United States Patent Application Publication US 2024/0084334 A1 - sequence listing, part 6

SEQ ID NO: 7139 - protein, 2094 aa, synthetic construct
MPAAKRVKLDGGDKKYSIGLDIGTNSVGWAVITDEYKVPSKKFKVLGNTDRHSIKKNLIGALLFDSGETAEATRLKRTARRRYTRRKNRICYLQEIFSNEMAKVDDSFFHRLEESFLVEEDKKHERHPIFGNIVDEVAYHEKYPTIYHLRKKLVDSTDKADLRLIYLALAHMIKFRGHFLIEGDLNPDNSDVDKLFIQLVQTYNQLFEENPINASGVDAKAILSARLSKSRRLENLIAQLPGEKKNGLFGNLIALSLGLTPNFKSNFDLAEDAKLQLSKDTYDDDLDNLLAQIGDQYADLFLAAKNLSDAILLSDILRVNTEITKAPLSASMIKRYDEHHQDLTLLKALVRQQLPEKYKEIFFDQSKNGYAGYIDGGASQEEFYKFIKPILEKMDGTEELLVKLNREDLLRKQRTFDNGSIPHQIHLGELHAILRRQEDFYPFLKDNREKIEKILTFRIPYYVGPLARGNSRFAWMTRKSEETITPWNFEEVVDKGASAQSFIERMTNFDKNLPNEKVLPKHSLLYEYFTVYNELTKVKYVTEGMRKPAFLSGEQKKAIVDLLFKTNRKVTVKQLKEDYFKKIECFDSVEISGVEDRFNASLGTYHDLLKIIKDKDFLDNEENEDILEDIVLTLTLFEDREMIEERLKTYAHLFDDKVMKQLKRRRYTGWGRLSRKLINGIRDKQSGKTILDFLKSDGFANRNFMQLIHDDSLTFKEDIQKAQVSGQGDSLHEHIANLAGSPAIKKGILQTVKVVDELVKVMGRHKPENIVIEMARENQTTQKGQKNSRERMKRIEEGIKELGSQILKEHPVENTQLQNEKLYLYYLQNGRDMYVDQELDINRLSDYDVDHIVPQSFLKDDSIDNKVLTRSDKARGKSDNVPSEEVVKKMKNYWRQLLNAKLITQRKFDNLTKAERGGLSELDKAGFIKRQLVETRQITKHVAQILDSRMNTKYDENDKLIREVKVITLKSKLVSDFRKDFQFYKVREINNYHHAHDAYLNAVVGTALIKKYPKLESEFVYGDYKVYDVRKMIAKSEQEIGKATAKYFFYSNIMNFFKTEITLANGEIRKRPLIETNGETGEIVWDKGRDFATVRKVLSMPQVNIVKKTEVQTGGFSKESILPKRNSDKLIARKKDWDPKKYGGFDSPTVAYSVLVVAKVEKGKSKKLKSVKELLGITIMERSSFEKNPIDFLEAKGYKEVKKDLIIKLPKYSLFELENGRKRMLASAGELQKGNELALPSKYVNFLYLASHYEKLKGSPEDNEQKQLFVEQHKHYLDEIIEQISEFSKRVILADANLDKVLSAYNKHRDKPIREQAENIIHLFTLTNLGAPAAFKYFDTTIDRKRYTSTKEVLDATLIHQSITGLYETRIDLSQLGGDGGGGSPAPGSSGGTLNLEDEYRLYETSAEPEVSPGSTWLSDFPQAWAETGGMGLAVRQAPLIIPLKATSTPVSIKQYPMSQEAKLGIKPHIQRLLDQGILVPCQSPWNTPLLPVKKPGTNDYRPVQDLREVNKRVEDIHPTVPNPYNLLSGLPPSHRWYTVLDLKDAFFCLRLHPTSQPLFAFEWRDPGMGISGQLTWTRLPQGFKNSPTLFNEALHRDLADFRIQHPDLILLQYVDDILLAATSELDCQQGTRALLLTLGNLGYRASAKKAQLCQKQVKYLGYLLKEGQRWLTEARKETVMGQPTPKTPRQLREFLGTAGFCRLWIPGFAEMAAPLYPLTKPGTLFNWGPDQQKAYQEIKQALLTAPALGLPDLTKPFELFVDEKQGYAKGVLTQKLGPWRRPVAYLSKKLDPVAAGWPPCLRMVAAIAVLRKDAGKLTMGQPLVILAPHAVEALVKQPPDRWLSNARMTHYQAMLLDTDRVQFGPVVALNPATLLPLPEEGAPHDCLEILAETHGTRPDLTDQPIPDADHTWYTDGSSFLQEGQRKAGAAVTTETEVIWARALPAGTSAQRAELIALTQALKMAEGKRLNVYTDSRYAFATAHIHGEIYRRRGWLTSEGREIKNKSEILALLKALFLPKRLSIIHCLGHQKGDSAEARGNRLADQAAREAAIKTPPDTSTLLAGKRTADGSEFEKRTADGSEFESPKKKAKVE

SEQ ID NO: 7140 - protein, 2094 aa, synthetic construct
MPAAKRVKLDGGDKKYSIGLDIGTNSVGWAVITDEYKVPSKKFKVLGNTDRHSIKKNLIGALLFDSGETAEATRLKRTARRRYTRRKNRICYLQEIFSNEMAKVDDSFFHRLEESFLVEEDKKHERHPIFGNIVDEVAYHEKYPTIYHLRKKLVDSTDKADLRLIYLALAHMIKFRGHFLIEGDLNPDNSDVDKLFIQLVQTYNQLFEENPINASGVDAKAILSARLSKSRRLENLIAQLPGEKKNGLFGNLIALSLGLTPNFKSNFDLAEDAKLQLSKDTYDDDLDNLLAQIGDQYADLFLAAKNLSDAILLSDILRVNTEITKAPLSASMIKRYDEHHQDLTLLKALVRQQLPEKYKEIFFDQSKNGYAGYIDGGASQEEFYKFIKPILEKMDGTEELLVKLNREDLLRKQRTFDNGSIPHQIHLGELHAILRRQEDFYPFLKDNREKIEKILTFRIPYYVGPLARGNSRFAWMTRKSEETITPWNFEEVVDKGASAQSFIERMTNFDKNLPNEKVLPKHSLLYEYFTVYNELTKVKYVTEGMRKPAFLSGEQKKAIVDLLFKTNRKVTVKQLKEDYFKKIECFDSVEISGVEDRFNASLGTYHDLLKIIKDKDFLDNEENEDILEDIVLTLTLFEDREMIEERLKTYAHLFDDKVMKQLKRRRYTGWGRLSRKLINGIRDKQSGKTILDFLKSDGFANRNFMQLIHDDSLTFKEDIQKAQVSGQGDSLHEHIANLAGSPAIKKGILQTVKVVDELVKVMGRHKPENIVIEMARENQTTQKGQKNSRERMKRIEEGIKELGSQILKEHPVENTQLQNEKLYLYYLQNGRDMYVDQELDINRLSDYDVDHIVPQSFLKDDSIDNKVLTRSDKARGKSDNVPSEEVVKKMKNYWRQLLNAKLITQRKFDNLTKAERGGLSELDKAGFIKRQLVETRQITKHVAQILDSRMNTKYDENDKLIREVKVITLKSKLVSDFRKDFQFYKVREINNYHHAHDAYLNAVVGTALIKKYPKLESEFVYGDYKVYDVRKMIAKSEQEIGKATAKYFFYSNIMNFFKTEITLANGEIRKRPLIETNGETGEIVWDKGRDFATVRKVLSMPQVNIVKKTEVQTGGFSKESILPKRNSDKLIARKKDWDPKKYGGFDSPTVAYSVLVVAKVEKGKSKKLKSVKELLGITIMERSSFEKNPIDFLEAKGYKEVKKDLIIKLPKYSLFELENGRKRMLASAGELQKGNELALPSKYVNFLYLASHYEKLKGSPEDNEQKQLFVEQHKHYLDEIIEQISEFSKRVILADANLDKVLSAYNKHRDKPIREQAENIIHLFTLTNLGAPAAFKYFDTTIDRKRYTSTKEVLDATLIHQSITGLYETRIDLSQLGGDGGGGSPAPGSSGGTLNIEDEYRLHETSKGPDVPLGSTWLSDFPQAWAETGGMGLAVRQAPLIIPLKATSTPVSIKQYPMSQEARLGIKPHIQRLLDQGILVPCQSPWNTPLLPVKKPGTNDYRPVQDLREVNKRVEDIHPTVPNPYNLLSGLPPSHQWYTVLDLKDAFFCLRLHPTSQSLFAFEWRDPEMGISGQLTWTRLPQGFKNSPTLFNEALHRDLADFRIQHPDLILLQYVDDLLLAATSELDCQQGTRALLQTLGDLGYRASAKKAQICQKQVKYLGYLLKEGQRWLTEARKETVMGQPTPKTPRQLREFLGTAGFCRLWIPGFAEMAAPLYPLTKPGTLFEWGPDQQKAYQEIKQALLTAPALGLPDLTKPFELFVDEKQGYAKGVLTQKLGPWRRPVAYLSKKLDPVAAGWPPCLRMVAAIAVLTKDAGKLTMGQPLVILAPHAVEALVKQPPDRWLSNARMTHYQALLLDTDRVQFGPIVALNPATLLPLPEEGLQHDCLDILAEAHGTRPDLTDQPLPDADHTWYTDGSSFLQEGQRKAGAAVTTETEVVWAKALPAGTSAQRAELIALTQALKMAEGKKLNVYTDSRYAFATAHIHGEIYRRRGWLTSEGKEIKNKDEILALLKALFLPKRLSIIHCPGHQKGNRAEARGNRMADQAAREVATRETPETSTLLAGKRTADGSEFEKRTADGSEFESPKKKAKVE

SEQ ID NO: 7141 - protein, 2092 aa, synthetic construct
MPAAKRVKLDGGDKKYSIGLDIGTNSVGWAVITDEYKVPSKKFKVLGNTDRHSIKKNLIGALLFDSGETAEATRLKRTARRRYTRRKNRICYLQEIFSNEMAKVDDSFFHRLEESFLVEEDKKHERHPIFGNIVDEVAYHEKYPTIYHLRKKLVDSTDKADLRLIYLALAHMIKFRGHFLIEGDLNPDNSDVDKLFIQLVQTYNQLFEENPINASGVDAKAILSARLSKSRRLENLIAQLPGEKKNGLFGNLIALSLGLTPNFKSNFDLAEDAKLQLSKDTYDDDLDNLLAQIGDQYADLFLAAKNLSDAILLSDILRVNTEITKAPLSASMIKRYDEHHQDLTLLKALVRQQLPEKYKEIFFDQSKNGYAGYIDGGASQEEFYKFIKPILEKMDGTEELLVKLNREDLLRKQRTFDNGSIPHQIHLGELHAILRRQEDFYPFLKDNREKIEKILTFRIPYYVGPLARGNSRFAWMTRKSEETITPWNFEEVVDKGASAQSFIERMTNFDKNLPNEKVLPKHSLLYEYFTVYNELTKVKYVTEGMRKPAFLSGEQKKAIVDLLFKTNRKVTVKQLKEDYFKKIECFDSVEISGVEDRFNASLGTYHDLLKIIKDKDFLDNEENEDILEDIVLTLTLFEDREMIEERLKTYAHLFDDKVMKQLKRRRYTGWGRLSRKLINGIRDKQSGKTILDFLKSDGFANRNFMQLIHDDSLTFKEDIQKAQVSGQGDSLHEHIANLAGSPAIKKGILQTVKVVDELVKVMGRHKPENIVIEMARENQTTQKGQKNSRERMKRIEEGIKELGSQILKEHPVENTQLQNEKLYLYYLQNGRDMYVDQELDINRLSDYDVDHIVPQSFLKDDSIDNKVLTRSDKARGKSDNVPSEEVVKKMKNYWRQLLNAKLITQRKFDNLTKAERGGLSELDKAGFIKRQLVETRQITKHVAQILDSRMNTKYDENDKLIREVKVITLKSKLVSDFRKDFQFYKVREINNYHHAHDAYLNAVVGTALIKKYPKLESEFVYGDYKVYDVRKMIAKSEQEIGKATAKYFFYSNIMNFFKTEITLANGEIRKRPLIETNGETGEIVWDKGRDFATVRKVLSMPQVNIVKKTEVQTGGFSKESILPKRNSDKLIARKKDWDPKKYGGFDSPTVAYSVLVVAKVEKGKSKKLKSVKELLGITIMERSSFEKNPIDFLEAKGYKEVKKDLIIKLPKYSLFELENGRKRMLASAGELQKGNELALPSKYVNFLYLASHYEKLKGSPEDNEQKQLFVEQHKHYLDEIIEQISEFSKRVILADANLDKVLSAYNKHRDKPIREQAENIIHLFTLTNLGAPAAFKYFDTTIDRKRYTSTKEVLDATLIHQSITGLYETRIDLSQLGGDGGGGSPAPGSSGGVLNLEEEYRLHEKPVPSSIDPSWLQLFPTVWAERAGMGLANQVPPVVVELRSGASPVAVRQYPMSKEAREGIRPHIQRFLDLGVLVPCQSPWNTPLLPVKKPGTNDYRPVQDLREINKRVQDIHPTVPNPYNLLSSLPPSHTWYSVLDLKDAFFCLKLHPNSQPLFAFEWRDPEKGNTGQLTWTRLPQGFKNSPTLFNEALHRDLAPFRALNPQVVLLQYVDDLLVAAPTYRDCKEGTQKLLQELSKLGYRVSAKKAQLCQKEVTYLGYLLKEGKRWLTPARKATVMKIPPPTTPRQVREFLGTAGFCRLWIPGFASLAAPLYPLTKPSIPFIWTEEHQKAFDRIKEALLSAPALALPDLTKPFTLYVDERAGVARGVLTQTLGPWRRPVAYLSKKLDPVASGWPTCLKAVAAVALLLKDADKLTLGQNVTVIASHSLESIVRQPPDRWMTNARMTHYQSLLLNERVSFAPPAVLNPATLLPVESEATPVHRCSEILAEETGTRRDLKDQPLPGVPAWYTDGSSFIAEGKRRAGAAIVDGKRTVWASSLPEGTSAQKAELVALTQALRLAEGKDINIYTDSRYAFATAHIHGAIYKQRGWLTSAGKDIKNKEEILALLEAIHLPKRVAIIHCPGHQKGNDPVATGNRRADEAAKQAALSTRVLAETTKPAGKRTADGSEFEKRTADGSEFESPKKKAKVE

SEQ ID NO: 7142 - protein, 2094 aa, synthetic construct; identical to SEQ ID NO: 4525

SEQ ID NO: 7143 - protein, 2096 aa, synthetic construct
MPAAKRVKLDGGDKKYSIGLDIGTNSVGWAVITDEYKVPSKKFKVLGNTDRHSIKKNLIGALLFDSGETAEATRLKRTARRRYTRRKNRICYLQEIFSNEMAKVDDSFFHRLEESFLVEEDKKHERHPIFGNIVDEVAYHEKYPTIYHLRKKLVDSTDKADLRLIYLALAHMIKFRGHFLIEGDLNPDNSDVDKLFIQLVQTYNQLFEENPINASGVDAKAILSARLSKSRRLENLIAQLPGEKKNGLFGNLIALSLGLTPNFKSNFDLAEDAKLQLSKDTYDDDLDNLLAQIGDQYADLFLAAKNLSDAILLSDILRVNTEITKAPLSASMIKRYDEHHQDLTLLKALVRQQLPEKYKEIFFDQSKNGYAGYIDGGASQEEFYKFIKPILEKMDGTEELLVKLNREDLLRKQRTFDNGSIPHQIHLGELHAILRRQEDFYPFLKDNREKIEKILTFRIPYYVGPLARGNSRFAWMTRKSEETITPWNFEEVVDKGASAQSFIERMTNFDKNLPNEKVLPKHSLLYEYFTVYNELTKVKYVTEGMRKPAFLSGEQKKAIVDLLFKTNRKVTVKQLKEDYFKKIECFDSVEISGVEDRFNASLGTYHDLLKIIKDKDFLDNEENEDILEDIVLTLTLFEDREMIEERLKTYAHLFDDKVMKQLKRRRYTGWGRLSRKLINGIRDKQSGKTILDFLKSDGFANRNFMQLIHDDSLTFKEDIQKAQVSGQGDSLHEHIANLAGSPAIKKGILQTVKVVDELVKVMGRHKPENIVIEMARENQTTQKGQKNSRERMKRIEEGIKELGSQILKEHPVENTQLQNEKLYLYYLQNGRDMYVDQELDINRLSDYDVDHIVPQSFLKDDSIDNKVLTRSDKARGKSDNVPSEEVVKKMKNYWRQLLNAKLITQRKFDNLTKAERGGLSELDKAGFIKRQLVETRQITKHVAQILDSRMNTKYDENDKLIREVKVITLKSKLVSDFRKDFQFYKVREINNYHHAHDAYLNAVVGTALIKKYPKLESEFVYGDYKVYDVRKMIAKSEQEIGKATAKYFFYSNIMNFFKTEITLANGEIRKRPLIETNGETGEIVWDKGRDFATVRKVLSMPQVNIVKKTEVQTGGFSKESILPKRNSDKLIARKKDWDPKKYGGFDSPTVAYSVLVVAKVEKGKSKKLKSVKELLGITIMERSSFEKNPIDFLEAKGYKEVKKDLIIKLPKYSLFELENGRKRMLASAGELQKGNELALPSKYVNFLYLASHYEKLKGSPEDNEQKQLFVEQHKHYLDEIIEQISEFSKRVILADANLDKVLSAYNKHRDKPIREQAENIIHLFTLTNLGAPAAFKYFDTTIDRKRYTSTKEVLDATLIHQSITGLYETRIDLSQLGGDGGGSSGGSPAPGGTAPLEEEYRLFLEAPIQNVTLLEQWKREIPKVWAEINPPGLASTQAPIHVQLLSTALPVRVRQYPITLEAKRSLRETIRKFRAAGILRPVHSPWNTPLLPVRKSGTSEYRMVQDLREVNKRVETIHPTVPNPYTLLSLLPPDRIWYSVLDLKDAFFCIPLAPESQLIFAFEWADAEEGESGQLTWTRLPQGFKNSPTLFNEALNRDLQGFRLDHPSVSLLQYVDDLLIAADTQAACLSATRDLLMTLAELGYRVSGKKAQLCQEEVTYLGFKIHKGSRSLSNSRTQAILQIPVPKTKRQVREFLGKIGYCRLFIPGFAELAQPLYAATRPGNDPLVWGEKEEEAFQSLKLALTQPPALALPSLDKPFQLFVEETSGAAKGVLTQALGPWKRPVAYLSKRLDPVAAGWPRCLRAIAAAALLTREASKLTFGQDIEITSSHNLESLLRSPPDKWLTNARITQYQVLLLDPPRVRFKQTAALNPATLLPETDDTLPIHHCLDTLDSLTSTRPDLTDQPLAQAEATLFTDGSSYIRDGKRYAGAAVVTLDSVIWAEPLPIGTSAQKAELIALTKALEWSKDKSVNIYTDSRYAFATLHVHGMIYRERGWLTAGGKAIKNAPEILALLTAVWLPKRVAVMHCKGHQKDDAPTSTGNRRADEVAREVAIRPLSTQATISAGKRTADGSEFEKRTADGSEFESPKKKAKVE

SEQ ID NO: 7144 - protein, 2093 aa, synthetic construct
MPAAKRVKLDGGDKKYSIGLDIGTNSVGWAVITDEYKVPSKKFKVLGNTDRHSIKKNLIGALLFDSGETAEATRLKRTARRRYTRRKNRICYLQEIFSNEMAKVDDSFFHRLEESFLVEEDKKHERHPIFGNIVDEVAYHEKYPTIYHLRKKLVDSTDKADLRLIYLALAHMIKFRGHFLIEGDLNPDNSDVDKLFIQLVQTYNQLFEENPINASGVDAKAILSARLSKSRRLENLIAQLPGEKKNGLFGNLIALSLGLTPNFKSNFDLAEDAKLQLSKDTYDDDLDNLLAQIGDQYADLFLAAKNLSDAILLSDILRVNTEITKAPLSASMIKRYDEHHQDLTLLKALVRQQLPEKYKEIFFDQSKNGYAGYIDGGASQEEFYKFIKPILEKMDGTEELLVKLNREDLLRKQRTFDNGSIPHQIHLGELHAILRRQEDFYPFLKDNREKIEKILTFRIPYYVGPLARGNSRFAWMTRKSEETITPWNFEEVVDKGASAQSFIERMTNFDKNLPNEKVLPKHSLLYEYFTVYNELTKVKYVTEGMRKPAFLSGEQKKAIVDLLFKTNRKVTVKQLKEDYFKKIECFDSVEISGVEDRFNASLGTYHDLLKIIKDKDFLDNEENEDILEDIVLTLTLFEDREMIEERLKTYAHLFDDKVMKQLKRRRYTGWGRLSRKLINGIRDKQSGKTILDFLKSDGFANRNFMQLIHDDSLTFKEDIQKAQVSGQGDSLHEHIANLAGSPAIKKGILQTVKVVDELVKVMGRHKPENIVIEMARENQTTQKGQKNSRERMKRIEEGIKELGSQILKEHPVENTQLQNEKLYLYYLQNGRDMYVDQELDINRLSDYDVDHIVPQSFLKDDSIDNKVLTRSDKARGKSDNVPSEEVVKKMKNYWRQLLNAKLITQRKFDNLTKAERGGLSELDKAGFIKRQLVETRQITKHVAQILDSRMNTKYDENDKLIREVKVITLKSKLVSDFRKDFQFYKVREINNYHHAHDAYLNAVVGTALIKKYPKLESEFVYGDYKVYDVRKMIAKSEQEIGKATAKYFFYSNIMNFFKTEITLANGEIRKRPLIETNGETGEIVWDKGRDFATVRKVLSMPQVNIVKKTEVQTGGFSKESILPKRNSDKLIARKKDWDPKKYGGFDSPTVAYSVLVVAKVEKGKSKKLKSVKELLGITIMERSSFEKNPIDFLEAKGYKEVKKDLIIKLPKYSLFELENGRKRMLASAGELQKGNELALPSKYVNFLYLASHYEKLKGSPEDNEQKQLFVEQHKHYLDEIIEQISEFSKRVILADANLDKVLSAYNKHRDKPIREQAENIIHLFTLTNLGAPAAFKYFDTTIDRKRYTSTKEVLDATLIHQSITGLYETRIDLSQLGGDGGGSSGGSPAPGGTLQLEEEYRLFEPESTQKQEMDIWLKNFPQAWAETGGMGTAHCQAPVLIQLKATATPISIRQYPMPHEAYQGIKPHIRRMLDQGILKPCQSPWNTPLLPVKKPGTEDYRPVQDLREVNKRVEDIHPTVPNPYNLLSTLPPSHPWYTVLDLKDAFFCLRLHSESQLLFAFEWRDPEIGLSGQLTWTRLPQGFKNSPTLFNEALHSDLADFRVRYPALVLLQYVDDLLLAAATRTECLEGTKALLETLGNKGYRASAKKAQICLQEVTYLGYSLKDGQRWLTKARKEAILSIPVPKNSRQVREFLGKAGYCRLFIPGFAELAAPLYPLTRPGTLFQWGTEQQLAFEDIKKALLSSPALGLPDITKPFELFIDENSGFAKGVLVQKLGPWKRPVAYLSKKLDTVASGWPPCLRMVAAIAILVKDAGKLTLGQPLTILTSHPVEALVRQPPNKWLSNARMTHYQAMLLDAERVHFGPTVSLNPATLLPLPSGGNHHDCLQILAETHGTRPDLTDQPLPDADLTWYTDGSSFIRNGEREAGAAVTTESEVIWAAPLPPGTSAQRAELIALTQALKMAEGKKLTVYTDSRYAFATTHVHGEIYRRRGWLTSEGKEIKNKNEILALLEALFLPKRLSIIHCPGHQKGDSPQAKGNRLADDTAKKAATETHSSLTVLPAGKRTADGSEFEKRTADGSEFESPKKKAKVE

SEQ ID NO: 7145 - protein, 2174 aa, synthetic construct
MPAAKRVKLDGGDKKYSIGLDIGTNSVGWAVITDEYKVPSKKFKVLGNTDRHSIKKNLIGALLFDSGETAEATRLKRTARRRYTRRKNRICYLQEIFSNEMAKVDDSFFHRLEESFLVEEDKKHERHPIFGNIVDEVAYHEKYPTIYHLRKKLVDSTDKADLRLIYLALAHMIKFRGHFLIEGDLNPDNSDVDKLFIQLVQTYNQLFEENPINASGVDAKAILSARLSKSRRLENLIAQLPGEKKNGLFGNLIALSLGLTPNFKSNFDLAEDAKLQLSKDTYDDDLDNLLAQIGDQYADLFLAAKNLSDAILLSDILRVNTEITKAPLSASMIKRYDEHHQDLTLLKALVRQQLPEKYKEIFFDQSKNGYAGYIDGGASQEEFYKFIKPILEKMDGTEELLVKLNREDLLRKQRTFDNGSIPHQIHLGELHAILRRQEDFYPFLKDNREKIEKILTFRIPYYVGPLARGNSRFAWMTRKSEETITPWNFEEVVDKGASAQSFIERMTNFDKNLPNEKVLPKHSLLYEYFTVYNELTKVKYVTEGMRKPAFLSGEQKKAIVDLLFKTNRKVTVKQLKEDYFKKIECFDSVEISGVEDRFNASLGTYHDLLKIIKDKDFLDNEENEDILEDIVLTLTLFEDREMIEERLKTYAHLFDDKVMKQLKRRRYTGWGRLSRKLINGIRDKQSGKTILDFLKSDGFANRNFMQLIHDDSLTFKEDIQKAQVSGQGDSLHEHIANLAGSPAIKKGILQTVKVVDELVKVMGRHKPENIVIEMARENQTTQKGQKNSRERMKRIEEGIKELGSQILKEHPVENTQLQNEKLYLYYLQNGRDMYVDQELDINRLSDYDVDHIVPQSFLKDDSIDNKVLTRSDKARGKSDNVPSEEVVKKMKNYWRQLLNAKLITQRKFDNLTKAERGGLSELDKAGFIKRQLVETRQITKHVAQILDSRMNTKYDENDKLIREVKVITLKSKLVSDFRKDFQFYKVREINNYHHAHDAYLNAVVGTALIKKYPKLESEFVYGDYKVYDVRKMIAKSEQEIGKATAKYFFYSNIMNFFKTEITLANGEIRKRPLIETNGETGEIVWDKGRDFATVRKVLSMPQVNIVKKTEVQTGGFSKESILPKRNSDKLIARKKDWDPKKYGGFDSPTVAYSVLVVAKVEKGKSKKLKSVKELLGITIMERSSFEKNPIDFLEAKGYKEVKKDLIIKLPKYSLFELENGRKRMLASAGELQKGNELALPSKYVNFLYLASHYEKLKGSPEDNEQKQLFVEQHKHYLDEIIEQISEFSKRVILADANLDKVLSAYNKHRDKPIREQAENIIHLFTLTNLGAPAAFKYFDTTIDRKRYTSTKEVLDATLIHQSITGLYETRIDLSQLGGDGGGSSGGSPAPGGMNPLQLLQPLPAEIKGTKLLAHWNSGATITCIPESFLEDEQPIKKTLIKTIHGEKQQNVYYVTFKVKGRKVEAEVIASPYEYILLSPTDVPWLTQQPLQLTILVPLQEYQEKILSKTALPEDQKQQLKTLFVKYDNLWQHWENQVGHRKIRPHNIATGDYPPRPQKQYPINPKAKPSIQIVIDDLLKQGVLTPQNSTMNTPVYPVPKPDGRWRMVLDYREVNKTIPLTAAQNQHSAGILATIVRQKYKTTLDLANGFWAHPITPESYWLTAFTWQGKQYCWTRLPQGFLNSPALFNADVVDLLKEIPNVQVYVDDIYLSHDDPKEHVQQLEKVFQILLQAGYVVSLKKSEIGQKTVEFLGFNITKEGRGLTDTFKTKLLNITPPKDLKQLQSILGKLNFARNFIPNFAELVQPLYNLIAPAKGKYIEWSEENTKQLNMVIEALNTASNLEERLPEQRLVIKVNTSPSAGYVRYYNETGKKPIMYLNYVFSKAELKFSMLEKLLTTMHKALIKAMDLAMGQEILVYSPIVSMTKIQKTPLPERKALPIRWITWMTYLEDPRIQFHYDKTLPELKHIPDVYTSSQSPVKHPSQYEGVFYTDGSAIKSPDPTKSNNAGMGIVHATYKPEYQVLNQWSIPLGNHTAQMAEIAAVEFACKKALKIPGPVLVITDSFYVAESANKELPYWKSNGFVNNKKKPLKHISKWKSIAECLSMKPDITIQHEKGISLQIPVFILKGNALADKLATQGSYVVNAGKRTADGSEFEKRTADGSEFESPKKKAKVE

SEQ ID NO: 7146 - protein, 2092 aa, synthetic construct
MPAAKRVKLDGGDKKYSIGLDIGTNSVGWAVITDEYKVPSKKFKVLGNTDRHSIKKNLIGALLFDSGETAEATRLKRTARRRYTRRKNRICYLQEIFSNEMAKVDDSFFHRLEESFLVEEDKKHERHPIFGNIVDEVAYHEKYPTIYHLRKKLVDSTDKADLRLIYLALAHMIKFRGHFLIEGDLNPDNSDVDKLFIQLVQTYNQLFEENPINASGVDAKAILSARLSKSRRLENLIAQLPGEKKNGLFGNLIALSLGLTPNFKSNFDLAEDAKLQLSKDTYDDDLDNLLAQIGDQYADLFLAAKNLSDAILLSDILRVNTEITKAPLSASMIKRYDEHHQDLTLLKALVRQQLPEKYKEIFFDQSKNGYAGYIDGGASQEEFYKFIKPILEKMDGTEELLVKLNREDLLRKQRTFDNGSIPHQIHLGELHAILRRQEDFYPFLKDNREKIEKILTFRIPYYVGPLARGNSRFAWMTRKSEETITPWNFEEVVDKGASAQSFIERMTNFDKNLPNEKVLPKHSLLYEYFTVYNELTKVKYVTEGMRKPAFLSGEQKKAIVDLLFKTNRKVTVKQLKEDYFKKIECFDSVEISGVEDRFNASLGTYHDLLKIIKDKDFLDNEENEDILEDIVLTLTLFEDREMIEERLKTYAHLFDDKVMKQLKRRRYTGWGRLSRKLINGIRDKQSGKTILDFLKSDGFANRNFMQLIHDDSLTFKEDIQKAQVSGQGDSLHEHIANLAGSPAIKKGILQTVKVVDELVKVMGRHKPENIVIEMARENQTTQKGQKNSRERMKRIEEGIKELGSQILKEHPVENTQLQNEKLYLYYLQNGRDMYVDQELDINRLSDYDVDHIVPQSFLKDDSIDNKVLTRSDKARGKSDNVPSEEVVKKMKNYWRQLLNAKLITQRKFDNLTKAERGGLSELDKAGFIKRQLVETRQITKHVAQILDSRMNTKYDENDKLIREVKVITLKSKLVSDFRKDFQFYKVREINNYHHAHDAYLNAVVGTALIKKYPKLESEFVYGDYKVYDVRKMIAKSEQEIGKATAKYFFYSNIMNFFKTEITLANGEIRKRPLIETNGETGEIVWDKGRDFATVRKVLSMPQVNIVKKTEVQTGGFSKESILPKRNSDKLIARKKDWDPKKYGGFDSPTVAYSVLVVAKVEKGKSKKLKSVKELLGITIMERSSFEKNPIDFLEAKGYKEVKKDLIIKLPKYSLFELENGRKRMLASAGELQKGNELALPSKYVNFLYLASHYEKLKGSPEDNEQKQLFVEQHKHYLDEIIEQISEFSKRVILADANLDKVLSAYNKHRDKPIREQAENIIHLFTLTNLGAPAAFKYFDTTIDRKRYTSTKEVLDATLIHQSITGLYETRIDLSQLGGDGGGSSGGSPAPGGVLNLEEEYRLHEKPVPSSIDPSWLQLFPTVWAERAGMGLANQVPPVVVELRSGASPVAVRQYPMSKEAREGIRPHIQKFLDLGVLVPCRSPWNTPLLPVKKPGTNDYRPVQDLREINKRVQDIHPTVPNPYNLLSSLPPSYTWYSVLDLKDAFFCLRLHPNSQPLFAFEWKDPEKGNTGQLTWTRLPQGFKNSPTLFNEALHRDLAPFRALNPQVVLLQYVDDLLVAAPTYEDCKKGTQKLLQELSKLGYRVSAKKAQLCQREVTYLGYLLKEGKRWLTPARKATVMKIPVPTTPRQVREFLGKAGFCRLFIPGFASLAAPLYPLTKPSIPFIWTEEHQQAFDHIKKALLSAPALALPDLTKPFTLYIDERAGVARGVLTQTLGPWRRPVAYLSKKLDPVASGWPTCLKAVAAVALLLKDADKLTLGQNVTVIASHSLESIVRQPPDRWMTNARMTHYQSLLLNERVSFAPPAVLNPATLLPVESEATPVHRCSEILAEETGTRRDLEDQPLPGVPTWYTDGSSFITEGKRRAGAPIVDGKRTVWASSLPEGTSAQKAELVALTQALRLAEGKNINIYTDSRYAFATAHIHGAIYKQRGWLTSAGKDIKNKEEILALLEAIHLPRRVAIIHCPGHQRGSNPVATGNRRADEAAKQAALSTRVLAGTTKPAGKRTADGSEFEKRTADGSEFESPKKKAKVE

SEQ ID NO: 7147 - protein, 2094 aa, synthetic construct
MPAAKRVKLDGGDKKYSIGLDIGTNSVGWAVITDEYKVPSKKFKVLGNTDRHSIKKNLIGALLFDSGETAEATRLKRTARRRYTRRKNRICYLQEIFSNEMAKVDDSFFHRLEESFLVEEDKKHERHPIFGNIVDEVAYHEKYPTIYHLRKKLVDSTDKADLRLIYLALAHMIKFRGHFLIEGDLNPDNSDVDKLFIQLVQTYNQLFEENPINASGVDAKAILSARLSKSRRLENLIAQLPGEKKNGLFGNLIALSLGLTPNFKSNFDLAEDAKLQLSKDTYDDDLDNLLAQIGDQYADLFLAAKNLSDAILLSDILRVNTEITKAPLSASMIKRYDEHHQDLTLLKALVRQQLPEKYKEIFFDQSKNGYAGYIDGGASQEEFYKFIKPILEKMDGTEELLVKLNREDLLRKQRTFDNGSIPHQIHLGELHAILRRQEDFYPFLKDNREKIEKILTFRIPYYVGPLARGNSRFAWMTRKSEETITPWNFEEVVDKGASAQSFIERMTNFDKNLPNEKVLPKHSLLYEYFTVYNELTKVKYVTEGMRKPAFLSGEQKKAIVDLLFKTNRKVTVKQLKEDYFKKIECFDSVEISGVEDRFNASLGTYHDLLKIIKDKDFLDNEENEDILEDIVLTLTLFEDREMIEERLKTYAHLFDDKVMKQLKRRRYTGWGRLSRKLINGIRDKQSGKTILDFLKSDGFANRNFMQLIHDDSLTFKEDIQKAQVSGQGDSLHEHIANLAGSPAIKKGILQTVKVVDELVKVMGRHKPENIVIEMARENQTTQKGQKNSRERMKRIEEGIKELGSQILKEHPVENTQLQNEKLYLYYLQNGRDMYVDQELDINRLSDYDVDHIVPQSFLKDDSIDNKVLTRSDKARGKSDNVPSEEVVKKMKNYWRQLLNAKLITQRKFDNLTKAERGGLSELDKAGFIKRQLVETRQITKHVAQILDSRMNTKYDENDKLIREVKVITLKSKLVSDFRKDFQFYKVREINNYHHAHDAYLNAVVGTALIKKYPKLESEFVYGDYKVYDVRKMIAKSEQEIGKATAKYFFYSNIMNFFKTEITLANGEIRKRPLIETNGETGEIVWDKGRDFATVRKVLSMPQVNIVKKTEVQTGGFSKESILPKRNSDKLIARKKDWDPKKYGGFDSPTVAYSVLVVAKVEKGKSKKLKSVKELLGITIMERSSFEKNPIDFLEAKGYKEVKKDLIIKLPKYSLFELENGRKRMLASAGELQKGNELALPSKYVNFLYLASHYEKLKGSPEDNEQKQLFVEQHKHYLDEIIEQISEFSKRVILADANLDKVLSAYNKHRDKPIREQAENIIHLFTLTNLGAPAAFKYFDTTIDRKRYTSTKEVLDATLIHQSITGLYETRIDLSQLGGDGGGSSGGSPAPGGTLNIEDEYRLHETSKEPDVSLGSTWLSDFPQAWAETGGMGLAVRQAPLIIPLKATSTPVSIKQYPMSQEARLGIKPHIQRLLDQGILVPCQSPWNTPLLPVKKPGTNDYRPVQDLREVNKRVEDIHPTVPNPYNLLSGLPPSHQWYTVLDLKDAFFCLRLHPTSQPLFAFEWRDPEMGISGQLTWTRLPQGFKNSPTLFNEALHRDLAGFRIQHPDLILLQYVDDLLLAATSELDCQQGTRALLQTLGDLGYRASAKKAQICQKQVKYLGYLLKEGQRWLTEARKETVMGQPIPKTPRQLREFLGTAGFCRLWIPGFAEMAAPLYPLTKPGTLFNWGPDQQKAFQEIKQALLTAPALGLPDLTKPFELFVDEKQGYAKGVLTQKLGPWRRPVAYLSKKLDPVAAGWPPCLRMVAAIAVLTKDAGKLTMGQPLVILAPHAVEALVKQPPDRWLSNARMTHYQALLLDTDRVQFGPVVALNPATLLPLPEEGLQHDCLDILAEAHGTRSDLMDQPLPDADHTWYTDGSSFLQEGQRKAGAAVTTETEVIWARALPAGTSAQRAELIALTQALKMAEGKKLNVYTDSRYAFATAHIHGEIYRRRGWLTSEGKEIKNKDEILALLKALFLPKRLSIIHCPGHQKGNSAEARGNRMADQAAREVATRETPETSTLLAGKRTADGSEFEKRTADGSEFESPKKKAKVE

SEQ ID NO: 7148 - protein, 2092 aa, synthetic construct
MPAAKRVKLDGGDKKYSIGLDIGTNSVGWAVITDEYKVPSKKFKVLGNTDRHSIKKNLIGALLFDSGETAEATRLKRTARRRYTRRKNRICYLQEIFSNEMAKVDDSFFHRLEESFLVEEDKKHERHPIFGNIVDEVAYHEKYPTIYHLRKKLVDSTDKADLRLIYLALAHMIKFRGHFLIEGDLNPDNSDVDKLFIQLVQTYNQLFEENPINASGVDAKAILSARLSKSRRLENLIAQLPGEKKNGLFGNLIALSLGLTPNFKSNFDLAEDAKLQLSKDTYDDDLDNLLAQIGDQYADLFLAAKNLSDAILLSDILRVNTEITKAPLSASMIKRYDEHHQDLTLLKALVRQQLPEKYKEIFFDQSKNGYAGYIDGGASQEEFYKFIKPILEKMDGTEELLVKLNREDLLRKQRTFDNGSIPHQIHLGELHAILRRQEDFYPFLKDNREKIEKILTFRIPYYVGPLARGNSRFAWMTRKSEETITPWNFEEVVDKGASAQSFIERMTNFDKNLPNEKVLPKHSLLYEYFTVYNELTKVKYVTEGMRKPAFLSGEQKKAIVDLLFKTNRKVTVKQLKEDYFKKIECFDSVEISGVEDRFNASLGTYHDLLKIIKDKDFLDNEENEDILEDIVLTLTLFEDREMIEERLKTYAHLFDDKVMKQLKRRRYTGWGRLSRKLINGIRDKQSGKTILDFLKSDGFANRNFMQLIHDDSLTFKEDIQKAQVSGQGDSLHEHIANLAGSPAIKKGILQTVKVVDELVKVMGRHKPENIVIEMARENQTTQKGQKNSRERMKRIEEGIKELGSQILKEHPVENTQLQNEKLYLYYLQNGRDMYVDQELDINRLSDYDVDHIVPQSFLKDDSIDNKVLTRSDKARGKSDNVPSEEVVKKMKNYWRQLLNAKLITQRKFDNLTKAERGGLSELDKAGFIKRQLVETRQITKHVAQILDSRMNTKYDENDKLIREVKVITLKSKLVSDFRKDFQFYKVREINNYHHAHDAYLNAVVGTALIKKYPKLESEFVYGDYKVYDVRKMIAKSEQEIGKATAKYFFYSNIMNFFKTEITLANGEIRKRPLIETNGETGEIVWDKGRDFATVRKVLSMPQVNIVKKTEVQTGGFSKESILPKRNSDKLIARKKDWDPKKYGGFDSPTVAYSVLVVAKVEKGKSKKLKSVKELLGITIMERSSFEKNPIDFLEAKGYKEVKKDLIIKLPKYSLFELENGRKRMLASAGELQKGNELALPSKYVNFLYLASHYEKLKGSPEDNEQKQLFVEQHKHYLDEIIEQISEFSKRVILADANLDKVLSAYNKHRDKPIREQAENIIHLFTLTNLGAPAAFKYFDTTIDRKRYTSTKEVLDATLIHQSITGLYETRIDLSQLGGDGGGSSGGSPAPGGVLNLEEEYRLHEKPVPSSIDPSWLQLFPTVWAERAGMGLANQVPPVVVELRSGASPVAVRQYPMSKEAREGIRPHIQRFLDLGVLVPCQSPWNTPLLPVKKPGTNDYRPVQDLREINKRVQDIHPTVPNPYNLLSSLPPSHTWYSVLDLKDAFFCLKLHPNSQPLFAFEWRDPEKGNTGQLTWTRLPQGFKNSPTLFNEALHRDLAPFRALNPQVVLLQYVDDLLVAAPTYRDCKEGTQKLLQELSKLGYRVSAKKAQLCQKEVTYLGYLLKEGKRWLTPARKATVMKIPPPTTPRQVREFLGTAGFCRLWIPGFASLAAPLYPLTKPSIPFIWTEEHQKAFDRIKEALLSAPALALPDLTKPFTLYVDERAGVARGVLTQTLGPWRRPVAYLSKKLDPVASGWPTCLKAVAAVALLLKDADKLTLGQNVTVIASHSLESIVRQPPDRWMTNARMTHYQSLLLNERVSFAPPAVLNPATLLPVESEATPVHRCSEILAEETGTRRDLKDQPLPGVPAWYTDGSSFIAEGKRRAGAAIVDGKRTVWASSLPEGTSAQKAELVALTQALRLAEGKDINIYTDSRYAFATAHIHGAIYKQRGWLTSAGKDIKNKEEILALLEAIHLPKRVAIIHCPGHQKGNDPVATGNRRADEAAKQAALSTRVLAETTKPAGKRTADGSEFEKRTADGSEFESPKKKAKVE

SEQ ID NO: 7149 - protein, 2092 aa, synthetic construct
MPAAKRVKLDGGDKKYSIGLDIGTNSVGWAVITDEYKVPSKKFKVLGNTDRHSIKKNLIGALLFDSGETAEATRLKRTARRRYTRRKNRICYLQEIFSNEMAKVDDSFFHRLEESFLVEEDKKHERHPIFGNIVDEVAYHEKYPTIYHLRKKLVDSTDKADLRLIYLALAHMIKFRGHFLIEGDLNPDNSDVDKLFIQLVQTYNQLFEENPINASGVDAKAILSARLSKSRRLENLIAQLPGEKKNGLFGNLIALSLGLTPNFKSNFDLAEDAKLQLSKDTYDDDLDNLLAQIGDQYADLFLAAKNLSDAILLSDILRVNTEITKAPLSASMIKRYDEHHQDLTLLKALVRQQLPEKYKEIFFDQSKNGYAGYIDGGASQEEFYKFIKPILEKMDGTEELLVKLNREDLLRKQRTFDNGSIPHQIHLGELHAILRRQEDFYPFLKDNREKIEKILTFRIPYYVGPLARGNSRFAWMTRKSEETITPWNFEEVVDKGASAQSFIERMTNFDKNLPNEKVLPKHSLLYEYFTVYNELTKVKYVTEGMRKPAFLSGEQKKAIVDLLFKTNRKVTVKQLKEDYFKKIECFDSVEISGVEDRFNASLGTYHDLLKIIKDKDFLDNEENEDILEDIVLTLTLFEDREMIEERLKTYAHLFDDKVMKQLKRRRYTGWGRLSRKLINGIRDKQSGKTILDFLKSDGFANRNFMQLIHDDSLTFKEDIQKAQVSGQGDSLHEHIANLAGSPAIKKGILQTVKVVDELVKVMGRHKPENIVIEMARENQTTQKGQKNSRERMKRIEEGIKELGSQILKEHPVENTQLQNEKLYLYYLQNGRDMYVDQELDINRLSDYDVDHIVPQSFLKDDSIDNKVLTRSDKARGKSDNVPSEEVVKKMKNYWRQLLNAKLITQRKFDNLTKAERGGLSELDKAGFIKRQLVETRQITKHVAQILDSRMNTKYDENDKLIREVKVITLKSKLVSDFRKDFQFYKVREINNYHHAHDAYLNAVVGTALIKKYPKLESEFVYGDYKVYDVRKMIAKSEQEIGKATAKYFFYSNIMNFFKTEITLANGEIRKRPLIETNGETGEIVWDKGRDFATVRKVLSMPQVNIVKKTEVQTGGFSKESILPKRNSDKLIARKKDWDPKKYGGFDSPTVAYSVLVVAKVEKGKSKKLKSVKELLGITIMERSSFEKNPIDFLEAKGYKEVKKDLIIKLPKYSLFELENGRKRMLASAGELQKGNELALPSKYVNFLYLASHYEKLKGSPEDNEQKQLFVEQHKHYLDEIIEQISEFSKRVILADANLDKVLSAYNKHRDKPIREQAENIIHLFTLTNLGAPAAFKYFDTTIDRKRYTSTKEVLDATLIHQSITGLYETRIDLSQLGGDGGGSSGGSPAPGGVLNLEEEYRLHEKPVPSSIDPSWLQLFPTVWAERAGMGLANQVPPVVVELRSGASPVAVRQYPMSKEAREGIRPHIQRFLDLGVLVPCQSPWNTPLLPVKKPGTNDYRPVQDLREINKRVQDIHPTVPNPYNLLSSLPPSHTWYSVLDLKDAFFCLKLHPNSQPLFAFEWRDPEKGNTGQLTWTRLPQGFKNSPTLFNEALHRDLAPFRALNPQVVLLQYVDDLLVAAPTYRDCKEGTQKLLQELSKLGYRVSAKKAQLCQKEVTYLGYLLKEGKRWLTPARKATVMKIPPPTTPRQVREFLGKAGFCRLFIPGFASLAAPLYPLTKPSIPFIWTEEHQKAFDRIKEALLSAPALALPDLTKPFTLYVDERAGVARGVLTQTLGPWRRPVAYLSKKLDPVASGWPTCLKAVAAVALLLKDADKLTLGQNVTVIASHSLESIVRQPPDRWMTNARMTHYQSLLLNERVSFAPPAVLNPATLLPVESEATPVHRCSEILAEETGTRRDLKDQPLPGVPAWYTDGSSFIAEGKRRAGAAIVDGKRTVWASSLPEGTSAQKAELVALTQALRLAEGKDINIYTDSRYAFATAHIHGAIYKQRGWLTSAGKDIKNKEEILALLEAIHLPKRVAIIHCPGHQKGNDPVATGNRRADEAAKQAALSTRVLAETTKPAGKRTADGSEFEKRTADGSEFESPKKKAKVE

SEQ ID NO: 7150 - protein, 2094 aa, synthetic construct
MPAAKRVKLDGGDKKYSIGLDIGTNSVGWAVITDEYKVPSKKFKVLGNTDRHSIKKNLIGALLFDSGETAEATRLKRTARRRYTRRKNRICYLQEIFSNEMAKVDDSFFHRLEESFLVEEDKKHERHPIFGNIVDEVAYHEKYPTIYHLRKKLVDSTDKADLRLIYLALAHMIKFRGHFLIEGDLNPDNSDVDKLFIQLVQTYNQLFEENPINASGVDAKAILSARLSKSRRLENLIAQLPGEKKNGLFGNLIALSLGLTPNFKSNFDLAEDAKLQLSKDTYDDDLDNLLAQIGDQYADLFLAAKNLSDAILLSDILRVNTEITKAPLSASMIKRYDEHHQDLTLLKALVRQQLPEKYKEIFFDQSKNGYAGYIDGGASQEEFYKFIKPILEKMDGTEELLVKLNREDLLRKQRTFDNGSIPHQIHLGELHAILRRQEDFYPFLKDNREKIEKILTFRIPYYVGPLARGNSRFAWMTRKSEETITPWNFEEVVDKGASAQSFIERMTNFDKNLPNEKVLPKHSLLYEYFTVYNELTKVKYVTEGMRKPAFLSGEQKKAIVDLLFKTNRKVTVKQLKEDYFKKIECFDSVEISGVEDRFNASLGTYHDLLKIIKDKDFLDNEENEDILEDIVLTLTLFEDREMIEERLKTYAHLFDDKVMKQLKRRRYTGWGRLSRKLINGIRDKQSGKTILDFLKSDGFANRNFMQLIHDDSLTFKEDIQKAQVSGQGDSLHEHIANLAGSPAIKKGILQTVKVVDELVKVMGRHKPENIVIEMARENQTTQKGQKNSRERMKRIEEGIKELGSQILKEHPVENTQLQNEKLYLYYLQNGRDMYVDQELDINRLSDYDVDHIVPQSFLKDDSIDNKVLTRSDKARGKSDNVPSEEVVKKMKNYWRQLLNAKLITQRKFDNLTKAERGGLSELDKAGFIKRQLVETRQITKHVAQILDSRMNTKYDENDKLIREVKVITLKSKLVSDFRKDFQFYKVREINNYHHAHDAYLNAVVGTALIKKYPKLESEFVYGDYKVYDVRKMIAKSEQEIGKATAKYFFYSNIMNFFKTEITLANGEIRKRPLIETNGETGEIVWDKGRDFATVRKVLSMPQVNIVKKTEVQTGGFSKESILPKRNSDKLIARKKDWDPKKYGGFDSPTVAYSVLVVAKVEKGKSKKLKSVKELLGITIMERSSFEKNPIDFLEAKGYKEVKKDLIIKLPKYSLFELENGRKRMLASAGELQKGNELALPSKYVNFLYLASHYEKLKGSPEDNEQKQLFVEQHKHYLDEIIEQISEFSKRVILADANLDKVLSAYNKHRDKPIREQAENIIHLFTLTNLGAPAAFKYFDTTIDRKRYTSTKEVLDATLIHQSITGLYETRIDLSQLGGDGGGSSGGSPAPGGTLNIEDEYRLHETSKEPDVPLGSTWLSDFPQAWAETGGMGLAVRQAPLIIPLKATSTPVSIKQYPMSQEARLGIKPHIQRLLDQGILVPCQSPWNTPLLPVKKPGTNDYRPVQDLREVNKRVEDIHPTVPNPYNLLSGLPPSHQWYTVLDLKDAFFCLRLHPTSQPLFAFEWRDPEMGISGQLTWTRLPQGFKNSPTLFNEALHRDLADFRIQHPDLILLQYVDDLLLAATSEQDCQRGTRALLQTLGNLGYRASAKKAQICQKQVKYLGYLLKEGQRWLTEARKETVMGQPTPKTPRQLREFLGTAGFCRLWIPGFAEMAAPLYPLTKPGTLFNWGPDQQKAYQEIKQALLTAPALGLPDLTKPFELFVDEKQGYAKGVLTQKLGPWRRPVAYLSKKLDPVAAGWPPCLRMVAAIAVLTKDAGKLTMGQPLVILAPHAVEALVKQPPDRWLSNARMTHYQAMLLDTDRVQFGPVVALNPATLLPLPEKEAPHDCLEILAETHGTRPDLTDQPIPDADYTWYTDGSSFLQEGQRRAGAAVTTETEVIWARALPAGTSAQRAELIALTQALKMAEGKKLNVYTDSRYAFATAHVHGEIYRRRGWLTSEGREIKNKNEILALLKALFLPKRLSIIHCPGHQKGNSAEARGNRMADQAAREAAMKAVLETSTLLAGKRTADGSEFEKRTADGSEFESPKKKAKVE

SEQ ID NO: 7151 - protein, 2096 aa, synthetic construct
MPAAKRVKLDGGDKKYSIGLDIGTNSVGWAVITDEYKVPSKKFKVLGNTDRHSIKKNLIGALLFDSGETAEATRLKRTARRRYTRRKNRICYLQEIFSNEMAKVDDSFFHRLEESFLVEEDKKHERHPIFGNIVDEVAYHEKYPTIYHLRKKLVDSTDKADLRLIYLALAHMIKFRGHFLIEGDLNPDNSDVDKLFIQLVQTYNQLFEENPINASGVDAKAILSARLSKSRRLENLIAQLPGEKKNGLFGNLIALSLGLTPNFKSNFDLAEDAKLQLSKDTYDDDLDNLLAQIGDQYADLFLAAKNLSDAILLSDILRVNTEITKAPLSASMIKRYDEHHQDLTLLKALVRQQLPEKYKEIFFDQSKNGYAGYIDGGASQEEFYKFIKPILEKMDGTEELLVKLNREDLLRKQRTFDNGSIPHQIHLGELHAILRRQEDFYPFLKDNREKIEKILTFRIPYYVGPLARGNSRFAWMTRKSEETITPWNFEEVVDKGASAQSFIERMTNFDKNLPNEKVLPKHSLLYEYFTVYNELTKVKYVTEGMRKPAFLSGEQKKAIVDLLFKTNRKVTVKQLKEDYFKKIECFDSVEISGVEDRFNASLGTYHDLLKIIKDKDFLDNEENEDILEDIVLTLTLFEDREMIEERLKTYAHLFDDKVMKQLKRRRYTGWGRLSRKLINGIRDKQSGKTILDFLKSDGFANRNFMQLIHDDSLTFKEDIQKAQVSGQGDSLHEHIANLAGSPAIKKGILQTVKVVDELVKVMGRHKPENIVIEMARENQTTQKGQKNSRERMKRIEEGIKELGSQILKEHPVENTQLQNEKLYLYYLQNGRDMYVDQELDINRLSDYDVDHIVPQSFLKDDSIDNKVLTRSDKARGKSDNVPSEEVVKKMKNYWRQLLNAKLITQRKFDNLTKAERGGLSELDKAGFIKRQLVETRQITKHVAQILDSRMNTKYDENDKLIREVKVITLKSKLVSDFRKDFQFYKVREINNYHHAHDAYLNAVVGTALIKKYPKLESEFVYGDYKVYDVRKMIAKSEQEIGKATAKYFFYSNIMNFFKTEITLANGEIRKRPLIETNGETGEIVWDKGRDFATVRKVLSMPQVNIVKKTEVQTGGFSKESILPKRNSDKLIARKKDWDPKKYGGFDSPTVAYSVLVVAKVEKGKSKKLKSVKELLGITIMERSSFEKNPIDFLEAKGYKEVKKDLIIKLPKYSLFELENGRKRMLASAGELQKGNELALPSKYVNFLYLASHYEKLKGSPEDNEQKQLFVEQHKHYLDEIIEQISEFSKRVILADANLDKVLSAYNKHRDKPIREQAENIIHLFTLTNLGAPAAFKYFDTTIDRKRYTSTKEVLDATLIHQSITGLYETRIDLSQLGGDGGGSSPAPGGSGGTAPLEEEYRLFLEAPIQNVTLLEQWKREIPKVWAEINPPGLASTQAPIHVQLLSTALPVRVRQYPITLEAKRSLRETIRKFRAAGILRPVHSPWNTPLLPVRKSGTSEYRMVQDLREVNKRVETIHPTVPNPYTLLSLLPPDRIWYSVLDLKDAFFCIPLAPESQLIFAFEWADAEEGESGQLTWTRLPQGFKNSPTLFNEALNRDLQGFRLDHPSVSLLQYVDDLLIAADTQAACLSATRDLLMTLAELGYRVSGKKAQLCQEEVTYLGFKIHKGSRSLSNSRTQAILQIPVPKTKRQVREFLGTIGYCRLWIPGFAELAQPLYAATRPGNDPLVWGEKEEEAFQSLKLALTQPPALALPSLDKPFQLFVEETSGAAKGVLTQALGPWKRPVAYLSKRLDPVAAGWPRCLRAIAAAALLTREASKLTFGQDIEITSSHNLESLLRSPPDKWLTNARITQYQVLLLDPPRVRFKQTAALNPATLLPETDDTLPIHHCLDTLDSLTSTRPDLTDQPLAQAEATLFTDGSSYIRDGKRYAGAAVVTLDSVIWAEPLPIGTSAQKAELIALTKALEWSKDKSVNIYTDSRYAFATLHVHGMIYRERGWLTAGGKAIKNAPEILALLTAVWLPKRVAVMHCKGHQKDDAPTSTGNRRADEVAREVAIRPLSTQATISAGKRTADGSEFEKRTADGSEFESPKKKAKVE

SEQ ID NO: 7152 - protein, 2096 aa, synthetic construct
MPAAKRVKLDGGDKKYSIGLDIGTNSVGWAVITDEYKVPSKKFKVLGNTDRHSIKKNLIGALLFDSGETAEATRLKRTARRRYTRRKNRICYLQEIFSNEMAKVDDSFFHRLEESFLVEEDKKHERHPIFGNIVDEVAYHEKYPTIYHLRKKLVDSTDKADLRLIYLALAHMIKFRGHFLIEGDLNPDNSDVDKLFIQLVQTYNQLFEENPINASGVDAKAILSARLSKSRRLENLIAQLPGEKKNGLFGNLIALSLGLTPNFKSNFDLAEDAKLQLSKDTYDDDLDNLLAQIGDQYADLFLAAKNLSDAILLSDILRVNTEITKAPLSASMIKRYDEHHQDLTLLKALVRQQLPEKYKEIFFDQSKNGYAGYIDGGASQEEFYKFIKPILEKMDGTEELLVKLNREDLLRKQRTFDNGSIPHQIHLGELHAILRRQEDFYPFLKDNREKIEKILTFRIPYYVGPLARGNSRFAWMTRKSEETITPWNFEEVVDKGASAQSFIERMTNFDKNLPNEKVLPKHSLLYEYFTVYNELTKVKYVTEGMRKPAFLSGEQKKAIVDLLFKTNRKVTVKQLKEDYFKKIECFDSVEISGVEDRFNASLGTYHDLLKIIKDKDFLDNEENEDILEDIVLTLTLFEDREMIEERLKTYAHLFDDKVMKQLKRRRYTGWGRLSRKLINGIRDKQSGKTILDFLKSDGFANRNFMQLIHDDSLTFKEDIQKAQVSGQGDSLHEHIANLAGSPAIKKGILQTVKVVDELVKVMGRHKPENIVIEMARENQTTQKGQKNSRERMKRIEEGIKELGSQILKEHPVENTQLQNEKLYLYYLQNGRDMYVDQELDINRLSDYDVDHIVPQSFLKDDSIDNKVLTRSDKARGKSDNVPSEEVVKKMKNYWRQLLNAKLITQRKFDNLTKAERGGLSELDKAGFIKRQLVETRQITKHVAQILDSRMNTKYDENDKLIREVKVITLKSKLVSDFRKDFQFYKVREINNYHHAHDAYLNAVVGTALIKKYPKLESEFVYGDYKVYDVRKMIAKSEQEIGKATAKYFFYSNIMNFFKTEITLANGEIRKRPLIETNGETGEIVWDKGRDFATVRKVLSMPQVNIVKKTEVQTGGFSKESILPKRNSDKLIARKKDWDPKKYGGFDSPTVAYSVLVVAKVEKGKSKKLKSVKELLGITIMERSSFEKNPIDFLEAKGYKEVKKDLIIKLPKYSLFELENGRKRMLASAGELQKGNELALPSKYVNFLYLASHYEKLKGSPEDNEQKQLFVEQHKHYLDEIIEQISEFSKRVILADANLDKVLSAYNKHRDKPIREQAENIIHLFTLTNLGAPAAFKYFDTTIDRKRYTSTKEVLDATLIHQSITGLYETRIDLSQLGGDGGGSSPAPGGSGGTAPLEEEYRLFLEAPIQNVTLLEQWKREIPKVWAEINPPGLASTQAPIHVQLLSTALPVRVRQYPITLEAKRSLRETIRKFRAAGILRPVHSPWNTPLLPVRKSGTSEYRMVQDLREVNKRVETIHPTVPNPYTLLSLLPPDRIWYSVLDLKDAFFCIPLAPESQLIFAFEWADAEEGESGQLTWTRLPQGFKNSPTLFNEALNRDLQGFRLDHPSVSLLQYVDDLLIAADTQAACLSATRDLLMTLAELGYRVSGKKAQLCQEEVTYLGFKIHKGSRSLSNSRTQAILQIPVPKTKRQVREFLGKIGYCRLFIPGFAELAQPLYAATRPGNDPLVWGEKEEEAFQSLKLALTQPPALALPSLDKPFQLFVEETSGAAKGVLTQALGPWKRPVAYLSKRLDPVAAGWPRCLRAIAAAALLTREASKLTFGQDIEITSSHNLESLLRSPPDKWLTNARITQYQVLLLDPPRVRFKQTAALNPATLLPETDDTLPIHHCLDTLDSLTSTRPDLTDQPLAQAEATLFTDGSSYIRDGKRYAGAAVVTLDSVIWAEPLPIGTSAQKAELIALTKALEWSKDKSVNIYTDSRYAFATLHVHGMIYRERGWLTAGGKAIKNAPEILALLTAVWLPKRVAVMHCKGHQKDDAPTSTGNRRADEVAREVAIRPLSTQATISAGKRTADGSEFEKRTADGSEFESPKKKAKVE

SEQ ID NO: 7153 - protein, 2093 aa, synthetic construct
MPAAKRVKLDGGDKKYSIGLDIGTNSVGWAVITDEYKVPSKKFKVLGNTDRHSIKKNLIGALLFDSGETAEATRLKRTARRRYTRRKNRICYLQEIFSNEMAKVDDSFFHRLEESFLVEEDKKHERHPIFGNIVDEVAYHEKYPTIYHLRKKLVDSTDKADLRLIYLALAHMIKFRGHFLIEGDLNPDNSDVDKLFIQLVQTYNQLFEENPINASGVDAKAILSARLSKSRRLENLIAQLPGEKKNGLFGNLIALSLGLTPNFKSNFDLAEDAKLQLSKDTYDDDLDNLLAQIGDQYADLFLAAKNLSDAILLSDILRVNTEITKAPLSASMIKRYDEHHQDLTLLKALVRQQLPEKYKEIFFDQSKNGYAGYIDGGASQEEFYKFIKPILEKMDGTEELLVKLNREDLLRKQRTFDNGSIPHQIHLGELHAILRRQEDFYPFLKDNREKIEKILTFRIPYYVGPLARGNSRFAWMTRKSEETITPWNFEEVVDKGASAQSFIERMTNFDKNLPNEKVLPKHSLLYEYFTVYNELTKVKYVTEGMRKPAFLSGEQKKAIVDLLFKTNRKVTVKQLKEDYFKKIECFDSVEISGVEDRFNASLGTYHDLLKIIKDKDFLDNEENEDILEDIVLTLTLFEDREMIEERLKTYAHLFDDKVMKQLKRRRYTGWGRLSRKLINGIRDKQSGKTILDFLKSDGFANRNFMQLIHDDSLTFKEDIQKAQVSGQGDSLHEHIANLAGSPAIKKGILQTVKVVDELVKVMGRHKPENIVIEMARENQTTQKGQKNSRERMKRIEEGIKELGSQILKEHPVENTQLQNEKLYLYYLQNGRDMYVDQELDINRLSDYDVDHIVPQSFLKDDSIDNKVLTRSDKARGKSDNVPSEEVVKKMKNYWRQLLNAKLITQRKFDNLTKAERGGLSELDKAGFIKRQLVETRQITKHVAQILDSRMNTKYDENDKLIREVKVITLKSKLVSDFRKDFQFYKVREINNYHHAHDAYLNAVVGTALIKKYPKLESEFVYGDYKVYDVRKMIAKSEQEIGKATAKYFFYSNIMNFFKTEITLANGEIRKRPLIETNGETGEIVWDKGRDFATVRKVLSMPQVNIVKKTEVQTGGFSKESILPKRNSDKLIARKKDWDPKKYGGFDSPTVAYSVLVVAKVEKGKSKKLKSVKELLGITIMERSSFEKNPIDFLEAKGYKEVKKDLIIKLPKYSLFELENGRKRMLASAGELQKGNELALPSKYVNFLYLASHYEKLKGSPEDNEQKQLFVEQHKHYLDEIIEQISEFSKRVILADANLDKVLSAYNKHRDKPIREQAENIIHLFTLTNLGAPAAFKYFDTTIDRKRYTSTKEVLDATLIHQSITGLYETRIDLSQLGGDGGGSSPAPGGSGGTLQLEEEYRLFEPESTQKQEMDIWLKNFPQAWAETGGMGTAHCQAPVLIQLKATATPISIRQYPMPHEAYQGIKPHIRRMLDQGILKPCQSPWNTPLLPVKKPGTEDYRPVQDLREVNKRVEDIHPTVPNPYNLLSTLPPSHPWYTVLDLKDAFFCLRLHSESQLLFAFEWRDPEIGLSGQLTWTRLPQGFKNSPTLFNEALHSDLADFRVRYPALVLLQYVDDLLLAAATRTECLEGTKALLETLGNKGYRASAKKAQICLQEVTYLGYSLKDGQRWLTKARKEAILSIPVPKNSRQVREFLGKAGYCRLFIPGFAELAAPLYPLTRPGTLFQWGTEQQLAFEDIKKALLSSPALGLPDITKPFELFIDENSGFAKGVLVQKLGPWKRPVAYLSKKLDTVASGWPPCLRMVAAIAILVKDAGKLTLGQPLTILTSHPVEALVRQPPNKWLSNARMTHYQAMLLDAERVHFGPTVSLNPATLLPLPSGGNHHDCLQILAETHGTRPDLTDQPLPDADLTWYTDGSSFIRNGEREAGAAVTTESEVIWAAPLPPGTSAQRAELIALTQALKMAEGKKLTVYTDSRYAFATTHVHGEIYRRRGWLTSEGKEIKNKNEILALLEALFLPKRLSIIHCPGHQKGDSPQAKGNRLADDTAKKAATETHSSLTVLPAGKRTADGSEFEKRTADGSEFESPKKKAKVE

SEQ ID NO: 7154 - protein, 2125 aa, synthetic construct; identical to SEQ ID NO: 4526

SEQ ID NO: 7155 - protein, 2216 aa, synthetic construct
MPAAKRVKLDGGDKKYSIGLDIGTNSVGWAVITDEYKVPSKKFKVLGNTDRHSIKKNLIGALLFDSGETAEATRLKRTARRRYTRRKNRICYLQEIFSNEMAKVDDSFFHRLEESFLVEEDKKHERHPIFGNIVDEVAYHEKYPTIYHLRKKLVDSTDKADLRLIYLALAHMIKFRGHFLIEGDLNPDNSDVDKLFIQLVQTYNQLFEENPINASGVDAKAILSARLSKSRRLENLIAQLPGEKKNGLFGNLIALSLGLTPNFKSNFDLAEDAKLQLSKDTYDDDLDNLLAQIGDQYADLFLAAKNLSDAILLSDILRVNTEITKAPLSASMIKRYDEHHQDLTLLKALVRQQLPEKYKEIFFDQSKNGYAGYIDGGASQEEFYKFIKPILEKMDGTEELLVKLNREDLLRKQRTFDNGSIPHQIHLGELHAILRRQEDFYPFLKDNREKIEKILTFRIPYYVGPLARGNSRFAWMTRKSEETITPWNFEEVVDKGASAQSFIERMTNFDKNLPNEKVLPKHSLLYEYFTVYNELTKVKYVTEGMRKPAFLSGEQKKAIVDLLFKTNRKVTVKQLKEDYFKKIECFDSVEISGVEDRFNASLGTYHDLLKIIKDKDFLDNEENEDILEDIVLTLTLFEDREMIEERLKTYAHLFDDKVMKQLKRRRYTGWGRLSRKLINGIRDKQSGKTILDFLKSDGFANRNFMQLIHDDSLTFKEDIQKAQVSGQGDSLHEHIANLAGSPAIKKGILQTVKVVDELVKVMGRHKPENIVIEMARENQTTQKGQKNSRERMKRIEEGIKELGSQILKEHPVENTQLQNEKLYLYYLQNGRDMYVDQELDINRLSDYDVDHIVPQSFLKDDSIDNKVLTRSDKARGKSDNVPSEEVVKKMKNYWRQLLNAKLITQRKFDNLTKAERGGLSELDKAGFIKRQLVETRQITKHVAQILDSRMNTKYDENDKLIREVKVITLKSKLVSDFRKDFQFYKVREINNYHHAHDAYLNAVVGTALIKKYPKLESEFVYGDYKVYDVRKMIAKSEQEIGKATAKYFFYSNIMNFFKTEITLANGEIRKRPLIETNGETGEIVWDKGRDFATVRKVLSMPQVNIVKKTEVQTGGFSKESILPKRNSDKLIARKKDWDPKKYGGFDSPTVAYSVLVVAKVEKGKSKKLKSVKELLGITIMERSSFEKNPIDFLEAKGYKEVKKDLIIKLPKYSLFELENGRKRMLASAGELQKGNELALPSKYVNFLYLASHYEKLKGSPEDNEQKQLFVEQHKHYLDEIIEQISEFSKRVILADANLDKVLSAYNKHRDKPIREQAENIIHLFTLTNLGAPAAFKYFDTTIDRKRYTSTKEVLDATLIHQSITGLYETRIDLSQLGGDGGGSSPAPGGSGGTLGDQGSRGSDPLPEPRVTLTVEGIPTEFLVNTGAEHSVLTKPMGKMGSKRTVVAGATGSKVYPWTTKRLLKIGQKQVTHSFLVIPECPAPLLGRDLLTKLKAQIQFSTEGPQVTWEDRPAMCLVLNLEEEYRLHEKPVPPSIDPSWLQLFPMVWAEKAGMGLANQVPPVVVELKSDASPVAVRQYPMSKEAREGIRPHIQRFLDLGILVPCQSPWNTPLLPVKKPGTNDYRPVQDLREVNKRVQDIHPTVPNPYNLLSSLPPSHTWYSVLDLKDAFFCLKLHPNSQPLFAFEWRDPEKGNTGQLTWTRLPQGFKNSPTLFNEALHRDLASFRALNPQVVMLQYVDDLLVAAPTYRDCKEGTRRLLQELSKLGYRVSAKKAQLCREEVTYLGYLLKGGKRWLTPARKATVMKIPTPTTPRQVREFLGTAGFCRLWIPGFASLAAPLYPLTRPKVPFTWTEAHQEAFGRIKEALLSAPALALPDLTKPFALYVDEKEGVARGVLTQTLGPWRRPVAYLSKKLDPVASGWPTCLKAIAAVALLLKDADKLTLGQNVLVIAPHNLESIVRQPPDRWMTNARMTHYQSLLLNERVSFAPPAILNPATLLPVESDDTPIHICSEILAEETGTRPDLRDQPLPGVPAWYTDGSSFIMDGRRQAGAAIVDNKRTVWASNLPEGTSAQKAELIALTQALRLAEGKSINIYTDSRYAFATAHVHGAIYKQRGWLTSAGKDIKNKEEILALLEAIHLPKRVAIIHCPGHQRGTDPVATGNRKADEAAKQAAQSTRILTETTKNAGKRTADGSEFEKRTADGSEFESPKKKAKVE

SEQ ID NO: 7156 - protein, 2094 aa, synthetic construct
MPAAKRVKLDGGDKKYSIGLDIGTNSVGWAVITDEYKVPSKKFKVLGNTDRHSIKKNLIGALLFDSGETAEATRLKRTARRRYTRRKNRICYLQEIFSNEMAKVDDSFFHRLEESFLVEEDKKHERHPIFGNIVDEVAYHEKYPTIYHLRKKLVDSTDKADLRLIYLALAHMIKFRGHFLIEGDLNPDNSDVDKLFIQLVQTYNQLFEENPINASGVDAKAILSARLSKSRRLENLIAQLPGEKKNGLFGNLIALSLGLTPNFKSNFDLAEDAKLQLSKDTYDDDLDNLLAQIGDQYADLFLAAKNLSDAILLSDILRVNTEITKAPLSASMIKRYDEHHQDLTLLKALVRQQLPEKYKEIFFDQSKNGYAGYIDGGASQEEFYKFIKPILEKMDGTEELLVKLNREDLLRKQRTFDNGSIPHQIHLGELHAILRRQEDFYPFLKDNREKIEKILTFRIPYYVGPLARGNSRFAWMTRKSEETITPWNFEEVVDKGASAQSFIERMTNFDKNLPNEKVLPKHSLLYEYFTVYNELTKVKYVTEGMRKPAFLSGEQKKAIVDLLFKTNRKVTVKQLKEDYFKKIECFDSVEISGVEDRFNASLGTYHDLLKIIKDKDFLDNEENEDILEDIVLTLTLFEDREMIEERLKTYAHLFDDKVMKQLKRRRYTGWGRLSRKLINGIRDKQSGKTILDFLKSDGFANRNFMQLIHDDSLTFKEDIQKAQVSGQGDSLHEHIANLAGSPAIKKGILQTVKVVDELVKVMGRHKPENIVIEMARENQTTQKGQKNSRERMKRIEEGIKELGSQILKEHPVENTQLQNEKLYLYYLQNGRDMYVDQELDINRLSDYDVDHIVPQSFLKDDSIDNKVLTRSDKARGKSDNVPSEEVVKKMKNYWRQLLNAKLITQRKFDNLTKAERGGLSELDKAGFIKRQLVETRQITKHVAQILDSRMNTKYDENDKLIREVKVITLKSKLVSDFRKDFQFYKVREINNYHHAHDAYLNAVVGTALIKKYPKLESEFVYGDYKVYDVRKMIAKSEQEIGKATAKYFFYSNIMNFFKTEITLANGEIRKRPLIETNGETGEIVWDKGRDFATVRKVLSMPQVNIVKKTEVQTGGFSKESILPKRNSDKLIARKKDWDPKKYGGFDSPTVAYSVLVVAKVEKGKSKKLKSVKELLGITIMERSSFEKNPIDFLEAKGYKEVKKDLIIKLPKYSLFELENGRKRMLASAGELQKGNELALPSKYVNFLYLASHYEKLKGSPEDNEQKQLFVEQHKHYLDEIIEQISEFSKRVILADANLDKVLSAYNKHRDKPIREQAENIIHLFTLTNLGAPAAFKYFDTTIDRKRYTSTKEVLDATLIHQSITGLYETRIDLSQLGGDGGGSSPAPGGSGGTLNLEDEYRLYETSAEPEVSPGSTWLSDFPQAWAETGGMGLAVRQAPLIIPLKATSTPVSIKQYPMSQEAKLGIKPHIQRLLDQGILVPCQSPWNTPLLPVKKPGTNDYRPVQDLREVNKRVEDIHPTVPNPYNLLSGLPPSHRWYTVLDLKDAFFCLRLHPTSQPLFAFEWRDPGMGISGQLTWTRLPQGFKNSPTLFNEALHRDLADFRIQHPDLILLQYVDDILLAATSELDCQQGTRALLLTLGNLGYRASAKKAQLCQKQVKYLGYLLKEGQRWLTEARKETVMGQPTPKTPRQLREFLGKAGFCRLFIPGFAEMAAPLYPLTKPGTLFNWGPDQQKAYQEIKQALLTAPALGLPDLTKPFELFVDEKQGYAKGVLTQKLGPWRRPVAYLSKKLDPVAAGWPPCLRMVAAIAVLRKDAGKLTMGQPLVILAPHAVEALVKQPPDRWLSNARMTHYQAMLLDTDRVQFGPVVALNPATLLPLPEEGAPHDCLEILAETHGTRPDLTDQPIPDADHTWYTDGSSFLQEGQRKAGAAVTTETEVIWARALPAGTSAQRAELIALTQALKMAEGKRLNVYTDSRYAFATAHIHGEIYRRRGWLTSEGREIKNKSEILALLKALFLPKRLSIIHCLGHQKGDSAEARGNRLADQAAREAAIKTPPDTSTLLAGKRTADGSEFEKRTADGSEFESPKKKAKVE

SEQ ID NO: 7157 - protein, 2094 aa, synthetic construct
MPAAKRVKLDGGDKKYSIGLDIGTNSVGWAVITDEYKVPSKKFKVLGNTDRHSIKKNLIGALLFDSGETAEATRLKRTARRRYTRRKNRICYLQEIFSNEMAKVDDSFFHRLEESFLVEEDKKHERHPIFGNIVDEVAYHEKYPTIYHLRKKLVDSTDKADLRLIYLALAHMIKFRGHFLIEGDLNPDNSDVDKLFIQLVQTYNQLFEENPINASGVDAKAILSARLSKSRRLENLIAQLPGEKKNGLFGNLIALSLGLTPNFKSNFDLAEDAKLQLSKDTYDDDLDNLLAQIGDQYADLFLAAKNLSDAILLSDILRVNTEITKAPLSASMIKRYDEHHQDLTLLKALVRQQLPEKYKEIFFDQSKNGYAGYIDGGASQEEFYKFIKPILEKMDGTEELLVKLNREDLLRKQRTFDNGSIPHQIHLGELHAILRRQEDFYPFLKDNREKIEKILTFRIPYYVGPLARGNSRFAWMTRKSEETITPWNFEEVVDKGASAQSFIERMTNFDKNLPNEKVLPKHSLLYEYFTVYNELTKVKYVTEGMRKPAFLSGEQKKAIVDLLFKTNRKVTVKQLKEDYFKKIECFDSVEISGVEDRFNASLGTYHDLLKIIKDKDFLDNEENEDILEDIVLTLTLFEDREMIEERLKTYAHLFDDKVMKQLKRRRYTGWGRLSRKLINGIRDKQSGKTILDFLKSDGFANRNFMQLIHDDSLTFKEDIQKAQVSGQGDSLHEHIANLAGSPAIKKGILQTVKVVDELVKVMGRHKPENIVIEMARENQTTQKGQKNSRERMKRIEEGIKELGSQILKEHPVENTQLQNEKLYLYYLQNGRDMYVDQELDINRLSDYDVDHIVPQSFLKDDSIDNKVLTRSDKARGKSDNVPSEEVVKKMKNYWRQLLNAKLITQRKFDNLTKAERGGLSELDKAGFIKRQLVETRQITKHVAQILDSRMNTKYDENDKLIREVKVITLKSKLVSDFRKDFQFYKVREINNYHHAHDAYLNAVVGTALIKKYPKLESEFVYGDYKVYDVRKMIAKSEQEIGKATAKYFFYSNIMNFFKTEITLANGEIRKRPLIETNGETGEIVWDKGRDFATVRKVLSMPQVNIVKKTEVQTGGFSKESILPKRNSDKLIARKKDWDPKKYGGFDSPTVAYSVLVVAKVEKGKSKKLKSVKELLGITIMERSSFEKNPIDFLEAKGYKEVKKDLIIKLPKYSLFELENGRKRMLASAGELQKGNELALPSKYVNFLYLASHYEKLKGSPEDNEQKQLFVEQHKHYLDEIIEQISEFSKRVILADANLDKVLSAYNKHRDKPIREQAENIIHLFTLTNLGAPAAFKYFDTTIDRKRYTSTKEVLDATLIHQSITGLYETRIDLSQLGGDGGGSSPAPGGSGGTLNIEDEHRLHETSKEPDVSLGSTWLSDFPQAWAETGGMGLAVRQAPLIIPLKATSTPVSIKQYPMSQEARLGIKPHIQRLLDQGILVPCQSPWNTPLLPVKKPGTNDYRPVQDLREVNKRVEDIHPTVPNPYNLLSGLPPSHQWYTVLDLKDAFFCLRLHPTSQPLFAFEWRDPEMGISGQLTWTRLPQGFKNSPTLFNEALHRDLADFRIQHPDLILLQYVDDLLLAATSELDCQQGTRALLQTLGNLGYRASAKKAQICQKQVKYLGYLLKEGQRWLTEARKETVMGQPTPKTPRQLREFLGTAGFCRLWIPGFAEMAAPLYPLTKPGTLFNWGPDQQKAYQEIKQALLTAPALGLPDLTKPFELFVDEKQGYAKGVLTQKLGPWRRPVAYLSKKLDPVAAGWPPCLRMVAAIAVLTKDAGKLTMGQPLVILAPHAVEALVKQPPDRWLSNARMTHYQALLLDTDRVQFGPVVALNPATLLPLPEEGLQHNCLDILAEAHGTRPDLTDQPLPDADHTWYTDGSSLLQEGQRKAGAAVTTETEVIWAKALPAGTSAQRAELIALTQALKMAEGKKLNVYTDSRYAFATAHIHGEIYRRRGWLTSEGKEIKNKDEILALLKALFLPKRLSIIHCPGHQKGHSAEARGNRMADQAARKAAITETPDTSTLLAGKRTADGSEFEKRTADGSEFESPKKKAKVE

SEQ ID NO: 7158 - protein, 2094 aa, synthetic construct
MPAAKRVKLDGGDKKYSIGLDIGTNSVGWAVITDEYKVPSKKFKVLGNTDRHSIKKNLIGALLFDSGETAEATRLKRTARRRYTRRKNRICYLQEIFSNEMAKVDDSFFHRLEESFLVEEDKKHERHPIFGNIVDEVAYHEKYPTIYHLRKKLVDSTDKADLRLIYLALAHMIKFRGHFLIEGDLNPDNSDVDKLFIQLVQTYNQLFEENPINASGVDAKAILSARLSKSRRLENLIAQLPGEKKNGLFGNLIALSLGLTPNFKSNFDLAEDAKLQLSKDTYDDDLDNLLAQIGDQYADLFLAAKNLSDAILLSDILRVNTEITKAPLSASMIKRYDEHHQDLTLLKALVRQQLPEKYKEIFFDQSKNGYAGYIDGGASQEEFYKFIKPILEKMDGTEELLVKLNREDLLRKQRTFDNGSIPHQIHLGELHAILRRQEDFYPFLKDNREKIEKILTFRIPYYVGPLARGNSRFAWMTRKSEETITPWNFEEVVDKGASAQSFIERMTNFDKNLPNEKVLPKHSLLYEYFTVYNELTKVKYVTEGMRKPAFLSGEQKKAIVDLLFKTNRKVTVKQLKEDYFKKIECFDSVEISGVEDRFNASLGTYHDLLKIIKDKDFLDNEENEDILEDIVLTLTLFEDREMIEERLKTYAHLFDDKVMKQLKRRRYTGWGRLSRKLINGIRDKQSGKTILDFLKSDGFANRNFMQLIHDDSLTFKEDIQKAQVSGQGDSLHEHIANLAGSPAIKKGILQTVKVVDELVKVMGRHKPENIVIEMARENQTTQKGQKNSRERMKRIEEGIKELGSQILKEHPVENTQLQNEKLYLYYLQNGRDMYVDQELDINRLSDYDVDHIVPQSFLKDDSIDNKVLTRSDKARGKSDNVPSEEVVKKMKNYWRQLLNAKLITQRKFDNLTKAERGGLSELDKAGFIKRQLVETRQITKHVAQILDSRMNTKYDENDKLIREVKVITLKSKLVSDFRKDFQFYKVREINNYHHAHDAYLNAVVGTALIKKYPKLESEFVYGDYKVYDVRKMIAKSEQEIGKATAKYFFYSNIMNFFKTEITLANGEIRKRPLIETNGETGEIVWDKGRDFATVRKVLSMPQVNIVKKTEVQTGGFSKESILPKRNSDKLIARKKDWDPKKYGGFDSPTVAYSVLVVAKVEKGKSKKLKSVKELLGITIMERSSFEKNPIDFLEAKGYKEVKKDLIIKLPKYSLFELENGRKRMLASAGELQKGNELALPSKYVNFLYLASHYEKLKGSPEDNEQKQLFVEQHKHYLDEIIEQISEFSKRVILADANLDKVLSAYNKHRDKPIREQAENIIHLFTLTNLGAPAAFKYFDTTIDRKRYTSTKEVLDATLIHQSITGLYETRIDLSQLGGDGGGSSPAPGGSGGTLNIEDEHRLHETSKEPDVSLGSTWLSDFPQAWAETGGMGLAVRQAPLIIPLKATSTPVSIKQYPMSQEARLGIKPHIQRLLDQGILVPCQSPWNTPLLPVKKPGTNDYRPVQDLREVNKRVEDIHPTVPNPYNLLSGLPPSHQWYTVLDLKDAFFCLRLHPTSQPLFAFEWRDPEMGISGQLTWTRLPQGFKNSPTLFNEALHRDLADFRIQHPDLILLQYVDDLLLAATSELDCQQGTRALLQTLGNLGYRASAKKAQICQKQVKYLGYLLKEGQRWLTEARKETVMGQPTPKTPRQLREFLGKAGFCRLFIPGFAEMAAPLYPLTKPGTLFNWGPDQQKAYQEIKQALLTAPALGLPDLTKPFELFVDEKQGYAKGVLTQKLGPWRRPVAYLSKKLDPVAAGWPPCLRMVAAIAVLTKDAGKLTMGQPLVILAPHAVEALVKQPPDRWLSNARMTHYQALLLDTDRVQFGPVVALNPATLLPLPEEGLQHNCLDILAEAHGTRPDLTDQPLPDADHTWYTDGSSLLQEGQRKAGAAVTTETEVIWAKALPAGTSAQRAELIALTQALKMAEGKKLNVYTDSRYAFATAHIHGEIYRRRGWLTSEGKEIKNKDEILALLKALFLPKRLSIIHCPGHQKGHSAEARGNRMADQAARKAAITETPDTSTLLAGKRTADGSEFEKRTADGSEFESPKKKAKVE

SEQ ID NO: 7159 - protein, 2094 aa, synthetic construct; identical to SEQ ID NO: 7157

SEQ ID NO: 7160 - protein, 2094 aa, synthetic construct; identical to SEQ ID NO: 7158

SEQ ID NO: 7161 - protein, 2085 aa, synthetic construct
MPAAKRVKLDGGDKKYSIGLDIGTNSVGWAVITDEYKVPSKKFKVLGNTDRHSIKKNLIGALLFDSGETAEATRLKRTARRRYTRRKNRICYLQEIFSNEMAKVDDSFFHRLEESFLVEEDKKHERHPIFGNIVDEVAYHEKYPTIYHLRKKLVDSTDKADLRLIYLALAHMIKFRGHFLIEGDLNPDNSDVDKLFIQLVQTYNQLFEENPINASGVDAKAILSARLSKSRRLENLIAQLPGEKKNGLFGNLIALSLGLTPNFKSNFDLAEDAKLQLSKDTYDDDLDNLLAQIGDQYADLFLAAKNLSDAILLSDILRVNTEITKAPLSASMIKRYDEHHQDLTLLKALVRQQLPEKYKEIFFDQSKNGYAGYIDGGASQEEFYKFIKPILEKMDGTEELLVKLNREDLLRKQRTFDNGSIPHQIHLGELHAILRRQEDFYPFLKDNREKIEKILTFRIPYYVGPLARGNSRFAWMTRKSEETITPWNFEEVVDKGASAQSFIERMTNFDKNLPNEKVLPKHSLLYEYFTVYNELTKVKYVTEGMRKPAFLSGEQKKAIVDLLFKTNRKVTVKQLKEDYFKKIECFDSVEISGVEDRFNASLGTYHDLLKIIKDKDFLDNEENEDILEDIVLTLTLFEDREMIEERLKTYAHLFDDKVMKQLKRRRYTGWGRLSRKLINGIRDKQSGKTILDFLKSDGFANRNFMQLIHDDSLTFKEDIQKAQVSGQGDSLHEHIANLAGSPAIKKGILQTVKVVDELVKVMGRHKPENIVIEMARENQTTQKGQKNSRERMKRIEEGIKELGSQILKEHPVENTQLQNEKLYLYYLQNGRDMYVDQELDINRLSDYDVDHIVPQSFLKDDSIDNKVLTRSDKARGKSDNVPSEEVVKKMKNYWRQLLNAKLITQRKFDNLTKAERGGLSELDKAGFIKRQLVETRQITKHVAQILDSRMNTKYDENDKLIREVKVITLKSKLVSDFRKDFQFYKVREINNYHHAHDAYLNAVVGTALIKKYPKLESEFVYGDYKVYDVRKMIAKSEQEIGKATAKYFFYSNIMNFFKTEITLANGEIRKRPLIETNGETGEIVWDKGRDFATVRKVLSMPQVNIVKKTEVQTGGFSKESILPKRNSDKLIARKKDWDPKKYGGFDSPTVAYSVLVVAKVEKGKSKKLKSVKELLGITIMERSSFEKNPIDFLEAKGYKEVKKDLIIKLPKYSLFELENGRKRMLASAGELQKGNELALPSKYVNFLYLASHYEKLKGSPEDNEQKQLFVEQHKHYLDEIIEQISEFSKRVILADANLDKVLSAYNKHRDKPIREQAENIIHLFTLTNLGAPAAFKYFDTTIDRKRYTSTKEVLDATLIHQSITGLYETRIDLSQLGGDGGGSSPAPGGSGGIPWLMKKPLQLTTLVPLQEYEERLLKQTMLTGSYKEKLQSLFLKYDALWQHWENQVGHRRIKPHHIATGTVNPRPQKQYPINPKAKASIQTVINDLLKQGVLIQQNSIMNTPVYPVPKPDGKWRMVLDYREVNKTIPLIAAQNQHSAGILSSIFRGKYKTTLDLSNGFWAHSITPESYWLTAFTWLGQQYCWTRLPQGFLNSPALFNADVVDLLKEVPNVQVYVDDIYISHDDPREHLEQLEKVFSLLLNAGYVVSLKKSEIAQHEVEFLGFNITKEGRGLTETFKQKLLNITPPRDLKQLQSILGKLNFARNFIPNFSELVKPLYNIIATAPGKYITWTTDNSQQLQNIISMLNSAENLEERNPEVRLIMKVNTSPSAGYIRFYNEFAKRPIMYLNYVYTKAEVKFTNTEKLLTTIHKGLIKALDLGMGQEILVYSPIVSMTKIQKTPLPERKALPIRWITWMSYLEDPRIQFHYDKTLPELQQVPTVTDDIIAKIKHPSEFSMVFYTDGSAIKHPNVNKSHNAGMGIAQVQFKPEFTVINTWSIPLGDHTAQLAEVAAVEFACKKALKIDGPVLIVTDSFYVAESVNKELPYWQSNGFFNNKKKPLKHVSKWKSIADCIQLKPDIIIIHEKGHQPTASTFHTEGNNLADKLATQGSYVVNAGKRTADGSEFEKRTADGSEFESPKKKAKVE

SEQ ID NO: 7162 - protein, 2092 aa, synthetic construct
MPAAKRVKLDGGDKKYSIGLDIGTNSVGWAVITDEYKVPSKKFKVLGNTDRHSIKKNLIGALLFDSGETAEATRLKRTARRRYTRRKNRICYLQEIFSNEMAKVDDSFFHRLEESFLVEEDKKHERHPIFGNIVDEVAYHEKYPTIYHLRKKLVDSTDKADLRLIYLALAHMIKFRGHFLIEGDLNPDNSDVDKLFIQLVQTYNQLFEENPINASGVDAKAILSARLSKSRRLENLIAQLPGEKKNGLFGNLIALSLGLTPNFKSNFDLAEDAKLQLSKDTYDDDLDNLLAQIGDQYADLFLAAKNLSDAILLSDILRVNTEITKAPLSASMIKRYDEHHQDLTLLKALVRQQLPEKYKEIFFDQSKNGYAGYIDGGASQEEFYKFIKPILEKMDGTEELLVKLNREDLLRKQRTFDNGSIPHQIHLGELHAILRRQEDFYPFLKDNREKIEKILTFRIPYYVGPLARGNSRFAWMTRKSEETITPWNFEEVVDKGASAQSFIERMTNFDKNLPNEKVLPKHSLLYEYFTVYNELTKVKYVTEGMRKPAFLSGEQKKAIVDLLFKTNRKVTVKQLKEDYFKKIECFDSVEISGVEDRFNASLGTYHDLLKIIKDKDFLDNEENEDILEDIVLTLTLFEDREMIEERLKTYAHLFDDKVMKQLKRRRYTGWGRLSRKLINGIRDKQSGKTILDFLKSDGFANRNFMQLIHDDSLTFKEDIQKAQVSGQGDSLHEHIANLAGSPAIKKGILQTVKVVDELVKVMGRHKPENIVIEMARENQTTQKGQKNSRERMKRIEEGIKELGSQILKEHPVENTQLQNEKLYLYYLQNGRDMYVDQELDINRLSDYDVDHIVPQSFLKDDSIDNKVLTRSDKARGKSDNVPSEEVVKKMKNYWRQLLNAKLITQRKFDNLTKAERGGLSELDKAGFIKRQLVETRQITKHVAQILDSRMNTKYDENDKLIREVKVITLKSKLVSDFRKDFQFYKVREINNYHHAHDAYLNAVVGTALIKKYPKLESEFVYGDYKVYDVRKMIAKSEQEIGKATAKYFFYSNIMNFFKTEITLANGEIRKRPLIETNGETGEIVWDKGRDFATVRKVLSMPQVNIVKKTEVQTGGFSKESILPKRNSDKLIARKKDWDPKKYGGFDSPTVAYSVLVVAKVEKGKSKKLKSVKELLGITIMERSSFEKNPIDFLEAKGYKEVKKDLIIKLPKYSLFELENGRKRMLASAGELQKGNELALPSKYVNFLYLASHYEKLKGSPEDNEQKQLFVEQHKHYLDEIIEQISEFSKRVILADANLDKVLSAYNKHRDKPIREQAENIIHLFTLTNLGAPAAFKYFDTTIDRKRYTSTKEVLDATLIHQSITGLYETRIDLSQLGGDGGGSSPAPGGSGGVLNLEEEYRLHEKPVPSSIDPSWLQLFPTVWAERAGMGLANQVPPVVVELRSGASPVAVRQYPMSKEAREGIRPHIQRFLDLGVLVPCQSPWNTPLLPVKKPGTNDYRPVQDLREINKRVQDIHPTVPNPYNLLSSLPPSHTWYSVLDLKDAFFCLKLHPNSQPLFAFEWRDPEKGNTGQLTWTRLPQGFKNSPTLFNEALHRDLAPFRALNPQVVLLQYVDDLLVAAPTYRDCKEGTQKLLQELSKLGYRVSAKKAQLCQKEVTYLGYLLKEGKRWLTPARKATVMKIPPPTTPRQVREFLGKAGFCRLFIPGFASLAAPLYPLTKPSIPFIWTEEHQKAFDRIKEALLSAPALALPDLTKPFTLYVDERAGVARGVLTQTLGPWRRPVAYLSKKLDPVASGWPTCLKAVAAVALLLKDADKLTLGQNVTVIASHSLESIVRQPPDRWMTNARMTHYQSLLLNERVSFAPPAVLNPATLLPVESEATPVHRCSEILAEETGTRRDLKDQPLPGVPAWYTDGSSFIAEGKRRAGAAIVDGKRTVWASSLPEGTSAQKAELVALTQALRLAEGKDINIYTDSRYAFATAHIHGAIYKQRGWLTSAGKDIKNKEEILALLEAIHLPKRVAIIHCPGHQKGNDPVATGNRRADEAAKQAALSTRVLAETTKPAGKRTADGSEFEKRTADGSEFESPKKKAKVE

SEQ ID NO: 7163 - protein, 2096 aa, synthetic construct
MPAAKRVKLDGGDKKYSIGLDIGTNSVGWAVITDEYKVPSKKFKVLGNTDRHSIKKNLIGALLFDSGETAEATRLKRTARRRYTRRKNRICYLQEIFSNEMAKVDDSFFHRLEESFLVEEDKKHERHPIFGNIVDEVAYHEKYPTIYHLRKKLVDSTDKADLRLIYLALAHMIKFRGHFLIEGDLNPDNSDVDKLFIQLVQTYNQLFEENPINASGVDAKAILSARLSKSRRLENLIAQLPGEKKNGLFGNLIALSLGLTPNFKSNFDLAEDAKLQLSKDTYDDDLDNLLAQIGDQYADLFLAAKNLSDAILLSDILRVNTEITKAPLSASMIKRYDEHHQDLTLLKALVRQQLPEKYKEIFFDQSKNGYAGYIDGGASQEEFYKFIKPILEKMDGTEELLVKLNREDLLRKQRTFDNGSIPHQIHLGELHAILRRQEDFYPFLKDNREKIEKILTFRIPYYVGPLARGNSRFAWMTRKSEETITPWNFEEVVDKGASAQSFIERMTNFDKNLPNEKVLPKHSLLYEYFTVYNELTKVKYVTEGMRKPAFLSGEQKKAIVDLLFKTNRKVTVKQLKEDYFKKIECFDSVEISGVEDRFNASLGTYHDLLKIIKDKDFLDNEENEDILEDIVLTLTLFEDREMIEERLKTYAHLFDDKVMKQLKRRRYTGWGRLSRKLINGIRDKQSGKTILDFLKSDGFANRNFMQLIHDDSLTFKEDIQKAQVSGQGDSLHEHIANLAGSPAIKKGILQTVKVVDELVKVMGRHKPENIVIEMARENQTTQKGQKNSRERMKRIEEGIKELGSQILKEHPVENTQLQNEKLYLYYLQNGRDMYVDQELDINRLSDYDVDHIVPQSFLKDDSIDNKVLTRSDKARGKSDNVPSEEVVKKMKNYWRQLLNAKLITQRKFDNLTKAERGGLSELDKAGFIKRQLVETRQITKHVAQILDSRMNTKYDENDKLIREVKVITLKSKLVSDFRKDFQFYKVREINNYHHAHDAYLNAVVGTALIKKYPKLESEFVYGDYKVYDVRKMIAKSEQEIGKATAKYFFYSNIMNFFKTEITLANGEIRKRPLIETNGETGEIVWDKGRDFATVRKVLSMPQVNIVKKTEVQTGGFSKESILPKRNSDKLIARKKDWDPKKYGGFDSPTVAYSVLVVAKVEKGKSKKLKSVKELLGITIMERSSFEKNPIDFLEAKGYKEVKKDLIIKLPKYSLFELENGRKRMLASAGELQKGNELALPSKYVNFLYLASHYEKLKGSPEDNEQKQLFVEQHKHYLDEIIEQISEFSKRVILADANLDKVLSAYNKHRDKPIREQAENIIHLFTLTNLGAPAAFKYFDTTIDRKRYTSTKEVLDATLIHQSITGLYETRIDLSQLGGDGGPAPGGSGSSGGTAPLEEEYRLFLEAPIQNVTLLEQWKREIPKVWAEINPPGLASTQAPIHVQLLSTALPVRVRQYPITLEAKRSLRETIRKFRAAGILRPVHSPWNTPLLPVRKSGTSEYRMVQDLREVNKRVETIHPTVPNPYTLLSLLPPDRIWYSVLDLKDAFFCIPLAPESQLIFAFEWADAEEGESGQLTWTRLPQGFKNSPTLFNEALNRDLQGFRLDHPSVSLLQYVDDLLIAADTQAACLSATRDLLMTLAELGYRVSGKKAQLCQEEVTYLGFKIHKGSRSLSNSRTQAILQIPVPKTKRQVREFLGTIGYCRLWIPGFAELAQPLYAATRPGNDPLVWGEKEEEAFQSLKLALTQPPALALPSLDKPFQLFVEETSGAAKGVLTQALGPWKRPVAYLSKRLDPVAAGWPRCLRAIAAAALLTREASKLTFGQDIEITSSHNLESLLRSPPDKWLTNARITQYQVLLLDPPRVRFKQTAALNPATLLPETDDTLPIHHCLDTLDSLTSTRPDLTDQPLAQAEATLFTDGSSYIRDGKRYAGAAVVTLDSVIWAEPLPIGTSAQKAELIALTKALEWSKDKSVNIYTDSRYAFATLHVHGMIYRERGWLTAGGKAIKNAPEILALLTAVWLPKRVAVMHCKGHQKDDAPTSTGNRRADEVAREVAIRPLSTQATISAGKRTADGSEFEKRTADGSEFESPKKKAKVE

SEQ ID NO: 7164 - protein, 2093 aa, synthetic construct
MPAAKRVKLDGGDKKYSIGLDIGTNSVGWAVITDEYKVPSKKFKVLGNTDRHSIKKNLIGALLFDSGETAEATRLKRTARRRYTRRKNRICYLQEIFSNEMAKVDDSFFHRLEESFLVEEDKKHERHPIFGNIVDEVAYHEKYPTIYHLRKKLVDSTDKADLRLIYLALAHMIKFRGHFLIEGDLNPDNSDVDKLFIQLVQTYNQLFEENPINASGVDAKAILSARLSKSRRLENLIAQLPGEKKNGLFGNLIALSLGLTPNFKSNFDLAEDAKLQLSKDTYDDDLDNLLAQIGDQYADLFLAAKNLSDAILLSDILRVNTEITKAPLSASMIKRYDEHHQDLTLLKALVRQQLPEKYKEIFFDQSKNGYAGYIDGGASQEEFYKFIKPILEKMDGTEELLVKLNREDLLRKQRTFDNGSIPHQIHLGELHAILRRQEDFYPFLKDNREKIEKILTFRIPYYVGPLARGNSRFAWMTRKSEETITPWNFEEVVDKGASAQSFIERMTNFDKNLPNEKVLPKHSLLYEYFTVYNELTKVKYVTEGMRKPAFLSGEQKKAIVDLLFKTNRKVTVKQLKEDYFKKIECFDSVEISGVEDRFNASLGTYHDLLKIIKDKDFLDNEENEDILEDIVLTLTLFEDREMIEERLKTYAHLFDDKVMKQLKRRRYTGWGRLSRKLINGIRDKQSGKTILDFLKSDGFANRNFMQLIHDDSLTFKEDIQKAQVSGQGDSLHEHIANLAGSPAIKKGILQTVKVVDELVKVMGRHKPENIVIEMARENQTTQKGQKNSRERMKRIEEGIKELGSQILKEHPVENTQLQNEKLYLYYLQNGRDMYVDQELDINRLSDYDVDHIVPQSFLKDDSIDNKVLTRSDKARGKSDNVPSEEVVKKMKNYWRQLLNAKLITQRKFDNLTKAERGGLSELDKAGFIKRQLVETRQITKHVAQILDSRMNTKYDENDKLIREVKVITLKSKLVSDFRKDFQFYKVREINNYHHAHDAYLNAVVGTALIKKYPKLESEFVYGDYKVYDVRKMIAKSEQEIGKATAKYFFYSNIMNFFKTEITLANGEIRKRPLIETNGETGEIVWDKGRDFATVRKVLSMPQVNIVKKTEVQTGGFSKESILPKRNSDKLIARKKDWDPKKYGGFDSPTVAYSVLVVAKVEKGKSKKLKSVKELLGITIMERSSFEKNPIDFLEAKGYKEVKKDLIIKLPKYSLFELENGRKRMLASAGELQKGNELALPSKYVNFLYLASHYEKLKGSPEDNEQKQLFVEQHKHYLDEIIEQISEFSKRVILADANLDKVLSAYNKHRDKPIREQAENIIHLFTLTNLGAPAAFKYFDTTIDRKRYTSTKEVLDATLIHQSITGLYETRIDLSQLGGDGGPAPGGSGSSGGTLQLEEEYRLFEPESTQKQEMDIWLKNFPQAWAETGGMGTAHCQAPVLIQLKATATPISIRQYPMPHEAYQGIKPHIRRMLDQGILKPCQSPWNTPLLPVKKPGTEDYRPVQDLREVNKRVEDIHPTVPNPYNLLSTLPPSHPWYTVLDLKDAFFCLRLHSESQLLFAFEWRDPEIGLSGQLTWTRLPQGFKNSPTLFNEALHSDLADFRVRYPALVLLQYVDDLLLAAATRTECLEGTKALLETLGNKGYRASAKKAQICLQEVTYLGYSLKDGQRWLTKARKEAILSIPVPKNSRQVREFLGKAGYCRLFIPGFAELAAPLYPLTRPGTLFQWGTEQQLAFEDIKKALLSSPALGLPDITKPFELFIDENSGFAKGVLVQKLGPWKRPVAYLSKKLDTVASGWPPCLRMVAAIAILVKDAGKLTLGQPLTILTSHPVEALVRQPPNKWLSNARMTHYQAMLLDAERVHFGPTVSLNPATLLPLPSGGNHHDCLQILAETHGTRPDLTDQPLPDADLTWYTDGSSFIRNGEREAGAAVTTESEVIWAAPLPPGTSAQRAELIALTQALKMAEGKKLTVYTDSRYAFATTHVHGEIYRRRGWLTSEGKEIKNKNEILALLEALFLPKRLSIIHCPGHQKGDSPQAKGNRLADDTAKKAATETHSSLTVLPAGKRTADGSEFEKRTADGSEFESPKKKAKVE

SEQ ID NO: 7165 - protein, 2174 aa, synthetic construct
MPAAKRVKLDGGDKKYSIGLDIGTNSVGWAVITDEYKVPSKKFKVLGNTDRHSIKKNLIGALLFDSGETAEATRLKRTARRRYTRRKNRICYLQEIFSNEMAKVDDSFFHRLEESFLVEEDKKHERHPIFGNIVDEVAYHEKYPTIYHLRKKLVDSTDKADLRLIYLALAHMIKFRGHFLIEGDLNPDNSDVDKLFIQLVQTYNQLFEENPINASGVDAKAILSARLSKSRRLENLIAQLPGEKKNGLFGNLIALSLGLTPNFKSNFDLAEDAKLQLSKDTYDDDLDNLLAQIGDQYADLFLAAKNLSDAILLSDILRVNTEITKAPLSASMIKRYDEHHQDLTLLKALVRQQLPEKYKEIFFDQSKNGYAGYIDGGASQEEFYKFIKPILEKMDGTEELLVKLNREDLLRKQRTFDNGSIPHQIHLGELHAILRRQEDFYPFLKDNREKIEKILTFRIPYYVGPLARGNSRFAWMTRKSEETITPWNFEEVVDKGASAQSFIERMTNFDKNLPNEKVLPKHSLLYEYFTVYNELTKVKYVTEGMRKPAFLSGEQKKAIVDLLFKTNRKVTVKQLKEDYFKKIECFDSVEISGVEDRFNASLGTYHDLLKIIKDKDFLDNEENEDILEDIVLTLTLFEDREMIEERLKTYAHLFDDKVMKQLKRRRYTGWGRLSRKLINGIRDKQSGKTILDFLKSDGFANRNFMQLIHDDSLTFKEDIQKAQVSGQGDSLHEHIANLAGSPAIKKGILQTVKVVDELVKVMGRHKPENIVIEMARENQTTQKGQKNSRERMKRIEEGIKELGSQILKEHPVENTQLQNEKLYLYYLQNGRDMYVDQELDINRLSDYDVDHIVPQSFLKDDSIDNKVLTRSDKARGKSDNVPSEEVVKKMKNYWRQLLNAKLITQRKFDNLTKAERGGLSELDKAGFIKRQLVETRQITKHVAQILDSRMNTKYDENDKLIREVKVITLKSKLVSDFRKDFQFYKVREINNYHHAHDAYLNAVVGTALIKKYPKLESEFVYGDYKVYDVRKMIAKSEQEIGKATAKYFFYSNIMNFFKTEITLANGEIRKRPLIETNGETGEIVWDKGRDFATVRKVLSMPQVNIVKKTEVQTGGFSKESILPKRNSDKLIARKKDWDPKKYGGFDSPTVAYSVLVVAKVEKGKSKKLKSVKELLGITIMERSSFEKNPIDFLEAKGYKEVKKDLIIKLPKYSLFELENGRKRMLASAGELQKGNELALPSKYVNFLYLASHYEKLKGSPEDNEQKQLFVEQHKHYLDEIIEQISEFSKRVILADANLDKVLSAYNKHRDKPIREQAENIIHLFTLTNLGAPAAFKYFDTTIDRKRYTSTKEVLDATLIHQSITGLYETRIDLSQLGGDGGPAPGGSGSSGGMNPLQLLQPLPAEIKGTKLLAHWNSGATITCIPESFLEDEQPIKKTLIKTIHGEKQQNVYYVTFKVKGRKVEAEVIASPYEYILLSPTDVPWLTQQPLQLTILVPLQEYQEKILSKTALPEDQKQQLKTLFVKYDNLWQHWENQVGHRKIRPHNIATGDYPPRPQKQYPINPKAKPSIQIVIDDLLKQGVLTPQNSTMNTPVYPVPKPDGRWRMVLDYREVNKTIPLTAAQNQHSAGILATIVRQKYKTTLDLANGFWAHPITPESYWLTAFTWQGKQYCWTRLPQGFLNSPALFTADVVDLLKEIPNVQVYVDDIYLSHDDPKEHVQQLEKVFQILLQAGYVVSLKKSEIGQKTVEFLGFNITKEGRGLTDTFKTKLLNITPPKDLKQLQSILGLLNFARNFIPNFAELVQPLYNLIASAKGKYIEWSEENTKQLNMVIEALNTASNLEERLPEQRLVIKVNTSPSAGYVRYYNETGKKPIMYLNYVFSKAELKFSMLEKLLTTMHKALIKAMDLAMGQEILVYSPIVSMTKIQKTPLPERKALPIRWITWMTYLEDPRIQFHYDKTLPELKHIPDVYTSSQSPVKHPSQYEGVFYTDGSAIKSPDPTKSNNAGMGIVHATYKPEYQVLNQWSIPLGNHTAQMAEIAAVEFACKKALKIPGPVLVITDSFYVAESANKELPYWKSNGFVNNKKKPLKHISKWKSIAECLSMKPDITIQHEKGISLQIPVFILKGNALADKLATQGSYVVNAGKRTADGSEFEKRTADGSEFESPKKKAKVE

SEQ ID NO: 7166 - protein, 2085 aa, synthetic construct
MPAAKRVKLDGGDKKYSIGLDIGTNSVGWAVITDEYKVPSKKFKVLGNTDRHSIKKNLIGALLFDSGETAEATRLKRTARRRYTRRKNRICYLQEIFSNEMAKVDDSFFHRLEESFLVEEDKKHERHPIFGNIVDEVAYHEKYPTIYHLRKKLVDSTDKADLRLIYLALAHMIKFRGHFLIEGDLNPDNSDVDKLFIQLVQTYNQLFEENPINASGVDAKAILSARLSKSRRLENLIAQLPGEKKNGLFGNLIALSLGLTPNFKSNFDLAEDAKLQLSKDTYDDDLDNLLAQIGDQYADLFLAAKNLSDAILLSDILRVNTEITKAPLSASMIKRYDEHHQDLTLLKALVRQQLPEKYKEIFFDQSKNGYAGYIDGGASQEEFYKFIKPILEKMDGTEELLVKLNREDLLRKQRTFDNGSIPHQIHLGELHAILRRQEDFYPFLKDNREKIEKILTFRIPYYVGPLARGNSRFAWMTRKSEETITPWNFEEVVDKGASAQSFIERMTNFDKNLPNEKVLPKHSLLYEYFTVYNELTKVKYVTEGMRKPAFLSGEQKKAIVDLLFKTNRKVTVKQLKEDYFKKIECFDSVEISGVEDRFNASLGTYHDLLKIIKDKDFLDNEENEDILEDIVLTLTLFEDREMIEERLKTYAHLFDDKVMKQLKRRRYTGWGRLSRKLINGIRDKQSGKTILDFLKSDGFANRNFMQLIHDDSLTFKEDIQKAQVSGQGDSLHEHIANLAGSPAIKKGILQTVKVVDELVKVMGRHKPENIVIEMARENQTTQKGQKNSRERMKRIEEGIKELGSQILKEHPVENTQLQNEKLYLYYLQNGRDMYVDQELDINRLSDYDVDHIVPQSFLKDDSIDNKVLTRSDKARGKSDNVPSEEVVKKMKNYWRQLLNAKLITQRKFDNLTKAERGGLSELDKAGFIKRQLVETRQITKHVAQILDSRMNTKYDENDKLIREVKVITLKSKLVSDFRKDFQFYKVREINNYHHAHDAYLNAVVGTALIKKYPKLESEFVYGDYKVYDVRKMIAKSEQEIGKATAKYFFYSNIMNFFKTEITLANGEIRKRPLIETNGETGEIVWDKGRDFATVRKVLSMPQVNIVKKTEVQTGGFSKESILPKRNSDKLIARKKDWDPKKYGGFDSPTVAYSVLVVAKVEKGKSKKLKSVKELLGITIMERSSFEKNPIDFLEAKGYKEVKKDLIIKLPKYSLFELENGRKRMLASAGELQKGNELALPSKYVNFLYLASHYEKLKGSPEDNEQKQLFVEQHKHYLDEIIEQISEFSKRVILADANLDKVLSAYNKHRDKPIREQAENIIHLFTLTNLGAPAAFKYFDTTIDRKRYTSTKEVLDATLIHQSITGLYETRIDLSQLGGDGGPAPGGSGSSGGVPWLTQQPLQLTILVPLQEYQEKILSKTALPEDQKQQLKTLFVKYDNLWQHWENQVGHRKIRPHNIATGDYPPRPQKQYPINPKAKPSIQIVIDDLLKQGVLTPQNSTMNTPVYPVPKPDGRWRMVLDYREVNKTIPLTAAQNQHSAGILATIVRQKYKTTLDLANGFWAHPITPESYWLTAFTWQGKQYCWTRLPQGFLNSPALFNADVVDLLKEIPNVQVYVDDIYLSHDDPKEHVQQLEKVFQILLQAGYVVSLKKSEIGQKTVEFLGFNITKEGRGLTDTFKTKLLNITPPKDLKQLQSILGLLNFARNFIPNFAELVQPLYNLIAPAKGKYIEWSEENTKQLNMVIEALNTASNLEERLPEQRLVIKVNTSPSAGYVRYYNETGKKPIMYLNYVFSKAELKFSMLEKLLTTMHKALIKAMDLAMGQEILVYSPIVSMTKIQKTPLPERKALPIRWITWMTYLEDPRIQFHYDKTLPELKHIPDVYTSSQSPVKHPSQYEGVFYTDGSAIKSPDPTKSNNAGMGIVHATYKPEYQVLNQWSIPLGNHTAQMAEIAAVEFACKKALKIPGPVLVITDSFYVAESANKELPYWKSNGFVNNKKKPLKHISKWKSIAECLSMKPDITIQHEKGISLQIPVFILKGNALADKLATQGSYVVNAGKRTADGSEFEKRTADGSEFESPKKKAKVE

SEQ ID NO: 7167 - protein, 2092 aa, synthetic construct
MPAAKRVKLDGGDKKYSIGLDIGTNSVGWAVITDEYKVPSKKFKVLGNTDRHSIKKNLIGALLFDSGETAEATRLKRTARRRYTRRKNRICYLQEIFSNEMAKVDDSFFHRLEESFLVEEDKKHERHPIFGNIVDEVAYHEKYPTIYHLRKKLVDSTDKADLRLIYLALAHMIKFRGHFLIEGDLNPDNSDVDKLFIQLVQTYNQLFEENPINASGVDAKAILSARLSKSRRLENLIAQLPGEKKNGLFGNLIALSLGLTPNFKSNFDLAEDAKLQLSKDTYDDDLDNLLAQIGDQYADLFLAAKNLSDAILLSDILRVNTEITKAPLSASMIKRYDEHHQDLTLLKALVRQQLPEKYKEIFFDQSKNGYAGYIDGGASQEEFYKFIKPILEKMDGTEELLVKLNREDLLRKQRTFDNGSIPHQIHLGELHAILRRQEDFYPFLKDNREKIEKILTFRIPYYVGPLARGNSRFAWMTRKSEETITPWNFEEVVDKGASAQSFIERMTNFDKNLPNEKVLPKHSLLYEYFTVYNELTKVKYVTEGMRKPAFLSGEQKKAIVDLLFKTNRKVTVKQLKEDYFKKIECFDSVEISGVEDRFNASLGTYHDLLKIIKDKDFLDNEENEDILEDIVLTLTLFEDREMIEERLKTYAHLFDDKVMKQLKRRRYTGWGRLSRKLINGIRDKQSGKTILDFLKSDGFANRNFMQLIHDDSLTFKEDIQKAQVSGQGDSLHEHIANLAGSPAIKKGILQTVKVVDELVKVMGRHKPENIVIEMARENQTTQKGQKNSRERMKRIEEGIKELGSQILKEHPVENTQLQNEKLYLYYLQNGRDMYVDQELDINRLSDYDVDHIVPQSFLKDDSIDNKVLTRSDKARGKSDNVPSEEVVKKMKNYWRQLLNAKLITQRKFDNLTKAERGGLSELDKAGFIKRQLVETRQITKHVAQILDSRMNTKYDENDKLIREVKVITLKSKLVSDFRKDFQFYKVREINNYHHAHDAYLNAVVGTALIKKYPKLESEFVYGDYKVYDVRKMIAKSEQEIGKATAKYFFYSNIMNFFKTEITLANGEIRKRPLIETNGETGEIVWDKGRDFATVRKVLSMPQVNIVKKTEVQTGGFSKESILPKRNSDKLIARKKDWDPKKYGGFDSPTVAYSVLVVAKVEKGKSKKLKSVKELLGITIMERSSFEKNPIDFLEAKGYKEVKKDLIIKLPKYSLFELENGRKRMLASAGELQKGNELALPSKYVNFLYLASHYEKLKGSPEDNEQKQLFVEQHKHYLDEIIEQISEFSKRVILADANLDKVLSAYNKHRDKPIREQAENIIHLFTLTNLGAPAAFKYFDTTIDRKRYTSTKEVLDATLIHQSITGLYETRIDLSQLGGDGGPAPGGSGSSGGVLNLEEEYRLHEKPVPSSIDPSWLQLFPTVWAERAGMGLANQVPPVVVELRSGASPVAVRQYPMSKEAREGIRPHIQKFLDLGVLVPCRSPWNTPLLPVKKPGTNDYRPVQDLREINKRVQDIHPTVPNPYNLLSSLPPSYTWYSVLDLKDAFFCLRLHPNSQPLFAFEWKDPEKGNTGQLTWTRLPQGFKNSPTLFNEALHRDLAPFRALNPQVVLLQYVDDLLVAAPTYEDCKKGTQKLLQELSKLGYRVSAKKAQLCQREVTYLGYLLKEGKRWLTPARKATVMKIPVPTTPRQVREFLGTAGFCRLWIPGFASLAAPLYPLTKPSIPFIWTEEHQQAFDHIKKALLSAPALALPDLTKPFTLYIDERAGVARGVLTQTLGPWRRPVAYLSKKLDPVASGWPTCLKAVAAVALLLKDADKLTLGQNVTVIASHSLESIVRQPPDRWMTNARMTHYQSLLLNERVSFAPPAVLNPATLLPVESEATPVHRCSEILAEETGTRRDLEDQPLPGVPTWYTDGSSFITEGKRRAGAPIVDGKRTVWASSLPEGTSAQKAELVALTQALRLAEGKNINIYTDSRYAFATAHIHGAIYKQRGWLTSAGKDIKNKEEILALLEAIHLPRRVAIIHCPGHQRGSNPVATGNRRADEAAKQAALSTRVLAGTTKPAGKRTADGSEFEKRTADGSEFESPKKKAKVE

SEQ ID NO: 7168 - protein, 2216 aa, synthetic construct
MPAAKRVKLDGGDKKYSIGLDIGTNSVGWAVITDEYKVPSKKFKVLGNTDRHSIKKNLIGALLFDSGETAEATRLKRTARRRYTRRKNRICYLQEIFSNEMAKVDDSFFHRLEESFLVEEDKKHERHPIFGNIVDEVAYHEKYPTIYHLRKKLVDSTDKADLRLIYLALAHMIKFRGHFLIEGDLNPDNSDVDKLFIQLVQTYNQLFEENPINASGVDAKAILSARLSKSRRLENLIAQLPGEKKNGLFGNLIALSLGLTPNFKSNFDLAEDAKLQLSKDTYDDDLDNLLAQIGDQYADLFLAAKNLSDAILLSDILRVNTEITKAPLSASMIKRYDEHHQDLTLLKALVRQQLPEKYKEIFFDQSKNGYAGYIDGGASQEEFYKFIKPILEKMDGTEELLVKLNREDLLRKQRTFDNGSIPHQIHLGELHAILRRQEDFYPFLKDNREKIEKILTFRIPYYVGPLARGNSRFAWMTRKSEETITPWNFEEVVDKGASAQSFIERMTNFDKNLPNEKVLPKHSLLYEYFTVYNELTKVKYVTEGMRKPAFLSGEQKKAIVDLLFKTNRKVTVKQLKEDYFKKIECFDSVEISGVEDRFNASLGTYHDLLKIIKDKDFLDNEENEDILEDIVLTLTLFEDREMIEERLKTYAHLFDDKVMKQLKRRRYTGWGRLSRKLINGIRDKQSGKTILDFLKSDGFANRNFMQLIHDDSLTFKEDIQKAQVSGQGDSLHEHIANLAGSPAIKKGILQTVKVVDELVKVMGRHKPENIVIEMARENQTTQKGQKNSRERMKRIEEGIKELGSQILKEHPVENTQLQNEKLYLYYLQNGRDMYVDQELDINRLSDYDVDHIVPQSFLKDDSIDNKVLTRSDKARGKSDNVPSEEVVKKMKNYWRQLLNAKLITQRKFDNLTKAERGGLSELDKAGFIKRQLVETRQITKHVAQILDSRMNTKYDENDKLIREVKVITLKSKLVSDFRKDFQFYKVREINNYHHAHDAYLNAVVGTALIKKYPKLESEFVYGDYKVYDVRKMIAKSEQEIGKATAKYFFYSNIMNFFKTEITLANGEIRKRPLIETNGETGEIVWDKGRDFATVRKVLSMPQVNIVKKTEVQTGGFSKESILPKRNSDKLIARKKDWDPKKYGGFDSPTVAYSVLVVAKVEKGKSKKLKSVKELLGITIMERSSFEKNPIDFLEAKGYKEVKKDLIIKLPKYSLFELENGRKRMLASAGELQKGNELALPSKYVNFLYLASHYEKLKGSPEDNEQKQLFVEQHKHYLDEIIEQISEFSKRVILADANLDKVLSAYNKHRDKPIREQAENIIHLFTLTNLGAPAAFKYFDTTIDRKRYTSTKEVLDATLIHQSITGLYETRIDLSQLGGDGGPAPGGSGSSGGTLGDQGSRGSDPLPEPRVTLTVEGIPTEFLVNTGAEHSVLTKPMGKMGSKRTVVAGATGSKVYPWTTKRLLKIGQKQVTHSFLVIPECPAPLLGRDLLTKLKAQIQFSTEGPQVTWEDRPAMCLVLNLEEEYRLHEKPVPPSIDPSWLQLFPMVWAEKAGMGLANQVPPVVVELKSDASPVAVRQYPMSKEAREGIRPHIQRFLDLGILVPCQSPWNTPLLPVKKPGTNDYRPVQDLREVNKRVQDIHPTVPNPYNLLSSLPPSHTWYSVLDLKDAFFCLKLHPNSQPLFAFEWRDPEKGNTGQLTWTRLPQGFKNSPTLFDEALHRDLASFRALNPQVVMLQYVDDLLVAAPTYRDCKEGTRRLLQELSKLGYRVSAKKAQLCREEVTYLGYLLKGGKRWLTPARKATVMKIPTPTTPRQVREFLGTAGFCRLWIPGFASLAAPLYPLTREKVPFTWTEAHQEAFGRIKEALLSAPALALPDLTKPFALYVDEKEGVARGVLTQTLGPWRRPVAYLSKKLDPVASGWPTCLKAIAAVALLLKDADKLTLGQNVLVIAPHNLESIVRQPPDRWMTNARMTHYQSLLLNERVSFAPPAILNPATLLPVESDDTPIHICSEILAEETGTRPDLRDQPLPGVPAWYTDGSSFIMDGRRQAGAAIVDNKRTVWASNLPEGTSAQKAELIALTQALRLAEGKSINIYTDSRYAFATAHVHGAIYKQRGLLTSAGKDIKNKEEILALLEAIHLPKRVAIIHCPGHQRGTDPVATGNRKADEAAKQAAQSTRILTETTKNAGKRTADGSEFEKRTADGSEFESPKKKAKVE

SEQ ID NO: 7169 - protein, 2094 aa, synthetic construct
MPAAKRVKLDGGDKKYSIGLDIGTNSVGWAVITDEYKVPSKKFKVLGNTDRHSIKKNLIGALLFDSGETAEATRLKRTARRRYTRRKNRICYLQEIFSNEMAKVDDSFFHRLEESFLVEEDKKHERHPIFGNIVDEVAYHEKYPTIYHLRKKLVDSTDKADLRLIYLALAHMIKFRGHFLIEGDLNPDNSDVDKLFIQLVQTYNQLFEENPINASGVDAKAILSARLSKSRRLENLIAQLPGEKKNGLFGNLIALSLGLTPNFKSNFDLAEDAKLQLSKDTYDDDLDNLLAQIGDQYADLFLAAKNLSDAILLSDILRVNTEITKAPLSASMIKRYDEHHQDLTLLKALVRQQLPEKYKEIFFDQSKNGYAGYIDGGASQEEFYKFIKPILEKMDGTEELLVKLNREDLLRKQRTFDNGSIPHQIHLGELHAILRRQEDFYPFLKDNREKIEKILTFRIPYYVGPLARGNSRFAWMTRKSEETITPWNFEEVVDKGASAQSFIERMTNFDKNLPNEKVLPKHSLLYEYFTVYNELTKVKYVTEGMRKPAFLSGEQKKAIVDLLFKTNRKVTVKQLKEDYFKKIECFDSVEISGVEDRFNASLGTYHDLLKIIKDKDFLDNEENEDILEDIVLTLTLFEDREMIEERLKTYAHLFDDKVMKQLKRRRYTGWGRLSRKLINGIRDKQSGKTILDFLKSDGFANRNFMQLIHDDSLTFKEDIQKAQVSGQGDSLHEHIANLAGSPAIKKGILQTVKVVDELVKVMGRHKPENIVIEMARENQTTQKGQKNSRERMKRIEEGIKELGSQILKEHPVENTQLQNEKLYLYYLQNGRDMYVDQELDINRLSDYDVDHIVPQSFLKDDSIDNKVLTRSDKARGKSDNVPSEEVVKKMKNYWRQLLNAKLITQRKFDNLTKAERGGLSELDKAGFIKRQLVETRQITKHVAQILDSRMNTKYDENDKLIREVKVITLKSKLVSDFRKDFQFYKVREINNYHHAHDAYLNAVVGTALIKKYPKLESEFVYGDYKVYDVRKMIAKSEQEIGKATAKYFFYSNIMNFFKTEITLANGEIRKRPLIETNGETGEIVWDKGRDFATVRKVLSMPQVNIVKKTEVQTGGFSKESILPKRNSDKLIARKKDWDPKKYGGFDSPTVAYSVLVVAKVEKGKSKKLKSVKELLGITIMERSSFEKNPIDFLEAKGYKEVKKDLIIKLPKYSLFELENGRKRMLASAGELQKGNELALPSKYVNFLYLASHYEKLKGSPEDNEQKQLFVEQHKHYLDEIIEQISEFSKRVILADANLDKVLSAYNKHRDKPIREQAENIIHLFTLTNLGAPAAFKYFDTTIDRKRYTSTKEVLDATLIHQSITGLYETRIDLSQLGGDGGPAPGGSGSSGGLGIEDEYRLHETSTEPDVSLGSTWLSDFPQAWAETGGMGLAVRQAPLIIPLKATSTPVSIQQYPMSHEARLGIKPHIQRLLDQGILVPCQSPWNTPLLPVKKPGTNDYRPVQDLREVNKRVEDIHPTVPNPYNLLSGLPPSHQWYTVLDLKDAFFCLRLHPTSQPLFAFEWRDPGMGISGQLTWTRLPQGFKNSPTLFNEALHRDLADFRIQHPDLILLQYVDDILLAATSELDCQQGTRALLQTLGDLGYRASAKKAQICQKQVKYLGYLLREGQRWLTEARKETVMGQPVPKTPRQLREFLGKAGFCRLFIPGFAEMAAPLYPLTKPGTLFSWGPDQQKAYQEIKQALLTAPALGLPDLTKPFELFVDEKQGYAKGVLTQKLGPWRRPVAYLSKKLDPVAAGWPPCLRMVAAIAVLTKDAGKLTMGQPLVILAPHAVEALVKQPPDRWLSNARMTHYQAMLLDTDRVQFGPVVALNPATLLPLPEEGAPHDCLEILAETHGTRPDLTDQPIPDADHTWYTDGSSFLQEGQRKAGAAVTTETEVIWAGALPAGTSAQRAELIALTQALKMAEGKRLNVYTDSRYAFATAHIHGEIYRRRGWLTSEGREIKNKSEILALLKALFLPKRLSIIHCLGHQKGDSAEARGNRLADQAAREAAIKTPPDTSTLLIAGKRTADGSEFEKRTADGSEFESPKKKAKVE

SEQ ID NO: 7170 - protein, 2094 aa, synthetic construct
MPAAKRVKLDGGDKKYSIGLDIGTNSVGWAVITDEYKVPSKKFKVLGNTDRHSIKKNLIGALLFDSGETAEATRLKRTARRRYTRRKNRICYLQEIFSNEMAKVDDSFFHRLEESFLVEEDKKHERHPIFGNIVDEVAYHEKYPTIYHLRKKLVDSTDKADLRLIYLALAHMIKFRGHFLIEGDLNPDNSDVDKLFIQLVQTYNQLFEENPINASGVDAKAILSARLSKSRRLENLIAQLPGEKKNGLFGNLIALSLGLTPNFKSNFDLAEDAKLQLSKDTYDDDLDNLLAQIGDQYADLFLAAKNLSDAILLSDILRVNTEITKAPLSASMIKRYDEHHQDLTLLKALVRQQLPEKYKEIFFDQSKNGYAGYIDGGASQEEFYKFIKPILEKMDGTEELLVKLNREDLLRKQRTFDNGSIPHQIHLGELHAILRRQEDFYPFLKDNREKIEKILTFRIPYYVGPLARGNSRFAWMTRKSEETITPWNFEEVVDKGASAQSFIERMTNFDKNLPNEKVLPKHSLLYEYFTVYNELTKVKYVTEGMRKPAFLSGEQKKAIVDLLFKTNRKVTVKQLKEDYFKKIECFDSVEISGVEDRFNASLGTYHDLLKIIKDKDFLDNEENEDILEDIVLTLTLFEDREMIEERLKTYAHLFDDKVMKQLKRRRYTGWGRLSRKLINGIRDKQSGKTILDFLKSDGFANRNFMQLIHDDSLTFKEDIQKAQVSGQGDSLHEHIANLAGSPAIKKGILQTVKVVDELVKVMGRHKPENIVIEMARENQTTQKGQKNSRERMKRIEEGIKELGSQILKEHPVENTQLQNEKLYLYYLQNGRDMYVDQELDINRLSDYDVDHIVPQSFLKDDSIDNKVLTRSDKARGKSDNVPSEEVVKKMKNYWRQLLNAKLITQRKFDNLTKAERGGLSELDKAGFIKRQLVETRQITKHVAQILDSRMNTKYDENDKLIREVKVITLKSKLVSDFRKDFQFYKVREINNYHHAHDAYLNAVVGTALIKKYPKLESEFVYGDYKVYDVRKMIAKSEQEIGKATAKYFFYSNIMNFFKTEITLANGEIRKRPLIETNGETGEIVWDKGRDFATVRKVLSMPQVNIVKKTEVQTGGFSKESILPKRNSDKLIARKKDWDPKKYGGFDSPTVAYSVLVVAKVEKGKSKKLKSVKELLGITIMERSSFEKNPIDFLEAKGYKEVKKDLIIKLPKYSLFELENGRKRMLASAGELQKGNELALPSKYVNFLYLASHYEKLKGSPEDNEQKQLFVEQHKHYLDEIIEQISEFSKRVILADANLDKVLSAYNKHRDKPIREQAENIIHLFTLTNLGAPAAFKYFDTTIDRKRYTSTKEVLDATLIHQSITGLYETRIDLSQLGGDGGPAPGGSGSSGGTLGIEDEYRLHETSTEPDVSLGSTWLSDFPQAWAETGGMGLAVRQAPLIIPLKATSTPVSIQQYPMSHEARLGIKPHIQRLLDQGILVPCQSPWNTPLLPVKKPGTNDYRPVQDLREVNKRVEDIHPTVPNPYNLLSGLPPSHQWYTVLDLKDAFFCLRLHPTSQPLFAFEWRDPGMGISGQLTWTRLPQGFKNSPTLFNEALHRDLADFRIQHPDLILLQYVDDILLAATSELDCQQGTRALLQTLGDLGYRASAKKAQICQKQVKYLGYLLREGQRWLTEARKETVMGQPVPKTPRQLREFLGTAGFCRLWIPGFAEMAAPLYPLTKPGTLFSWGPDQQKAYQEIKQALLTAPALGLPDLTKPFELFVDEKQGYAKGVLTQKLGPWRRPVAYLSKKLDPVAAGWPPCLRMVAAIAVLTKDAGKLTMGQPLVILAPHAVEALVKQPPDRWLSNARMTHYQAMLLDTDRVQFGPVVALNPATLLPLPEEGAPHDCLEILAETHGTRPDLTDQPIPDADHTWYTDGSSFLQEGQRKAGAAVTTETEVIWAGALPAGTSAQRAELIALTQALKMAEGKRLNVYTDSRYAFATAHIHGEIYRRRGWLTSEGREIKNKSEILALLKALFLPKRLSIIHCLGHQKGDSAEARGNRLADQAAREAAIKTPPDTSTLLAGKRTADGSEFEKRTADGSEFESPKKKAKVE

SEQ ID NO: 7171 - protein, 2094 aa, synthetic construct
MPAAKRVKLDGGDKKYSIGLDIGTNSVGWAVITDEYKVPSKKFKVLGNTDRHSIKKNLIGALLFDSGETAEATRLKRTARRRYTRRKNRICYLQEIFSNEMAKVDDSFFHRLEESFLVEEDKKHERHPIFGNIVDEVAYHEKYPTIYHLRKKLVDSTDKADLRLIYLALAHMIKFRGHFLIEGDLNPDNSDVDKLFIQLVQTYNQLFEENPINASGVDAKAILSARLSKSRRLENLIAQLPGEKKNGLFGNLIALSLGLTPNFKSNFDLAEDAKLQLSKDTYDDDLDNLLAQIGDQYADLFLAAKNLSDAILLSDILRVNTEITKAPLSASMIKRYDEHHQDLTLLKALVRQQLPEKYKEIFFDQSKNGYAGYIDGGASQEEFYKFIKPILEKMDGTEELLVKLNREDLLRKQRTFDNGSIPHQIHLGELHAILRRQEDFYPFLKDNREKIEKILTFRIPYYVGPLARGNSRFAWMTRKSEETITPWNFEEVVDKGASAQSFIERMTNFDKNLPNEKVLPKHSLLYEYFTVYNELTKVKYVTEGMRKPAFLSGEQKKAIVDLLFKTNRKVTVKQLKEDYFKKIECFDSVEISGVEDRFNASLGTYHDLLKIIKDKDFLDNEENEDILEDIVLTLTLFEDREMIEERLKTYAHLFDDKVMKQLKRRRYTGWGRLSRKLINGIRDKQSGKTILDFLKSDGFANRNFMQLIHDDSLTFKEDIQKAQVSGQGDSLHEHIANLAGSPAIKKGILQTVKVVDELVKVMGRHKPENIVIEMARENQTTQKGQKNSRERMKRIEEGIKELGSQILKEHPVENTQLQNEKLYLYYLQNGRDMYVDQELDINRLSDYDVDHIVPQSFLKDDSIDNKVLTRSDKARGKSDNVPSEEVVKKMKNYWRQLLNAKLITQRKFDNLTKAERGGLSELDKAGFIKRQLVETRQITKHVAQILDSRMNTKYDENDKLIREVKVITLKSKLVSDFRKDFQFYKVREINNYHHAHDAYLNAVVGTALIKKYPKLESEFVYGDYKVYDVRKMIAKSEQEIGKATAKYFFYSNIMNFFKTEITLANGEIRKRPLIETNGETGEIVWDKGRDFATVRKVLSMPQVNIVKKTEVQTGGFSKESILPKRNSDKLIARKKDWDPKKYGGFDSPTVAYSVLVVAKVEKGKSKKLKSVKELLGITIMERSSFEKNPIDFLEAKGYKEVKKDLIIKLPKYSLFELENGRKRMLASAGELQKGNELALPSKYVNFLYLASHYEKLKGSPEDNEQKQLFVEQHKHYLDEIIEQISEFSKRVILADANLDKVLSAYNKHRDKPIREQAENIIHLFTLTNLGAPAAFKYFDTTIDRKRYTSTKEVLDATLIHQSITGLYETRIDLSQLGGDGGPAPGGSGSSGGTLNIEDEYRLHETSKEPDVSLGSTWLSDFPQAWAETGGMGLAVRQAPLIIPLKATSTPVSIKQYPMSQEARLGIKPHIQRLLDQGILVPCQSPWNTPLLPVKKPGTNDYRPVQDLREVNKRVEDIHPTVPNPYNLLSGLPPSHQWYTVLDLKDAFFCLRLHPTSQPLFAFEWRDPEMGISGQLTWTRLPQGFKNSPTLFNEALHRDLAGFRIQHPDLILLQYVDDLLLAATSELDCQQGTRALLQTLGDLGYRASAKKAQICQKQVKYLGYLLKEGQRWLTEARKETVMGQPIPKTPRQLREFLGTAGFCRLWIPGFAEMAAPLYPLTKPGTLFNWGPDQQKAFQEIKQALLTAPALGLPDLTKPFELFVDEKQGYAKGVLTQKLGPWRRPVAYLSKKLDPVAAGWPPCLRMVAAIAVLTKDAGKLTMGQPLVILAPHAVEALVKQPPDRWLSNARMTHYQALLLDTDRVQFGPVVALNPATLLPLPEEGLQHDCLDILAEAHGTRSDLMDQPLPDADHTWYTDGSSFLQEGQRKAGAAVTTETEVIWARALPAGTSAQRAELIALTQALKMAEGKKLNVYTDSRYAFATAHIHGEIYRRRGWLTSEGKEIKNKDEILALLKALFLPKRLSIIHCPGHQKGNSAEARGNRMADQAAREVATRETPETSTLLAGKRTADGSEFEKRTADGSEFESPKKKAKVE

SEQ ID NO: 7172 - protein, 2114 aa, synthetic construct
MPAAKRVKLDGGDKKYSIGLDIGTNSVGWAVITDEYKVPSKKFKVLGNTDRHSIKKNLIGALLFDSGETAEATRLKRTARRRYTRRKNRICYLQEIFSNEMAKVDDSFFHRLEESFLVEEDKKHERHPIFGNIVDEVAYHEKYPTIYHLRKKLVDSTDKADLRLIYLALAHMIKFRGHFLIEGDLNPDNSDVDKLFIQLVQTYNQLFEENPINASGVDAKAILSARLSKSRRLENLIAQLPGEKKNGLFGNLIALSLGLTPNFKSNFDLAEDAKLQLSKDTYDDDLDNLLAQIGDQYADLFLAAKNLSDAILLSDILRVNTEITKAPLSASMIKRYDEHHQDLTLLKALVRQQLPEKYKEIFFDQSKNGYAGYIDGGASQEEFYKFIKPILEKMDGTEELLVKLNREDLLRKQRTFDNGSIPHQIHLGELHAILRRQEDFYPFLKDNREKIEKILTFRIPYYVGPLARGNSRFAWMTRKSEETITPWNFEEVVDKGASAQSFIERMTNFDKNLPNEKVLPKHSLLYEYFTVYNELTKVKYVTEGMRKPAFLSGEQKKAIVDLLFKTNRKVTVKQLKEDYFKKIECFDSVEISGVEDRFNASLGTYHDLLKIIKDKDFLDNEENEDILEDIVLTLTLFEDREMIEERLKTYAHLFDDKVMKQLKRRRYTGWGRLSRKLINGIRDKQSGKTILDFLKSDGFANRNFMQLIHDDSLTFKEDIQKAQVSGQGDSLHEHIANLAGSPAIKKGILQTVKVVDELVKVMGRHKPENIVIEMARENQTTQKGQKNSRERMKRIEEGIKELGSQILKEHPVENTQLQNEKLYLYYLQNGRDMYVDQELDINRLSDYDVDHIVPQSFLKDDSIDNKVLTRSDKARGKSDNVPSEEVVKKMKNYWRQLLNAKLITQRKFDNLTKAERGGLSELDKAGFIKRQLVETRQITKHVAQILDSRMNTKYDENDKLIREVKVITLKSKLVSDFRKDFQFYKVREINNYHHAHDAYLNAVVGTALIKKYPKLESEFVYGDYKVYDVRKMIAKSEQEIGKATAKYFFYSNIMNFFKTEITLANGEIRKRPLIETNGETGEIVWDKGRDFATVRKVLSMPQVNIVKKTEVQTGGFSKESILPKRNSDKLIARKKDWDPKKYGGFDSPTVAYSVLVVAKVEKGKSKKLKSVKELLGITIMERSSFEKNPIDFLEAKGYKEVKKDLIIKLPKYSLFELENGRKRMLASAGELQKGNELALPSKYVNFLYLASHYEKLKGSPEDNEQKQLFVEQHKHYLDEIIEQISEFSKRVILADANLDKVLSAYNKHRDKPIREQAENIIHLFTLTNLGAPAAFKYFDTTIDRKRYTSTKEVLDATLIHQSITGLYETRIDLSQLGGDGGPAPGGSGSSGGTLNIEDEYRLHETSKEPDVSLGSTWLSDFPQAWAETGGMGLAVRQAPLIIPLKATSTPVSIKQYPMSQEARLGIKPHIQRLLDQGILVPCQSPWNTPLLPVKKPGTNDYRPVQDLREVNKRVEDIHPTVPNPYNLLSGLPPSHQWYTVLDLKDAFFCLRLHPTSQPLFAFEWRDPEMGISGQLTWTRLPQGFKNSPTLFNEALHRDLADFRIQHPDLILLQYVDDLLLAATSELDCQQGTRALLQTLGNLGYRASAKKAQICQKQVKYLGYLLKEGQRWLTEARKETVMGQPTPKTPRQLREFLGKAGFCRLFIPGFAEMAAPLYPLTKPGTLFNWGPDQQKAYQEIKQALLTAPALGLPDLTKPFELFVDEKQGYAKGVLTQKLGPWRRPVAYLSKKLDPVAAGWPPCLRMVAAIAVLTKDAGKLTMGQPLVILAPHAVEALVKQPPDRWLSNARMTHYQALLLDTDRVQFGPVVALNPATLLPLPEEGLQHNCLDILAEAHGTRPDLTDQPLPDADHTWYTDGSSLLQEGQRKAGAAVTTETEVIWAKALPAGTSAQRAELIALTQALKMAEGKKLNVYTDSRYAFATAHIHGEIYRRRGWLTSEGKEIKNKDEILALLKALFLPKRLSIIHCPGHQKGHSAEARGNRMADQAARKAAITETPDTSTLLIENSSPSGGSKRTADGSEFEAGKRTADGSEFEKRTADGSEFESPKKKAKVE

SEQ ID NO: 7173 - protein, 2094 aa, synthetic construct
MPAAKRVKLDGGDKKYSIGLDIGTNSVGWAVITDEYKVPSKKFKVLGNTDRHSIKKNLIGALLFDSGETAEATRLKRTARRRYTRRKNRICYLQEIFSNEMAKVDDSFFHRLEESFLVEEDKKHERHPIFGNIVDEVAYHEKYPTIYHLRKKLVDSTDKADLRLIYLALAHMIKFRGHFLIEGDLNPDNSDVDKLFIQLVQTYNQLFEENPINASGVDAKAILSARLSKSRRLENLIAQLPGEKKNGLFGNLIALSLGLTPNFKSNFDLAEDAKLQLSKDTYDDDLDNLLAQIGDQYADLFLAAKNLSDAILLSDILRVNTEITKAPLSASMIKRYDEHHQDLTLLKALVRQQLPEKYKEIFFDQSKNGYAGYIDGGASQEEFYKFIKPILEKMDGTEELLVKLNREDLLRKQRTFDNGSIPHQIHLGELHAILRRQEDFYPFLKDNREKIEKILTFRIPYYVGPLARGNSRFAWMTRKSEETITPWNFEEVVDKGASAQSFIERMTNFDKNLPNEKVLPKHSLLYEYFTVYNELTKVKYVTEGMRKPAFLSGEQKKAIVDLLFKTNRKVTVKQLKEDYFKKIECFDSVEISGVEDRFNASLGTYHDLLKIIKDKDFLDNEENEDILEDIVLTLTLFEDREMIEERLKTYAHLFDDKVMKQLKRRRYTGWGRLSRKLINGIRDKQSGKTILDFLKSDGFANRNFMQLIHDDSLTFKEDIQKAQVSGQGDSLHEHIANLAGSPAIKKGILQTVKVVDELVKVMGRHKPENIVIEMARENQTTQKGQKNSRERMKRIEEGIKELGSQILKEHPVENTQLQNEKLYLYYLQNGRDMYVDQELDINRLSDYDVDHIVPQSFLKDDSIDNKVLTRSDKARGKSDNVPSEEVVKKMKNYWRQLLNAKLITQRKFDNLTKAERGGLSELDKAGFIKRQLVETRQITKHVAQILDSRMNTKYDENDKLIREVKVITLKSKLVSDFRKDFQFYKVREINNYHHAHDAYLNAVVGTALIKKYPKLESEFVYGDYKVYDVRKMIAKSEQEIGKATAKYFFYSNIMNFFKTEITLANGEIRKRPLIETNGETGEIVWDKGRDFATVRKVLSMPQVNIVKKTEVQTGGFSKESILPKRNSDKLIARKKDWDPKKYGGFDSPTVAYSVLVVAKVEKGKSKKLKSVKELLGITIMERSSFEKNPIDFLEAKGYKEVKKDLIIKLPKYSLFELENGRKRMLASAGELQKGNELALPSKYVNFLYLASHYEKLKGSPEDNEQKQLFVEQHKHYLDEIIEQISEFSKRVILADANLDKVLSAYNKHRDKPIREQAENIIHLFTLTNLGAPAAFKYFDTTIDRKRYTSTKEVLDATLIHQSITGLYETRIDLSQLGGDGGPAPGGSGSSGGTLNIEDEHRLHETSKEPDVSLGSTWLSDFPQAWAETGGMGLAVRQAPLIIPLKATSTPVSIKQYPMSQEARLGIKPHIQRLLDQGILVPCQSPWNTPLLPVKKPGTNDYRPVQDLREVNKRVEDIHPTVPNPYNLLSGLPPSHQWYTVLDLKDAFFCLRLHPTSQPLFAFEWRDPEMGISGQLTWTRLPQGFKNSPTLFNEALHRDLADFRIQHPDLILLQYVDDLLLAATSELDCQQGTRALLQTLGNLGYRASAKKAQICQKQVKYLGYLLKEGQRWLTEARKETVMGQPTPKTPRQLREFLGTAGFCRLWIPGFAEMAAPLYPLTKPGTLFNWGPDQQKAYQEIKQALLTAPALGLPDLTKPFELFVDEKQGYAKGVLTQKLGPWRRPVAYLSKKLDPVAAGWPPCLRMVAAIAVLTKDAGKLTMGQPLVILAPHAVEALVKQPPDRWLSNARMTHYQALLLDTDRVQFGPVVALNPATLLPLPEEGLQHNCLDILAEAHGTRPDLTDQPLPDADHTWYTDGSSLLQEGQRKAGAAVTTETEVIWAKALPAGTSAQRAELIALTQALKMAEGKKLNVYTDSRYAFATAHIHGEIYRRRGWLTSEGKEIKNKDEILALLKALFLPKRLSIIHCPGHQKGHSAEARGNRMADQAARKAAITETPDTSTLLAGKRTADGSEFEKRTADGSEFESPKKKAKVE

SEQ ID NO: 7174 - protein, 2114 aa, synthetic construct; identical to SEQ ID NO: 7172

SEQ ID NO: 7175 - protein, 2094 aa, synthetic construct
MPAAKRVKLDGGDKKYSIGLDIGTNSVGWAVITDEYKVPSKKFKVLGNTDRHSIKKNLIGALLFDSGETAEATRLKRTARRRYTRRKNRICYLQEIFSNEMAKVDDSFFHRLEESFLVEEDKKHERHPIFGNIVDEVAYHEKYPTIYHLRKKLVDSTDKADLRLIYLALAHMIKFRGHFLIEGDLNPDNSDVDKLFIQLVQTYNQLFEENPINASGVDAKAILSARLSKSRRLENLIAQLPGEKKNGLFGNLIALSLGLTPNFKSNFDLAEDAKLQLSKDTYDDDLDNLLAQIGDQYADLFLAAKNLSDAILLSDILRVNTEITKAPLSASMIKRYDEHHQDLTLLKALVRQQLPEKYKEIFFDQSKNGYAGYIDGGASQEEFYKFIKPILEKMDGTEELLVKLNREDLLRKQRTFDNGSIPHQIHLGELHAILRRQEDFYPFLKDNREKIEKILTFRIPYYVGPLARGNSRFAWMTRKSEETITPWNFEEVVDKGASAQSFIERMTNFDKNLPNEKVLPKHSLLYEYFTVYNELTKVKYVTEGMRKPAFLSGEQKKAIVDLLFKTNRKVTVKQLKEDYFKKIECFDSVEISGVEDRFNASLGTYHDLLKIIKDKDFLDNEENEDILEDIVLTLTLFEDREMIEERLKTYAHLFDDKVMKQLKRRRYTGWGRLSRKLINGIRDKQSGKTILDFLKSDGFANRNFMQLIHDDSLTFKEDIQKAQVSGQGDSLHEHIANLAGSPAIKKGILQTVKVVDELVKVMGRHKPENIVIEMARENQTTQKGQKNSRERMKRIEEGIKELGSQILKEHPVENTQLQNEKLYLYYLQNGRDMYVDQELDINRLSDYDVDHIVPQSFLKDDSIDNKVLTRSDKARGKSDNVPSEEVVKKMKNYWRQLLNAKLITQRKFDNLTKAERGGLSELDKAGFIKRQLVETRQITKHVAQILDSRMNTKYDENDKLIREVKVITLKSKLVSDFRKDFQFYKVREINNYHHAHDAYLNAVVGTALIKKYPKLESEFVYGDYKVYDVRKMIAKSEQEIGKATAKYFFYSNIMNFFKTEITLANGEIRKRPLIETNGETGEIVWDKGRDFATVRKVLSMPQVNIVKKTEVQTGGFSKESILPKRNSDKLIARKKDWDPKKYGGFDSPTVAYSVLVVAKVEKGKSKKLKSVKELLGITIMERSSFEKNPIDFLEAKGYKEVKKDLIIKLPKYSLFELENGRKRMLASAGELQKGNELALPSKYVNFLYLASHYEKLKGSPEDNEQKQLFVEQHKHYLDEIIEQISEFSKRVILADANLDKVLSAYNKHRDKPIREQAENIIHLFTLTNLGAPAAFKYFDTTIDRKRYTSTKEVLDATLIHQSITGLYETRIDLSQLGGDGGPAPGGSGSSGGTLNIEDEHRLHETSKEPDVSLGSTWLSDFPQAWAETGGMGLAVRQAPLIIPLKATSTPVSIKQYPMSQEARLGIKPHIQRLLDQGILVPCQSPWNTPLLPVKKPGTNDYRPVQDLREVNKRVEDIHPTVPNPYNLLSGLPPSHQWYTVLDLKDAFFCLRLHPTSQPLFAFEWRDPEMGISGQLTWTRLPQGFKNSPTLFDEALHRDLADFRIQHPDLILLQYVDDLLLAATSELDCQQGTRALLQTLGNLGYRASAKKAQICQKQVKYLGYLLKEGQRWLTEARKETVMGQPTPKTPRQLREFLGTAGFCRLWIPGFAEMAAPLYPLTKTGTLFNWGPDQQKAYQEIKQALLTAPALGLPDLTKPFELFVDEKQGYAKGVLTQKLGPWRRPVAYLSKKLDPVAAGWPPCLRMVAAIAVLTKDAGKLTMGQPLVILAPHAVEALVKQPPDRWLSNARMTHYQALLLDTDRVQFGPVVALNPATLLPLPEEGLQHNCLDILAEAHGTRPDLTDQPLPDADHTWYTDGSSLLQEGQRKAGAAVTTETEVIWAKALPAGTSAQRAELIALTQALKMAEGKKLNVYTDSRYAFATAHIHGEIYRRRGLLTSEGKEIKNKDEILALLKALFLPKRLSIIHCPGHQKGHSAEARGNRMADQAARKAAITETPDTSTLLAGKRTADGSEFEKRTADGSEFESPKKKAKVE

SEQ ID NO: 7176 - protein, 2094 aa, synthetic construct; identical to SEQ ID NO: 7173

SEQ ID NO: 7177 - protein, 2085 aa, synthetic construct
MPAAKRVKLDGGDKKYSIGLDIGTNSVGWAVITDEYKVPSKKFKVLGNTDRHSIKKNLIGALLFDSGETAEATRLKRTARRRYTRRKNRICYLQEIFSNEMAKVDDSFFHRLEESFLVEEDKKHERHPIFGNIVDEVAYHEKYPTIYHLRKKLVDSTDKADLRLIYLALAHMIKFRGHFLIEGDLNPDNSDVDKLFIQLVQTYNQLFEENPINASGVDAKAILSARLSKSRRLENLIAQLPGEKKNGLFGNLIALSLGLTPNFKSNFDLAEDAKLQLSKDTYDDDLDNLLAQIGDQYADLFLAAKNLSDAILLSDILRVNTEITKAPLSASMIKRYDEHHQDLTLLKALVRQQLPEKYKEIFFDQSKNGYAGYIDGGASQEEFYKFIKPILEKMDGTEELLVKLNREDLLRKQRTFDNGSIPHQIHLGELHAILRRQEDFYPFLKDNREKIEKILTFRIPYYVGPLARGNSRFAWMTRKSEETITPWNFEEVVDKGASAQSFIERMTNFDKNLPNEKVLPKHSLLYEYFTVYNELTKVKYVTEGMRKPAFLSGEQKKAIVDLLFKTNRKVTVKQLKEDYFKKIECFDSVEISGVEDRFNASLGTYHDLLKIIKDKDFLDNEENEDILEDIVLTLTLFEDREMIEERLKTYAHLFDDKVMKQLKRRRYTGWGRLSRKLINGIRDKQSGKTILDFLKSDGFANRNFMQLIHDDSLTFKEDIQKAQVSGQGDSLHEHIANLAGSPAIKKGILQTVKVVDELVKVMGRHKPENIVIEMARENQTTQKGQKNSRERMKRIEEGIKELGSQILKEHPVENTQLQNEKLYLYYLQNGRDMYVDQELDINRLSDYDVDHIVPQSFLKDDSIDNKVLTRSDKARGKSDNVPSEEVVKKMKNYWRQLLNAKLITQRKFDNLTKAERGGLSELDKAGFIKRQLVETRQITKHVAQILDSRMNTKYDENDKLIREVKVITLKSKLVSDFRKDFQFYKVREINNYHHAHDAYLNAVVGTALIKKYPKLESEFVYGDYKVYDVRKMIAKSEQEIGKATAKYFFYSNIMNFFKTEITLANGEIRKRPLIETNGETGEIVWDKGRDFATVRKVLSMPQVNIVKKTEVQTGGFSKESILPKRNSDKLIARKKDWDPKKYGGFDSPTVAYSVLVVAKVEKGKSKKLKSVKELLGITIMERSSFEKNPIDFLEAKGYKEVKKDLIIKLPKYSLFELENGRKRMLASAGELQKGNELALPSKYVNFLYLASHYEKLKGSPEDNEQKQLFVEQHKHYLDEIIEQISEFSKRVILADANLDKVLSAYNKHRDKPIREQAENIIHLFTLTNLGAPAAFKYFDTTIDRKRYTSTKEVLDATLIHQSITGLYETRIDLSQLGGDGGPAPGGSGSSGGIPWLMKKPLQLTTLVPLQEYEERLLKQTMLTGSYKEKLQSLFLKYDALWQHWENQVGHRRIKPHHIATGTVNPRPQKQYPINPKAKASIQTVINDLLKQGVLIQQNSIMNTPVYPVPKPDGKWRMVLDYREVNKTIPLIAAQNQHSAGILSSIFRGKYKTTLDLSNGFWAHSITPESYWLTAFTWLGQQYCWTRLPQGFLNSPALFNADVVDLLKEVPNVQVYVDDIYISHDDPREHLEQLEKVFSLLLNAGYVVSLKKSEIAQHEVEFLGFNITKEGRGLTETFKQKLLNITPPRDLKQLQSILGKLNFARNFIPNFSELVKPLYNIIATAPGKYITWTTDNSQQLQNIISMLNSAENLEERNPEVRLIMKVNTSPSAGYIRFYNEFAKRPIMYLNYVYTKAEVKFTNTEKLLTTIHKGLIKALDLGMGQEILVYSPIVSMTKIQKTPLPERKALPIRWITWMSYLEDPRIQFHYDKTLPELQQVPTVTDDIIAKIKHPSEFSMVFYTDGSAIKHPNVNKSHNAGMGIAQVQFKPEFTVINTWSIPLGDHTAQLAEVAAVEFACKKALKIDGPVLIVTDSFYVAESVNKELPYWQSNGFFNNKKKPLKHVSKWKSIADCIQLKPDIIIIHEKGHQPTASTFHTEGNNLADKLATQGSYVVNAGKRTADGSEFEKRTADGSEFESPKKKAKVE

SEQ ID NO: 7178 - protein, 2092 aa, synthetic construct
MPAAKRVKLDGGDKKYSIGLDIGTNSVGWAVITDEYKVPSKKFKVLGNTDRHSIKKNLIGALLFDSGETAEATRLKRTARRRYTRRKNRICYLQEIFSNEMAKVDDSFFHRLEESFLVEEDKKHERHPIFGNIVDEVAYHEKYPTIYHLRKKLVDSTDKADLRLIYLALAHMIKFRGHFLIEGDLNPDNSDVDKLFIQLVQTYNQLFEENPINASGVDAKAILSARLSKSRRLENLIAQLPGEKKNGLFGNLIALSLGLTPNFKSNFDLAEDAKLQLSKDTYDDDLDNLLAQIGDQYADLFLAAKNLSDAILLSDILRVNTEITKAPLSASMIKRYDEHHQDLTLLKALVRQQLPEKYKEIFFDQSKNGYAGYIDGGASQEEFYKFIKPILEKMDGTEELLVKLNREDLLRKQRTFDNGSIPHQIHLGELHAILRRQEDFYPFLKDNREKIEKILTFRIPYYVGPLARGNSRFAWMTRKSEETITPWNFEEVVDKGASAQSFIERMTNFDKNLPNEKVLPKHSLLYEYFTVYNELTKVKYVTEGMRKPAFLSGEQKKAIVDLLFKTNRKVTVKQLKEDYFKKIECFDSVEISGVEDRFNASLGTYHDLLKIIKDKDFLDNEENEDILEDIVLTLTLFEDREMIEERLKTYAHLFDDKVMKQLKRRRYTGWGRLSRKLINGIRDKQSGKTILDFLKSDGFANRNFMQLIHDDSLTFKEDIQKAQVSGQGDSLHEHIANLAGSPAIKKGILQTVKVVDELVKVMGRHKPENIVIEMARENQTTQKGQKNSRERMKRIEEGIKELGSQILKEHPVENTQLQNEKLYLYYLQNGRDMYVDQELDINRLSDYDVDHIVPQSFLKDDSIDNKVLTRSDKARGKSDNVPSEEVVKKMKNYWRQLLNAKLITQRKFDNLTKAERGGLSELDKAGFIKRQLVETRQITKHVAQILDSRMNTKYDENDKLIREVKVITLKSKLVSDFRKDFQFYKVREINNYHHAHDAYLNAVVGTALIKKYPKLESEFVYGDYKVYDVRKMIAKSEQEIGKATAKYFFYSNIMNFFKTEITLANGEIRKRPLIETNGETGEIVWDKGRDFATVRKVLSMPQVNIVKKTEVQTGGFSKESILPKRNSDKLIARKKDWDPKKYGGFDSPTVAYSVLVVAKVEKGKSKKLKSVKELLGITIMERSSFEKNPIDFLEAKGYKEVKKDLIIKLPKYSLFELENGRKRMLASAGELQKGNELALPSKYVNFLYLASHYEKLKGSPEDNEQKQLFVEQHKHYLDEIIEQISEFSKRVILADANLDKVLSAYNKHRDKPIREQAENIIHLFTLTNLGAPAAFKYFDTTIDRKRYTSTKEVLDATLIHQSITGLYETRIDLSQLGGDGGPAPGGSGSSGGVLNLEEEYRLHEKPVPSSIDPSWLQLFPTVWAERAGMGLANQVPPVVVELRSGASPVAVRQYPMSKEAREGIRPHIQRFLDLGVLVPCQSPWNTPLLPVKKPGTNDYRPVQDLREINKRVQDIHPTVPNPYNLLSSLPPSHTWYSVLDLKDAFFCLKLHPNSQPLFAFEWRDPEKGNTGQLTWTRLPQGFKNSPTLFNEALHRDLAPFRALNPQVVLLQYVDDLLVAAPTYRDCKEGTQKLLQELSKLGYRVSAKKAQLCQKEVTYLGYLLKEGKRWLTPARKATVMKIPPPTTPRQVREFLGTAGFCRLWIPGFASLAAPLYPLTKPSIPFIWTEEHQKAFDRIKEALLSAPALALPDLTKPFTLYVDERAGVARGVLTQTLGPWRRPVAYLSKKLDPVASGWPTCLKAVAAVALLLKDADKLTLGQNVTVIASHSLESIVRQPPDRWMTNARMTHYQSLLLNERVSFAPPAVLNPATLLPVESEATPVHRCSEILAEETGTRRDLKDQPLPGVPAWYTDGSSFIAEGKRRAGAAIVDGKRTVWASSLPEGTSAQKAELVALTQALRLAEGKDINIYTDSRYAFATAHIHGAIYKQRGWLTSAGKDIKNKEEILALLEAIHLPKRVAIIHCPGHQKGNDPVATGNRRADEAAKQAALSTRVLAETTKPAGKRTADGSEFEKRTADGSEFESPKKKAKVE

SEQ ID NO: 7179 - protein, 2094 aa, synthetic construct
MPAAKRVKLDGGDKKYSIGLDIGTNSVGWAVITDEYKVPSKKFKVLGNTDRHSIKKNLIGALLFDSGETAEATRLKRTARRRYTRRKNRICYLQEIFSNEMAKVDDSFFHRLEESFLVEEDKKHERHPIFGNIVDEVAYHEKYPTIYHLRKKLVDSTDKADLRLIYLALAHMIKFRGHFLIEGDLNPDNSDVDKLFIQLVQTYNQLFEENPINASGVDAKAILSARLSKSRRLENLIAQLPGEKKNGLFGNLIALSLGLTPNFKSNFDLAEDAKLQLSKDTYDDDLDNLLAQIGDQYADLFLAAKNLSDAILLSDILRVNTEITKAPLSASMIKRYDEHHQDLTLLKALVRQQLPEKYKEIFFDQSKNGYAGYIDGGASQEEFYKFIKPILEKMDGTEELLVKLNREDLLRKQRTFDNGSIPHQIHLGELHAILRRQEDFYPFLKDNREKIEKILTFRIPYYVGPLARGNSRFAWMTRKSEETITPWNFEEVVDKGASAQSFIERMTNFDKNLPNEKVLPKHSLLYEYFTVYNELTKVKYVTEGMRKPAFLSGEQKKAIVDLLFKTNRKVTVKQLKEDYFKKIECFDSVEISGVEDRFNASLGTYHDLLKIIKDKDFLDNEENEDILEDIVLTLTLFEDREMIEERLKTYAHLFDDKVMKQLKRRRYTGWGRLSRKLINGIRDKQSGKTILDFLKSDGFANRNFMQLIHDDSLTFKEDIQKAQVSGQGDSLHEHIANLAGSPAIKKGILQTVKVVDELVKVMGRHKPENIVIEMARENQTTQKGQKNSRERMKRIEEGIKELGSQILKEHPVENTQLQNEKLYLYYLQNGRDMYVDQELDINRLSDYDVDHIVPQSFLKDDSIDNKVLTRSDKARGKSDNVPSEEVVKKMKNYWRQLLNAKLITQRKFDNLTKAERGGLSELDKAGFIKRQLVETRQITKHVAQILDSRMNTKYDENDKLIREVKVITLKSKLVSDFRKDFQFYKVREINNYHHAHDAYLNAVVGTALIKKYPKLESEFVYGDYKVYDVRKMIAKSEQEIGKATAKYFFYSNIMNFFKTEITLANGEIRKRPLIETNGETGEIVWDKGRDFATVRKVLSMPQVNIVKKTEVQTGGFSKESILPKRNSDKLIARKKDWDPKKYGGFDSPTVAYSVLVVAKVEKGKSKKLKSVKELLGITIMERSSFEKNPIDFLEAKGYKEVKKDLIIKLPKYSLFELENGRKRMLASAGELQKGNELALPSKYVNFLYLASHYEKLKGSPEDNEQKQLFVEQHKHYLDEIIEQISEFSKRVILADANLDKVLSAYNKHRDKPIREQAENIIHLFTLTNLGAPAAFKYFDTTIDRKRYTSTKEVLDATLIHQSITGLYETRIDLSQLGGDGGPAPGGSGSSGGTLNIEDEYRLHETSKEPDVPLGSTWLSDFPQAWAETGGMGLAVRQAPLIIPLKATSTPVSIKQYPMSQEARLGIKPHIQRLLDQGILVPCQSPWNTPLLPVKKPGTNDYRPVQDLREVNKRVEDIHPTVPNPYNLLSGLPPSHQWYTVLDLKDAFFCLRLHPTSQPLFAFEWRDPEMGISGQLTWTRLPQGFKNSPTLFNEALHRDLADFRIQHPDLILLQYVDDLLLAATSEQDCQRGTRALLQTLGNLGYRASAKKAQICQKQVKYLGYLLKEGQRWLTEARKETVMGQPTPKTPRQLREFLGTAGFCRLWIPGFAEMAAPLYPLTKPGTLFNWGPDQQKAYQEIKQALLTAPALGLPDLTKPFELFVDEKQGYAKGVLTQKLGPWRRPVAYLSKKLDPVAAGWPPCLRMVAAIAVLTKDAGKLTMGQPLVILAPHAVEALVKQPPDRWLSNARMTHYQAMLLDTDRVQFGPVVALNPATLLPLPEKEAPHDCLEILAETHGTRPDLTDQPIPDADYTWYTDGSSFLQEGQRRAGAAVTTETEVIWARALPAGTSAQRAELIALTQALKMAEGKKLNVYTDSRYAFATAHVHGEIYRRRGWLTSEGREIKNKNEILALLKALFLPKRLSIIHCPGHQKGNSAEARGNRMADQAAREAAMKAVLETSTLLAGKRTADGSEFEKRTADGSEFESPKKKAKVE

SEQ ID NO: 7180 - protein, 2094 aa, synthetic construct
MPAAKRVKLDGGDKKYSIGLDIGTNSVGWAVITDEYKVPSKKFKVLGNTDRHSIKKNLIGALLFDSGETAEATRLKRTARRRYTRRKNRICYLQEIFSNEMAKVDDSFFHRLEESFLVEEDKKHERHPIFGNIVDEVAYHEKYPTIYHLRKKLVDSTDKADLRLIYLALAHMIKFRGHFLIEGDLNPDNSDVDKLFIQLVQTYNQLFEENPINASGVDAKAILSARLSKSRRLENLIAQLPGEKKNGLFGNLIALSLGLTPNFKSNFDLAEDAKLQLSKDTYDDDLDNLLAQIGDQYADLFLAAKNLSDAILLSDILRVNTEITKAPLSASMIKRYDEHHQDLTLLKALVRQQLPEKYKEIFFDQSKNGYAGYIDGGASQEEFYKFIKPILEKMDGTEELLVKLNREDLLRKQRTFDNGSIPHQIHLGELHAILRRQEDFYPFLKDNREKIEKILTFRIPYYVGPLARGNSRFAWMTRKSEETITPWNFEEVVDKGASAQSFIERMTNFDKNLPNEKVLPKHSLLYEYFTVYNELTKVKYVTEGMRKPAFLSGEQKKAIVDLLFKTNRKVTVKQLKEDYFKKIECFDSVEISGVEDRFNASLGTYHDLLKIIKDKDFLDNEENEDILEDIVLTLTLFEDREMIEERLKTYAHLFDDKVMKQLKRRRYTGWGRLSRKLINGIRDKQSGKTILDFLKSDGFANRNFMQLIHDDSLTFKEDIQKAQVSGQGDSLHEHIANLAGSPAIKKGILQTVKVVDELVKVMGRHKPENIVIEMARENQTTQKGQKNSRERMKRIEEGIKELGSQILKEHPVENTQLQNEKLYLYYLQNGRDMYVDQELDINRLSDYDVDHIVPQSFLKDDSIDNKVLTRSDKARGKSDNVPSEEVVKKMKNYWRQLLNAKLITQRKFDNLTKAERGGLSELDKAGFIKRQLVETRQITKHVAQILDSRMNTKYDENDKLIREVKVITLKSKLVSDFRKDFQFYKVREINNYHHAHDAYLNAVVGTALIKKYPKLESEFVYGDYKVYDVRKMIAKSEQEIGKATAKYFFYSNIMNFFKTEITLANGEIRKRPLIETNGETGEIVWDKGRDFATVRKVLSMPQVNIVKKTEVQTGGFSKESILPKRNSDKLIARKKDWDPKKYGGFDSPTVAYSVLVVAKVEKGKSKKLKSVKELLGITIMERSSFEKNPIDFLEAKGYKEVKKDLIIKLPKYSLFELENGRKRMLASAGELQKGNELALPSKYVNFLYLASHYEKLKGSPEDNEQKQLFVEQHKHYLDEIIEQISEFSKRVILADANLDKVLSAYNKHRDKPIREQAENIIHLFTLTNLGAPAAFKYFDTTIDRKRYTSTKEVLDATLIHQSITGLYETRIDLSQLGGDGGPAPGGSGSSGGTLNIEDEYRLHETSKEPDVPLGSTWLSDFPQAWAETGGMGLAVRQAPLIIPLKATSTPVSIKQYPMSQEARLGIKPHIQRLLDQGILVPCQSPWNTPLLPVKKPGTNDYRPVQDLREVNKRVEDIHPTVPNPYNLLSGLPPSHQWYTVLDLKDAFFCLRLHPTSQPLFAFEWRDPEMGISGQLTWTRLPQGFKNSPTLFNEALHRDLADFRIQHPDLILLQYVDDLLLAATSEQDCQRGTRALLQTLGNLGYRASAKKAQICQKQVKYLGYLLKEGQRWLTEARKETVMGQPTPKTPRQLREFLGKAGFCRLFIPGFAEMAAPLYPLTKPGTLFNWGPDQQKAYQEIKQALLTAPALGLPDLTKPFELFVDEKQGYAKGVLTQKLGPWRRPVAYLSKKLDPVAAGWPPCLRMVAAIAVLTKDAGKLTMGQPLVILAPHAVEALVKQPPDRWLSNARMTHYQAMLLDTDRVQFGPVVALNPATLLPLPEKEAPHDCLEILAETHGTRPDLTDQPIPDADYTWYTDGSSFLQEGQRRAGAAVTTETEVIWARALPAGTSAQRAELIALTQALKMAEGKKLNVYTDSRYAFATAHVHGEIYRRRGWLTSEGREIKNKNEILALLKALFLPKRLSIIHCPGHQKGNSAEARGNRMADQAAREAAMKAVLETSTLLAGKRTADGSEFEKRTADGSEFESPKKKAKVE

SEQ ID NO: 7181 - protein, 2096 aa, synthetic construct
MPAAKRVKLDGGDKKYSIGLDIGTNSVGWAVITDEYKVPSKKFKVLGNTDRHSIKKNLIGALLFDSGETAEATRLKRTARRRYTRRKNRICYLQEIFSNEMAKVDDSFFHRLEESFLVEEDKKHERHPIFGNIVDEVAYHEKYPTIYHLRKKLVDSTDKADLRLIYLALAHMIKFRGHFLIEGDLNPDNSDVDKLFIQLVQTYNQLFEENPINASGVDAKAILSARLSKSRRLENLIAQLPGEKKNGLFGNLIALSLGLTPNFKSNFDLAEDAKLQLSKDTYDDDLDNLLAQIGDQYADLFLAAKNLSDAILLSDILRVNTEITKAPLSASMIKRYDEHHQDLTLLKALVRQQLPEKYKEIFFDQSKNGYAGYIDGGASQEEFYKFIKPILEKMDGTEELLVKLNREDLLRKQRTFDNGSIPHQIHLGELHAILRRQEDFYPFLKDNREKIEKILTFRIPYYVGPLARGNSRFAWMTRKSEETITPWNFEEVVDKGASAQSFIERMTNFDKNLPNEKVLPKHSLLYEYFTVYNELTKVKYVTEGMRKPAFLSGEQKKAIVDLLFKTNRKVTVKQLKEDYFKKIECFDSVEISGVEDRFNASLGTYHDLLKIIKDKDFLDNEENEDILEDIVLTLTLFEDREMIEERLKTYAHLFDDKVMKQLKRRRYTGWGRLSRKLINGIRDKQSGKTILDFLKSDGFANRNFMQLIHDDSLTFKEDIQKAQVSGQGDSLHEHIANLAGSPAIKKGILQTVKVVDELVKVMGRHKPENIVIEMARENQTTQKGQKNSRERMKRIEEGIKELGSQILKEHPVENTQLQNEKLYLYYLQNGRDMYVDQELDINRLSDYDVDHIVPQSFLKDDSIDNKVLTRSDKARGKSDNVPSEEVVKKMKNYWRQLLNAKLITQRKFDNLTKAERGGLSELDKAGFIKRQLVETRQITKHVAQILDSRMNTKYDENDKLIREVKVITLKSKLVSDFRKDFQFYKVREINNYHHAHDAYLNAVVGTALIKKYPKLESEFVYGDYKVYDVRKMIAKSEQEIGKATAKYFFYSNIMNFFKTEITLANGEIRKRPLIETNGETGEIVWDKGRDFATVRKVLSMPQVNIVKKTEVQTGGFSKESILPKRNSDKLIARKKDWDPKKYGGFDSPTVAYSVLVVAKVEKGKSKKLKSVKELLGITIMERSSFEKNPIDFLEAKGYKEVKKDLIIKLPKYSLFELENGRKRMLASAGELQKGNELALPSKYVNFLYLASHYEKLKGSPEDNEQKQLFVEQHKHYLDEIIEQISEFSKRVILADANLDKVLSAYNKHRDKPIREQAENIIHLFTLTNLGAPAAFKYFDTTIDRKRYTSTKEVLDATLIHQSITGLYETRIDLSQLGGDGGPAPGSSGGSGGTAPLEEEYRLFLEAPIQNVTLLEQWKREIPKVWAEINPPGLASTQAPIHVQLLSTALPVRVRQYPITLEAKRSLRETIRKFRAAGILRPVHSPWNTPLLPVRKSGTSEYRMVQDLREVNKRVETIHPTVPNPYTLLSLLPPDRIWYSVLDLKDAFFCIPLAPESQLIFAFEWADAEEGESGQLTWTRLPQGFKNSPTLFNEALNRDLQGFRLDHPSVSLLQYVDDLLIAADTQAACLSATRDLLMTLAELGYRVSGKKAQLCQEEVTYLGFKIHKGSRSLSNSRTQAILQIPVPKTKRQVREFLGTIGYCRLWIPGFAELAQPLYAATRPGNDPLVWGEKEEEAFQSLKLALTQPPALALPSLDKPFQLFVEETSGAAKGVLTQALGPWKRPVAYLSKRLDPVAAGWPRCLRAIAAAALLTREASKLTFGQDIEITSSHNLESLLRSPPDKWLTNARITQYQVLLLDPPRVRFKQTAALNPATLLPETDDTLPIHHCLDTLDSLTSTRPDLTDQPLAQAEATLFTDGSSYIRDGKRYAGAAVVTLDSVIWAEPLPIGTSAQKAELIALTKALEWSKDKSVNIYTDSRYAFATLHVHGMIYRERGWLTAGGKAIKNAPEILALLTAVWLPKRVAVMHCKGHQKDDAPTSTGNRRADEVAREVAIRPLSTQATISAGKRTADGSEFEKRTADGSEFESPKKKAKVE

SEQ ID NO: 7182 - protein, 2093 aa, synthetic construct
MPAAKRVKLDGGDKKYSIGLDIGTNSVGWAVITDEYKVPSKKFKVLGNTDRHSIKKNLIGALLFDSGETAEATRLKRTARRRYTRRKNRICYLQEIFSNEMAKVDDSFFHRLEESFLVEEDKKHERHPIFGNIVDEVAYHEKYPTIYHLRKKLVDSTDKADLRLIYLALAHMIKFRGHFLIEGDLNPDNSDVDKLFIQLVQTYNQLFEENPINASGVDAKAILSARLSKSRRLENLIAQLPGEKKNGLFGNLIALSLGLTPNFKSNFDLAEDAKLQLSKDTYDDDLDNLLAQIGDQYADLFLAAKNLSDAILLSDILRVNTEITKAPLSASMIKRYDEHHQDLTLLKALVRQQLPEKYKEIFFDQSKNGYAGYIDGGASQEEFYKFIKPILEKMDGTEELLVKLNREDLLRKQRTFDNGSIPHQIHLGELHAILRRQEDFYPFLKDNREKIEKILTFRIPYYVGPLARGNSRFAWMTRKSEETITPWNFEEVVDKGASAQSFIERMTNFDKNLPNEKVLPKHSLLYEYFTVYNELTKVKYVTEGMRKPAFLSGEQKKAIVDLLFKTNRKVTVKQLKEDYFKKIECFDSVEISGVEDRFNASLGTYHDLLKIIKDKDFLDNEENEDILEDIVLTLTLFEDREMIEERLKTYAHLFDDKVMKQLKRRRYTGWGRLSRKLINGIRDKQSGKTILDFLKSDGFANRNFMQLIHDDSLTFKEDIQKAQVSGQGDSLHEHIANLAGSPAIKKGILQTVKVVDELVKVMGRHKPENIVIEMARENQTTQKGQKNSRERMKRIEEGIKELGSQILKEHPVENTQLQNEKLYLYYLQNGRDMYVDQELDINRLSDYDVDHIVPQSFLKDDSIDNKVLTRSDKARGKSDNVPSEEVVKKMKNYWRQLLNAKLITQRKFDNLTKAERGGLSELDKAGFIKRQLVETRQITKHVAQILDSRMNTKYDENDKLIREVKVITLKSKLVSDFRKDFQFYKVREINNYHHAHDAYLNAVVGTALIKKYPKLESEFVYGDYKVYDVRKMIAKSEQEIGKATAKYFFYSNIMNFFKTEITLANGEIRKRPLIETNGETGEIVWDKGRDFATVRKVLSMPQVNIVKKTEVQTGGFSKESILPKRNSDKLIARKKDWDPKKYGGFDSPTVAYSVLVVAKVEKGKSKKLKSVKELLGITIMERSSFEKNPIDFLEAKGYKEVKKDLIIKLPKYSLFELENGRKRMLASAGELQKGNELALPSKYVNFLYLASHYEKLKGSPEDNEQKQLFVEQHKHYLDEIIEQISEFSKRVILADANLDKVLSAYNKHRDKPIREQAENIIHLFTLTNLGAPAAFKYFDTTIDRKRYTSTKEVLDATLIHQSITGLYETRIDLSQLGGDGGPAPGSSGGSGGTLQLEEEYRLFEPESTQKQEMDIWLKNFPQAWAETGGMGTAHCQAPVLIQLKATATPISIRQYPMPHEAYQGIKPHIRRMLDQGILKPCQSPWNTPLLPVKKPGTEDYRPVQDLREVNKRVEDIHPTVPNPYNLLSTLPPSHPWYTVLDLKDAFFCLRLHSESQLLFAFEWRDPEIGLSGQLTWTRLPQGFKNSPTLFNEALHSDLADFRVRYPALVLLQYVDDLLLAAATRTECLEGTKALLETLGNKGYRASAKKAQICLQEVTYLGYSLKDGQRWLTKARKEAILSIPVPKNSRQVREFLGTAGYCRLWIPGFAELAAPLYPLTRPGTLFQWGTEQQLAFEDIKKALLSSPALGLPDITKPFELFIDENSGFAKGVLVQKLGPWKRPVAYLSKKLDTVASGWPPCLRMVAAIAILVKDAGKLTLGQPLTILTSHPVEALVRQPPNKWLSNARMTHYQAMLLDAERVHFGPTVSLNPATLLPLPSGGNHHDCLQILAETHGTRPDLTDQPLPDADLTWYTDGSSFIRNGEREAGAAVTTESEVIWAAPLPPGTSAQRAELIALTQALKMAEGKKLTVYTDSRYAFATTHVHGEIYRRRGWLTSEGKEIKNKNEILALLEALFLPKRLSIIHCPGHQKGDSPQAKGNRLADDTAKKAATETHSSLTVLPAGKRTADGSEFEKRTADGSEFESPKKKAKVE

SEQ ID NO: 7183 - protein, 2216 aa, synthetic construct
MPAAKRVKLDGGDKKYSIGLDIGTNSVGWAVITDEYKVPSKKFKVLGNTDRHSIKKNLIGALLFDSGETAEATRLKRTARRRYTRRKNRICYLQEIFSNEMAKVDDSFFHRLEESFLVEEDKKHERHPIFGNIVDEVAYHEKYPTIYHLRKKLVDSTDKADLRLIYLALAHMIKFRGHFLIEGDLNPDNSDVDKLFIQLVQTYNQLFEENPINASGVDAKAILSARLSKSRRLENLIAQLPGEKKNGLFGNLIALSLGLTPNFKSNFDLAEDAKLQLSKDTYDDDLDNLLAQIGDQYADLFLAAKNLSDAILLSDILRVNTEITKAPLSASMIKRYDEHHQDLTLLKALVRQQLPEKYKEIFFDQSKNGYAGYIDGGASQEEFYKFIKPILEKMDGTEELLVKLNREDLLRKQRTFDNGSIPHQIHLGELHAILRRQEDFYPFLKDNREKIEKILTFRIPYYVGPLARGNSRFAWMTRKSEETITPWNFEEVVDKGASAQSFIERMTNFDKNLPNEKVLPKHSLLYEYFTVYNELTKVKYVTEGMRKPAFLSGEQKKAIVDLLFKTNRKVTVKQLKEDYFKKIECFDSVEISGVEDRFNASLGTYHDLLKIIKDKDFLDNEENEDILEDIVLTLTLFEDREMIEERLKTYAHLFDDKVMKQLKRRRYTGWGRLSRKLINGIRDKQSGKTILDFLKSDGFANRNFMQLIHDDSLTFKEDIQKAQVSGQGDSLHEHIANLAGSPAIKKGILQTVKVVDELVKVMGRHKPENIVIEMARENQTTQKGQKNSRERMKRIEEGIKELGSQILKEHPVENTQLQNEKLYLYYLQNGRDMYVDQELDINRLSDYDVDHIVPQSFLKDDSIDNKVLTRSDKARGKSDNVPSEEVVKKMKNYWRQLLNAKLITQRKFDNLTKAERGGLSELDKAGFIKRQLVETRQITKHVAQILDSRMNTKYDENDKLIREVKVITLKSKLVSDFRKDFQFYKVREINNYHHAHDAYLNAVVGTALIKKYPKLESEFVYGDYKVYDVRKMIAKSEQEIGKATAKYFFYSNIMNFFKTEITLANGEIRKRPLIETNGETGEIVWDKGRDFATVRKVLSMPQVNIVKKTEVQTGGFSKESILPKRNSDKLIARKKDWDPKKYGGFDSPTVAYSVLVVAKVEKGKSKKLKSVKELLGITIMERSSFEKNPIDFLEAKGYKEVKKDLIIKLPKYSLFELENGRKRMLASAGELQKGNELALPSKYVNFLYLASHYEKLKGSPEDNEQKQLFVEQHKHYLDEIIEQISEFSKRVILADANLDKVLSAYNKHRDKPIREQAENIIHLFTLTNLGAPAAFKYFDTTIDRKRYTSTKEVLDATLIHQSITGLYETRIDLSQLGGDGGPAPGSSGGSGGTLGDQGSRGSDPLPEPRVTLTVEGIPTEFLVNTGAEHSVLTKPMGKMGSKRTVVAGATGSKVYPWTTKRLLKIGQKQVTHSFLVIPECPAPLLGRDLLTKLKAQIQFSTEGPQVTWEDRPAMCLVLNLEEEYRLHEKPVPPSIDPSWLQLFPMVWAEKAGMGLANQVPPVVVELKSDASPVAVRQYPMSKEAREGIRPHIQRFLDLGILVPCQSPWNTPLLPVKKPGTNDYRPVQDLREVNKRVQDIHPTVPNPYNLLSSLPPSHTWYSVLDLKDAFFCLKLHPNSQPLFAFEWRDPEKGNTGQLTWTRLPQGFKNSPTLFDEALHRDLASFRALNPQVVMLQYVDDLLVAAPTYRDCKEGTRRLLQELSKLGYRVSAKKAQLCREEVTYLGYLLKGGKRWLTPARKATVMKIPTPTTPRQVREFLGTAGFCRLWIPGFASLAAPLYPLTREKVPFTWTEAHQEAFGRIKEALLSAPALALPDLTKPFALYVDEKEGVARGVLTQTLGPWRRPVAYLSKKLDPVASGWPTCLKAIAAVALLLKDADKLTLGQNVLVIAPHNLESIVRQPPDRWMTNARMTHYQSLLLNERVSFAPPAILNPATLLPVESDDTPIHICSEILAEETGTRPDLRDQPLPGVPAWYTDGSSFIMDGRRQAGAAIVDNKRTVWASNLPEGTSAQKAELIALTQALRLAEGKSINIYTDSRYAFATAHVHGAIYKQRGLLTSAGKDIKNKEEILALLEAIHLPKRVAIIHCPGHQRGTDPVATGNRKADEAAKQAAQSTRILTETTKNAGKRTADGSEFEKRTADGSEFESPKKKAKVE

SEQ ID NO: 7184 - protein, 2216 aa, synthetic construct
MPAAKRVKLDGGDKKYSIGLDIGTNSVGWAVITDEYKVPSKKFKVLGNTDRHSIKKNLIGALLFDSGETAEATRLKRTARRRYTRRKNRICYLQEIFSNEMAKVDDSFFHRLEESFLVEEDKKHERHPIFGNIVDEVAYHEKYPTIYHLRKKLVDSTDKADLRLIYLALAHMIKFRGHFLIEGDLNPDNSDVDKLFIQLVQTYNQLFEENPINASGVDAKAILSARLSKSRRLENLIAQLPGEKKNGLFGNLIALSLGLTPNFKSNFDLAEDAKLQLSKDTYDDDLDNLLAQIGDQYADLFLAAKNLSDAILLSDILRVNTEITKAPLSASMIKRYDEHHQDLTLLKALVRQQLPEKYKEIFFDQSKNGYAGYIDGGASQEEFYKFIKPILEKMDGTEELLVKLNREDLLRKQRTFDNGSIPHQIHLGELHAILRRQEDFYPFLKDNREKIEKILTFRIPYYVGPLARGNSRFAWMTRKSEETITPWNFEEVVDKGASAQSFIERMTNFDKNLPNEKVLPKHSLLYEYFTVYNELTKVKYVTEGMRKPAFLSGEQKKAIVDLLFKTNRKVTVKQLKEDYFKKIECFDSVEISGVEDRFNASLGTYHDLLKIIKDKDFLDNEENEDILEDIVLTLTLFEDREMIEERLKTYAHLFDDKVMKQLKRRRYTGWGRLSRKLINGIRDKQSGKTILDFLKSDGFANRNFMQLIHDDSLTFKEDIQKAQVSGQGDSLHEHIANLAGSPAIKKGILQTVKVVDELVKVMGRHKPENIVIEMARENQTTQKGQKNSRERMKRIEEGIKELGSQILKEHPVENTQLQNEKLYLYYLQNGRDMYVDQELDINRLSDYDVDHIVPQSFLKDDSIDNKVLTRSDKARGKSDNVPSEEVVKKMKNYWRQLLNAKLITQRKFDNLTKAERGGLSELDKAGFIKRQLVETRQITKHVAQILDSRMNTKYDENDKLIREVKVITLKSKLVSDFRKDFQFYKVREINNYHHAHDAYLNAVVGTALIKKYPKLESEFVYGDYKVYDVRKMIAKSEQEIGKATAKYFFYSNIMNFFKTEITLANGEIRKRPLIETNGETGEIVWDKGRDFATVRKVLSMPQVNIVKKTEVQTGGFSKESILPKRNSDKLIARKKDWDPKKYGGFDSPTVAYSVLVVAKVEKGKSKKLKSVKELLGITIMERSSFEKNPIDFLEAKGYKEVKKDLIIKLPKYSLFELENGRKRMLASAGELQKGNELALPSKYVNFLYLASHYEKLKGSPEDNEQKQLFVEQHKHYLDEIIEQISEFSKRVILADANLDKVLSAYNKHRDKPIREQAENIIHLFTLTNLGAPAAFKYFDTTIDRKRYTSTKEVLDATLIHQSITGLYETRIDLSQLGGDGGPAPGSSGGSGGTLGDQGSRGSDPLPEPRVTLTVEGIPTEFLVNTGAEHSVLTKPMGKMGSKRTVVAGATGSKVYPWTTKRLLKIGQKQVTHSFLVIPECPAPLLGRDLLTKLKAQIQFSTEGPQVTWEDRPAMCLVLNLEEEYRLHEKPVPPSIDPSWLQLFPMVWAEKAGMGLANQVPPVVVELKSDASPVAVRQYPMSKEAREGIRPHIQRFLDLGILVPCQSPWNTPLLPVKKPGTNDYRPVQDLREVNKRVQDIHPTVPNPYNLLSSLPPSHTWYSVLDLKDAFFCLKLHPNSQPLFAFEWRDPEKGNTGQLTWTRLPQGFKNSPTLFNEALHRDLASFRALNPQVVMLQYVDDLLVAAPTYRDCKEGTRRLLQELSKLGYRVSAKKAQLCREEVTYLGYLLKGGKRWLTPARKATVMKIPTPTTPRQVREFLGKAGFCRLFIPGFASLAAPLYPLTRPKVPFTWTEAHQEAFGRIKEALLSAPALALPDLTKPFALYVDEKEGVARGVLTQTLGPWRRPVAYLSKKLDPVASGWPTCLKAIAAVALLLKDADKLTLGQNVLVIAPHNLESIVRQPPDRWMTNARMTHYQSLLLNERVSFAPPAILNPATLLPVESDDTPIHICSEILAEETGTRPDLRDQPLPGVPAWYTDGSSFIMDGRRQAGAAIVDNKRTVWASNLPEGTSAQKAELIALTQALRLAEGKSINIYTDSRYAFATAHVHGAIYKQRGWLTSAGKDIKNKEEILALLEAIHLPKRVAIIHCPGHQRGTDPVATGNRKADEAAKQAAQSTRILTETTKNAGKRTADGSEFEKRTADGSEFESPKKKAKVE

SEQ ID NO: 7185 - protein, 2094 aa, synthetic construct
MPAAKRVKLDGGDKKYSIGLDIGTNSVGWAVITDEYKVPSKKFKVLGNTDRHSIKKNLIGALLFDSGETAEATRLKRTARRRYTRRKNRICYLQEIFSNEMAKVDDSFFHRLEESFLVEEDKKHERHPIFGNIVDEVAYHEKYPTIYHLRKKLVDSTDKADLRLIYLALAHMIKFRGHFLIEGDLNPDNSDVDKLFIQLVQTYNQLFEENPINASGVDAKAILSARLSKSRRLENLIAQLPGEKKNGLFGNLIALSLGLTPNFKSNFDLAEDAKLQLSKDTYDDDLDNLLAQIGDQYADLFLAAKNLSDAILLSDILRVNTEITKAPLSASMIKRYDEHHQDLTLLKALVRQQLPEKYKEIFFDQSKNGYAGYIDGGASQEEFYKFIKPILEKMDGTEELLVKLNREDLLRKQRTFDNGSIPHQIHLGELHAILRRQEDFYPFLKDNREKIEKILTFRIPYYVGPLARGNSRFAWMTRKSEETITPWNFEEVVDKGASAQSFIERMTNFDKNLPNEKVLPKHSLLYEYFTVYNELTKVKYVTEGMRKPAFLSGEQKKAIVDLLFKTNRKVTVKQLKEDYFKKIECFDSVEISGVEDRFNASLGTYHDLLKIIKDKDFLDNEENEDILEDIVLTLTLFEDREMIEERLKTYAHLFDDKVMKQLKRRRYTGWGRLSRKLINGIRDKQSGKTILDFLKSDGFANRNFMQLIHDDSLTFKEDIQKAQVSGQGDSLHEHIANLAGSPAIKKGILQTVKVVDELVKVMGRHKPENIVIEMARENQTTQKGQKNSRERMKRIEEGIKELGSQILKEHPVENTQLQNEKLYLYYLQNGRDMYVDQELDINRLSDYDVDHIVPQSFLKDDSIDNKVLTRSDKARGKSDNVPSEEVVKKMKNYWRQLLNAKLITQRKFDNLTKAERGGLSELDKAGFIKRQLVETRQITKHVAQILDSRMNTKYDENDKLIREVKVITLKSKLVSDFRKDFQFYKVREINNYHHAHDAYLNAVVGTALIKKYPKLESEFVYGDYKVYDVRKMIAKSEQEIGKATAKYFFYSNIMNFFKTEITLANGEIRKRPLIETNGETGEIVWDKGRDFATVRKVLSMPQVNIVKKTEVQTGGFSKESILPKRNSDKLIARKKDWDPKKYGGFDSPTVAYSVLVVAKVEKGKSKKLKSVKELLGITIMERSSFEKNPIDFLEAKGYKEVKKDLIIKLPKYSLFELENGRKRMLASAGELQKGNELALPSKYVNFLYLASHYEKLKGSPEDNEQKQLFVEQHKHYLDEIIEQISEFSKRVILADANLDKVLSAYNKHRDKPIREQAENIIHLFTLTNLGAPAAFKYFDTTIDRKRYTSTKEVLDATLIHQSITGLYETRIDLSQLGGDGGPAPGSSGGSGGLGIEDEYRLHETSTEPDVSLGSTWLSDFPQAWAETGGMGLAVRQAPLIIPLKATSTPVSIQQYPMSHEARLGIKPHIQRLLDQGILVPCQSPWNTPLLPVKKPGTNDYRPVQDLREVNKRVEDIHPTVPNPYNLLSGLPPSHQWYTVLDLKDAFFCLRLHPTSQPLFAFEWRDPGMGISGQLTWTRLPQGFKNSPTLFNEALHRDLADFRIQHPDLILLQYVDDILLAATSELDCQQGTRALLQTLGDLGYRASAKKAQICQKQVKYLGYLLREGQRWLTEARKETVMGQPVPKTPRQLREFLGKAGFCRLFIPGFAEMAAPLYPLTKPGTLFSWGPDQQKAYQEIKQALLTAPALGLPDLTKPFELFVDEKQGYAKGVLTQKLGPWRRPVAYLSKKLDPVAAGWPPCLRMVAAIAVLTKDAGKLTMGQPLVILAPHAVEALVKQPPDRWLSNARMTHYQAMLLDTDRVQFGPVVALNPATLLPLPEEGAPHDCLEILAETHGTRPDLTDQPIPDADHTWYTDGSSFLQEGQRKAGAAVTTETEVIWAGALPAGTSAQRAELIALTQALKMAEGKRLNVYTDSRYAFATAHIHGEIYRRRGWLTSEGREIKNKSEILALLKALFLPKRLSIIHCLGHQKGDSAEARGNRLADQAAREAAIKTPPDTSTLLIAGKRTADGSEFEKRTADGSEFESPKKKAKVE

SEQ ID NO: 7186 - protein, 2094 aa, synthetic construct; identical to SEQ ID NO: 7185

SEQ ID NO: 7187 - protein, 2088 aa, synthetic construct
MPAAKRVKLDGGDKKYSIGLDIGTNSVGWAVITDEYKVPSKKFKVLGNTDRHSIKKNLIGALLFDSGETAEATRLKRTARRRYTRRKNRICYLQEIFSNEMAKVDDSFFHRLEESFLVEEDKKHERHPIFGNIVDEVAYHEKYPTIYHLRKKLVDSTDKADLRLIYLALAHMIKFRGHFLIEGDLNPDNSDVDKLFIQLVQTYNQLFEENPINASGVDAKAILSARLSKSRRLENLIAQLPGEKKNGLFGNLIALSLGLTPNFKSNFDLAEDAKLQLSKDTYDDDLDNLLAQIGDQYADLFLAAKNLSDAILLSDILRVNTEITKAPLSASMIKRYDEHHQDLTLLKALVRQQLPEKYKEIFFDQSKNGYAGYIDGGASQEEFYKFIKPILEKMDGTEELLVKLNREDLLRKQRTFDNGSIPHQIHLGELHAILRRQEDFYPFLKDNREKIEKILTFRIPYYVGPLARGNSRFAWMTRKSEETITPWNFEEVVDKGASAQSFIERMTNFDKNLPNEKVLPKHSLLYEYFTVYNELTKVKYVTEGMRKPAFLSGEQKKAIVDLLFKTNRKVTVKQLKEDYFKKIECFDSVEISGVEDRFNASLGTYHDLLKIIKDKDFLDNEENEDILEDIVLTLTLFEDREMIEERLKTYAHLFDDKVMKQLKRRRYTGWGRLSRKLINGIRDKQSGKTILDFLKSDGFANRNFMQLIHDDSLTFKEDIQKAQVSGQGDSLHEHIANLAGSPAIKKGILQTVKVVDELVKVMGRHKPENIVIEMARENQTTQKGQKNSRERMKRIEEGIKELGSQILKEHPVENTQLQNEKLYLYYLQNGRDMYVDQELDINRLSDYDVDHIVPQSFLKDDSIDNKVLTRSDKARGKSDNVPSEEVVKKMKNYWRQLLNAKLITQRKFDNLTKAERGGLSELDKAGFIKRQLVETRQITKHVAQILDSRMNTKYDENDKLIREVKVITLKSKLVSDFRKDFQFYKVREINNYHHAHDAYLNAVVGTALIKKYPKLESEFVYGDYKVYDVRKMIAKSEQEIGKATAKYFFYSNIMNFFKTEITLANGEIRKRPLIETNGETGEIVWDKGRDFATVRKVLSMPQVNIVKKTEVQTGGFSKESILPKRNSDKLIARKKDWDPKKYGGFDSPTVAYSVLVVAKVEKGKSKKLKSVKELLGITIMERSSFEKNPIDFLEAKGYKEVKKDLIIKLPKYSLFELENGRKRMLASAGELQKGNELALPSKYVNFLYLASHYEKLKGSPEDNEQKQLFVEQHKHYLDEIIEQISEFSKRVILADANLDKVLSAYNKHRDKPIREQAENIIHLFTLTNLGAPAAFKYFDTTIDRKRYTSTKEVLDATLIHQSITGLYETRIDLSQLGGDGGPAPGSSGGSGGTLQLDDEYRLYSPLVKPDQNIQFWLEQFPQAWAETAGMGLAKQVPPQVIQLKASATPVSVRQYPLSKEAQEGIRPHVQRLIQQGILVPVQSPWNTPLLPVRKPGTNDYRPVQDLREVNKRVQDIHPTVPNPYNLLCALPPQRSWYTVLDLKDAFFCLRLHPTSQPLFAFEWRDPGTGRTGQLTWTRLPQGFKNSPTIFDEALHRDLANFRIQHPQVTLLQYVDDLLLAGATKQDCLEGTKALLLELSDLGYRASAKKAQICRREVTYLGYSLRDGQRWLTEARKKTVVQIPAPTTAKQVREFLGTAGFCRLWIPGFATLAAPLYPLTKEKGEFSWAPEHQKAFDAIKKALLSAPALALPDVTKPFTLYVDERKGVARGVLTQTLGPWRRPVAYLSKKLDPVASGWPVCLKAIAAVAILVKDADKLTLGQNITVIAPHALENIVRQPPDRWMTNARMTHYQSLLLTERVTFAPPAALNPATLLPEETDEPVTHDCHQLLIEETGVRKDLTDIPLTGEVLTWFTDGSSYVVEGKRMAGAAVVDGTRTIWASSLPEGTSAQKAELMALTQALRLAEGKSINIYTDSRYAFATAHVHGAIYKQRGLLTSAGREIKNKEEILSLLEALHLPKRLAIIHCPGHQKAKDPISRGNQMADRVAKQAAQGVNLLAGKRTADGSEFEKRTADGSEFESPKKKAKVE

SEQ ID NO: 7188 - protein, 2085 aa, synthetic construct
MPAAKRVKLDGGDKKYSIGLDIGTNSVGWAVITDEYKVPSKKFKVLGNTDRHSIKKNLIGALLFDSGETAEATRLKRTARRRYTRRKNRICYLQEIFSNEMAKVDDSFFHRLEESFLVEEDKKHERHPIFGNIVDEVAYHEKYPTIYHLRKKLVDSTDKADLRLIYLALAHMIKFRGHFLIEGDLNPDNSDVDKLFIQLVQTYNQLFEENPINASGVDAKAILSARLSKSRRLENLIAQLPGEKKNGLFGNLIALSLGLTPNFKSNFDLAEDAKLQLSKDTYDDDLDNLLAQIGDQYADLFLAAKNLSDAILLSDILRVNTEITKAPLSASMIKRYDEHHQDLTLLKALVRQQLPEKYKEIFFDQSKNGYAGYIDGGASQEEFYKFIKPILEKMDGTEELLVKLNREDLLRKQRTFDNGSIPHQIHLGELHAILRRQEDFYPFLKDNREKIEKILTFRIPYYVGPLARGNSRFAWMTRKSEETITPWNFEEVVDKGASAQSFIERMTNFDKNLPNEKVLPKHSLLYEYFTVYNELTKVKYVTEGMRKPAFLSGEQKKAIVDLLFKTNRKVTVKQLKEDYFKKIECFDSVEISGVEDRFNASLGTYHDLLKIIKDKDFLDNEENEDILEDIVLTLTLFEDREMIEERLKTYAHLFDDKVMKQLKRRRYTGWGRLSRKLINGIRDKQSGKTILDFLKSDGFANRNFMQLIHDDSLTFKEDIQKAQVSGQGDSLHEHIANLAGSPAIKKGILQTVKVVDELVKVMGRHKPENIVIEMARENQTTQKGQKNSRERMKRIEEGIKELGSQILKEHPVENTQLQNEKLYLYYLQNGRDMYVDQELDINRLSDYDVDHIVPQSFLKDDSIDNKVLTRSDKARGKSDNVPSEEVVKKMKNYWRQLLNAKLITQRKFDNLTKAERGGLSELDKAGFIKRQLVETRQITKHVAQILDSRMNTKYDENDKLIREVKVITLKSKLVSDFRKDFQFYKVREINNYHHAHDAYLNAVVGTALIKKYPKLESEFVYGDYKVYDVRKMIAKSEQEIGKATAKYFFYSNIMNFFKTEITLANGEIRKRPLIETNGETGEIVWDKGRDFATVRKVLSMPQVNIVKKTEVQTGGFSKESILPKRNSDKLIARKKDWDPKKYGGFDSPTVAYSVLVVAKVEKGKSKKLKSVKELLGITIMERSSFEKNPIDFLEAKGYKEVKKDLIIKLPKYSLFELENGRKRMLASAGELQKGNELALPSKYVNFLYLASHYEKLKGSPEDNEQKQLFVEQHKHYLDEIIEQISEFSKRVILADANLDKVLSAYNKHRDKPIREQAENIIHLFTLTNLGAPAAFKYFDTTIDRKRYTSTKEVLDATLIHQSITGLYETRIDLSQLGGDGGPAPGSSGGSGGIPWLMKKPLQLTTLVPLQEYEERLLKQTMLTGSYKEKLQSLFLKYDALWQHWENQVGHRRIKPHHIATGTVNPRPQKQYPINPKAKASIQTVINDLLKQGVLIQQNSIMNTPVYPVPKPDGKWRMVLDYREVNKTIPLIAAQNQHSAGILSSIFRGKYKTTLDLSNGFWAHSITPESYWLTAFTWLGQQYCWTRLPQGFLNSPALFNADVVDLLKEVPNVQVYVDDIYISHDDPREHLEQLEKVFSLLLNAGYVVSLKKSEIAQHEVEFLGFNITKEGRGLTETFKQKLLNITPPRDLKQLQSILGKLNFARNFIPNFSELVKPLYNIIATAPGKYITWTTDNSQQLQNIISMLNSAENLEERNPEVRLIMKVNTSPSAGYIRFYNEFAKRPIMYLNYVYTKAEVKFTNTEKLLTTIHKGLIKALDLGMGQEILVYSPIVSMTKIQKTPLPERKALPIRWITWMSYLEDPRIQFHYDKTLPELQQVPTVTDDIIAKIKHPSEFSMVFYTDGSAIKHPNVNKSHNAGMGIAQVQFKPEFTVINTWSIPLGDHTAQLAEVAAVEFACKKALKIDGPVLIVTDSFYVAESVNKELPYWQSNGFFNNKKKPLKHVSKWKSIADCIQLKPDIIIIHEKGHQPTASTFHTEGNNLADKLATQGSYVVNAGKRTADGSEFEKRTADGSEFESPKKKAKVE

SEQ ID NO: 7189 - protein, 2174 aa, synthetic construct
MPAAKRVKLDGGDKKYSIGLDIGTNSVGWAVITDEYKVPSKKFKVLGNTDRHSIKKNLIGALLFDSGETAEATRLKRTARRRYTRRKNRICYLQEIFSNEMAKVDDSFFHRLEESFLVEEDKKHERHPIFGNIVDEVAYHEKYPTIYHLRKKLVDSTDKADLRLIYLALAHMIKFRGHFLIEGDLNPDNSDVDKLFIQLVQTYNQLFEENPINASGVDAKAILSARLSKSRRLENLIAQLPGEKKNGLFGNLIALSLGLTPNFKSNFDLAEDAKLQLSKDTYDDDLDNLLAQIGDQYADLFLAAKNLSDAILLSDILRVNTEITKAPLSASMIKRYDEHHQDLTLLKALVRQQLPEKYKEIFFDQSKNGYAGYIDGGASQEEFYKFIKPILEKMDGTEELLVKLNREDLLRKQRTFDNGSIPHQIHLGELHAILRRQEDFYPFLKDNREKIEKILTFRIPYYVGPLARGNSRFAWMTRKSEETITPWNFEEVVDKGASAQSFIERMTNFDKNLPNEKVLPKHSLLYEYFTVYNELTKVKYVTEGMRKPAFLSGEQKKAIVDLLFKTNRKVTVKQLKEDYFKKIECFDSVEISGVEDRFNASLGTYHDLLKIIKDKDFLDNEENEDILEDIVLTLTLFEDREMIEERLKTYAHLFDDKVMKQLKRRRYTGWGRLSRKLINGIRDKQSGKTILDFLKSDGFANRNFMQLIHDDSLTFKEDIQKAQVSGQGDSLHEHIANLAGSPAIKKGILQTVKVVDELVKVMGRHKPENIVIEMARENQTTQKGQKNSRERMKRIEEGIKELGSQILKEHPVENTQLQNEKLYLYYLQNGRDMYVDQELDINRLSDYDVDHIVPQSFLKDDSIDNKVLTRSDKARGKSDNVPSEEVVKKMKNYWRQLLNAKLITQRKFDNLTKAERGGLSELDKAGFIKRQLVETRQITKHVAQILDSRMNTKYDENDKLIREVKVITLKSKLVSDFRKDFQFYKVREINNYHHAHDAYLNAVVGTALIKKYPKLESEFVYGDYKVYDVRKMIAKSEQEIGKATAKYFFYSNIMNFFKTEITLANGEIRKRPLIETNGETGEIVWDKGRDFATVRKVLSMPQVNIVKKTEVQTGGFSKESILPKRNSDKLIARKKDWDPKKYGGFDSPTVAYSVLVVAKVEKGKSKKLKSVKELLGITIMERSSFEKNPIDFLEAKGYKEVKKDLIIKLPKYSLFELENGRKRMLASAGELQKGNELALPSKYVNFLYLASHYEKLKGSPEDNEQKQLFVEQHKHYLDEIIEQISEFSKRVILADANLDKVLSAYNKHRDKPIREQAENIIHLFTLTNLGAPAAFKYFDTTIDRKRYTSTKEVLDATLIHQSITGLYETRIDLSQLGGDGGPAPGSSGGSGGMDPLQLLQPLEAEIKGTKLKAHWNSGATITCVPQAFLEEEVPIKNIWIKTIHGEKEQPVYYLTFKIQGRKVEAEVISSPYDYILVSPSDIPWLMKKPLQLTTLVPLQEYEERLLKQTMLTGSYKEKLQSLFLKYDALWQHWENQVGHRRIKPHHIATGTVNPRPQKQYPINPKAKASIQTVINDLLKQGVLIQQNSIMNTPVYPVPKPDGKWRMVLDYREVNKTIPLIAAQNQHSAGILSSIFRGKYKTTLDLSNGFWAHSITPESYWLTAFTWLGQQYCWTRLPQGFLNSPALFNADVVDLLKEVPNVQVYVDDIYISHDDPREHLEQLEKVFSLLLNAGYVVSLKKSEIAQHEVEFLGFNITKEGRGLTETFKQKLLNITPPRDLKQLQSILGLLNFARNFIPNFSELVKPLYNIIATAPGKYITWTTDNSQQLQNIISMLNSAENLEERNPEVRLIMKVNTSPSAGYIRFYNEFAKRPIMYLNYVYTKAEVKFTNTEKLLTTIHKGLIKALDLGMGQEILVYSPIVSMTKIQKTPLPERKALPIRWITWMSYLEDPRIQFHYDKTLPELQQVPTVTDDIIAKIKHPSEFSMVFYTDGSAIKHPNVNKSHNAGMGIAQVQFKPEFTVINTWSIPLGDHTAQLAEVAAVEFACKKALKIDGPVLIVTDSFYVAESVNKELPYWQSNGFFNNKKKPLKHVSKWKSIADCIQLKPDIIIIHEKGHQPTASTFHTEGNNLADKLATQGSYVVNAGKRTADGSEFEKRTADGSEFESPKKKAKVE

SEQ ID NO: 7190 - protein, 2174 aa, synthetic construct
MPAAKRVKLDGGDKKYSIGLDIGTNSVGWAVITDEYKVPSKKFKVLGNTDRHSIKKNLIGALLFDSGETAEATRLKRTARRRYTRRKNRICYLQEIFSNEMAKVDDSFFHRLEESFLVEEDKKHERHPIFGNIVDEVAYHEKYPTIYHLRKKLVDSTDKADLRLIYLALAHMIKFRGHFLIEGDLNPDNSDVDKLFIQLVQTYNQLFEENPINASGVDAKAILSARLSKSRRLENLIAQLPGEKKNGLFGNLIALSLGLTPNFKSNFDLAEDAKLQLSKDTYDDDLDNLLAQIGDQYADLFLAAKNLSDAILLSDILRVNTEITKAPLSASMIKRYDEHHQDLTLLKALVRQQLPEKYKEIFFDQSKNGYAGYIDGGASQEEFYKFIKPILEKMDGTEELLVKLNREDLLRKQRTFDNGSIPHQIHLGELHAILRRQEDFYPFLKDNREKIEKILTFRIPYYVGPLARGNSRFAWMTRKSEETITPWNFEEVVDKGASAQSFIERMTNFDKNLPNEKVLPKHSLLYEYFTVYNELTKVKYVTEGMRKPAFLSGEQKKAIVDLLFKTNRKVTVKQLKEDYFKKIECFDSVEISGVEDRFNASLGTYHDLLKIIKDKDFLDNEENEDILEDIVLTLTLFEDREMIEERLKTYAHLFDDKVMKQLKRRRYTGWGRLSRKLINGIRDKQSGKTILDFLKSDGFANRNFMQLIHDDSLTFKEDIQKAQVSGQGDSLHEHIANLAGSPAIKKGILQTVKVVDELVKVMGRHKPENIVIEMARENQTTQKGQKNSRERMKRIEEGIKELGSQILKEHPVENTQLQNEKLYLYYLQNGRDMYVDQELDINRLSDYDVDHIVPQSFLKDDSIDNKVLTRSDKARGKSDNVPSEEVVKKMKNYWRQLLNAKLITQRKFDNLTKAERGGLSELDKAGFIKRQLVETRQITKHVAQILDSRMNTKYDENDKLIREVKVITLKSKLVSDFRKDFQFYKVREINNYHHAHDAYLNAVVGTALIKKYPKLESEFVYGDYKVYDVRKMIAKSEQEIGKATAKYFFYSNIMNFFKTEITLANGEIRKRPLIETNGETGEIVWDKGRDFATVRKVLSMPQVNIVKKTEVQTGGFSKESILPKRNSDKLIARKKDWDPKKYGGFDSPTVAYSVLVVAKVEKGKSKKLKSVKELLGITIMERSSFEKNPIDFLEAKGYKEVKKDLIIKLPKYSLFELENGRKRMLASAGELQKGNELALPSKYVNFLYLASHYEKLKGSPEDNEQKQLFVEQHKHYLDEIIEQISEFSKRVILADANLDKVLSAYNKHRDKPIREQAENIIHLFTLTNLGAPAAFKYFDTTIDRKRYTSTKEVLDATLIHQSITGLYETRIDLSQLGGDGGPAPGSSGGSGGMNPLQLLQPLPAEVKGTKLLAHWNSGATITCIPESFLEDEQPIKQTLIKTIHGEKQQNVYYLTFKVKGRKVEAEVIASPYEYILLSPTDVPWLTQQPLQLTILVPLQEYQDRILNKTALPEEQKQQLKALFTKYDNLWQHWENQVGHRKIRPHNIATGDYPPRPQKQYPINPKAKPSIQIVIDDLLKQGVLTPQNSTMNTPVYPVPKPDGRWRMVLDYREVNKTIPLTAAQNQHSAGILATIVRQKYKTTLDLANGFWAHPITPDSYWLTAFTWQGKQYCWTRLPQGFLNSPALFTADAVDLLKEVPNVQVYVDDIYLSHDNPHEHIQQLEKVFQILLQAGYVVSLKKSEIGQRTVEFLGFNITKEGRGLTDTFKTKLLNVTPPKDLKQLQSILGLLNFARNFIPNFAELVQTLYNLIASSKGKYIEWTEDNTKQLNKVIEALNTASNLEERLPDQRLVIKVNTSPSAGYVRYYNESGKKPIMYLNYVFSKAELKFSMLEKLLTTMHKALIKAMDLAMGQEILVYSPIVSMTKIQKTPLPERKALPIRWITWMTYLEDPRIQFHYDKTLPELKHIPDVYTSSIPPLKHPSQYEGVFCTDGSAIKSPDPTKSNNAGMGIVHAIYNPEYKILNQWSIPLGHHTAQMAEIAAVEFACKKALKVPGPVLVITDSFYVAESANKELPYWKSNGFVNNKKEPLKHISKWKSIAECLSIKPDITIQHEKGHQPINTSIHTEGNALADKLATQGSYVVNAGKRTADGSEFEKRTADGSEFESPKKKAKVE

SEQ ID NO: 7191 - protein, 2092 aa, synthetic construct
MPAAKRVKLDGGDKKYSIGLDIGTNSVGWAVITDEYKVPSKKFKVLGNTDRHSIKKNLIGALLFDSGETAEATRLKRTARRRYTRRKNRICYLQEIFSNEMAKVDDSFFHRLEESFLVEEDKKHERHPIFGNIVDEVAYHEKYPTIYHLRKKLVDSTDKADLRLIYLALAHMIKFRGHFLIEGDLNPDNSDVDKLFIQLVQTYNQLFEENPINASGVDAKAILSARLSKSRRLENLIAQLPGEKKNGLFGNLIALSLGLTPNFKSNFDLAEDAKLQLSKDTYDDDLDNLLAQIGDQYADLFLAAKNLSDAILLSDILRVNTEITKAPLSASMIKRYDEHHQDLTLLKALVRQQLPEKYKEIFFDQSKNGYAGYIDGGASQEEFYKFIKPILEKMDGTEELLVKLNREDLLRKQRTFDNGSIPHQIHLGELHAILRRQEDFYPFLKDNREKIEKILTFRIPYYVGPLARGNSRFAWMTRKSEETITPWNFEEVVDKGASAQSFIERMTNFDKNLPNEKVLPKHSLLYEYFTVYNELTKVKYVTEGMRKPAFLSGEQKKAIVDLLFKTNRKVTVKQLKEDYFKKIECFDSVEISGVEDRFNASLGTYHDLLKIIKDKDFLDNEENEDILEDIVLTLTLFEDREMIEERLKTYAHLFDDKVMKQLKRRRYTGWGRLSRKLINGIRDKQSGKTILDFLKSDGFANRNFMQLIHDDSLTFKEDIQKAQVSGQGDSLHEHIANLAGSPAIKKGILQTVKVVDELVKVMGRHKPENIVIEMARENQTTQKGQKNSRERMKRIEEGIKELGSQILKEHPVENTQLQNEKLYLYYLQNGRDMYVDQELDINRLSDYDVDHIVPQSFLKDDSIDNKVLTRSDKARGKSDNVPSEEVVKKMKNYWRQLLNAKLITQRKFDNLTKAERGGLSELDKAGFIKRQLVETRQITKHVAQILDSRMNTKYDENDKLIREVKVITLKSKLVSDFRKDFQFYKVREINNYHHAHDAYLNAVVGTALIKKYPKLESEFVYGDYKVYDVRKMIAKSEQEIGKATAKYFFYSNIMNFFKTEITLANGEIRKRPLIETNGETGEIVWDKGRDFATVRKVLSMPQVNIVKKTEVQTGGFSKESILPKRNSDKLIARKKDWDPKKYGGFDSPTVAYSVLVVAKVEKGKSKKLKSVKELLGITIMERSSFEKNPIDFLEAKGYKEVKKDLIIKLPKYSLFELENGRKRMLASAGELQKGNELALPSKYVNFLYLASHYEKLKGSPEDNEQKQLFVEQHKHYLDEIIEQISEFSKRVILADANLDKVLSAYNKHRDKPIREQAENIIHLFTLTNLGAPAAFKYFDTTIDRKRYTSTKEVLDATLIHQSITGLYETRIDLSQLGGDGGPAPGSSGGSGGVLNLEEEYRLHEKPVPSSIDPSWLQLFPTVWAERAGMGLANQVPPVVVELRSGASPVAVRQYPMSKEAREGIRPHIQRFLDLGVLVPCQSPWNTPLLPVKKPGTNDYRPVQDLREINKRVQDIHPTVPNPYNLLSSLPPSHTWYSVLDLKDAFFCLKLHPNSQPLFAFEWRDPEKGNTGQLTWTRLPQGFKNSPTLFNEALHRDLAPFRALNPQVVLLQYVDDLLVAAPTYRDCKEGTQKLLQELSKLGYRVSAKKAQLCQKEVTYLGYLLKEGKRWLTPARKATVMKIPPPTTPRQVREFLGTAGFCRLWIPGFASLAAPLYPLTKPSIPFIWTEEHQKAFDRIKEALLSAPALALPDLTKPFTLYVDERAGVARGVLTQTLGPWRRPVAYLSKKLDPVASGWPTCLKAVAAVALLLKDADKLTLGQNVTVIASHSLESIVRQPPDRWMTNARMTHYQSLLLNERVSFAPPAVLNPATLLPVESEATPVHRCSEILAEETGTRRDLKDQPLPGVPAWYTDGSSFIAEGKRRAGAAIVDGKRTVWASSLPEGTSAQKAELVALTQALRLAEGKDINIYTDSRYAFATAHIHGAIYKQRGWLTSAGKDIKNKEEILALLEAIHLPKRVAIIHCPGHQKGNDPVATGNRRADEAAKQAALSTRVLAETTKPAGKRTADGSEFEKRTADGSEFESPKKKAKVE

SEQ ID NO: 7192 - protein, 2092 aa, synthetic construct
MPAAKRVKLDGGDKKYSIGLDIGTNSVGWAVITDEYKVPSKKFKVLGNTDRHSIKKNLIGALLFDSGETAEATRLKRTARRRYTRRKNRICYLQEIFSNEMAKVDDSFFHRLEESFLVEEDKKHERHPIFGNIVDEVAYHEKYPTIYHLRKKLVDSTDKADLRLIYLALAHMIKFRGHFLIEGDLNPDNSDVDKLFIQLVQTYNQLFEENPINASGVDAKAILSARLSKSRRLENLIAQLPGEKKNGLFGNLIALSLGLTPNFKSNFDLAEDAKLQLSKDTYDDDLDNLLAQIGDQYADLFLAAKNLSDAILLSDILRVNTEITKAPLSASMIKRYDEHHQDLTLLKALVRQQLPEKYKEIFFDQSKNGYAGYIDGGASQEEFYKFIKPILEKMDGTEELLVKLNREDLLRKQRTFDNGSIPHQIHLGELHAILRRQEDFYPFLKDNREKIEKILTFRIPYYVGPLARGNSRFAWMTRKSEETITPWNFEEVVDKGASAQSFIERMTNFDKNLPNEKVLPKHSLLYEYFTVYNELTKVKYVTEGMRKPAFLSGEQKKAIVDLLFKTNRKVTVKQLKEDYFKKIECFDSVEISGVEDRFNASLGTYHDLLKIIKDKDFLDNEENEDILEDIVLTLTLFEDREMIEERLKTYAHLFDDKVMKQLKRRRYTGWGRLSRKLINGIRDKQSGKTILDFLKSDGFANRNFMQLIHDDSLTFKEDIQKAQVSGQGDSLHEHIANLAGSPAIKKGILQTVKVVDELVKVMGRHKPENIVIEMARENQTTQKGQKNSRERMKRIEEGIKELGSQILKEHPVENTQLQNEKLYLYYLQNGRDMYVDQELDINRLSDYDVDHIVPQSFLKDDSIDNKVLTRSDKARGKSDNVPSEEVVKKMKNYWRQLLNAKLITQRKFDNLTKAERGGLSELDKAGFIKRQLVETRQITKHVAQILDSRMNTKYDENDKLIREVKVITLKSKLVSDFRKDFQFYKVREINNYHHAHDAYLNAVVGTALIKKYPKLESEFVYGDYKVYDVRKMIAKSEQEIGKATAKYFFYSNIMNFFKTEITLANGEIRKRPLIETNGETGEIVWDKGRDFATVRKVLSMPQVNIVKKTEVQTGGFSKESILPKRNSDKLIARKKDWDPKKYGGFDSPTVAYSVLVVAKVEKGKSKKLKSVKELLGITIMERSSFEKNPIDFLEAKGYKEVKKDLIIKLPKYSLFELENGRKRMLASAGELQKGNELALPSKYVNFLYLASHYEKLKGSPEDNEQKQLFVEQHKHYLDEIIEQISEFSKRVILADANLDKVLSAYNKHRDKPIREQAENIIHLFTLTNLGAPAAFKYFDTTIDRKRYTSTKEVLDATLIHQSITGLYETRIDLSQLGGDGGPAPGSSGGSGGVLNLEEEYRLHEKPVPSSIDPSWLQLFPTVWAERAGMGLANQVPPVVVELRSGASPVAVRQYPMSKEAREGIRPHIQRFLDLGVLVPCQSPWNTPLLPVKKPGTNDYRPVQDLREINKRVQDIHPTVPNPYNLLSSLPPSHTWYSVLDLKDAFFCLKLHPNSQPLFAFEWRDPEKGNTGQLTWTRLPQGFKNSPTLFNEALHRDLAPFRALNPQVVLLQYVDDLLVAAPTYRDCKEGTQKLLQELSKLGYRVSAKKAQLCQKEVTYLGYLLKEGKRWLTPARKATVMKIPPPTTPRQVREFLGKAGFCRLFIPGFASLAAPLYPLTKPSIPFIWTEEHQKAFDRIKEALLSAPALALPDLTKPFTLYVDERAGVARGVLTQTLGPWRRPVAYLSKKLDPVASGWPTCLKAVAAVALLLKDADKLTLGQNVTVIASHSLESIVRQPPDRWMTNARMTHYQSLLLNERVSFAPPAVLNPATLLPVESEATPVHRCSEILAEETGTRRDLKDQPLPGVPAWYTDGSSFIAEGKRRAGAAIVDGKRTVWASSLPEGTSAQKAELVALTQALRLAEGKDINIYTDSRYAFATAHIHGAIYKQRGWLTSAGKDIKNKEEILALLEAIHLPKRVAIIHCPGHQKGNDPVATGNRRADEAAKQAALSTRVLAETTKPAGKRTADGSEFEKRTADGSEFESPKKKAKVE

SEQ ID NO: 7193 - protein, 2095 aa, synthetic construct
MPAAKRVKLDGGDKKYSIGLDIGTNSVGWAVITDEYKVPSKKFKVLGNTDRHSIKKNLIGALLFDSGETAEATRLKRTARRRYTRRKNRICYLQEIFSNEMAKVDDSFFHRLEESFLVEEDKKHERHPIFGNIVDEVAYHEKYPTIYHLRKKLVDSTDKADLRLIYLALAHMIKFRGHFLIEGDLNPDNSDVDKLFIQLVQTYNQLFEENPINASGVDAKAILSARLSKSRRLENLIAQLPGEKKNGLFGNLIALSLGLTPNFKSNFDLAEDAKLQLSKDTYDDDLDNLLAQIGDQYADLFLAAKNLSDAILLSDILRVNTEITKAPLSASMIKRYDEHHQDLTLLKALVRQQLPEKYKEIFFDQSKNGYAGYIDGGASQEEFYKFIKPILEKMDGTEELLVKLNREDLLRKQRTFDNGSIPHQIHLGELHAILRRQEDFYPFLKDNREKIEKILTFRIPYYVGPLARGNSRFAWMTRKSEETITPWNFEEVVDKGASAQSFIERMTNFDKNLPNEKVLPKHSLLYEYFTVYNELTKVKYVTEGMRKPAFLSGEQKKAIVDLLFKTNRKVTVKQLKEDYFKKIECFDSVEISGVEDRFNASLGTYHDLLKIIKDKDFLDNEENEDILEDIVLTLTLFEDREMIEERLKTYAHLFDDKVMKQLKRRRYTGWGRLSRKLINGIRDKQSGKTILDFLKSDGFANRNFMQLIHDDSLTFKEDIQKAQVSGQGDSLHEHIANLAGSPAIKKGILQTVKVVDELVKVMGRHKPENIVIEMARENQTTQKGQKNSRERMKRIEEGIKELGSQILKEHPVENTQLQNEKLYLYYLQNGRDMYVDQELDINRLSDYDVDHIVPQSFLKDDSIDNKVLTRSDKARGKSDNVPSEEVVKKMKNYWRQLLNAKLITQRKFDNLTKAERGGLSELDKAGFIKRQLVETRQITKHVAQILDSRMNTKYDENDKLIREVKVITLKSKLVSDFRKDFQFYKVREINNYHHAHDAYLNAVVGTALIKKYPKLESEFVYGDYKVYDVRKMIAKSEQEIGKATAKYFFYSNIMNFFKTEITLANGEIRKRPLIETNGETGEIVWDKGRDFATVRKVLSMPQVNIVKKTEVQTGGFSKESILPKRNSDKLIARKKDWDPKKYGGFDSPTVAYSVLVVAKVEKGKSKKLKSVKELLGITIMERSSFEKNPIDFLEAKGYKEVKKDLIIKLPKYSLFELENGRKRMLASAGELQKGNELALPSKYVNFLYLASHYEKLKGSPEDNEQKQLFVEQHKHYLDEIIEQISEFSKRVILADANLDKVLSAYNKHRDKPIREQAENIIHLFTLTNLGAPAAFKYFDTTIDRKRYTSTKEVLDATLIHQSITGLYETRIDLSQLGGDGGGGSEAAAKPAPGGTLQLEEEYRLFEPESTQKQEMDIWLKNFPQAWAETGGMGTAHCQAPVLIQLKATATPISIRQYPMPHEAYQGIKPHIRRMLDQGILKPCQSPWNTPLLPVKKPGTEDYRPVQDLREVNKRVEDIHPTVPNPYNLLSTLPPSHPWYTVLDLKDAFFCLRLHSESQLLFAFEWRDPEIGLSGQLTWTRLPQGFKNSPTLFNEALHSDLADFRVRYPALVLLQYVDDLLLAAATRTECLEGTKALLETLGNKGYRASAKKAQICLQEVTYLGYSLKDGQRWLTKARKEAILSIPVPKNSRQVREFLGTAGYCRLWIPGFAELAAPLYPLTRPGTLFQWGTEQQLAFEDIKKALLSSPALGLPDITKPFELFIDENSGFAKGVLVQKLGPWKRPVAYLSKKLDTVASGWPPCLRMVAAIAILVKDAGKLTLGQPLTILTSHPVEALVRQPPNKWLSNARMTHYQAMLLDAERVHFGPTVSLNPATLLPLPSGGNHHDCLQILAETHGTRPDLTDQPLPDADLTWYTDGSSFIRNGEREAGAAVTTESEVIWAAPLPPGTSAQRAELIALTQALKMAEGKKLTVYTDSRYAFATTHVHGEIYRRRGWLTSEGKEIKNKNEILALLEALFLPKRLSIIHCPGHQKGDSPQAKGNRLADDTAKKAATETHSSLTVLPAGKRTADGSEFEKRTADGSEFESPKKKAKVE

SEQ ID NO: 7194 - protein, 2095 aa, synthetic construct
MPAAKRVKLDGGDKKYSIGLDIGTNSVGWAVITDEYKVPSKKFKVLGNTDRHSIKKNLIGALLFDSGETAEATRLKRTARRRYTRRKNRICYLQEIFSNEMAKVDDSFFHRLEESFLVEEDKKHERHPIFGNIVDEVAYHEKYPTIYHLRKKLVDSTDKADLRLIYLALAHMIKFRGHFLIEGDLNPDNSDVDKLFIQLVQTYNQLFEENPINASGVDAKAILSARLSKSRRLENLIAQLPGEKKNGLFGNLIALSLGLTPNFKSNFDLAEDAKLQLSKDTYDDDLDNLLAQIGDQYADLFLAAKNLSDAILLSDILRVNTEITKAPLSASMIKRYDEHHQDLTLLKALVRQQLPEKYKEIFFDQSKNGYAGYIDGGASQEEFYKFIKPILEKMDGTEELLVKLNREDLLRKQRTFDNGSIPHQIHLGELHAILRRQEDFYPFLKDNREKIEKILTFRIPYYVGPLARGNSRFAWMTRKSEETITPWNFEEVVDKGASAQSFIERMTNFDKNLPNEKVLPKHSLLYEYFTVYNELTKVKYVTEGMRKPAFLSGEQKKAIVDLLFKTNRKVTVKQLKEDYFKKIECFDSVEISGVEDRFNASLGTYHDLLKIIKDKDFLDNEENEDILEDIVLTLTLFEDREMIEERLKTYAHLFDDKVMKQLKRRRYTGWGRLSRKLINGIRDKQSGKTILDFLKSDGFANRNFMQLIHDDSLTFKEDIQKAQVSGQGDSLHEHIANLAGSPAIKKGILQTVKVVDELVKVMGRHKPENIVIEMARENQTTQKGQKNSRERMKRIEEGIKELGSQILKEHPVENTQLQNEKLYLYYLQNGRDMYVDQELDINRLSDYDVDHIVPQSFLKDDSIDNKVLTRSDKARGKSDNVPSEEVVKKMKNYWRQLLNAKLITQRKFDNLTKAERGGLSELDKAGFIKRQLVETRQITKHVAQILDSRMNTKYDENDKLIREVKVITLKSKLVSDFRKDFQFYKVREINNYHHAHDAYLNAVVGTALIKKYPKLESEFVYGDYKVYDVRKMIAKSEQEIGKATAKYFFYSNIMNFFKTEITLANGEIRKRPLIETNGETGEIVWDKGRDFATVRKVLSMPQVNIVKKTEVQTGGFSKESILPKRNSDKLIARKKDWDPKKYGGFDSPTVAYSVLVVAKVEKGKSKKLKSVKELLGITIMERSSFEKNPIDFLEAKGYKEVKKDLIIKLPKYSLFELENGRKRMLASAGELQKGNELALPSKYVNFLYLASHYEKLKGSPEDNEQKQLFVEQHKHYLDEIIEQISEFSKRVILADANLDKVLSAYNKHRDKPIREQAENIIHLFTLTNLGAPAAFKYFDTTIDRKRYTSTKEVLDATLIHQSITGLYETRIDLSQLGGDGGGGSEAAAKPAPGGTLQLEEEYRLFEPESTQKQEMDIWLKNFPQAWAETGGMGTAHCQAPVLIQLKATATPISIRQYPMPHEAYQGIKPHIRRMLDQGILKPCQSPWNTPLLPVKKPGTEDYRPVQDLREVNKRVEDIHPTVPNPYNLLSTLPPSHPWYTVLDLKDAFFCLRLHSESQLLFAFEWRDPEIGLSGQLTWTRLPQGFKNSPTLFNEALHSDLADFRVRYPALVLLQYVDDLLLAAATRTECLEGTKALLETLGNKGYRASAKKAQICLQEVTYLGYSLKDGQRWLTKARKEAILSIPVPKNSRQVREFLGKAGYCRLFIPGFAELAAPLYPLTRPGTLFQWGTEQQLAFEDIKKALLSSPALGLPDITKPFELFIDENSGFAKGVLVQKLGPWKRPVAYLSKKLDTVASGWPPCLRMVAAIAILVKDAGKLTLGQPLTILTSHPVEALVRQPPNKWLSNARMTHYQAMLLDAERVHFGPTVSLNPATLLPLPSGGNHHDCLQILAETHGTRPDLTDQPLPDADLTWYTDGSSFIRNGEREAGAAVTTESEVIWAAPLPPGTSAQRAELIALTQALKMAEGKKLTVYTDSRYAFATTHVHGEIYRRRGWLTSEGKEIKNKNEILALLEALFLPKRLSIIHCPGHQKGDSPQAKGNRLADDTAKKAATETHSSLTVLPAGKRTADGSEFEKRTADGSEFESPKKKAKVE

SEQ ID NO: 7195 - protein, 2176 aa, synthetic construct
MPAAKRVKLDGGDKKYSIGLDIGTNSVGWAVITDEYKVPSKKFKVLGNTDRHSIKKNLIGALLFDSGETAEATRLKRTARRRYTRRKNRICYLQEIFSNEMAKVDDSFFHRLEESFLVEEDKKHERHPIFGNIVDEVAYHEKYPTIYHLRKKLVDSTDKADLRLIYLALAHMIKFRGHFLIEGDLNPDNSDVDKLFIQLVQTYNQLFEENPINASGVDAKAILSARLSKSRRLENLIAQLPGEKKNGLFGNLIALSLGLTPNFKSNFDLAEDAKLQLSKDTYDDDLDNLLAQIGDQYADLFLAAKNLSDAILLSDILRVNTEITKAPLSASMIKRYDEHHQDLTLLKALVRQQLPEKYKEIFFDQSKNGYAGYIDGGASQEEFYKFIKPILEKMDGTEELLVKLNREDLLRKQRTFDNGSIPHQIHLGELHAILRRQEDFYPFLKDNREKIEKILTFRIPYYVGPLARGNSRFAWMTRKSEETITPWNFEEVVDKGASAQSFIERMTNFDKNLPNEKVLPKHSLLYEYFTVYNELTKVKYVTEGMRKPAFLSGEQKKAIVDLLFKTNRKVTVKQLKEDYFKKIECFDSVEISGVEDRFNASLGTYHDLLKIIKDKDFLDNEENEDILEDIVLTLTLFEDREMIEERLKTYAHLFDDKVMKQLKRRRYTGWGRLSRKLINGIRDKQSGKTILDFLKSDGFANRNFMQLIHDDSLTFKEDIQKAQVSGQGDSLHEHIANLAGSPAIKKGILQTVKVVDELVKVMGRHKPENIVIEMARENQTTQKGQKNSRERMKRIEEGIKELGSQILKEHPVENTQLQNEKLYLYYLQNGRDMYVDQELDINRLSDYDVDHIVPQSFLKDDSIDNKVLTRSDKARGKSDNVPSEEVVKKMKNYWRQLLNAKLITQRKFDNLTKAERGGLSELDKAGFIKRQLVETRQITKHVAQILDSRMNTKYDENDKLIREVKVITLKSKLVSDFRKDFQFYKVREINNYHHAHDAYLNAVVGTALIKKYPKLESEFVYGDYKVYDVRKMIAKSEQEIGKATAKYFFYSNIMNFFKTEITLANGEIRKRPLIETNGETGEIVWDKGRDFATVRKVLSMPQVNIVKKTEVQTGGFSKESILPKRNSDKLIARKKDWDPKKYGGFDSPTVAYSVLVVAKVEKGKSKKLKSVKELLGITIMERSSFEKNPIDFLEAKGYKEVKKDLIIKLPKYSLFELENGRKRMLASAGELQKGNELALPSKYVNFLYLASHYEKLKGSPEDNEQKQLFVEQHKHYLDEIIEQISEFSKRVILADANLDKVLSAYNKHRDKPIREQAENIIHLFTLTNLGAPAAFKYFDTTIDRKRYTSTKEVLDATLIHQSITGLYETRIDLSQLGGDGGGGSEAAAKPAPGGMNPLQLLQPLPAEIKGTKLLAHWNSGATITCIPESFLEDEQPIKKTLIKTIHGEKQQNVYYVTFKVKGRKVEAEVIASPYEYILLSPTDVPWLTQQPLQLTILVPLQEYQEKILSKTALPEDQKQQLKTLFVKYDNLWQHWENQVGHRKIRPHNIATGDYPPRPQKQYPINPKAKPSIQIVIDDLLKQGVLTPQNSTMNTPVYPVPKPDGRWRMVLDYREVNKTIPLTAAQNQHSAGILATIVRQKYKTTLDLANGFWAHPITPESYWLTAFTWQGKQYCWTRLPQGFLNSPALFNADVVDLLKEIPNVQVYVDDIYLSHDDPKEHVQQLEKVFQILLQAGYVVSLKKSEIGQKTVEFLGFNITKEGRGLTDTFKTKLLNITPPKDLKQLQSILGKLNFARNFIPNFAELVQPLYNLIAPAKGKYIEWSEENTKQLNMVIEALNTASNLEERLPEQRLVIKVNTSPSAGYVRYYNETGKKPIMYLNYVFSKAELKFSMLEKLLTTMHKALIKAMDLAMGQEILVYSPIVSMTKIQKTPLPERKALPIRWITWMTYLEDPRIQFHYDKTLPELKHIPDVYTSSQSPVKHPSQYEGVFYTDGSAIKSPDPTKSNNAGMGIVHATYKPEYQVLNQWSIPLGNHTAQMAEIAAVEFACKKALKIPGPVLVITDSFYVAESANKELPYWKSNGFVNNKKKPLKHISKWKSIAECLSMKPDITIQHEKGISLQIPVFILKGNALADKLATQGSYVVNAGKRTADGSEFEKRTADGSEFESPKKKAKVE

SEQ ID NO: 7196 - protein, 2218 aa, synthetic construct
MPAAKRVKLDGGDKKYSIGLDIGTNSVGWAVITDEYKVPSKKFKVLGNTDRHSIKKNLIGALLFDSGETAEATRLKRTARRRYTRRKNRICYLQEIFSNEMAKVDDSFFHRLEESFLVEEDKKHERHPIFGNIVDEVAYHEKYPTIYHLRKKLVDSTDKADLRLIYLALAHMIKFRGHFLIEGDLNPDNSDVDKLFIQLVQTYNQLFEENPINASGVDAKAILSARLSKSRRLENLIAQLPGEKKNGLFGNLIALSLGLTPNFKSNFDLAEDAKLQLSKDTYDDDLDNLLAQIGDQYADLFLAAKNLSDAILLSDILRVNTEITKAPLSASMIKRYDEHHQDLTLLKALVRQQLPEKYKEIFFDQSKNGYAGYIDGGASQEEFYKFIKPILEKMDGTEELLVKLNREDLLRKQRTFDNGSIPHQIHLGELHAILRRQEDFYPFLKDNREKIEKILTFRIPYYVGPLARGNSRFAWMTRKSEETITPWNFEEVVDKGASAQSFIERMTNFDKNLPNEKVLPKHSLLYEYFTVYNELTKVKYVTEGMRKPAFLSGEQKKAIVDLLFKTNRKVTVKQLKEDYFKKIECFDSVEISGVEDRFNASLGTYHDLLKIIKDKDFLDNEENEDILEDIVLTLTLFEDREMIEERLKTYAHLFDDKVMKQLKRRRYTGWGRLSRKLINGIRDKQSGKTILDFLKSDGFANRNFMQLIHDDSLTFKEDIQKAQVSGQGDSLHEHIANLAGSPAIKKGILQTVKVVDELVKVMGRHKPENIVIEMARENQTTQKGQKNSRERMKRIEEGIKELGSQILKEHPVENTQLQNEKLYLYYLQNGRDMYVDQELDINRLSDYDVDHIVPQSFLKDDSIDNKVLTRSDKARGKSDNVPSEEVVKKMKNYWRQLLNAKLITQRKFDNLTKAERGGLSELDKAGFIKRQLVETRQITKHVAQILDSRMNTKYDENDKLIREVKVITLKSKLVSDFRKDFQFYKVREINNYHHAHDAYLNAVVGTALIKKYPKLESEFVYGDYKVYDVRKMIAKSEQEIGKATAKYFFYSNIMNFFKTEITLANGEIRKRPLIETNGETGEIVWDKGRDFATVRKVLSMPQVNIVKKTEVQTGGFSKESILPKRNSDKLIARKKDWDPKKYGGFDSPTVAYSVLVVAKVEKGKSKKLKSVKELLGITIMERSSFEKNPIDFLEAKGYKEVKKDLIIKLPKYSLFELENGRKRMLASAGELQKGNELALPSKYVNFLYLASHYEKLKGSPEDNEQKQLFVEQHKHYLDEIIEQISEFSKRVILADANLDKVLSAYNKHRDKPIREQAENIIHLFTLTNLGAPAAFKYFDTTIDRKRYTSTKEVLDATLIHQSITGLYETRIDLSQLGGDGGGGSEAAAKPAPGGTLGDQGSRGSDPLPEPRVTLTVEGIPTEFLVNTGAEHSVLTKPMGKMGSKRTVVAGATGSKVYPWTTKRLLKIGQKQVTHSFLVIPECPAPLLGRDLLTKLKAQIQFSTEGPQVTWEDRPAMCLVLNLEEEYRLHEKPVPPSIDPSWLQLFPMVWAEKAGMGLANQVPPVVVELKSDASPVAVRQYPMSKEAREGIRPHIQRFLDLGILVPCQSPWNTPLLPVKKPGTNDYRPVQDLREVNKRVQDIHPTVPNPYNLLSSLPPSHTWYSVLDLKDAFFCLKLHPNSQPLFAFEWRDPEKGNTGQLTWTRLPQGFKNSPTLFNEALHRDLASFRALNPQVVMLQYVDDLLVAAPTYRDCKEGTRRLLQELSKLGYRVSAKKAQLCREEVTYLGYLLKGGKRWLTPARKATVMKIPTPTTPRQVREFLGTAGFCRLWIPGFASLAAPLYPLTRPKVPFTWTEAHQEAFGRIKEALLSAPALALPDLTKPFALYVDEKEGVARGVLTQTLGPWRRPVAYLSKKLDPVASGWPTCLKAIAAVALLLKDADKLTLGQNVLVIAPHNLESIVRQPPDRWMTNARMTHYQSLLLNERVSFAPPAILNPATLLPVESDDTPIHICSEILAEETGTRPDLRDQPLPGVPAWYTDGSSFIMDGRRQAGAAIVDNKRTVWASNLPEGTSAQKAELIALTQALRLAEGKSINIYTDSRYAFATAHVHGAIYKQRGWLTSAGKDIKNKEEILALLEAIHLPKRVAIIHCPGHQRGTDPVATGNRKADEAAKQAAQSTRILTETTKNAGKRTADGSEFEKRTADGSEFESPKKKAKVE

SEQ ID NO: 7197 - protein, 2218 aa, synthetic construct
MPAAKRVKLDGGDKKYSIGLDIGTNSVGWAVITDEYKVPSKKFKVLGNTDRHSIKKNLIGALLFDSGETAEATRLKRTARRRYTRRKNRICYLQEIFSNEMAKVDDSFFHRLEESFLVEEDKKHERHPIFGNIVDEVAYHEKYPTIYHLRKKLVDSTDKADLRLIYLALAHMIKFRGHFLIEGDLNPDNSDVDKLFIQLVQTYNQLFEENPINASGVDAKAILSARLSKSRRLENLIAQLPGEKKNGLFGNLIALSLGLTPNFKSNFDLAEDAKLQLSKDTYDDDLDNLLAQIGDQYADLFLAAKNLSDAILLSDILRVNTEITKAPLSASMIKRYDEHHQDLTLLKALVRQQLPEKYKEIFFDQSKNGYAGYIDGGASQEEFYKFIKPILEKMDGTEELLVKLNREDLLRKQRTFDNGSIPHQIHLGELHAILRRQEDFYPFLKDNREKIEKILTFRIPYYVGPLARGNSRFAWMTRKSEETITPWNFEEVVDKGASAQSFIERMTNFDKNLPNEKVLPKHSLLYEYFTVYNELTKVKYVTEGMRKPAFLSGEQKKAIVDLLFKTNRKVTVKQLKEDYFKKIECFDSVEISGVEDRFNASLGTYHDLLKIIKDKDFLDNEENEDILEDIVLTLTLFEDREMIEERLKTYAHLFDDKVMKQLKRRRYTGWGRLSRKLINGIRDKQSGKTILDFLKSDGFANRNFMQLIHDDSLTFKEDIQKAQVSGQGDSLHEHIANLAGSPAIKKGILQTVKVVDELVKVMGRHKPENIVIEMARENQTTQKGQKNSRERMKRIEEGIKELGSQILKEHPVENTQLQNEKLYLYYLQNGRDMYVDQELDINRLSDYDVDHIVPQSFLKDDSIDNKVLTRSDKARGKSDNVPSEEVVKKMKNYWRQLLNAKLITQRKFDNLTKAERGGLSELDKAGFIKRQLVETRQITKHVAQILDSRMNTKYDENDKLIREVKVITLKSKLVSDFRKDFQFYKVREINNYHHAHDAYLNAVVGTALIKKYPKLESEFVYGDYKVYDVRKMIAKSEQEIGKATAKYFFYSNIMNFFKTEITLANGEIRKRPLIETNGETGEIVWDKGRDFATVRKVLSMPQVNIVKKTEVQTGGFSKESILPKRNSDKLIARKKDWDPKKYGGFDSPTVAYSVLVVAKVEKGKSKKLKSVKELLGITIMERSSFEKNPIDFLEAKGYKEVKKDLIIKLPKYSLFELENGRKRMLASAGELQKGNELALPSKYVNFLYLASHYEKLKGSPEDNEQKQLFVEQHKHYLDEIIEQISEFSKRVILADANLDKVLSAYNKHRDKPIREQAENIIHLFTLTNLGAPAAFKYFDTTIDRKRYTSTKEVLDATLIHQSITGLYETRIDLSQLGGDGGGGSEAAAKPAPGGTLGDQGSRGSDPLPEPRVTLTVEGIPTEFLVNTGAEHSVLTKPMGKMGSKRTVVAGATGSKVYPWTTKRLLKIGQKQVTHSFLVIPECPAPLLGRDLLTKLKAQIQFSTEGPQVTWEDRPAMCLVLNLEEEYRLHEKPVPPSIDPSWLQLFPMVWAEKAGMGLANQVPPVVVELKSDASPVAVRQYPMSKEAREGIRPHIQRFLDLGILVPCQSPWNTPLLPVKKPGTNDYRPVQDLREVNKRVQDIHPTVPNPYNLLSSLPPSHTWYSVLDLKDAFFCLKLHPNSQPLFAFEWRDPEKGNTGQLTWTRLPQGFKNSPTLFNEALHRDLASFRALNPQVVMLQYVDDLLVAAPTYRDCKEGTRRLLQELSKLGYRVSAKKAQLCREEVTYLGYLLKGGKRWLTPARKATVMKIPTPTTPRQVREFLGKAGFCRLFIPGFASLAAPLYPLTRPKVPFTWTEAHQEAFGRIKEALLSAPALALPDLTKPFALYVDEKEGVARGVLTQTLGPWRRPVAYLSKKLDPVASGWPTCLKAIAAVALLLKDADKLTLGQNVLVIAPHNLESIVRQPPDRWMTNARMTHYQSLLLNERVSFAPPAILNPATLLPVESDDTPIHICSEILAEETGTRPDLRDQPLPGVPAWYTDGSSFIMDGRRQAGAAIVDNKRTVWASNLPEGTSAQKAELIALTQALRLAEGKSINIYTDSRYAFATAHVHGAIYKQRGWLTSAGKDIKNKEEILALLEAIHLPKRVAIIHCPGHQRGTDPVATGNRKADEAAKQAAQSTRILTETTKNAGKRTADGSEFEKRTADGSEFESPKKKAKVE

SEQ ID NO: 7198 - protein, 2096 aa, synthetic construct
MPAAKRVKLDGGDKKYSIGLDIGTNSVGWAVITDEYKVPSKKFKVLGNTDRHSIKKNLIGALLFDSGETAEATRLKRTARRRYTRRKNRICYLQEIFSNEMAKVDDSFFHRLEESFLVEEDKKHERHPIFGNIVDEVAYHEKYPTIYHLRKKLVDSTDKADLRLIYLALAHMIKFRGHFLIEGDLNPDNSDVDKLFIQLVQTYNQLFEENPINASGVDAKAILSARLSKSRRLENLIAQLPGEKKNGLFGNLIALSLGLTPNFKSNFDLAEDAKLQLSKDTYDDDLDNLLAQIGDQYADLFLAAKNLSDAILLSDILRVNTEITKAPLSASMIKRYDEHHQDLTLLKALVRQQLPEKYKEIFFDQSKNGYAGYIDGGASQEEFYKFIKPILEKMDGTEELLVKLNREDLLRKQRTFDNGSIPHQIHLGELHAILRRQEDFYPFLKDNREKIEKILTFRIPYYVGPLARGNSRFAWMTRKSEETITPWNFEEVVDKGASAQSFIERMTNFDKNLPNEKVLPKHSLLYEYFTVYNELTKVKYVTEGMRKPAFLSGEQKKAIVDLLFKTNRKVTVKQLKEDYFKKIECFDSVEISGVEDRFNASLGTYHDLLKIIKDKDFLDNEENEDILEDIVLTLTLFEDREMIEERLKTYAHLFDDKVMKQLKRRRYTGWGRLSRKLINGIRDKQSGKTILDFLKSDGFANRNFMQLIHDDSLTFKEDIQKAQVSGQGDSLHEHIANLAGSPAIKKGILQTVKVVDELVKVMGRHKPENIVIEMARENQTTQKGQKNSRERMKRIEEGIKELGSQILKEHPVENTQLQNEKLYLYYLQNGRDMYVDQELDINRLSDYDVDHIVPQSFLKDDSIDNKVLTRSDKARGKSDNVPSEEVVKKMKNYWRQLLNAKLITQRKFDNLTKAERGGLSELDKAGFIKRQLVETRQITKHVAQILDSRMNTKYDENDKLIREVKVITLKSKLVSDFRKDFQFYKVREINNYHHAHDAYLNAVVGTALIKKYPKLESEFVYGDYKVYDVRKMIAKSEQEIGKATAKYFFYSNIMNFFKTEITLANGEIRKRPLIETNGETGEIVWDKGRDFATVRKVLSMPQVNIVKKTEVQTGGFSKESILPKRNSDKLIARKKDWDPKKYGGFDSPTVAYSVLVVAKVEKGKSKKLKSVKELLGITIMERSSFEKNPIDFLEAKGYKEVKKDLIIKLPKYSLFELENGRKRMLASAGELQKGNELALPSKYVNFLYLASHYEKLKGSPEDNEQKQLFVEQHKHYLDEIIEQISEFSKRVILADANLDKVLSAYNKHRDKPIREQAENIIHLFTLTNLGAPAAFKYFDTTIDRKRYTSTKEVLDATLIHQSITGLYETRIDLSQLGGDGGGGSEAAAKPAPGGTLNLEDEYRLYETSAEPEVSPGSTWLSDFPQAWAETGGMGLAVRQAPLIIPLKATSTPVSIKQYPMSQEAKLGIKPHIQRLLDQGILVPCQSPWNTPLLPVKKPGTNDYRPVQDLREVNKRVEDIHPTVPNPYNLLSGLPPSHRWYTVLDLKDAFFCLRLHPTSQPLFAFEWRDPGMGISGQLTWTRLPQGFKNSPTLFNEALHRDLADFRIQHPDLILLQYVDDILLAATSELDCQQGTRALLLTLGNLGYRASAKKAQLCQKQVKYLGYLLKEGQRWLTEARKETVMGQPTPKTPRQLREFLGKAGFCRLFIPGFAEMAAPLYPLTKPGTLFNWGPDQQKAYQEIKQALLTAPALGLPDLTKPFELFVDEKQGYAKGVLTQKLGPWRRPVAYLSKKLDPVAAGWPPCLRMVAAIAVLRKDAGKLTMGQPLVILAPHAVEALVKQPPDRWLSNARMTHYQAMLLDTDRVQFGPVVALNPATLLPLPEEGAPHDCLEILAETHGTRPDLTDQPIPDADHTWYTDGSSFLQEGQRKAGAAVTTETEVIWARALPAGTSAQRAELIALTQALKMAEGKRLNVYTDSRYAFATAHIHGEIYRRRGWLTSEGREIKNKSEILALLKALFLPKRLSIIHCLGHQKGDSAEARGNRLADQAAREAAIKTPPDTSTLLAGKRTADGSEFEKRTADGSEFESPKKKAKVE

SEQ ID NO: 7199 - protein, 2096 aa, synthetic construct
MPAAKRVKLDGGDKKYSIGLDIGTNSVGWAVITDEYKVPSKKFKVLGNTDRHSIKKNLIGALLFDSGETAEATRLKRTARRRYTRRKNRICYLQEIFSNEMAKVDDSFFHRLEESFLVEEDKKHERHPIFGNIVDEVAYHEKYPTIYHLRKKLVDSTDKADLRLIYLALAHMIKFRGHFLIEGDLNPDNSDVDKLFIQLVQTYNQLFEENPINASGVDAKAILSARLSKSRRLENLIAQLPGEKKNGLFGNLIALSLGLTPNFKSNFDLAEDAKLQLSKDTYDDDLDNLLAQIGDQYADLFLAAKNLSDAILLSDILRVNTEITKAPLSASMIKRYDEHHQDLTLLKALVRQQLPEKYKEIFFDQSKNGYAGYIDGGASQEEFYKFIKPILEKMDGTEELLVKLNREDLLRKQRTFDNGSIPHQIHLGELHAILRRQEDFYPFLKDNREKIEKILTFRIPYYVGPLARGNSRFAWMTRKSEETITPWNFEEVVDKGASAQSFIERMTNFDKNLPNEKVLPKHSLLYEYFTVYNELTKVKYVTEGMRKPAFLSGEQKKAIVDLLFKTNRKVTVKQLKEDYFKKIECFDSVEISGVEDRFNASLGTYHDLLKIIKDKDFLDNEENEDILEDIVLTLTLFEDREMIEERLKTYAHLFDDKVMKQLKRRRYTGWGRLSRKLINGIRDKQSGKTILDFLKSDGFANRNFMQLIHDDSLTFKEDIQKAQVSGQGDSLHEHIANLAGSPAIKKGILQTVKVVDELVKVMGRHKPENIVIEMARENQTTQKGQKNSRERMKRIEEGIKELGSQILKEHPVENTQLQNEKLYLYYLQNGRDMYVDQELDINRLSDYDVDHIVPQSFLKDDSIDNKVLTRSDKARGKSDNVPSEEVVKKMKNYWRQLLNAKLITQRKFDNLTKAERGGLSELDKAGFIKRQLVETRQITKHVAQILDSRMNTKYDENDKLIREVKVITLKSKLVSDFRKDFQFYKVREINNYHHAHDAYLNAVVGTALIKKYPKLESEFVYGDYKVYDVRKMIAKSEQEIGKATAKYFFYSNIMNFFKTEITLANGEIRKRPLIETNGETGEIVWDKGRDFATVRKVLSMPQVNIVKKTEVQTGGFSKESILPKRNSDKLIARKKDWDPKKYGGFDSPTVAYSVLVVAKVEKGKSKKLKSVKELLGITIMERSSFEKNPIDFLEAKGYKEVKKDLIIKLPKYSLFELENGRKRMLASAGELQKGNELALPSKYVNFLYLASHYEKLKGSPEDNEQKQLFVEQHKHYLDEIIEQISEFSKRVILADANLDKVLSAYNKHRDKPIREQAENIIHLFTLTNLGAPAAFKYFDTTIDRKRYTSTKEVLDATLIHQSITGLYETRIDLSQLGGDGGGGSEAAAKPAPGGTLNIEDEYRLHETSKGPDVPLGSTWLSDFPQAWAETGGMGLAFRQAPLIISLKATSTPVSIKQYPMSQEARLGIKPHIQRLLDQGILVPCQSPWNTPLLPVKKPGTNDYRPVQDLREVNKRVEDIHPTVPNPYNLLSGLPPSHQWYTVLDLKDAFFCLRLHPTSQSLFAFEWKDPEMGISGQLTWTRLPQGFKNSPTLFNEALHRDLADFRIQHPDLILLQYVDDLLLAATSELDCQQGTRALLQTLGDLGYRASAKKAQICQKQVKYLGYLLKEGQRWLTEARKETVMGQPTPKTPRQLREFLGKAGLCRLFIPGFAEMAAPLYPLTKPGTLFKWGPDQQKAYQEIKQALLTAPALGLPDLTKPFELFVDEKQGYAKGVLTQKLGPWRRPVAYLSKKLDPVAAGWPPCLRMVAAIAVLTKDVGKLTMGQPLVILAPHAVEALVKQPPDRWLSNARMTHYQALLLDTDRVQFGPIVALNPATLLPLPEEGLQHDCLDILAEAHGTRPDLTDQPLPDADHTWYTDGSSFLQEGQRRAGAAVTTETEVIWAKALPAGTSAQRAELIALTQALKMAAGKKLNVYTDSRYAFATAHIHGEIYRRRGWLTSEGKEIKNKDEILALLKALFLPKRLSIIHCPGHQKGNHAEARGNRMADQAAREVATRETPETSTLLAGKRTADGSEFEKRTADGSEFESPKKKAKVE

SEQ ID NO: 7200 - protein, 2096 aa, synthetic construct
MPAAKRVKLDGGDKKYSIGLDIGTNSVGWAVITDEYKVPSKKFKVLGNTDRHSIKKNLIGALLFDSGETAEATRLKRTARRRYTRRKNRICYLQEIFSNEMAKVDDSFFHRLEESFLVEEDKKHERHPIFGNIVDEVAYHEKYPTIYHLRKKLVDSTDKADLRLIYLALAHMIKFRGHFLIEGDLNPDNSDVDKLFIQLVQTYNQLFEENPINASGVDAKAILSARLSKSRRLENLIAQLPGEKKNGLFGNLIALSLGLTPNFKSNFDLAEDAKLQLSKDTYDDDLDNLLAQIGDQYADLFLAAKNLSDAILLSDILRVNTEITKAPLSASMIKRYDEHHQDLTLLKALVRQQLPEKYKEIFFDQSKNGYAGYIDGGASQEEFYKFIKPILEKMDGTEELLVKLNREDLLRKQRTFDNGSIPHQIHLGELHAILRRQEDFYPFLKDNREKIEKILTFRIPYYVGPLARGNSRFAWMTRKSEETITPWNFEEVVDKGASAQSFIERMTNFDKNLPNEKVLPKHSLLYEYFTVYNELTKVKYVTEGMRKPAFLSGEQKKAIVDLLFKTNRKVTVKQLKEDYFKKIECFDSVEISGVEDRFNASLGTYHDLLKIIKDKDFLDNEENEDILEDIVLTLTLFEDREMIEERLKTYAHLFDDKVMKQLKRRRYTGWGRLSRKLINGIRDKQSGKTILDFLKSDGFANRNFMQLIHDDSLTFKEDIQKAQVSGQGDSLHEHIANLAGSPAIKKGILQTVKVVDELVKVMGRHKPENIVIEMARENQTTQKGQKNSRERMKRIEEGIKELGSQILKEHPVENTQLQNEKLYLYYLQNGRDMYVDQELDINRLSDYDVDHIVPQSFLKDDSIDNKVLTRSDKARGKSDNVPSEEVVKKMKNYWRQLLNAKLITQRKFDNLTKAERGGLSELDKAGFIKRQLVETRQITKHVAQILDSRMNTKYDENDKLIREVKVITLKSKLVSDFRKDFQFYKVREINNYHHAHDAYLNAVVGTALIKKYPKLESEFVYGDYKVYDVRKMIAKSEQEIGKATAKYFFYSNIMNFFKTEITLANGEIRKRPLIETNGETGEIVWDKGRDFATVRKVLSMPQVNIVKKTEVQTGGFSKESILPKRNSDKLIARKKDWDPKKYGGFDSPTVAYSVLVVAKVEKGKSKKLKSVKELLGITIMERSSFEKNPIDFLEAKGYKEVKKDLIIKLPKYSLFELENGRKRMLASAGELQKGNELALPSKYVNFLYLASHYEKLKGSPEDNEQKQLFVEQHKHYLDEIIEQISEFSKRVILADANLDKVLSAYNKHRDKPIREQAENIIHLFTLTNLGAPAAFKYFDTTIDRKRYTSTKEVLDATLIHQSITGLYETRIDLSQLGGDGGGGSEAAAKPAPGGTLNIEDEHRLHETSKEPDVSLGSTWLSDFPQAWAETGGMGLAVRQAPLIIPLKATSTPVSIKQYPMSQEARLGIKPHIQRLLDQGILVPCQSPWNTPLLPVKKPGTNDYRPVQDLREVNKRVEDIHPTVPNPYNLLSGLPPSHQWYTVLDLKDAFFCLRLHPTSQPLFAFEWRDPEMGISGQLTWTRLPQGFKNSPTLFDEALHRDLADFRIQHPDLILLQYVDDLLLAATSELDCQQGTRALLQTLGNLGYRASAKKAQICQKQVKYLGYLLKEGQRWLTEARKETVMGQPTPKTPRQLREFLGTAGFCRLWIPGFAEMAAPLYPLTKTGTLFNWGPDQQKAYQEIKQALLTAPALGLPDLTKPFELFVDEKQGYAKGVLTQKLGPWRRPVAYLSKKLDPVAAGWPPCLRMVAAIAVLTKDAGKLTMGQPLVILAPHAVEALVKQPPDRWLSNARMTHYQALLLDTDRVQFGPVVALNPATLLPLPEEGLQHNCLDILAEAHGTRPDLTDQPLPDADHTWYTDGSSLLQEGQRKAGAAVTTETEVIWAKALPAGTSAQRAELIALTQALKMAEGKKLNVYTDSRYAFATAHIHGEIYRRRGLLTSEGKEIKNKDEILALLKALFLPKRLSIIHCPGHQKGHSAEARGNRMADQAARKAAITETPDTSTLLAGKRTADGSEFEKRTADGSEFESPKKKAKVE

SEQ ID NO: 7201 - protein, 2090 aa, synthetic construct
MPAAKRVKLDGGDKKYSIGLDIGTNSVGWAVITDEYKVPSKKFKVLGNTDRHSIKKNLIGALLFDSGETAEATRLKRTARRRYTRRKNRICYLQEIFSNEMAKVDDSFFHRLEESFLVEEDKKHERHPIFGNIVDEVAYHEKYPTIYHLRKKLVDSTDKADLRLIYLALAHMIKFRGHFLIEGDLNPDNSDVDKLFIQLVQTYNQLFEENPINASGVDAKAILSARLSKSRRLENLIAQLPGEKKNGLFGNLIALSLGLTPNFKSNFDLAEDAKLQLSKDTYDDDLDNLLAQIGDQYADLFLAAKNLSDAILLSDILRVNTEITKAPLSASMIKRYDEHHQDLTLLKALVRQQLPEKYKEIFFDQSKNGYAGYIDGGASQEEFYKFIKPILEKMDGTEELLVKLNREDLLRKQRTFDNGSIPHQIHLGELHAILRRQEDFYPFLKDNREKIEKILTFRIPYYVGPLARGNSRFAWMTRKSEETITPWNFEEVVDKGASAQSFIERMTNFDKNLPNEKVLPKHSLLYEYFTVYNELTKVKYVTEGMRKPAFLSGEQKKAIVDLLFKTNRKVTVKQLKEDYFKKIECFDSVEISGVEDRFNASLGTYHDLLKIIKDKDFLDNEENEDILEDIVLTLTLFEDREMIEERLKTYAHLFDDKVMKQLKRRRYTGWGRLSRKLINGIRDKQSGKTILDFLKSDGFANRNFMQLIHDDSLTFKEDIQKAQVSGQGDSLHEHIANLAGSPAIKKGILQTVKVVDELVKVMGRHKPENIVIEMARENQTTQKGQKNSRERMKRIEEGIKELGSQILKEHPVENTQLQNEKLYLYYLQNGRDMYVDQELDINRLSDYDVDHIVPQSFLKDDSIDNKVLTRSDKARGKSDNVPSEEVVKKMKNYWRQLLNAKLITQRKFDNLTKAERGGLSELDKAGFIKRQLVETRQITKHVAQILDSRMNTKYDENDKLIREVKVITLKSKLVSDFRKDFQFYKVREINNYHHAHDAYLNAVVGTALIKKYPKLESEFVYGDYKVYDVRKMIAKSEQEIGKATAKYFFYSNIMNFFKTEITLANGEIRKRPLIETNGETGEIVWDKGRDFATVRKVLSMPQVNIVKKTEVQTGGFSKESILPKRNSDKLIARKKDWDPKKYGGFDSPTVAYSVLVVAKVEKGKSKKLKSVKELLGITIMERSSFEKNPIDFLEAKGYKEVKKDLIIKLPKYSLFELENGRKRMLASAGELQKGNELALPSKYVNFLYLASHYEKLKGSPEDNEQKQLFVEQHKHYLDEIIEQISEFSKRVILADANLDKVLSAYNKHRDKPIREQAENIIHLFTLTNLGAPAAFKYFDTTIDRKRYTSTKEVLDATLIHQSITGLYETRIDLSQLGGDGGGGSEAAAKPAPGGTLQLDDEYRLYSPLVKPDQNIQFWLEQFPQAWAETAGMGLAKQVPPQVIQLKASATPVSVRQYPLSKEAQEGIRPHVQRLIQQGILVPVQSPWNTPLLPVRKPGTNDYRPVQDLREVNKRVQDIHPTVPNPYNLLCALPPQRSWYTVLDLKDAFFCLRLHPTSQPLFAFEWRDPGTGRTGQLTWTRLPQGFKNSPTIFDEALHRDLANFRIQHPQVTLLQYVDDLLLAGATKQDCLEGTKALLLELSDLGYRASAKKAQICRREVTYLGYSLRDGQRWLTEARKKTVVQIPAPTTAKQVREFLGTAGFCRLWIPGFATLAAPLYPLTKEKGEFSWAPEHQKAFDAIKKALLSAPALALPDVTKPFTLYVDERKGVARGVLTQTLGPWRRPVAYLSKKLDPVASGWPVCLKAIAAVAILVKDADKLTLGQNITVIAPHALENIVRQPPDRWMTNARMTHYQSLLLTERVTFAPPAALNPATLLPEETDEPVTHDCHQLLIEETGVRKDLTDIPLTGEVLTWFTDGSSYVVEGKRMAGAAVVDGTRTIWASSLPEGTSAQKAELMALTQALRLAEGKSINIYTDSRYAFATAHVHGAIYKQRGLLTSAGREIKNKEEILSLLEALHLPKRLAIIHCPGHQKAKDPISRGNQMADRVAKQAAQGVNLLAGKRTADGSEFEKRTADGSEFESPKKKAKVE

SEQ ID NO: 7202 - protein, 2096 aa, synthetic construct
MPAAKRVKLDGGDKKYSIGLDIGTNSVGWAVITDEYKVPSKKFKVLGNTDRHSIKKNLIGALLFDSGETAEATRLKRTARRRYTRRKNRICYLQEIFSNEMAKVDDSFFHRLEESFLVEEDKKHERHPIFGNIVDEVAYHEKYPTIYHLRKKLVDSTDKADLRLIYLALAHMIKFRGHFLIEGDLNPDNSDVDKLFIQLVQTYNQLFEENPINASGVDAKAILSARLSKSRRLENLIAQLPGEKKNGLFGNLIALSLGLTPNFKSNFDLAEDAKLQLSKDTYDDDLDNLLAQIGDQYADLFLAAKNLSDAILLSDILRVNTEITKAPLSASMIKRYDEHHQDLTLLKALVRQQLPEKYKEIFFDQSKNGYAGYIDGGASQEEFYKFIKPILEKMDGTEELLVKLNREDLLRKQRTFDNGSIPHQIHLGELHAILRRQEDFYPFLKDNREKIEKILTFRIPYYVGPLARGNSRFAWMTRKSEETITPWNFEEVVDKGASAQSFIERMTNFDKNLPNEKVLPKHSLLYEYFTVYNELTKVKYVTEGMRKPAFLSGEQKKAIVDLLFKTNRKVTVKQLKEDYFKKIECFDSVEISGVEDRFNASLGTYHDLLKIIKDKDFLDNEENEDILEDIVLTLTLFEDREMIEERLKTYAHLFDDKVMKQLKRRRYTGWGRLSRKLINGIRDKQSGKTILDFLKSDGFANRNFMQLIHDDSLTFKEDIQKAQVSGQGDSLHEHIANLAGSPAIKKGILQTVKVVDELVKVMGRHKPENIVIEMARENQTTQKGQKNSRERMKRIEEGIKELGSQILKEHPVENTQLQNEKLYLYYLQNGRDMYVDQELDINRLSDYDVDHIVPQSFLKDDSIDNKVLTRSDKARGKSDNVPSEEVVKKMKNYWRQLLNAKLITQRKFDNLTKAERGGLSELDKAGFIKRQLVETRQITKHVAQILDSRMNTKYDENDKLIREVKVITLKSKLVSDFRKDFQFYKVREINNYHHAHDAYLNAVVGTALIKKYPKLESEFVYGDYKVYDVRKMIAKSEQEIGKATAKYFFYSNIMNFFKTEITLANGEIRKRPLIETNGETGEIVWDKGRDFATVRKVLSMPQVNIVKKTEVQTGGFSKESILPKRNSDKLIARKKDWDPKKYGGFDSPTVAYSVLVVAKVEKGKSKKLKSVKELLGITIMERSSFEKNPIDFLEAKGYKEVKKDLIIKLPKYSLFELENGRKRMLASAGELQKGNELALPSKYVNFLYLASHYEKLKGSPEDNEQKQLFVEQHKHYLDEIIEQISEFSKRVILADANLDKVLSAYNKHRDKPIREQAENIIHLFTLTNLGAPAAFKYFDTTIDRKRYTSTKEVLDATLIHQSITGLYETRIDLSQLGGDGGGGSEAAAKPAPGGTLNIEDEYRLHETSKEPDVPLGSTWLSDFPQAWAETGGMGLAVRQAPLIIPLKATSTPVSIKQYPMSQEARLGIKPHIQRLLDQGILVPCQSPWNTPLLPVKKPGTNDYRPVQDLREVNKRVEDIHPTVPNPYNLLSGLPPSHQWYTVLDLKDAFFCLRLHPTSQPLFAFEWRDPEMGISGQLTWTRLPQGFKNSPTLFDEALHRDLADFRIQHPDLILLQYVDDLLLAATSEQDCQRGTRALLQTLGNLGYRASAKKAQICQKQVKYLGYLLKEGQRWLTEARKETVMGQPTPKTPRQLREFLGTAGFCRLWIPGFAEMAAPLYPLTKTGTLFNWGPDQQKAYQEIKQALLTAPALGLPDLTKPFELFVDEKQGYAKGVLTQKLGPWRRPVAYLSKKLDPVAAGWPPCLRMVAAIAVLTKDAGKLTMGQPLVILAPHAVEALVKQPPDRWLSNARMTHYQAMLLDTDRVQFGPVVALNPATLLPLPEKEAPHDCLEILAETHGTRPDLTDQPIPDADYTWYTDGSSFLQEGQRRAGAAVTTETEVIWARALPAGTSAQRAELIALTQALKMAEGKKLNVYTDSRYAFATAHVHGEIYRRRGLLTSEGREIKNKNEILALLKALFLPKRLSIIHCPGHQKGNSAEARGNRMADQAAREAAMKAVLETSTLLAGKRTADGSEFEKRTADGSEFESPKKKAKVE

SEQ ID NO: 7203 - protein, 2096 aa, synthetic construct
MPAAKRVKLDGGDKKYSIGLDIGTNSVGWAVITDEYKVPSKKFKVLGNTDRHSIKKNLIGALLFDSGETAEATRLKRTARRRYTRRKNRICYLQEIFSNEMAKVDDSFFHRLEESFLVEEDKKHERHPIFGNIVDEVAYHEKYPTIYHLRKKLVDSTDKADLRLIYLALAHMIKFRGHFLIEGDLNPDNSDVDKLFIQLVQTYNQLFEENPINASGVDAKAILSARLSKSRRLENLIAQLPGEKKNGLFGNLIALSLGLTPNFKSNFDLAEDAKLQLSKDTYDDDLDNLLAQIGDQYADLFLAAKNLSDAILLSDILRVNTEITKAPLSASMIKRYDEHHQDLTLLKALVRQQLPEKYKEIFFDQSKNGYAGYIDGGASQEEFYKFIKPILEKMDGTEELLVKLNREDLLRKQRTFDNGSIPHQIHLGELHAILRRQEDFYPFLKDNREKIEKILTFRIPYYVGPLARGNSRFAWMTRKSEETITPWNFEEVVDKGASAQSFIERMTNFDKNLPNEKVLPKHSLLYEYFTVYNELTKVKYVTEGMRKPAFLSGEQKKAIVDLLFKTNRKVTVKQLKEDYFKKIECFDSVEISGVEDRFNASLGTYHDLLKIIKDKDFLDNEENEDILEDIVLTLTLFEDREMIEERLKTYAHLFDDKVMKQLKRRRYTGWGRLSRKLINGIRDKQSGKTILDFLKSDGFANRNFMQLIHDDSLTFKEDIQKAQVSGQGDSLHEHIANLAGSPAIKKGILQTVKVVDELVKVMGRHKPENIVIEMARENQTTQKGQKNSRERMKRIEEGIKELGSQILKEHPVENTQLQNEKLYLYYLQNGRDMYVDQELDINRLSDYDVDHIVPQSFLKDDSIDNKVLTRSDKARGKSDNVPSEEVVKKMKNYWRQLLNAKLITQRKFDNLTKAERGGLSELDKAGFIKRQLVETRQITKHVAQILDSRMNTKYDENDKLIREVKVITLKSKLVSDFRKDFQFYKVREINNYHHAHDAYLNAVVGTALIKKYPKLESEFVYGDYKVYDVRKMIAKSEQEIGKATAKYFFYSNIMNFFKTEITLANGEIRKRPLIETNGETGEIVWDKGRDFATVRKVLSMPQVNIVKKTEVQTGGFSKESILPKRNSDKLIARKKDWDPKKYGGFDSPTVAYSVLVVAKVEKGKSKKLKSVKELLGITIMERSSFEKNPIDFLEAKGYKEVKKDLIIKLPKYSLFELENGRKRMLASAGELQKGNELALPSKYVNFLYLASHYEKLKGSPEDNEQKQLFVEQHKHYLDEIIEQISEFSKRVILADANLDKVLSAYNKHRDKPIREQAENIIHLFTLTNLGAPAAFKYFDTTIDRKRYTSTKEVLDATLIHQSITGLYETRIDLSQLGGDGGGGSEAAAKPAPGGTLNIEDEYRLHETSKEPDVPLGSTWLSDFPQAWAETGGMGLAVRQAPLIIPLKATSTPVSIKQYPMSQEARLGIKPHIQRLLDQGILVPCQSPWNTPLLPVKKPGTNDYRPVQDLREVNKRVEDIHPTVPNPYNLLSGLPPSHQWYTVLDLKDAFFCLRLHPTSQPLFAFEWRDPEMGISGQLTWTRLPQGFKNSPTLFNEALHRDLADFRIQHPDLILLQYVDDLLLAATSEQDCQRGTRALLQTLGNLGYRASAKKAQICQKQVKYLGYLLKEGQRWLTEARKETVMGQPTPKTPRQLREFLGTAGFCRLWIPGFAEMAAPLYPLTKPGTLFNWGPDQQKAYQEIKQALLTAPALGLPDLTKPFELFVDEKQGYAKGVLTQKLGPWRRPVAYLSKKLDPVAAGWPPCLRMVAAIAVLTKDAGKLTMGQPLVILAPHAVEALVKQPPDRWLSNARMTHYQAMLLDTDRVQFGPVVALNPATLLPLPEKEAPHDCLEILAETHGTRPDLTDQPIPDADYTWYTDGSSFLQEGQRRAGAAVTTETEVIWARALPAGTSAQRAELIALTQALKMAEGKKLNVYTDSRYAFATAHVHGEIYRRRGWLTSEGREIKNKNEILALLKALFLPKRLSIIHCPGHQKGNSAEARGNRMADQAAREAAMKAVLETSTLLAGKRTADGSEFEKRTADGSEFESPKKKAKVE

SEQ ID NO: 7204 - protein, 2098 aa, synthetic construct
MPAAKRVKLDGGDKKYSIGLDIGTNSVGWAVITDEYKVPSKKFKVLGNTDRHSIKKNLIGALLFDSGETAEATRLKRTARRRYTRRKNRICYLQEIFSNEMAKVDDSFFHRLEESFLVEEDKKHERHPIFGNIVDEVAYHEKYPTIYHLRKKLVDSTDKADLRLIYLALAHMIKFRGHFLIEGDLNPDNSDVDKLFIQLVQTYNQLFEENPINASGVDAKAILSARLSKSRRLENLIAQLPGEKKNGLFGNLIALSLGLTPNFKSNFDLAEDAKLQLSKDTYDDDLDNLLAQIGDQYADLFLAAKNLSDAILLSDILRVNTEITKAPLSASMIKRYDEHHQDLTLLKALVRQQLPEKYKEIFFDQSKNGYAGYIDGGASQEEFYKFIKPILEKMDGTEELLVKLNREDLLRKQRTFDNGSIPHQIHLGELHAILRRQEDFYPFLKDNREKIEKILTFRIPYYVGPLARGNSRFAWMTRKSEETITPWNFEEVVDKGASAQSFIERMTNFDKNLPNEKVLPKHSLLYEYFTVYNELTKVKYVTEGMRKPAFLSGEQKKAIVDLLFKTNRKVTVKQLKEDYFKKIECFDSVEISGVEDRFNASLGTYHDLLKIIKDKDFLDNEENEDILEDIVLTLTLFEDREMIEERLKTYAHLFDDKVMKQLKRRRYTGWGRLSRKLINGIRDKQSGKTILDFLKSDGFANRNFMQLIHDDSLTFKEDIQKAQVSGQGDSLHEHIANLAGSPAIKKGILQTVKVVDELVKVMGRHKPENIVIEMARENQTTQKGQKNSRERMKRIEEGIKELGSQILKEHPVENTQLQNEKLYLYYLQNGRDMYVDQELDINRLSDYDVDHIVPQSFLKDDSIDNKVLTRSDKARGKSDNVPSEEVVKKMKNYWRQLLNAKLITQRKFDNLTKAERGGLSELDKAGFIKRQLVETRQITKHVAQILDSRMNTKYDENDKLIREVKVITLKSKLVSDFRKDFQFYKVREINNYHHAHDAYLNAVVGTALIKKYPKLESEFVYGDYKVYDVRKMIAKSEQEIGKATAKYFFYSNIMNFFKTEITLANGEIRKRPLIETNGETGEIVWDKGRDFATVRKVLSMPQVNIVKKTEVQTGGFSKESILPKRNSDKLIARKKDWDPKKYGGFDSPTVAYSVLVVAKVEKGKSKKLKSVKELLGITIMERSSFEKNPIDFLEAKGYKEVKKDLIIKLPKYSLFELENGRKRMLASAGELQKGNELALPSKYVNFLYLASHYEKLKGSPEDNEQKQLFVEQHKHYLDEIIEQISEFSKRVILADANLDKVLSAYNKHRDKPIREQAENIIHLFTLTNLGAPAAFKYFDTTIDRKRYTSTKEVLDATLIHQSITGLYETRIDLSQLGGDGGGGSPAPEAAAKGGTAPLEEEYRLFLEAPIQNVTLLEQWKREIPKVWAEINPPGLASTQAPIHVQLLSTALPVRVRQYPITLEAKRSLRETIRKFRAAGILRPVHSPWNTPLLPVRKSGTSEYRMVQDLREVNKRVETIHPTVPNPYTLLSLLPPDRIWYSVLDLKDAFFCIPLAPESQLIFAFEWADAEEGESGQLTWTRLPQGFKNSPTLFNEALNRDLQGFRLDHPSVSLLQYVDDLLIAADTQAACLSATRDLLMTLAELGYRVSGKKAQLCQEEVTYLGFKIHKGSRSLSNSRTQAILQIPVPKTKRQVREFLGKIGYCRLFIPGFAELAQPLYAATRPGNDPLVWGEKEEEAFQSLKLALTQPPALALPSLDKPFQLFVEETSGAAKGVLTQALGPWKRPVAYLSKRLDPVAAGWPRCLRAIAAAALLTREASKLTFGQDIEITSSHNLESLLRSPPDKWLTNARITQYQVLLLDPPRVRFKQTAALNPATLLPETDDTLPIHHCLDTLDSLTSTRPDLTDQPLAQAEATLFTDGSSYIRDGKRYAGAAVVTLDSVIWAEPLPIGTSAQKAELIALTKALEWSKDKSVNIYTDSRYAFATLHVHGMIYRERGWLTAGGKAIKNAPEILALLTAVWLPKRVAVMHCKGHQKDDAPTSTGNRRADEVAREVAIRPLSTQATISAGKRTADGSEFEKRTADGSEFESPKKKAKVE

SEQ ID NO: 7205 - protein, 2218 aa, synthetic construct
MPAAKRVKLDGGDKKYSIGLDIGTNSVGWAVITDEYKVPSKKFKVLGNTDRHSIKKNLIGALLFDSGETAEATRLKRTARRRYTRRKNRICYLQEIFSNEMAKVDDSFFHRLEESFLVEEDKKHERHPIFGNIVDEVAYHEKYPTIYHLRKKLVDSTDKADLRLIYLALAHMIKFRGHFLIEGDLNPDNSDVDKLFIQLVQTYNQLFEENPINASGVDAKAILSARLSKSRRLENLIAQLPGEKKNGLFGNLIALSLGLTPNFKSNFDLAEDAKLQLSKDTYDDDLDNLLAQIGDQYADLFLAAKNLSDAILLSDILRVNTEITKAPLSASMIKRYDEHHQDLTLLKALVRQQLPEKYKEIFFDQSKNGYAGYIDGGASQEEFYKFIKPILEKMDGTEELLVKLNREDLLRKQRTFDNGSIPHQIHLGELHAILRRQEDFYPFLKDNREKIEKILTFRIPYYVGPLARGNSRFAWMTRKSEETITPWNFEEVVDKGASAQSFIERMTNFDKNLPNEKVLPKHSLLYEYFTVYNELTKVKYVTEGMRKPAFLSGEQKKAIVDLLFKTNRKVTVKQLKEDYFKKIECFDSVEISGVEDRFNASLGTYHDLLKIIKDKDFLDNEENEDILEDIVLTLTLFEDREMIEERLKTYAHLFDDKVMKQLKRRRYTGWGRLSRKLINGIRDKQSGKTILDFLKSDGFANRNFMQLIHDDSLTFKEDIQKAQVSGQGDSLHEHIANLAGSPAIKKGILQTVKVVDELVKVMGRHKPENIVIEMARENQTTQKGQKNSRERMKRIEEGIKELGSQILKEHPVENTQLQNEKLYLYYLQNGRDMYVDQELDINRLSDYDVDHIVPQSFLKDDSIDNKVLTRSDKARGKSDNVPSEEVVKKMKNYWRQLLNAKLITQRKFDNLTKAERGGLSELDKAGFIKRQLVETRQITKHVAQILDSRMNTKYDENDKLIREVKVITLKSKLVSDFRKDFQFYKVREINNYHHAHDAYLNAVVGTALIKKYPKLESEFVYGDYKVYDVRKMIAKSEQEIGKATAKYFFYSNIMNFFKTEITLANGEIRKRPLIETNGETGEIVWDKGRDFATVRKVLSMPQVNIVKKTEVQTGGFSKESILPKRNSDKLIARKKDWDPKKYGGFDSPTVAYSVLVVAKVEKGKSKKLKSVKELLGITIMERSSFEKNPIDFLEAKGYKEVKKDLIIKLPKYSLFELENGRKRMLASAGELQKGNELALPSKYVNFLYLASHYEKLKGSPEDNEQKQLFVEQHKHYLDEIIEQISEFSKRVILADANLDKVLSAYNKHRDKPIREQAENIIHLFTLTNLGAPAAFKYFDTTIDRKRYTSTKEVLDATLIHQSITGLYETRIDLSQLGGDGGGGSPAPEAAAKGGTLGDQGSRGSDPLPEPRVTLTVEGIPTEFLVNTGAEHSVLTKPMGKMGSKRTVVAGATGSKVYPWTTKRLLKIGQKQVTHSFLVIPECPAPLLGRDLLTKLKAQIQFSTEGPQVTWEDRPAMCLVLNLEEEYRLHEKPVPPSIDPSWLQLFPMVWAEKAGMGLANQVPPVVVELKSDASPVAVRQYPMSKEAREGIRPHIQRFLDLGILVPCQSPWNTPLLPVKKPGTNDYRPVQDLREVNKRVQDIHPTVPNPYNLLSSLPPSHTWYSVLDLKDAFFCLKLHPNSQPLFAFEWRDPEKGNTGQLTWTRLPQGFKNSPTLFNEALHRDLASFRALNPQVVMLQYVDDLLVAAPTYRDCKEGTRRLLQELSKLGYRVSAKKAQLCREEVTYLGYLLKGGKRWLTPARKATVMKIPTPTTPRQVREFLGTAGFCRLWIPGFASLAAPLYPLTRPKVPFTWTEAHQEAFGRIKEALLSAPALALPDLTKPFALYVDEKEGVARGVLTQTLGPWRRPVAYLSKKLDPVASGWPTCLKAIAAVALLLKDADKLTLGQNVLVIAPHNLESIVRQPPDRWMTNARMTHYQSLLLNERVSFAPPAILNPATLLPVESDDTPIHICSEILAEETGTRPDLRDQPLPGVPAWYTDGSSFIMDGRRQAGAAIVDNKRTVWASNLPEGTSAQKAELIALTQALRLAEGKSINIYTDSRYAFATAHVHGAIYKQRGWLTSAGKDIKNKEEILALLEAIHLPKRVAIIHCPGHQRGTDPVATGNRKADEAAKQAAQSTRILTETTKNAGKRTADGSEFEKRTADGSEFESPKKKAKVE

SEQ ID NO: 7206 - protein, 2096 aa, synthetic construct
MPAAKRVKLDGGDKKYSIGLDIGTNSVGWAVITDEYKVPSKKFKVLGNTDRHSIKKNLIGALLFDSGETAEATRLKRTARRRYTRRKNRICYLQEIFSNEMAKVDDSFFHRLEESFLVEEDKKHERHPIFGNIVDEVAYHEKYPTIYHLRKKLVDSTDKADLRLIYLALAHMIKFRGHFLIEGDLNPDNSDVDKLFIQLVQTYNQLFEENPINASGVDAKAILSARLSKSRRLENLIAQLPGEKKNGLFGNLIALSLGLTPNFKSNFDLAEDAKLQLSKDTYDDDLDNLLAQIGDQYADLFLAAKNLSDAILLSDILRVNTEITKAPLSASMIKRYDEHHQDLTLLKALVRQQLPEKYKEIFFDQSKNGYAGYIDGGASQEEFYKFIKPILEKMDGTEELLVKLNREDLLRKQRTFDNGSIPHQIHLGELHAILRRQEDFYPFLKDNREKIEKILTFRIPYYVGPLARGNSRFAWMTRKSEETITPWNFEEVVDKGASAQSFIERMTNFDKNLPNEKVLPKHSLLYEYFTVYNELTKVKYVTEGMRKPAFLSGEQKKAIVDLLFKTNRKVTVKQLKEDYFKKIECFDSVEISGVEDRFNASLGTYHDLLKIIKDKDFLDNEENEDILEDIVLTLTLFEDREMIEERLKTYAHLFDDKVMKQLKRRRYTGWGRLSRKLINGIRDKQSGKTILDFLKSDGFANRNFMQLIHDDSLTFKEDIQKAQVSGQGDSLHEHIANLAGSPAIKKGILQTVKVVDELVKVMGRHKPENIVIEMARENQTTQKGQKNSRERMKRIEEGIKELGSQILKEHPVENTQLQNEKLYLYYLQNGRDMYVDQELDINRLSDYDVDHIVPQSFLKDDSIDNKVLTRSDKARGKSDNVPSEEVVKKMKNYWRQLLNAKLITQRKFDNLTKAERGGLSELDKAGFIKRQLVETRQITKHVAQILDSRMNTKYDENDKLIREVKVITLKSKLVSDFRKDFQFYKVREINNYHHAHDAYLNAVVGTALIKKYPKLESEFVYGDYKVYDVRKMIAKSEQEIGKATAKYFFYSNIMNFFKTEITLANGEIRKRPLIETNGETGEIVWDKGRDFATVRKVLSMPQVNIVKKTEVQTGGFSKESILPKRNSDKLIARKKDWDPKKYGGFDSPTVAYSVLVVAKVEKGKSKKLKSVKELLGITIMERSSFEKNPIDFLEAKGYKEVKKDLIIKLPKYSLFELENGRKRMLASAGELQKGNELALPSKYVNFLYLASHYEKLKGSPEDNEQKQLFVEQHKHYLDEIIEQISEFSKRVILADANLDKVLSAYNKHRDKPIREQAENIIHLFTLTNLGAPAAFKYFDTTIDRKRYTSTKEVLDATLIHQSITGLYETRIDLSQLGGDGGGGSPAPEAAAKGGTLNIEDEHRLHETSKEPDVSLGSTWLSDFPQAWAETGGMGLAVRQAPLIIPLKATSTPVSIKQYPMSQEARLGIKPHIQRLLDQGILVPCQSPWNTPLLPVKKPGTNDYRPVQDLREVNKRVEDIHPTVPNPYNLLSGLPPSHQWYTVLDLKDAFFCLRLHPTSQPLFAFEWRDPEMGISGQLTWTRLPQGFKNSPTLFDEALHRDLADFRIQHPDLILLQYVDDLLLAATSELDCQQGTRALLQTLGNLGYRASAKKAQICQKQVKYLGYLLKEGQRWLTEARKETVMGQPTPKTPRQLREFLGTAGFCRLWIPGFAEMAAPLYPLTKTGTLFNWGPDQQKAYQEIKQALLTAPALGLPDLTKPFELFVDEKQGYAKGVLTQKLGPWRRPVAYLSKKLDPVAAGWPPCLRMVAAIAVLTKDAGKLTMGQPLVILAPHAVEALVKQPPDRWLSNARMTHYQALLLDTDRVQFGPVVALNPATLLPLPEEGLQHNCLDILAEAHGTRPDLTDQPLPDADHTWYTDGSSLLQEGQRKAGAAVTTETEVIWAKALPAGTSAQRAELIALTQALKMAEGKKLNVYTDSRYAFATAHIHGEIYRRRGLLTSEGKEIKNKDEILALLKALFLPKRLSIIHCPGHQKGHSAEARGNRMADQAARKAAITETPDTSTLLAGKRTADGSEFEKRTADGSEFESPKKKAKVE

SEQ ID NO: 7207 - protein, 2090 aa, synthetic construct
MPAAKRVKLDGGDKKYSIGLDIGTNSVGWAVITDEYKVPSKKFKVLGNTDRHSIKKNLIGALLFDSGETAEATRLKRTARRRYTRRKNRICYLQEIFSNEMAKVDDSFFHRLEESFLVEEDKKHERHPIFGNIVDEVAYHEKYPTIYHLRKKLVDSTDKADLRLIYLALAHMIKFRGHFLIEGDLNPDNSDVDKLFIQLVQTYNQLFEENPINASGVDAKAILSARLSKSRRLENLIAQLPGEKKNGLFGNLIALSLGLTPNFKSNFDLAEDAKLQLSKDTYDDDLDNLLAQIGDQYADLFLAAKNLSDAILLSDILRVNTEITKAPLSASMIKRYDEHHQDLTLLKALVRQQLPEKYKEIFFDQSKNGYAGYIDGGASQEEFYKFIKPILEKMDGTEELLVKLNREDLLRKQRTFDNGSIPHQIHLGELHAILRRQEDFYPFLKDNREKIEKILTFRIPYYVGPLARGNSRFAWMTRKSEETITPWNFEEVVDKGASAQSFIERMTNFDKNLPNEKVLPKHSLLYEYFTVYNELTKVKYVTEGMRKPAFLSGEQKKAIVDLLFKTNRKVTVKQLKEDYFKKIECFDSVEISGVEDRFNASLGTYHDLLKIIKDKDFLDNEENEDILEDIVLTLTLFEDREMIEERLKTYAHLFDDKVMKQLKRRRYTGWGRLSRKLINGIRDKQSGKTILDFLKSDGFANRNFMQLIHDDSLTFKEDIQKAQVSGQGDSLHEHIANLAGSPAIKKGILQTVKVVDELVKVMGRHKPENIVIEMARENQTTQKGQKNSRERMKRIEEGIKELGSQILKEHPVENTQLQNEKLYLYYLQNGRDMYVDQELDINRLSDYDVDHIVPQSFLKDDSIDNKVLTRSDKARGKSDNVPSEEVVKKMKNYWRQLLNAKLITQRKFDNLTKAERGGLSELDKAGFIKRQLVETRQITKHVAQILDSRMNTKYDENDKLIREVKVITLKSKLVSDFRKDFQFYKVREINNYHHAHDAYLNAVVGTALIKKYPKLESEFVYGDYKVYDVRKMIAKSEQEIGKATAKYFFYSNIMNFFKTEITLANGEIRKRPLIETNGETGEIVWDKGRDFATVRKVLSMPQVNIVKKTEVQTGGFSKESILPKRNSDKLIARKKDWDPKKYGGFDSPTVAYSVLVVAKVEKGKSKKLKSVKELLGITIMERSSFEKNPIDFLEAKGYKEVKKDLIIKLPKYSLFELENGRKRMLASAGELQKGNELALPSKYVNFLYLASHYEKLKGSPEDNEQKQLFVEQHKHYLDEIIEQISEFSKRVILADANLDKVLSAYNKHRDKPIREQAENIIHLFTLTNLGAPAAFKYFDTTIDRKRYTSTKEVLDATLIHQSITGLYETRIDLSQLGGDGGGGSPAPEAAAKGGTLQLDDEYRLYSPLVKPDQNIQFWLEQFPQAWAETAGMGLAKQVPPQVIQLKASATPVSVRQYPLSKEAQEGIRPHVQRLIQQGILVPVQSPWNTPLLPVRKPGTNDYRPVQDLREVNKRVQDIHPTVPNPYNLLCALPPQRSWYTVLDLKDAFFCLRLHPTSQPLFAFEWRDPGTGRTGQLTWTRLPQGFKNSPTIFDEALHRDLANFRIQHPQVTLLQYVDDLLLAGATKQDCLEGTKALLLELSDLGYRASAKKAQICRREVTYLGYSLRDGQRWLTEARKKTVVQIPAPTTAKQVREFLGTAGFCRLWIPGFATLAAPLYPLTKEKGEFSWAPEHQKAFDAIKKALLSAPALALPDVTKPFTLYVDERKGVARGVLTQTLGPWRRPVAYLSKKLDPVASGWPVCLKAIAAVAILVKDADKLTLGQNITVIAPHALENIVRQPPDRWMTNARMTHYQSLLLTERVTFAPPAALNPATLLPEETDEPVTHDCHQLLIEETGVRKDLTDIPLTGEVLTWFTDGSSYVVEGKRMAGAAVVDGTRTIWASSLPEGTSAQKAELMALTQALRLAEGKSINIYTDSRYAFATAHVHGAIYKQRGLLTSAGREIKNKEEILSLLEALHLPKRLAIIHCPGHQKAKDPISRGNQMADRVAKQAAQGVNLLAGKRTADGSEFEKRTADGSEFESPKKKAKVE

SEQ ID NO: 7208 - protein, 2087 aa, synthetic construct
MPAAKRVKLDGGDKKYSIGLDIGTNSVGWAVITDEYKVPSKKFKVLGNTDRHSIKKNLIGALLFDSGETAEATRLKRTARRRYTRRKNRICYLQEIFSNEMAKVDDSFFHRLEESFLVEEDKKHERHPIFGNIVDEVAYHEKYPTIYHLRKKLVDSTDKADLRLIYLALAHMIKFRGHFLIEGDLNPDNSDVDKLFIQLVQTYNQLFEENPINASGVDAKAILSARLSKSRRLENLIAQLPGEKKNGLFGNLIALSLGLTPNFKSNFDLAEDAKLQLSKDTYDDDLDNLLAQIGDQYADLFLAAKNLSDAILLSDILRVNTEITKAPLSASMIKRYDEHHQDLTLLKALVRQQLPEKYKEIFFDQSKNGYAGYIDGGASQEEFYKFIKPILEKMDGTEELLVKLNREDLLRKQRTFDNGSIPHQIHLGELHAILRRQEDFYPFLKDNREKIEKILTFRIPYYVGPLARGNSRFAWMTRKSEETITPWNFEEVVDKGASAQSFIERMTNFDKNLPNEKVLPKHSLLYEYFTVYNELTKVKYVTEGMRKPAFLSGEQKKAIVDLLFKTNRKVTVKQLKEDYFKKIECFDSVEISGVEDRFNASLGTYHDLLKIIKDKDFLDNEENEDILEDIVLTLTLFEDREMIEERLKTYAHLFDDKVMKQLKRRRYTGWGRLSRKLINGIRDKQSGKTILDFLKSDGFANRNFMQLIHDDSLTFKEDIQKAQVSGQGDSLHEHIANLAGSPAIKKGILQTVKVVDELVKVMGRHKPENIVIEMARENQTTQKGQKNSRERMKRIEEGIKELGSQILKEHPVENTQLQNEKLYLYYLQNGRDMYVDQELDINRLSDYDVDHIVPQSFLKDDSIDNKVLTRSDKARGKSDNVPSEEVVKKMKNYWRQLLNAKLITQRKFDNLTKAERGGLSELDKAGFIKRQLVETRQITKHVAQILDSRMNTKYDENDKLIREVKVITLKSKLVSDFRKDFQFYKVREINNYHHAHDAYLNAVVGTALIKKYPKLESEFVYGDYKVYDVRKMIAKSEQEIGKATAKYFFYSNIMNFFKTEITLANGEIRKRPLIETNGETGEIVWDKGRDFATVRKVLSMPQVNIVKKTEVQTGGFSKESILPKRNSDKLIARKKDWDPKKYGGFDSPTVAYSVLVVAKVEKGKSKKLKSVKELLGITIMERSSFEKNPIDFLEAKGYKEVKKDLIIKLPKYSLFELENGRKRMLASAGELQKGNELALPSKYVNFLYLASHYEKLKGSPEDNEQKQLFVEQHKHYLDEIIEQISEFSKRVILADANLDKVLSAYNKHRDKPIREQAENIIHLFTLTNLGAPAAFKYFDTTIDRKRYTSTKEVLDATLIHQSITGLYETRIDLSQLGGDGGGGSPAPEAAAKGGIPWLMKKPLQLTTLVPLQEYEERLLKQTMLTGSYKEKLQSLFLKYDALWQHWENQVGHRRIKPHHIATGTVNPRPQKQYPINPKAKASIQTVINDLLKQGVLIQQNSIMNTPVYPVPKPDGKWRMVLDYREVNKTIPLIAAQNQHSAGILSSIFRGKYKTTLDLSNGFWAHSITPESYWLTAFTWLGQQYCWTRLPQGFLNSPALFNADVVDLLKEVPNVQVYVDDIYISHDDPREHLEQLEKVFSLLLNAGYVVSLKKSEIAQHEVEFLGFNITKEGRGLTETFKQKLLNITPPRDLKQLQSILGLLNFARNFIPNFSELVKPLYNIIATAPGKYITWTTDNSQQLQNIISMLNSAENLEERNPEVRLIMKVNTSPSAGYIRFYNEFAKRPIMYLNYVYTKAEVKFTNTEKLLTTIHKGLIKALDLGMGQEILVYSPIVSMTKIQKTPLPERKALPIRWITWMSYLEDPRIQFHYDKTLPELQQVPTVTDDIIAKIKHPSEFSMVFYTDGSAIKHPNVNKSHNAGMGIAQVQFKPEFTVINTWSIPLGDHTAQLAEVAAVEFACKKALKIDGPVLIVTDSFYVAESVNKELPYWQSNGFFNNKKKPLKHVSKWKSIADCIQLKPDIIIIHEKGHQPTASTFHTEGNNLADKLATQGSYVVNAGKRTADGSEFEKRTADGSEFESPKKKAKVE

SEQ ID NO: 7209 - protein, 2094 aa, synthetic construct
MPAAKRVKLDGGDKKYSIGLDIGTNSVGWAVITDEYKVPSKKFKVLGNTDRHSIKKNLIGALLFDSGETAEATRLKRTARRRYTRRKNRICYLQEIFSNEMAKVDDSFFHRLEESFLVEEDKKHERHPIFGNIVDEVAYHEKYPTIYHLRKKLVDSTDKADLRLIYLALAHMIKFRGHFLIEGDLNPDNSDVDKLFIQLVQTYNQLFEENPINASGVDAKAILSARLSKSRRLENLIAQLPGEKKNGLFGNLIALSLGLTPNFKSNFDLAEDAKLQLSKDTYDDDLDNLLAQIGDQYADLFLAAKNLSDAILLSDILRVNTEITKAPLSASMIKRYDEHHQDLTLLKALVRQQLPEKYKEIFFDQSKNGYAGYIDGGASQEEFYKFIKPILEKMDGTEELLVKLNREDLLRKQRTFDNGSIPHQIHLGELHAILRRQEDFYPFLKDNREKIEKILTFRIPYYVGPLARGNSRFAWMTRKSEETITPWNFEEVVDKGASAQSFIERMTNFDKNLPNEKVLPKHSLLYEYFTVYNELTKVKYVTEGMRKPAFLSGEQKKAIVDLLFKTNRKVTVKQLKEDYFKKIECFDSVEISGVEDRFNASLGTYHDLLKIIKDKDFLDNEENEDILEDIVLTLTLFEDREMIEERLKTYAHLFDDKVMKQLKRRRYTGWGRLSRKLINGIRDKQSGKTILDFLKSDGFANRNFMQLIHDDSLTFKEDIQKAQVSGQGDSLHEHIANLAGSPAIKKGILQTVKVVDELVKVMGRHKPENIVIEMARENQTTQKGQKNSRERMKRIEEGIKELGSQILKEHPVENTQLQNEKLYLYYLQNGRDMYVDQELDINRLSDYDVDHIVPQSFLKDDSIDNKVLTRSDKARGKSDNVPSEEVVKKMKNYWRQLLNAKLITQRKFDNLTKAERGGLSELDKAGFIKRQLVETRQITKHVAQILDSRMNTKYDENDKLIREVKVITLKSKLVSDFRKDFQFYKVREINNYHHAHDAYLNAVVGTALIKKYPKLESEFVYGDYKVYDVRKMIAKSEQEIGKATAKYFFYSNIMNFFKTEITLANGEIRKRPLIETNGETGEIVWDKGRDFATVRKVLSMPQVNIVKKTEVQTGGFSKESILPKRNSDKLIARKKDWDPKKYGGFDSPTVAYSVLVVAKVEKGKSKKLKSVKELLGITIMERSSFEKNPIDFLEAKGYKEVKKDLIIKLPKYSLFELENGRKRMLASAGELQKGNELALPSKYVNFLYLASHYEKLKGSPEDNEQKQLFVEQHKHYLDEIIEQISEFSKRVILADANLDKVLSAYNKHRDKPIREQAENIIHLFTLTNLGAPAAFKYFDTTIDRKRYTSTKEVLDATLIHQSITGLYETRIDLSQLGGDGGGGSPAPEAAAKGGVLNLEEEYRLHEKPVPSSIDPSWLQLFPTVWAERAGMGLANQVPPVVVELRSGASPVAVRQYPMSKEAREGIRPHIQRFLDLGVLVPCQSPWNTPLLPVKKPGTNDYRPVQDLREINKRVQDIHPTVPNPYNLLSSLPPSHTWYSVLDLKDAFFCLKLHPNSQPLFAFEWRDPEKGNTGQLTWTRLPQGFKNSPTLFNEALHRDLAPFRALNPQVVLLQYVDDLLVAAPTYRDCKEGTQKLLQELSKLGYRVSAKKAQLCQKEVTYLGYLLKEGKRWLTPARKATVMKIPPPTTPRQVREFLGTAGFCRLWIPGFASLAAPLYPLTKPSIPFIWTEEHQKAFDRIKEALLSAPALALPDLTKPFTLYVDERAGVARGVLTQTLGPWRRPVAYLSKKLDPVASGWPTCLKAVAAVALLLKDADKLTLGQNVTVIASHSLESIVRQPPDRWMTNARMTHYQSLLLNERVSFAPPAVLNPATLLPVESEATPVHRCSEILAEETGTRRDLKDQPLPGVPAWYTDGSSFIAEGKRRAGAAIVDGKRTVWASSLPEGTSAQKAELVALTQALRLAEGKDINIYTDSRYAFATAHIHGAIYKQRGWLTSAGKDIKNKEEILALLEAIHLPKRVAIIHCPGHQKGNDPVATGNRRADEAAKQAALSTRVLAETTKPAGKRTADGSEFEKRTADGSEFESPKKKAKVE

SEQ ID NO: 7210 - protein, 2102 aa, synthetic construct
MPAAKRVKLDGGDKKYSIGLDIGTNSVGWAVITDEYKVPSKKFKVLGNTDRHSIKKNLIGALLFDSGETAEATRLKRTARRRYTRRKNRICYLQEIFSNEMAKVDDSFFHRLEESFLVEEDKKHERHPIFGNIVDEVAYHEKYPTIYHLRKKLVDSTDKADLRLIYLALAHMIKFRGHFLIEGDLNPDNSDVDKLFIQLVQTYNQLFEENPINASGVDAKAILSARLSKSRRLENLIAQLPGEKKNGLFGNLIALSLGLTPNFKSNFDLAEDAKLQLSKDTYDDDLDNLLAQIGDQYADLFLAAKNLSDAILLSDILRVNTEITKAPLSASMIKRYDEHHQDLTLLKALVRQQLPEKYKEIFFDQSKNGYAGYIDGGASQEEFYKFIKPILEKMDGTEELLVKLNREDLLRKQRTFDNGSIPHQIHLGELHAILRRQEDFYPFLKDNREKIEKILTFRIPYYVGPLARGNSRFAWMTRKSEETITPWNFEEVVDKGASAQSFIERMTNFDKNLPNEKVLPKHSLLYEYFTVYNELTKVKYVTEGMRKPAFLSGEQKKAIVDLLFKTNRKVTVKQLKEDYFKKIECFDSVEISGVEDRFNASLGTYHDLLKIIKDKDFLDNEENEDILEDIVLTLTLFEDREMIEERLKTYAHLFDDKVMKQLKRRRYTGWGRLSRKLINGIRDKQSGKTILDFLKSDGFANRNFMQLIHDDSLTFKEDIQKAQVSGQGDSLHEHIANLAGSPAIKKGILQTVKVVDELVKVMGRHKPENIVIEMARENQTTQKGQKNSRERMKRIEEGIKELGSQILKEHPVENTQLQNEKLYLYYLQNGRDMYVDQELDINRLSDYDVDHIVPQSFLKDDSIDNKVLTRSDKARGKSDNVPSEEVVKKMKNYWRQLLNAKLITQRKFDNLTKAERGGLSELDKAGFIKRQLVETRQITKHVAQILDSRMNTKYDENDKLIREVKVITLKSKLVSDFRKDFQFYKVREINNYHHAHDAYLNAVVGTALIKKYPKLESEFVYGDYKVYDVRKMIAKSEQEIGKATAKYFFYSNIMNFFKTEITLANGEIRKRPLIETNGETGEIVWDKGRDFATVRKVLSMPQVNIVKKTEVQTGGFSKESILPKRNSDKLIARKKDWDPKKYGGFDSPTVAYSVLVVAKVEKGKSKKLKSVKELLGITIMERSSFEKNPIDFLEAKGYKEVKKDLIIKLPKYSLFELENGRKRMLASAGELQKGNELALPSKYVNFLYLASHYEKLKGSPEDNEQKQLFVEQHKHYLDEIIEQISEFSKRVILADANLDKVLSAYNKHRDKPIREQAENIIHLFTLTNLGAPAAFKYFDTTIDRKRYTSTKEVLDATLIHQSITGLYETRIDLSQLGGDGGEAAAKGGSPAPGGTVSLQDEHRLFDIPVTTSLPDVWLQDFPQAWAETGGLGRAKCQAPIIIDLKPTAVPVSIKQYPMSLEAHMGIRQHIIKFLELGVLRPCRSPWNTPLLPVKKPGTQDYRPVQDLREINKRTVDIHPTVPNPYNLLSTLKPDYSWYTVLDLKDAFFCLPLAPQSQELFAFEWKDPERGISGQLTWTRLPQGFKNSPTLFNEALHRDLTDFRTQHPEVTLLQYVDDLLLAAPTKKACTQGTRHLLQELGEKGYRASAKKAQICQTKVTYLGYILSEGKRWLTPGRIETVARIPPPRNPREVREFLGTAGFCRLWIPGFAELAAPLYALTKPSTPFTWQTEHQLAFEALKKALLSAPALGLPDTSKPFTLFLDERQGIAKGVLTQKLGPWKRPVAYLSKKLDPVAAGWPPCLRIMAATAMLVKDSAKLTLGQPLTVITPHTLEAIVRQPPDRWITNARLTHYQALLLDTDRVQFGPPVTLNPATLLPVPENQPSPHDCRQVLAETHGTREDLKDQELPDADHTWYTDGSSYLDSGTRRAGAAVVDGHNTIWAQSLPPGTSAQKAELIALTKALELSKGKKANIYTDSRYAFATAHTHGSIYERRGWLTSEGKEIKNKAEIIALLKALFLPQEVAIIHCPGHQKGQDPVAVGNRQADRVARQAAMAEVLTLATEPDNTSHITAGKRTADGSEFEKRTADGSEFESPKKKAKVE

SEQ ID NO: 7211 - protein, 2087 aa, synthetic construct
MPAAKRVKLDGGDKKYSIGLDIGTNSVGWAVITDEYKVPSKKFKVLGNTDRHSIKKNLIGALLFDSGETAEATRLKRTARRRYTRRKNRICYLQEIFSNEMAKVDDSFFHRLEESFLVEEDKKHERHPIFGNIVDEVAYHEKYPTIYHLRKKLVDSTDKADLRLIYLALAHMIKFRGHFLIEGDLNPDNSDVDKLFIQLVQTYNQLFEENPINASGVDAKAILSARLSKSRRLENLIAQLPGEKKNGLFGNLIALSLGLTPNFKSNFDLAEDAKLQLSKDTYDDDLDNLLAQIGDQYADLFLAAKNLSDAILLSDILRVNTEITKAPLSASMIKRYDEHHQDLTLLKALVRQQLPEKYKEIFFDQSKNGYAGYIDGGASQEEFYKFIKPILEKMDGTEELLVKLNREDLLRKQRTFDNGSIPHQIHLGELHAILRRQEDFYPFLKDNREKIEKILTFRIPYYVGPLARGNSRFAWMTRKSEETITPWNFEEVVDKGASAQSFIERMTNFDKNLPNEKVLPKHSLLYEYFTVYNELTKVKYVTEGMRKPAFLSGEQKKAIVDLLFKTNRKVTVKQLKEDYFKKIECFDSVEISGVEDRFNASLGTYHDLLKIIKDKDFLDNEENEDILEDIVLTLTLFEDREMIEERLKTYAHLFDDKVMKQLKRRRYTGWGRLSRKLINGIRDKQSGKTILDFLKSDGFANRNFMQLIHDDSLTFKEDIQKAQVSGQGDSLHEHIANLAGSPAIKKGILQTVKVVDELVKVMGRHKPENIVIEMARENQTTQKGQKNSRERMKRIEEGIKELGSQILKEHPVENTQLQNEKLYLYYLQNGRDMYVDQELDINRLSDYDVDHIVPQSFLKDDSIDNKVLTRSDKARGKSDNVPSEEVVKKMKNYWRQLLNAKLITQRKFDNLTKAERGGLSELDKAGFIKRQLVETRQITKHVAQILDSRMNTKYDENDKLIREVKVITLKSKLVSDFRKDFQFYKVREINNYHHAHDAYLNAVVGTALIKKYPKLESEFVYGDYKVYDVRKMIAKSEQEIGKATAKYFFYSNIMNFFKTEITLANGEIRKRPLIETNGETGEIVWDKGRDFATVRKVLSMPQVNIVKKTEVQTGGFSKESILPKRNSDKLIARKKDWDPKKYGGFDSPTVAYSVLVVAKVEKGKSKKLKSVKELLGITIMERSSFEKNPIDFLEAKGYKEVKKDLIIKLPKYSLFELENGRKRMLASAGELQKGNELALPSKYVNFLYLASHYEKLKGSPEDNEQKQLFVEQHKHYLDEIIEQISEFSKRVILADANLDKVLSAYNKHRDKPIREQAENIIHLFTLTNLGAPAAFKYFDTTIDRKRYTSTKEVLDATLIHQSITGLYETRIDLSQLGGDGGEAAAKGGSPAPGGVPWILKKPLELTIKLDLEEQQGTLLNNSILSKKGKEELKQLFEKYSALWQSWENQVGHRRIRPHKIATGTVKPTPQKQYHINPKAKPDIQIVINDLLKQGVLIQKESTMNTPVYPVPKPNGRWRMVLDYRAVNKVTPLIAVQNQHSYGILGSLFKGRYKTTIDLSNGFWAHPIVPEDYWITAFTWQGKQYCWTVLPQGFLNSPGLFNGDVVDLLQGIPNVEVYVDDVYISHDSEKEHLEYLDILFNRLKEAGYIISLKKSNIANSIVDFLGFQITNEGRGLTDTFKEKLENITAPTTLKQLQSILGLLNFARNFIPDFTELIAPLYALIPKSPKNYVPWQIEHSTTLETLITKLNGAEYLQGRKGDKTLIMKVNASYTTGYIRYYNEGEKKPISYVSIVFSKTELKFTELEKLLTTVHKGLLKALDLSMGQNIHVYSPIVSMQNIQKTPQTAKKALASRWLSWLSYLEDPRIRFFYDPQMPALKDLPAVDTGKDNKKHPSNFQHIFYTDGSAITSPTKEGHLNAGMGIVYFINKDGNLQKQQEWSISLGNHTAQFAEIAAFEFALKKCLPLGGNILVVTDSNYVAKAYNEELDVWASNGFVNNRKKPLKHISKWKSVADLKRLRPDVVVTHEPGHQKLDSSPHAYGNNLADQLATQASFKVHAGKRTADGSEFEKRTADGSEFESPKKKAKVE

SEQ ID NO: 7212 - protein, 2095 aa, synthetic construct
MPAAKRVKLDGGDKKYSIGLDIGTNSVGWAVITDEYKVPSKKFKVLGNTDRHSIKKNLIGALLFDSGETAEATRLKRTARRRYTRRKNRICYLQEIFSNEMAKVDDSFFHRLEESFLVEEDKKHERHPIFGNIVDEVAYHEKYPTIYHLRKKLVDSTDKADLRLIYLALAHMIKFRGHFLIEGDLNPDNSDVDKLFIQLVQTYNQLFEENPINASGVDAKAILSARLSKSRRLENLIAQLPGEKKNGLFGNLIALSLGLTPNFKSNFDLAEDAKLQLSKDTYDDDLDNLLAQIGDQYADLFLAAKNLSDAILLSDILRVNTEITKAPLSASMIKRYDEHHQDLTLLKALVRQQLPEKYKEIFFDQSKNGYAGYIDGGASQEEFYKFIKPILEKMDGTEELLVKLNREDLLRKQRTFDNGSIPHQIHLGELHAILRRQEDFYPFLKDNREKIEKILTFRIPYYVGPLARGNSRFAWMTRKSEETITPWNFEEVVDKGASAQSFIERMTNFDKNLPNEKVLPKHSLLYEYFTVYNELTKVKYVTEGMRKPAFLSGEQKKAIVDLLFKTNRKVTVKQLKEDYFKKIECFDSVEISGVEDRFNASLGTYHDLLKIIKDKDFLDNEENEDILEDIVLTLTLFEDREMIEERLKTYAHLFDDKVMKQLKRRRYTGWGRLSRKLINGIRDKQSGKTILDFLKSDGFANRNFMQLIHDDSLTFKEDIQKAQVSGQGDSLHEHIANLAGSPAIKKGILQTVKVVDELVKVMGRHKPENIVIEMARENQTTQKGQKNSRERMKRIEEGIKELGSQILKEHPVENTQLQNEKLYLYYLQNGRDMYVDQELDINRLSDYDVDHIVPQSFLKDDSIDNKVLTRSDKARGKSDNVPSEEVVKKMKNYWRQLLNAKLITQRKFDNLTKAERGGLSELDKAGFIKRQLVETRQITKHVAQILDSRMNTKYDENDKLIREVKVITLKSKLVSDFRKDFQFYKVREINNYHHAHDAYLNAVVGTALIKKYPKLESEFVYGDYKVYDVRKMIAKSEQEIGKATAKYFFYSNIMNFFKTEITLANGEIRKRPLIETNGETGEIVWDKGRDFATVRKVLSMPQVNIVKKTEVQTGGFSKESILPKRNSDKLIARKKDWDPKKYGGFDSPTVAYSVLVVAKVEKGKSKKLKSVKELLGITIMERSSFEKNPIDFLEAKGYKEVKKDLIIKLPKYSLFELENGRKRMLASAGELQKGNELALPSKYVNFLYLASHYEKLKGSPEDNEQKQLFVEQHKHYLDEIIEQISEFSKRVILADANLDKVLSAYNKHRDKPIREQAENIIHLFTLTNLGAPAAFKYFDTTIDRKRYTSTKEVLDATLIHQSITGLYETRIDLSQLGGDGGEAAAKGGSPAPGGTLQLEEEYRLFEPESTQKQEMDIWLKNFPQAWAETGGMGTAHCQAPVLIQLKATATPISIRQYPMPHEAYQGIKPHIRRMLDQGILKPCQSPWNTPLLPVKKPGTEDYRPVQDLREVNKRVEDIHPTVPNPYNLLSTLPPSHPWYTVLDLKDAFFCLRLHSESQLLFAFEWRDPEIGLSGQLTWTRLPQGFKNSPTLFNEALHSDLADFRVRYPALVLLQYVDDLLLAAATRTECLEGTKALLETLGNKGYRASAKKAQICLQEVTYLGYSLKDGQRWLTKARKEAILSIPVPKNSRQVREFLGKAGYCRLFIPGFAELAAPLYPLTRPGTLFQWGTEQQLAFEDIKKALLSSPALGLPDITKPFELFIDENSGFAKGVLVQKLGPWKRPVAYLSKKLDTVASGWPPCLRMVAAIAILVKDAGKLTLGQPLTILTSHPVEALVRQPPNKWLSNARMTHYQAMLLDAERVHFGPTVSLNPATLLPLPSGGNHHDCLQILAETHGTRPDLTDQPLPDADLTWYTDGSSFIRNGEREAGAAVTTESEVIWAAPLPPGTSAQRAELIALTQALKMAEGKKLTVYTDSRYAFATTHVHGEIYRRRGWLTSEGKEIKNKNEILALLEALFLPKRLSIIHCPGHQKGDSPQAKGNRLADDTAKKAATETHSSLTVLPAGKRTADGSEFEKRTADGSEFESPKKKAKVE

SEQ ID NO: 7213 - protein, 2176 aa, synthetic construct
MPAAKRVKLDGGDKKYSIGLDIGTNSVGWAVITDEYKVPSKKFKVLGNTDRHSIKKNLIGALLFDSGETAEATRLKRTARRRYTRRKNRICYLQEIFSNEMAKVDDSFFHRLEESFLVEEDKKHERHPIFGNIVDEVAYHEKYPTIYHLRKKLVDSTDKADLRLIYLALAHMIKFRGHFLIEGDLNPDNSDVDKLFIQLVQTYNQLFEENPINASGVDAKAILSARLSKSRRLENLIAQLPGEKKNGLFGNLIALSLGLTPNFKSNFDLAEDAKLQLSKDTYDDDLDNLLAQIGDQYADLFLAAKNLSDAILLSDILRVNTEITKAPLSASMIKRYDEHHQDLTLLKALVRQQLPEKYKEIFFDQSKNGYAGYIDGGASQEEFYKFIKPILEKMDGTEELLVKLNREDLLRKQRTFDNGSIPHQIHLGELHAILRRQEDFYPFLKDNREKIEKILTFRIPYYVGPLARGNSRFAWMTRKSEETITPWNFEEVVDKGASAQSFIERMTNFDKNLPNEKVLPKHSLLYEYFTVYNELTKVKYVTEGMRKPAFLSGEQKKAIVDLLFKTNRKVTVKQLKEDYFKKIECFDSVEISGVEDRFNASLGTYHDLLKIIKDKDFLDNEENEDILEDIVLTLTLFEDREMIEERLKTYAHLFDDKVMKQLKRRRYTGWGRLSRKLINGIRDKQSGKTILDFLKSDGFANRNFMQLIHDDSLTFKEDIQKAQVSGQGDSLHEHIANLAGSPAIKKGILQTVKVVDELVKVMGRHKPENIVIEMARENQTTQKGQKNSRERMKRIEEGIKELGSQILKEHPVENTQLQNEKLYLYYLQNGRDMYVDQELDINRLSDYDVDHIVPQSFLKDDSIDNKVLTRSDKARGKSDNVPSEEVVKKMKNYWRQLLNAKLITQRKFDNLTKAERGGLSELDKAGFIKRQLVETRQITKHVAQILDSRMNTKYDENDKLIREVKVITLKSKLVSDFRKDFQFYKVREINNYHHAHDAYLNAVVGTALIKKYPKLESEFVYGDYKVYDVRKMIAKSEQEIGKATAKYFFYSNIMNFFKTEITLANGEIRKRPLIETNGETGEIVWDKGRDFATVRKVLSMPQVNIVKKTEVQTGGFSKESILPKRNSDKLIARKKDWDPKKYGGFDSPTVAYSVLVVAKVEKGKSKKLKSVKELLGITIMERSSFEKNPIDFLEAKGYKEVKKDLIIKLPKYSLFELENGRKRMLASAGELQKGNELALPSKYVNFLYLASHYEKLKGSPEDNEQKQLFVEQHKHYLDEIIEQISEFSKRVILADANLDKVLSAYNKHRDKPIREQAENIIHLFTLTNLGAPAAFKYFDTTIDRKRYTSTKEVLDATLIHQSITGLYETRIDLSQLGGDGGEAAAKGGSPAPGGMNPLQLLQPLPAEIKGTKLLAHWNSGATITCIPESFLEDEQPIKKTLIKTIHGEKQQNVYYVTFKVKGRKVEAEVIASPYEYILLSPTDVPWLTQQPLQLTILVPLQEYQEKILSKTALPEDQKQQLKTLFVKYDNLWQHWENQVGHRKIRPHNIATGDYPPRPQKQYPINPKAKPSIQIVIDDLLKQGVLTPQNSTMNTPVYPVPKPDGRWRMVLDYREVNKTIPLTAAQNQHSAGILATIVRQKYKTTLDLANGFWAHPITPESYWLTAFTWQGKQYCWTRLPQGFLNSPALFNADVVDLLKEIPNVQVYVDDIYLSHDDPKEHVQQLEKVFQILLQAGYVVSLKKSEIGQKTVEFLGFNITKEGRGLTDTFKTKLLNITPPKDLKQLQSILGKLNFARNFIPNFAELVQPLYNLIAPAKGKYIEWSEENTKQLNMVIEALNTASNLEERLPEQRLVIKVNTSPSAGYVRYYNETGKKPIMYLNYVFSKAELKFSMLEKLLTTMHKALIKAMDLAMGQEILVYSPIVSMTKIQKTPLPERKALPIRWITWMTYLEDPRIQFHYDKTLPELKHIPDVYTSSQSPVKHPSQYEGVFYTDGSAIKSPDPTKSNNAGMGIVHATYKPEYQVLNQWSIPLGNHTAQMAEIAAVEFACKKALKIPGPVLVITDSFYVAESANKELPYWKSNGFVNNKKKPLKHISKWKSIAECLSMKPDITIQHEKGISLQIPVFILKGNALADKLATQGSYVVNAGKRTADGSEFEKRTADGSEFESPKKKAKVE

SEQ ID NO: 7214 - protein, 2094 aa, synthetic construct
MPAAKRVKLDGGDKKYSIGLDIGTNSVGWAVITDEYKVPSKKFKVLGNTDRHSIKKNLIGALLFDSGETAEATRLKRTARRRYTRRKNRICYLQEIFSNEMAKVDDSFFHRLEESFLVEEDKKHERHPIFGNIVDEVAYHEKYPTIYHLRKKLVDSTDKADLRLIYLALAHMIKFRGHFLIEGDLNPDNSDVDKLFIQLVQTYNQLFEENPINASGVDAKAILSARLSKSRRLENLIAQLPGEKKNGLFGNLIALSLGLTPNFKSNFDLAEDAKLQLSKDTYDDDLDNLLAQIGDQYADLFLAAKNLSDAILLSDILRVNTEITKAPLSASMIKRYDEHHQDLTLLKALVRQQLPEKYKEIFFDQSKNGYAGYIDGGASQEEFYKFIKPILEKMDGTEELLVKLNREDLLRKQRTFDNGSIPHQIHLGELHAILRRQEDFYPFLKDNREKIEKILTFRIPYYVGPLARGNSRFAWMTRKSEETITPWNFEEVVDKGASAQSFIERMTNFDKNLPNEKVLPKHSLLYEYFTVYNELTKVKYVTEGMRKPAFLSGEQKKAIVDLLFKTNRKVTVKQLKEDYFKKIECFDSVEISGVEDRFNASLGTYHDLLKIIKDKDFLDNEENEDILEDIVLTLTLFEDREMIEERLKTYAHLFDDKVMKQLKRRRYTGWGRLSRKLINGIRDKQSGKTILDFLKSDGFANRNFMQLIHDDSLTFKEDIQKAQVSGQGDSLHEHIANLAGSPAIKKGILQTVKVVDELVKVMGRHKPENIVIEMARENQTTQKGQKNSRERMKRIEEGIKELGSQILKEHPVENTQLQNEKLYLYYLQNGRDMYVDQELDINRLSDYDVDHIVPQSFLKDDSIDNKVLTRSDKARGKSDNVPSEEVVKKMKNYWRQLLNAKLITQRKFDNLTKAERGGLSELDKAGFIKRQLVETRQITKHVAQILDSRMNTKYDENDKLIREVKVITLKSKLVSDFRKDFQFYKVREINNYHHAHDAYLNAVVGTALIKKYPKLESEFVYGDYKVYDVRKMIAKSEQEIGKATAKYFFYSNIMNFFKTEITLANGEIRKRPLIETNGETGEIVWDKGRDFATVRKVLSMPQVNIVKKTEVQTGGFSKESILPKRNSDKLIARKKDWDPKKYGGFDSPTVAYSVLVVAKVEKGKSKKLKSVKELLGITIMERSSFEKNPIDFLEAKGYKEVKKDLIIKLPKYSLFELENGRKRMLASAGELQKGNELALPSKYVNFLYLASHYEKLKGSPEDNEQKQLFVEQHKHYLDEIIEQISEFSKRVILADANLDKVLSAYNKHRDKPIREQAENIIHLFTLTNLGAPAAFKYFDTTIDRKRYTSTKEVLDATLIHQSITGLYETRIDLSQLGGDGGEAAAKGGSPAPGGVLNLEEEYRLHEKPVPSSIDPSWLQLFPTVWAERAGMGLANQVPPVVVELRSGASPVAVRQYPMSKEAREGIRPHIQKFLDLGVLVPCRSPWNTPLLPVKKPGTNDYRPVQDLREINKRVQDIHPTVPNPYNLLSSLPPSYTWYSVLDLKDAFFCLRLHPNSQPLFAFEWKDPEKGNTGQLTWTRLPQGFKNSPTLFNEALHRDLAPFRALNPQVVLLQYVDDLLVAAPTYEDCKKGTQKLLQELSKLGYRVSAKKAQLCQREVTYLGYLLKEGKRWLTPARKATVMKIPVPTTPRQVREFLGTAGFCRLWIPGFASLAAPLYPLTKPSIPFIWTEEHQQAFDHIKKALLSAPALALPDLTKPFTLYIDERAGVARGVLTQTLGPWRRPVAYLSKKLDPVASGWPTCLKAVAAVALLLKDADKLTLGQNVTVIASHSLESIVRQPPDRWMTNARMTHYQSLLLNERVSFAPPAVLNPATLLPVESEATPVHRCSEILAEETGTRRDLEDQPLPGVPTWYTDGSSFITEGKRRAGAPIVDGKRTVWASSLPEGTSAQKAELVALTQALRLAEGKNINIYTDSRYAFATAHIHGAIYKQRGWLTSAGKDIKNKEEILALLEAIHLPRRVAIIHCPGHQRGSNPVATGNRRADEAAKQAALSTRVLAGTTKPAGKRTADGSEFEKRTADGSEFESPKKKAKVE

SEQ ID NO: 7215 - protein, 2127 aa, synthetic construct
MPAAKRVKLDGGDKKYSIGLDIGTNSVGWAVITDEYKVPSKKFKVLGNTDRHSIKKNLIGALLFDSGETAEATRLKRTARRRYTRRKNRICYLQEIFSNEMAKVDDSFFHRLEESFLVEEDKKHERHPIFGNIVDEVAYHEKYPTIYHLRKKLVDSTDKADLRLIYLALAHMIKFRGHFLIEGDLNPDNSDVDKLFIQLVQTYNQLFEENPINASGVDAKAILSARLSKSRRLENLIAQLPGEKKNGLFGNLIALSLGLTPNFKSNFDLAEDAKLQLSKDTYDDDLDNLLAQIGDQYADLFLAAKNLSDAILLSDILRVNTEITKAPLSASMIKRYDEHHQDLTLLKALVRQQLPEKYKEIFFDQSKNGYAGYIDGGASQEEFYKFIKPILEKMDGTEELLVKLNREDLLRKQRTFDNGSIPHQIHLGELHAILRRQEDFYPFLKDNREKIEKILTFRIPYYVGPLARGNSRFAWMTRKSEETITPWNFEEVVDKGASAQSFIERMTNFDKNLPNEKVLPKHSLLYEYFTVYNELTKVKYVTEGMRKPAFLSGEQKKAIVDLLFKTNRKVTVKQLKEDYFKKIECFDSVEISGVEDRFNASLGTYHDLLKIIKDKDFLDNEENEDILEDIVLTLTLFEDREMIEERLKTYAHLFDDKVMKQLKRRRYTGWGRLSRKLINGIRDKQSGKTILDFLKSDGFANRNFMQLIHDDSLTFKEDIQKAQVSGQGDSLHEHIANLAGSPAIKKGILQTVKVVDELVKVMGRHKPENIVIEMARENQTTQKGQKNSRERMKRIEEGIKELGSQILKEHPVENTQLQNEKLYLYYLQNGRDMYVDQELDINRLSDYDVDHIVPQSFLKDDSIDNKVLTRSDKARGKSDNVPSEEVVKKMKNYWRQLLNAKLITQRKFDNLTKAERGGLSELDKAGFIKRQLVETRQITKHVAQILDSRMNTKYDENDKLIREVKVITLKSKLVSDFRKDFQFYKVREINNYHHAHDAYLNAVVGTALIKKYPKLESEFVYGDYKVYDVRKMIAKSEQEIGKATAKYFFYSNIMNFFKTEITLANGEIRKRPLIETNGETGEIVWDKGRDFATVRKVLSMPQVNIVKKTEVQTGGFSKESILPKRNSDKLIARKKDWDPKKYGGFDSPTVAYSVLVVAKVEKGKSKKLKSVKELLGITIMERSSFEKNPIDFLEAKGYKEVKKDLIIKLPKYSLFELENGRKRMLASAGELQKGNELALPSKYVNFLYLASHYEKLKGSPEDNEQKQLFVEQHKHYLDEIIEQISEFSKRVILADANLDKVLSAYNKHRDKPIREQAENIIHLFTLTNLGAPAAFKYFDTTIDRKRYTSTKEVLDATLIHQSITGLYETRIDLSQLGGDGGEAAAKGGSPAPGGLLGRDLLTKLKAQIQFSTEGPQVTWEDRPAMCLVLNLEEEYRLHEKPVPPSIDPSWLQLFPMVWAEKAGMGLANQVPPVVVELKSDASPVAVRQYPMSKEAREGIRPHIQRFLDLGILVPCQSPWNTPLLPVKKPGTNDYRPVQDLREVNKRVQDIHPTVPNPYNLLSSLPPSHTWYSVLDLKDAFFCLKLHPNSQPLFAFEWRDPEKGNTGQLTWTRLPQGFKNSPTLFNEALHRDLASFRALNPQVVMLQYVDDLLVAAPTYRDCKEGTRRLLQELSKLGYRVSAKKAQLCREEVTYLGYLLKGGKRWLTPARKATVMKIPTPTTPRQVREFLGTAGFCRLWIPGFASLAAPLYPLTRPKVPFTWTEAHQEAFGRIKEALLSAPALALPDLTKPFALYVDEKEGVARGVLTQTLGPWRRPVAYLSKKLDPVASGWPTCLKAIAAVALLLKDADKLTLGQNVLVIAPHNLESIVRQPPDRWMTNARMTHYQSLLLNERVSFAPPAILNPATLLPVESDDTPIHICSEILAEETGTRPDLRDQPLPGVPAWYTDGSSFIMDGRRQAGAAIVDNKRTVWASNLPEGTSAQKAELIALTQALRLAEGKSINIYTDSRYAFATAHVHGAIYKQRGWLTSAGKDIKNKEEILALLEAIHLPKRVAIIHCPGHQRGTDPVATGNRKADEAAKQAAQSTRILTETTKNAGKRTADGSEFEKRTADGSEFESPKKKAKVE

SEQ ID NO: 7216 - protein, 2127 aa, synthetic construct
MPAAKRVKLDGGDKKYSIGLDIGTNSVGWAVITDEYKVPSKKFKVLGNTDRHSIKKNLIGALLFDSGETAEATRLKRTARRRYTRRKNRICYLQEIFSNEMAKVDDSFFHRLEESFLVEEDKKHERHPIFGNIVDEVAYHEKYPTIYHLRKKLVDSTDKADLRLIYLALAHMIKFRGHFLIEGDLNPDNSDVDKLFIQLVQTYNQLFEENPINASGVDAKAILSARLSKSRRLENLIAQLPGEKKNGLFGNLIALSLGLTPNFKSNFDLAEDAKLQLSKDTYDDDLDNLLAQIGDQYADLFLAAKNLSDAILLSDILRVNTEITKAPLSASMIKRYDEHHQDLTLLKALVRQQLPEKYKEIFFDQSKNGYAGYIDGGASQEEFYKFIKPILEKMDGTEELLVKLNREDLLRKQRTFDNGSIPHQIHLGELHAILRRQEDFYPFLKDNREKIEKILTFRIPYYVGPLARGNSRFAWMTRKSEETITPWNFEEVVDKGASAQSFIERMTNFDKNLPNEKVLPKHSLLYEYFTVYNELTKVKYVTEGMRKPAFLSGEQKKAIVDLLFKTNRKVTVKQLKEDYFKKIECFDSVEISGVEDRFNASLGTYHDLLKIIKDKDFLDNEENEDILEDIVLTLTLFEDREMIEERLKTYAHLFDDKVMKQLKRRRYTGWGRLSRKLINGIRDKQSGKTILDFLKSDGFANRNFMQLIHDDSLTFKEDIQKAQVSGQGDSLHEHIANLAGSPAIKKGILQTVKVVDELVKVMGRHKPENIVIEMARENQTTQKGQKNSRERMKRIEEGIKELGSQILKEHPVENTQLQNEKLYLYYLQNGRDMYVDQELDINRLSDYDVDHIVPQSFLKDDSIDNKVLTRSDKARGKSDNVPSEEVVKKMKNYWRQLLNAKLITQRKFDNLTKAERGGLSELDKAGFIKRQLVETRQITKHVAQILDSRMNTKYDENDKLIREVKVITLKSKLVSDFRKDFQFYKVREINNYHHAHDAYLNAVVGTALIKKYPKLESEFVYGDYKVYDVRKMIAKSEQEIGKATAKYFFYSNIMNFFKTEITLANGEIRKRPLIETNGETGEIVWDKGRDFATVRKVLSMPQVNIVKKTEVQTGGFSKESILPKRNSDKLIARKKDWDPKKYGGFDSPTVAYSVLVVAKVEKGKSKKLKSVKELLGITIMERSSFEKNPIDFLEAKGYKEVKKDLIIKLPKYSLFELENGRKRMLASAGELQKGNELALPSKYVNFLYLASHYEKLKGSPEDNEQKQLFVEQHKHYLDEIIEQISEFSKRVILADANLDKVLSAYNKHRDKPIREQAENIIHLFTLTNLGAPAAFKYFDTTIDRKRYTSTKEVLDATLIHQSITGLYETRIDLSQLGGDGGEAAAKGGSPAPGGLLGRDLLTKLKAQIQFSTEGPQVTWEDRPAMCLVLNLEEEYRLHEKPVPPSIDPSWLQLFPMVWAEKAGMGLANQVPPVVVELKSDASPVAVRQYPMSKEAREGIRPHIQRFLDLGILVPCQSPWNTPLLPVKKPGTNDYRPVQDLREVNKRVQDIHPTVPNPYNLLSSLPPSHTWYSVLDLKDAFFCLKLHPNSQPLFAFEWRDPEKGNTGQLTWTRLPQGFKNSPTLFNEALHRDLASFRALNPQVVMLQYVDDLLVAAPTYRDCKEGTRRLLQELSKLGYRVSAKKAQLCREEVTYLGYLLKGGKRWLTPARKATVMKIPTPTTPRQVREFLGKAGFCRLFIPGFASLAAPLYPLTRPKVPFTWTEAHQEAFGRIKEALLSAPALALPDLTKPFALYVDEKEGVARGVLTQTLGPWRRPVAYLSKKLDPVASGWPTCLKAIAAVALLLKDADKLTLGQNVLVIAPHNLESIVRQPPDRWMTNARMTHYQSLLLNERVSFAPPAILNPATLLPVESDDTPIHICSEILAEETGTRPDLRDQPLPGVPAWYTDGSSFIMDGRRQAGAAIVDNKRTVWASNLPEGTSAQKAELIALTQALRLAEGKSINIYTDSRYAFATAHVHGAIYKQRGWLTSAGKDIKNKEEILALLEAIHLPKRVAIIHCPGHQRGTDPVATGNRKADEAAKQAAQSTRILTETTKNAGKRTADGSEFEKRTADGSEFESPKKKAKVE

SEQ ID NO: 7217 - protein, 2218 aa, synthetic construct
MPAAKRVKLDGGDKKYSIGLDIGTNSVGWAVITDEYKVPSKKFKVLGNTDRHSIKKNLIGALLFDSGETAEATRLKRTARRRYTRRKNRICYLQEIFSNEMAKVDDSFFHRLEESFLVEEDKKHERHPIFGNIVDEVAYHEKYPTIYHLRKKLVDSTDKADLRLIYLALAHMIKFRGHFLIEGDLNPDNSDVDKLFIQLVQTYNQLFEENPINASGVDAKAILSARLSKSRRLENLIAQLPGEKKNGLFGNLIALSLGLTPNFKSNFDLAEDAKLQLSKDTYDDDLDNLLAQIGDQYADLFLAAKNLSDAILLSDILRVNTEITKAPLSASMIKRYDEHHQDLTLLKALVRQQLPEKYKEIFFDQSKNGYAGYIDGGASQEEFYKFIKPILEKMDGTEELLVKLNREDLLRKQRTFDNGSIPHQIHLGELHAILRRQEDFYPFLKDNREKIEKILTFRIPYYVGPLARGNSRFAWMTRKSEETITPWNFEEVVDKGASAQSFIERMTNFDKNLPNEKVLPKHSLLYEYFTVYNELTKVKYVTEGMRKPAFLSGEQKKAIVDLLFKTNRKVTVKQLKEDYFKKIECFDSVEISGVEDRFNASLGTYHDLLKIIKDKDFLDNEENEDILEDIVLTLTLFEDREMIEERLKTYAHLFDDKVMKQLKRRRYTGWGRLSRKLINGIRDKQSGKTILDFLKSDGFANRNFMQLIHDDSLTFKEDIQKAQVSGQGDSLHEHIANLAGSPAIKKGILQTVKVVDELVKVMGRHKPENIVIEMARENQTTQKGQKNSRERMKRIEEGIKELGSQILKEHPVENTQLQNEKLYLYYLQNGRDMYVDQELDINRLSDYDVDHIVPQSFLKDDSIDNKVLTRSDKARGKSDNVPSEEVVKKMKNYWRQLLNAKLITQRKFDNLTKAERGGLSELDKAGFIKRQLVETRQITKHVAQILDSRMNTKYDENDKLIREVKVITLKSKLVSDFRKDFQFYKVREINNYHHAHDAYLNAVVGTALIKKYPKLESEFVYGDYKVYDVRKMIAKSEQEIGKATAKYFFYSNIMNFFKTEITLANGEIRKRPLIETNGETGEIVWDKGRDFATVRKVLSMPQVNIVKKTEVQTGGFSKESILPKRNSDKLIARKKDWDPKKYGGFDSPTVAYSVLVVAKVEKGKSKKLKSVKELLGITIMERSSFEKNPIDFLEAKGYKEVKKDLIIKLPKYSLFELENGRKRMLASAGELQKGNELALPSKYVNFLYLASHYEKLKGSPEDNEQKQLFVEQHKHYLDEIIEQISEFSKRVILADANLDKVLSAYNKHRDKPIREQAENIIHLFTLTNLGAPAAFKYFDTTIDRKRYTSTKEVLDATLIHQSITGLYETRIDLSQLGGDGGEAAAKGGSPAPGGTLGDQGSRGSDPLPEPRVTLTVEGIPTEFLVNTGAEHSVLTKPMGKMGSKRTVVAGATGSKVYPWTTKRLLKIGQKQVTHSFLVIPECPAPLLGRDLLTKLKAQIQFSTEGPQVTWEDRPAMCLVLNLEEEYRLHEKPVPPSIDPSWLQLFPMVWAEKAGMGLANQVPPVVVELKSDASPVAVRQYPMSKEAREGIRPHIQRFLDLGILVPCQSPWNTPLLPVKKPGTNDYRPVQDLREVNKRVQDIHPTVPNPYNLLSSLPPSHTWYSVLDLKDAFFCLKLHPNSQPLFAFEWRDPEKGNTGQLTWTRLPQGFKNSPTLFNEALHRDLASFRALNPQVVMLQYVDDLLVAAPTYRDCKEGTRRLLQELSKLGYRVSAKKAQLCREEVTYLGYLLKGGKRWLTPARKATVMKIPTPTTPRQVREFLGTAGFCRLWIPGFASLAAPLYPLTRPKVPFTWTEAHQEAFGRIKEALLSAPALALPDLTKPFALYVDEKEGVARGVLTQTLGPWRRPVAYLSKKLDPVASGWPTCLKAIAAVALLLKDADKLTLGQNVLVIAPHNLESIVRQPPDRWMTNARMTHYQSLLLNERVSFAPPAILNPATLLPVESDDTPIHICSEILAEETGTRPDLRDQPLPGVPAWYTDGSSFIMDGRRQAGAAIVDNKRTVWASNLPEGTSAQKAELIALTQALRLAEGKSINIYTDSRYAFATAHVHGAIYKQRGWLTSAGKDIKNKEEILALLEAIHLPKRVAIIHCPGHQRGTDPVATGNRKADEAAKQAAQSTRILTETTKNAGKRTADGSEFEKRTADGSEFESPKKKAKVE

SEQ ID NO: 7218 - protein, 2096 aa, synthetic construct
MPAAKRVKLDGGDKKYSIGLDIGTNSVGWAVITDEYKVPSKKFKVLGNTDRHSIKKNLIGALLFDSGETAEATRLKRTARRRYTRRKNRICYLQEIFSNEMAKVDDSFFHRLEESFLVEEDKKHERHPIFGNIVDEVAYHEKYPTIYHLRKKLVDSTDKADLRLIYLALAHMIKFRGHFLIEGDLNPDNSDVDKLFIQLVQTYNQLFEENPINASGVDAKAILSARLSKSRRLENLIAQLPGEKKNGLFGNLIALSLGLTPNFKSNFDLAEDAKLQLSKDTYDDDLDNLLAQIGDQYADLFLAAKNLSDAILLSDILRVNTEITKAPLSASMIKRYDEHHQDLTLLKALVRQQLPEKYKEIFFDQSKNGYAGYIDGGASQEEFYKFIKPILEKMDGTEELLVKLNREDLLRKQRTFDNGSIPHQIHLGELHAILRRQEDFYPFLKDNREKIEKILTFRIPYYVGPLARGNSRFAWMTRKSEETITPWNFEEVVDKGASAQSFIERMTNFDKNLPNEKVLPKHSLLYEYFTVYNELTKVKYVTEGMRKPAFLSGEQKKAIVDLLFKTNRKVTVKQLKEDYFKKIECFDSVEISGVEDRFNASLGTYHDLLKIIKDKDFLDNEENEDILEDIVLTLTLFEDREMIEERLKTYAHLFDDKVMKQLKRRRYTGWGRLSRKLINGIRDKQSGKTILDFLKSDGFANRNFMQLIHDDSLTFKEDIQKAQVSGQGDSLHEHIANLAGSPAIKKGILQTVKVVDELVKVMGRHKPENIVIEMARENQTTQKGQKNSRERMKRIEEGIKELGSQILKEHPVENTQLQNEKLYLYYLQNGRDMYVDQELDINRLSDYDVDHIVPQSFLKDDSIDNKVLTRSDKARGKSDNVPSEEVVKKMKNYWRQLLNAKLITQRKFDNLTKAERGGLSELDKAGFIKRQLVETRQITKHVAQILDSRMNTKYDENDKLIREVKVITLKSKLVSDFRKDFQFYKVREINNYHHAHDAYLNAVVGTALIKKYPKLESEFVYGDYKVYDVRKMIAKSEQEIGKATAKYFFYSNIMNFFKTEITLANGEIRKRPLIETNGETGEIVWDKGRDFATVRKVLSMPQVNIVKKTEVQTGGFSKESILPKRNSDKLIARKKDWDPKKYGGFDSPTVAYSVLVVAKVEKGKSKKLKSVKELLGITIMERSSFEKNPIDFLEAKGYKEVKKDLIIKLPKYSLFELENGRKRMLASAGELQKGNELALPSKYVNFLYLASHYEKLKGSPEDNEQKQLFVEQHKHYLDEIIEQISEFSKRVILADANLDKVLSAYNKHRDKPIREQAENIIHLFTLTNLGAPAAFKYFDTTIDRKRYTSTKEVLDATLIHQSITGLYETRIDLSQLGGDGGEAAAKGGSPAPGGTLNLEDEYRLYETSAEPEVSPGSTWLSDFPQAWAETGGMGLAVRQAPLIIPLKATSTPVSIKQYPMSQEAKLGIKPHIQRLLDQGILVPCQSPWNTPLLPVKKPGTNDYRPVQDLREVNKRVEDIHPTVPNPYNLLSGLPPSHRWYTVLDLKDAFFCLRLHPTSQPLFAFEWRDPGMGISGQLTWTRLPQGFKNSPTLFNEALHRDLADFRIQHPDLILLQYVDDILLAATSELDCQQGTRALLLTLGNLGYRASAKKAQLCQKQVKYLGYLLKEGQRWLTEARKETVMGQPTPKTPRQLREFLGTAGFCRLWIPGFAEMAAPLYPLTKPGTLFNWGPDQQKAYQEIKQALLTAPALGLPDLTKPFELFVDEKQGYAKGVLTQKLGPWRRPVAYLSKKLDPVAAGWPPCLRMVAAIAVLRKDAGKLTMGQPLVILAPHAVEALVKQPPDRWLSNARMTHYQAMLLDTDRVQFGPVVALNPATLLPLPEEGAPHDCLEILAETHGTRPDLTDQPIPDADHTWYTDGSSFLQEGQRKAGAAVTTETEVIWARALPAGTSAQRAELIALTQALKMAEGKRLNVYTDSRYAFATAHIHGEIYRRRGWLTSEGREIKNKSEILALLKALFLPKRLSIIHCLGHQKGDSAEARGNRLADQAAREAAIKTPPDTSTLLAGKRTADGSEFEKRTADGSEFESPKKKAKVE

SEQ ID NO: 7219 - protein, 2096 aa, synthetic construct
MPAAKRVKLDGGDKKYSIGLDIGTNSVGWAVITDEYKVPSKKFKVLGNTDRHSIKKNLIGALLFDSGETAEATRLKRTARRRYTRRKNRICYLQEIFSNEMAKVDDSFFHRLEESFLVEEDKKHERHPIFGNIVDEVAYHEKYPTIYHLRKKLVDSTDKADLRLIYLALAHMIKFRGHFLIEGDLNPDNSDVDKLFIQLVQTYNQLFEENPINASGVDAKAILSARLSKSRRLENLIAQLPGEKKNGLFGNLIALSLGLTPNFKSNFDLAEDAKLQLSKDTYDDDLDNLLAQIGDQYADLFLAAKNLSDAILLSDILRVNTEITKAPLSASMIKRYDEHHQDLTLLKALVRQQLPEKYKEIFFDQSKNGYAGYIDGGASQEEFYKFIKPILEKMDGTEELLVKLNREDLLRKQRTFDNGSIPHQIHLGELHAILRRQEDFYPFLKDNREKIEKILTFRIPYYVGPLARGNSRFAWMTRKSEETITPWNFEEVVDKGASAQSFIERMTNFDKNLPNEKVLPKHSLLYEYFTVYNELTKVKYVTEGMRKPAFLSGEQKKAIVDLLFKTNRKVTVKQLKEDYFKKIECFDSVEISGVEDRFNASLGTYHDLLKIIKDKDFLDNEENEDILEDIVLTLTLFEDREMIEERLKTYAHLFDDKVMKQLKRRRYTGWGRLSRKLINGIRDKQSGKTILDFLKSDGFANRNFMQLIHDDSLTFKEDIQKAQVSGQGDSLHEHIANLAGSPAIKKGILQTVKVVDELVKVMGRHKPENIVIEMARENQTTQKGQKNSRERMKRIEEGIKELGSQILKEHPVENTQLQNEKLYLYYLQNGRDMYVDQELDINRLSDYDVDHIVPQSFLKDDSIDNKVLTRSDKARGKSDNVPSEEVVKKMKNYWRQLLNAKLITQRKFDNLTKAERGGLSELDKAGFIKRQLVETRQITKHVAQILDSRMNTKYDENDKLIREVKVITLKSKLVSDFRKDFQFYKVREINNYHHAHDAYLNAVVGTALIKKYPKLESEFVYGDYKVYDVRKMIAKSEQEIGKATAKYFFYSNIMNFFKTEITLANGEIRKRPLIETNGETGEIVWDKGRDFATVRKVLSMPQVNIVKKTEVQTGGFSKESILPKRNSDKLIARKKDWDPKKYGGFDSPTVAYSVLVVAKVEKGKSKKLKSVKELLGITIMERSSFEKNPIDFLEAKGYKEVKKDLIIKLPKYSLFELENGRKRMLASAGELQKGNELALPSKYVNFLYLASHYEKLKGSPEDNEQKQLFVEQHKHYLDEIIEQISEFSKRVILADANLDKVLSAYNKHRDKPIREQAENIIHLFTLTNLGAPAAFKYFDTTIDRKRYTSTKEVLDATLIHQSITGLYETRIDLSQLGGDGGEAAAKGGSPAPGGTLNLEDEYRLYETSAEPEVSPGSTWLSDFPQAWAETGGMGLAVRQAPLIIPLKATSTPVSIKQYPMSQEAKLGIKPHIQRLLDQGILVPCQSPWNTPLLPVKKPGTNDYRPVQDLREVNKRVEDIHPTVPNPYNLLSGLPPSHRWYTVLDLKDAFFCLRLHPTSQPLFAFEWRDPGMGISGQLTWTRLPQGFKNSPTLFNEALHRDLADFRIQHPDLILLQYVDDILLAATSELDCQQGTRALLLTLGNLGYRASAKKAQLCQKQVKYLGYLLKEGQRWLTEARKETVMGQPTPKTPRQLREFLGKAGFCRLFIPGFAEMAAPLYPLTKPGTLFNWGPDQQKAYQEIKQALLTAPALGLPDLTKPFELFVDEKQGYAKGVLTQKLGPWRRPVAYLSKKLDPVAAGWPPCLRMVAAIAVLRKDAGKLTMGQPLVILAPHAVEALVKQPPDRWLSNARMTHYQAMLLDTDRVQFGPVVALNPATLLPLPEEGAPHDCLEILAETHGTRPDLTDQPIPDADHTWYTDGSSFLQEGQRKAGAAVTTETEVIWARALPAGTSAQRAELIALTQALKMAEGKRLNVYTDSRYAFATAHIHGEIYRRRGWLTSEGREIKNKSEILALLKALFLPKRLSIIHCLGHQKGDSAEARGNRLADQAAREAAIKTPPDTSTLLAGKRTADGSEFEKRTADGSEFESPKKKAKVE

SEQ ID NO: 7220 - protein, 2096 aa, synthetic construct
MPAAKRVKLDGGDKKYSIGLDIGTNSVGWAVITDEYKVPSKKFKVLGNTDRHSIKKNLIGALLFDSGETAEATRLKRTARRRYTRRKNRICYLQEIFSNEMAKVDDSFFHRLEESFLVEEDKKHERHPIFGNIVDEVAYHEKYPTIYHLRKKLVDSTDKADLRLIYLALAHMIKFRGHFLIEGDLNPDNSDVDKLFIQLVQTYNQLFEENPINASGVDAKAILSARLSKSRRLENLIAQLPGEKKNGLFGNLIALSLGLTPNFKSNFDLAEDAKLQLSKDTYDDDLDNLLAQIGDQYADLFLAAKNLSDAILLSDILRVNTEITKAPLSASMIKRYDEHHQDLTLLKALVRQQLPEKYKEIFFDQSKNGYAGYIDGGASQEEFYKFIKPILEKMDGTEELLVKLNREDLLRKQRTFDNGSIPHQIHLGELHAILRRQEDFYPFLKDNREKIEKILTFRIPYYVGPLARGNSRFAWMTRKSEETITPWNFEEVVDKGASAQSFIERMTNFDKNLPNEKVLPKHSLLYEYFTVYNELTKVKYVTEGMRKPAFLSGEQKKAIVDLLFKTNRKVTVKQLKEDYFKKIECFDSVEISGVEDRFNASLGTYHDLLKIIKDKDFLDNEENEDILEDIVLTLTLFEDREMIEERLKTYAHLFDDKVMKQLKRRRYTGWGRLSRKLINGIRDKQSGKTILDFLKSDGFANRNFMQLIHDDSLTFKEDIQKAQVSGQGDSLHEHIANLAGSPAIKKGILQTVKVVDELVKVMGRHKPENIVIEMARENQTTQKGQKNSRERMKRIEEGIKELGSQILKEHPVENTQLQNEKLYLYYLQNGRDMYVDQELDINRLSDYDVDHIVPQSFLKDDSIDNKVLTRSDKARGKSDNVPSEEVVKKMKNYWRQLLNAKLITQRKFDNLTKAERGGLSELDKAGFIKRQLVETRQITKHVAQILDSRMNTKYDENDKLIREVKVITLKSKLVSDFRKDFQFYKVREINNYHHAHDAYLNAVVGTALIKKYPKLESEFVYGDYKVYDVRKMIAKSEQEIGKATAKYFFYSNIMNFFKTEITLANGEIRKRPLIETNGETGEIVWDKGRDFATVRKVLSMPQVNIVKKTEVQTGGFSKESILPKRNSDKLIARKKDWDPKKYGGFDSPTVAYSVLVVAKVEKGKSKKLKSVKELLGITIMERSSFEKNPIDFLEAKGYKEVKKDLIIKLPKYSLFELENGRKRMLASAGELQKGNELALPSKYVNFLYLASHYEKLKGSPEDNEQKQLFVEQHKHYLDEIIEQISEFSKRVILADANLDKVLSAYNKHRDKPIREQAENIIHLFTLTNLGAPAAFKYFDTTIDRKRYTSTKEVLDATLIHQSITGLYETRIDLSQLGGDGGEAAAKGGSPAPGGTLGIEDEYRLHETSTEPDVSLGSTWLSDFPQAWAETGGMGLAVRQAPLIIPLKATSTPVSIQQYPMSHEARLGIKPHIQRLLDQGILVPCQSPWNTPLLPVKKPGTNDYRPVQDLREVNKRVEDIHPTVPNPYNLLSGLPPSHQWYTVLDLKDAFFCLRLHPTSQPLFAFEWRDPGMGISGQLTWTRLPQGFKNSPTLFNEALHRDLADFRIQHPDLILLQYVDDILLAATSELDCQQGTRALLQTLGDLGYRASAKKAQICQKQVKYLGYLLREGQRWLTEARKETVMGQPVPKTPRQLREFLGTAGFCRLWIPGFAEMAAPLYPLTKPGTLFSWGPDQQKAYQEIKQALLTAPALGLPDLTKPFELFVDEKQGYAKGVLTQKLGPWRRPVAYLSKKLDPVAAGWPPCLRMVAAIAVLTKDAGKLTMGQPLVILAPHAVEALVKQPPDRWLSNARMTHYQAMLLDTDRVQFGPVVALNPATLLPLPEEGAPHDCLEILAETHGTRPDLTDQPIPDADHTWYTDGSSFLQEGQRKAGAAVTTETEVIWAGALPAGTSAQRAELIALTQALKMAEGKRLNVYTDSRYAFATAHIHGEIYRRRGWLTSEGREIKNKSEILALLKALFLPKRLSIIHCLGHQKGDSAEARGNRLADQAAREAAIKTPPDTSTLLAGKRTADGSEFEKRTADGSEFESPKKKAKVE

SEQ ID NO: 7221 - protein, 2096 aa, synthetic construct
MPAAKRVKLDGGDKKYSIGLDIGTNSVGWAVITDEYKVPSKKFKVLGNTDRHSIKKNLIGALLFDSGETAEATRLKRTARRRYTRRKNRICYLQEIFSNEMAKVDDSFFHRLEESFLVEEDKKHERHPIFGNIVDEVAYHEKYPTIYHLRKKLVDSTDKADLRLIYLALAHMIKFRGHFLIEGDLNPDNSDVDKLFIQLVQTYNQLFEENPINASGVDAKAILSARLSKSRRLENLIAQLPGEKKNGLFGNLIALSLGLTPNFKSNFDLAEDAKLQLSKDTYDDDLDNLLAQIGDQYADLFLAAKNLSDAILLSDILRVNTEITKAPLSASMIKRYDEHHQDLTLLKALVRQQLPEKYKEIFFDQSKNGYAGYIDGGASQEEFYKFIKPILEKMDGTEELLVKLNREDLLRKQRTFDNGSIPHQIHLGELHAILRRQEDFYPFLKDNREKIEKILTFRIPYYVGPLARGNSRFAWMTRKSEETITPWNFEEVVDKGASAQSFIERMTNFDKNLPNEKVLPKHSLLYEYFTVYNELTKVKYVTEGMRKPAFLSGEQKKAIVDLLFKTNRKVTVKQLKEDYFKKIECFDSVEISGVEDRFNASLGTYHDLLKIIKDKDFLDNEENEDILEDIVLTLTLFEDREMIEERLKTYAHLFDDKVMKQLKRRRYTGWGRLSRKLINGIRDKQSGKTILDFLKSDGFANRNFMQLIHDDSLTFKEDIQKAQVSGQGDSLHEHIANLAGSPAIKKGILQTVKVVDELVKVMGRHKPENIVIEMARENQTTQKGQKNSRERMKRIEEGIKELGSQILKEHPVENTQLQNEKLYLYYLQNGRDMYVDQELDINRLSDYDVDHIVPQSFLKDDSIDNKVLTRSDKARGKSDNVPSEEVVKKMKNYWRQLLNAKLITQRKFDNLTKAERGGLSELDKAGFIKRQLVETRQITKHVAQILDSRMNTKYDENDKLIREVKVITLKSKLVSDFRKDFQFYKVREINNYHHAHDAYLNAVVGTALIKKYPKLESEFVYGDYKVYDVRKMIAKSEQEIGKATAKYFFYSNIMNFFKTEITLANGEIRKRPLIETNGETGEIVWDKGRDFATVRKVLSMPQVNIVKKTEVQTGGFSKESILPKRNSDKLIARKKDWDPKKYGGFDSPTVAYSVLVVAKVEKGKSKKLKSVKELLGITIMERSSFEKNPIDFLEAKGYKEVKKDLIIKLPKYSLFELENGRKRMLASAGELQKGNELALPSKYVNFLYLASHYEKLKGSPEDNEQKQLFVEQHKHYLDEIIEQISEFSKRVILADANLDKVLSAYNKHRDKPIREQAENIIHLFTLTNLGAPAAFKYFDTTIDRKRYTSTKEVLDATLIHQSITGLYETRIDLSQLGGDGGEAAAKGGSPAPGGTLNIEDEYRLHETSKGPDVPLGSTWLSDFPQAWAETGGMGLAVRQAPLIIPLKATSTPVSIKQYPMSQEARLGIKPHIQRLLDQGILVPCQSPWNTPLLPVKKPGTNDYRPVQDLREVNKRVEDIHPTVPNPYNLLSGLPPSHQWYTVLDLKDAFFCLRLHPTSQSLFAFEWRDPEMGISGQLTWTRLPQGFKNSPTLFDEALHRDLADFRIQHPDLILLQYVDDLLLAATSELDCQQGTRALLQTLGDLGYRASAKKAQICQKQVKYLGYLLKEGQRWLTEARKETVMGQPTPKTPRQLREFLGTAGFCRLWIPGFAEMAAPLYPLTKTGTLFEWGPDQQKAYQEIKQALLTAPALGLPDLTKPFELFVDEKQGYAKGVLTQKLGPWRRPVAYLSKKLDPVAAGWPPCLRMVAAIAVLTKDAGKLTMGQPLVILAPHAVEALVKQPPDRWLSNARMTHYQALLLDTDRVQFGPIVALNPATLLPLPEEGLQHDCLDILAEAHGTRPDLTDQPLPDADHTWYTDGSSFLQEGQRKAGAAVTTETEVVWAKALPAGTSAQRAELIALTQALKMAEGKKLNVYTDSRYAFATAHIHGEIYRRRGLLTSEGKEIKNKDEILALLKALFLPKRLSIIHCPGHQKGNRAEARGNRMADQAAREVATRETPETSTLLAGKRTADGSEFEKRTADGSEFESPKKKAKVE

SEQ ID NO: 7222 - protein, 2096 aa, synthetic construct
MPAAKRVKLDGGDKKYSIGLDIGTNSVGWAVITDEYKVPSKKFKVLGNTDRHSIKKNLIGALLFDSGETAEATRLKRTARRRYTRRKNRICYLQEIFSNEMAKVDDSFFHRLEESFLVEEDKKHERHPIFGNIVDEVAYHEKYPTIYHLRKKLVDSTDKADLRLIYLALAHMIKFRGHFLIEGDLNPDNSDVDKLFIQLVQTYNQLFEENPINASGVDAKAILSARLSKSRRLENLIAQLPGEKKNGLFGNLIALSLGLTPNFKSNFDLAEDAKLQLSKDTYDDDLDNLLAQIGDQYADLFLAAKNLSDAILLSDILRVNTEITKAPLSASMIKRYDEHHQDLTLLKALVRQQLPEKYKEIFFDQSKNGYAGYIDGGASQEEFYKFIKPILEKMDGTEELLVKLNREDLLRKQRTFDNGSIPHQIHLGELHAILRRQEDFYPFLKDNREKIEKILTFRIPYYVGPLARGNSRFAWMTRKSEETITPWNFEEVVDKGASAQSFIERMTNFDKNLPNEKVLPKHSLLYEYFTVYNELTKVKYVTEGMRKPAFLSGEQKKAIVDLLFKTNRKVTVKQLKEDYFKKIECFDSVEISGVEDRFNASLGTYHDLLKIIKDKDFLDNEENEDILEDIVLTLTLFEDREMIEERLKTYAHLFDDKVMKQLKRRRYTGWGRLSRKLINGIRDKQSGKTILDFLKSDGFANRNFMQLIHDDSLTFKEDIQKAQVSGQGDSLHEHIANLAGSPAIKKGILQTVKVVDELVKVMGRHKPENIVIEMARENQTTQKGQKNSRERMKRIEEGIKELGSQILKEHPVENTQLQNEKLYLYYLQNGRDMYVDQELDINRLSDYDVDHIVPQSFLKDDSIDNKVLTRSDKARGKSDNVPSEEVVKKMKNYWRQLLNAKLITQRKFDNLTKAERGGLSELDKAGFIKRQLVETRQITKHVAQILDSRMNTKYDENDKLIREVKVITLKSKLVSDFRKDFQFYKVREINNYHHAHDAYLNAVVGTALIKKYPKLESEFVYGDYKVYDVRKMIAKSEQEIGKATAKYFFYSNIMNFFKTEITLANGEIRKRPLIETNGETGEIVWDKGRDFATVRKVLSMPQVNIVKKTEVQTGGFSKESILPKRNSDKLIARKKDWDPKKYGGFDSPTVAYSVLVVAKVEKGKSKKLKSVKELLGITIMERSSFEKNPIDFLEAKGYKEVKKDLIIKLPKYSLFELENGRKRMLASAGELQKGNELALPSKYVNFLYLASHYEKLKGSPEDNEQKQLFVEQHKHYLDEIIEQISEFSKRVILADANLDKVLSAYNKHRDKPIREQAENIIHLFTLTNLGAPAAFKYFDTTIDRKRYTSTKEVLDATLIHQSITGLYETRIDLSQLGGDGGEAAAKGGSPAPGGTLNIEDEYRLHETSKGPDVPLGSTWLSDFPQAWAETGGMGLAVRQAPLIIPLKATSTPVSIKQYPMSQEARLGIKPHIQRLLDQGILVPCQSPWNTPLLPVKKPGTNDYRPVQDLREVNKRVEDIHPTVPNPYNLLSGLPPSHQWYTVLDLKDAFFCLRLHPTSQSLFAFEWRDPEMGISGQLTWTRLPQGFKNSPTLFNEALHRDLADFRIQHPDLILLQYVDDLLLAATSELDCQQGTRALLQTLGDLGYRASAKKAQICQKQVKYLGYLLKEGQRWLTEARKETVMGQPTPKTPRQLREFLGKAGFCRLFIPGFAEMAAPLYPLTKPGTLFEWGPDQQKAYQEIKQALLTAPALGLPDLTKPFELFVDEKQGYAKGVLTQKLGPWRRPVAYLSKKLDPVAAGWPPCLRMVAAIAVLTKDAGKLTMGQPLVILAPHAVEALVKQPPDRWLSNARMTHYQALLLDTDRVQFGPIVALNPATLLPLPEEGLQHDCLDILAEAHGTRPDLTDQPLPDADHTWYTDGSSFLQEGQRKAGAAVTTETEVVWAKALPAGTSAQRAELIALTQALKMAEGKKLNVYTDSRYAFATAHIHGEIYRRRGWLTSEGKEIKNKDEILALLKALFLPKRLSIIHCPGHQKGNRAEARGNRMADQAAREVATRETPETSTLLAGKRTADGSEFEKRTADGSEFESPKKKAKVE

SEQ ID NO: 7223 - protein, 2087 aa, synthetic construct
MPAAKRVKLDGGDKKYSIGLDIGTNSVGWAVITDEYKVPSKKFKVLGNTDRHSIKKNLIGALLFDSGETAEATRLKRTARRRYTRRKNRICYLQEIFSNEMAKVDDSFFHRLEESFLVEEDKKHERHPIFGNIVDEVAYHEKYPTIYHLRKKLVDSTDKADLRLIYLALAHMIKFRGHFLIEGDLNPDNSDVDKLFIQLVQTYNQLFEENPINASGVDAKAILSARLSKSRRLENLIAQLPGEKKNGLFGNLIALSLGLTPNFKSNFDLAEDAKLQLSKDTYDDDLDNLLAQIGDQYADLFLAAKNLSDAILLSDILRVNTEITKAPLSASMIKRYDEHHQDLTLLKALVRQQLPEKYKEIFFDQSKNGYAGYIDGGASQEEFYKFIKPILEKMDGTEELLVKLNREDLLRKQRTFDNGSIPHQIHLGELHAILRRQEDFYPFLKDNREKIEKILTFRIPYYVGPLARGNSRFAWMTRKSEETITPWNFEEVVDKGASAQSFIERMTNFDKNLPNEKVLPKHSLLYEYFTVYNELTKVKYVTEGMRKPAFLSGEQKKAIVDLLFKTNRKVTVKQLKEDYFKKIECFDSVEISGVEDRFNASLGTYHDLLKIIKDKDFLDNEENEDILEDIVLTLTLFEDREMIEERLKTYAHLFDDKVMKQLKRRRYTGWGRLSRKLINGIRDKQSGKTILDFLKSDGFANRNFMQLIHDDSLTFKEDIQKAQVSGQGDSLHEHIANLAGSPAIKKGILQTVKVVDELVKVMGRHKPENIVIEMARENQTTQKGQKNSRERMKRIEEGIKELGSQILKEHPVENTQLQNEKLYLYYLQNGRDMYVDQELDINRLSDYDVDHIVPQSFLKDDSIDNKVLTRSDKARGKSDNVPSEEVVKKMKNYWRQLLNAKLITQRKFDNLTKAERGGLSELDKAGFIKRQLVETRQITKHVAQILDSRMNTKYDENDKLIREVKVITLKSKLVSDFRKDFQFYKVREINNYHHAHDAYLNAVVGTALIKKYPKLESEFVYGDYKVYDVRKMIAKSEQEIGKATAKYFFYSNIMNFFKTEITLANGEIRKRPLIETNGETGEIVWDKGRDFATVRKVLSMPQVNIVKKTEVQTGGFSKESILPKRNSDKLIARKKDWDPKKYGGFDSPTVAYSVLVVAKVEKGKSKKLKSVKELLGITIMERSSFEKNPIDFLEAKGYKEVKKDLIIKLPKYSLFELENGRKRMLASAGELQKGNELALPSKYVNFLYLASHYEKLKGSPEDNEQKQLFVEQHKHYLDEIIEQISEFSKRVILADANLDKVLSAYNKHRDKPIREQAENIIHLFTLTNLGAPAAFKYFDTTIDRKRYTSTKEVLDATLIHQSITGLYETRIDLSQLGGDGGEAAAKGGSPAPGGIPWLMKKPLQLTTLVPLQEYEERLLKQTMLTGSYKEKLQSLFLKYDALWQHWENQVGHRRIKPHHIATGTVNPRPQKQYPINPKAKASIQTVINDLLKQGVLIQQNSIMNTPVYPVPKPDGKWRMVLDYREVNKTIPLIAAQNQHSAGILSSIFRGKYKTTLDLSNGFWAHSITPESYWLTAFTWLGQQYCWTRLPQGFLNSPALFTADVVDLLKEVPNVQVYVDDIYISHDDPREHLEQLEKVFSLLLNAGYVVSLKKSEIAQHEVEFLGFNITKEGRGLTETFKQKLLNITPPRDLKQLQSILGLLNFARNFIPNFSELVKPLYNIIATANGKYITWTTDNSQQLQNIISMLNSAENLEERNPEVRLIMKVNTSPSAGYIRFYNEFAKRPIMYLNYVYTKAEVKFTNTEKLLTTIHKGLIKALDLGMGQEILVYSPIVSMTKIQKTPLPERKALPIRWITWMSYLEDPRIQFHYDKTLPELQQVPTVTDDIIAKIKHPSEFSMVFYTDGSAIKHPNVNKSHNAGMGIAQVQFKPEFTVINTWSIPLGDHTAQLAEVAAVEFACKKALKIDGPVLIVTDSFYVAESVNKELPYWQSNGFFNNKKKPLKHVSKWKSIADCIQLKPDIIIIHEKGHQPTASTFHTEGNNLADKLATQGSYVVNAGKRTADGSEFEKRTADGSEFESPKKKAKVE

SEQ ID NO: 7224 - protein, 2087 aa, synthetic construct
MPAAKRVKLDGGDKKYSIGLDIGTNSVGWAVITDEYKVPSKKFKVLGNTDRHSIKKNLIGALLFDSGETAEATRLKRTARRRYTRRKNRICYLQEIFSNEMAKVDDSFFHRLEESFLVEEDKKHERHPIFGNIVDEVAYHEKYPTIYHLRKKLVDSTDKADLRLIYLALAHMIKFRGHFLIEGDLNPDNSDVDKLFIQLVQTYNQLFEENPINASGVDAKAILSARLSKSRRLENLIAQLPGEKKNGLFGNLIALSLGLTPNFKSNFDLAEDAKLQLSKDTYDDDLDNLLAQIGDQYADLFLAAKNLSDAILLSDILRVNTEITKAPLSASMIKRYDEHHQDLTLLKALVRQQLPEKYKEIFFDQSKNGYAGYIDGGASQEEFYKFIKPILEKMDGTEELLVKLNREDLLRKQRTFDNGSIPHQIHLGELHAILRRQEDFYPFLKDNREKIEKILTFRIPYYVGPLARGNSRFAWMTRKSEETITPWNFEEVVDKGASAQSFIERMTNFDKNLPNEKVLPKHSLLYEYFTVYNELTKVKYVTEGMRKPAFLSGEQKKAIVDLLFKTNRKVTVKQLKEDYFKKIECFDSVEISGVEDRFNASLGTYHDLLKIIKDKDFLDNEENEDILEDIVLTLTLFEDREMIEERLKTYAHLFDDKVMKQLKRRRYTGWGRLSRKLINGIRDKQSGKTILDFLKSDGFANRNFMQLIHDDSLTFKEDIQKAQVSGQGDSLHEHIANLAGSPAIKKGILQTVKVVDELVKVMGRHKPENIVIEMARENQTTQKGQKNSRERMKRIEEGIKELGSQILKEHPVENTQLQNEKLYLYYLQNGRDMYVDQELDINRLSDYDVDHIVPQSFLKDDSIDNKVLTRSDKARGKSDNVPSEEVVKKMKNYWRQLLNAKLITQRKFDNLTKAERGGLSELDKAGFIKRQLVETRQITKHVAQILDSRMNTKYDENDKLIREVKVITLKSKLVSDFRKDFQFYKVREINNYHHAHDAYLNAVVGTALIKKYPKLESEFVYGDYKVYDVRKMIAKSEQEIGKATAKYFFYSNIMNFFKTEITLANGEIRKRPLIETNGETGEIVWDKGRDFATVRKVLSMPQVNIVKKTEVQTGGFSKESILPKRNSDKLIARKKDWDPKKYGGFDSPTVAYSVLVVAKVEKGKSKKLKSVKELLGITIMERSSFEKNPIDFLEAKGYKEVKKDLIIKLPKYSLFELENGRKRMLASAGELQKGNELALPSKYVNFLYLASHYEKLKGSPEDNEQKQLFVEQHKHYLDEIIEQISEFSKRVILADANLDKVLSAYNKHRDKPIREQAENIIHLFTLTNLGAPAAFKYFDTTIDRKRYTSTKEVLDATLIHQSITGLYETRIDLSQLGGDGGEAAAKGGSPAPGGIPWLMKKPLQLTTLVPLQEYEERLLKQTMLTGSYKEKLQSLFLKYDALWQHWENQVGHRRIKPHHIATGTVNPRPQKQYPINPKAKASIQTVINDLLKQGVLIQQNSIMNTPVYPVPKPDGKWRMVLDYREVNKTIPLIAAQNQHSAGILSSIFRGKYKTTLDLSNGFWAHSITPESYWLTAFTWLGQQYCWTRLPQGFLNSPALFNADVVDLLKEVPNVQVYVDDIYISHDDPREHLEQLEKVFSLLLNAGYVVSLKKSEIAQHEVEFLGFNITKEGRGLTETFKQKLLNITPPRDLKQLQSILGLLNFARNFIPNFSELVKPLYNIIATAPGKYITWTTDNSQQLQNIISMLNSAENLEERNPEVRLIMKVNTSPSAGYIRFYNEFAKRPIMYLNYVYTKAEVKFTNTEKLLTTIHKGLIKALDLGMGQEILVYSPIVSMTKIQKTPLPERKALPIRWITWMSYLEDPRIQFHYDKTLPELQQVPTVTDDIIAKIKHPSEFSMVFYTDGSAIKHPNVNKSHNAGMGIAQVQFKPEFTVINTWSIPLGDHTAQLAEVAAVEFACKKALKIDGPVLIVTDSFYVAESVNKELPYWQSNGFFNNKKKPLKHVSKWKSIADCIQLKPDIIIIHEKGHQPTASTFHTEGNNLADKLATQGSYVVNAGKRTADGSEFEKRTADGSEFESPKKKAKVE

SEQ ID NO: 7225 - protein, 2094 aa, synthetic construct
MPAAKRVKLDGGDKKYSIGLDIGTNSVGWAVITDEYKVPSKKFKVLGNTDRHSIKKNLIGALLFDSGETAEATRLKRTARRRYTRRKNRICYLQEIFSNEMAKVDDSFFHRLEESFLVEEDKKHERHPIFGNIVDEVAYHEKYPTIYHLRKKLVDSTDKADLRLIYLALAHMIKFRGHFLIEGDLNPDNSDVDKLFIQLVQTYNQLFEENPINASGVDAKAILSARLSKSRRLENLIAQLPGEKKNGLFGNLIALSLGLTPNFKSNFDLAEDAKLQLSKDTYDDDLDNLLAQIGDQYADLFLAAKNLSDAILLSDILRVNTEITKAPLSASMIKRYDEHHQDLTLLKALVRQQLPEKYKEIFFDQSKNGYAGYIDGGASQEEFYKFIKPILEKMDGTEELLVKLNREDLLRKQRTFDNGSIPHQIHLGELHAILRRQEDFYPFLKDNREKIEKILTFRIPYYVGPLARGNSRFAWMTRKSEETITPWNFEEVVDKGASAQSFIERMTNFDKNLPNEKVLPKHSLLYEYFTVYNELTKVKYVTEGMRKPAFLSGEQKKAIVDLLFKTNRKVTVKQLKEDYFKKIECFDSVEISGVEDRFNASLGTYHDLLKIIKDKDFLDNEENEDILEDIVLTLTLFEDREMIEERLKTYAHLFDDKVMKQLKRRRYTGWGRLSRKLINGIRDKQSGKTILDFLKSDGFANRNFMQLIHDDSLTFKEDIQKAQVSGQGDSLHEHIANLAGSPAIKKGILQTVKVVDELVKVMGRHKPENIVIEMARENQTTQKGQKNSRERMKRIEEGIKELGSQILKEHPVENTQLQNEKLYLYYLQNGRDMYVDQELDINRLSDYDVDHIVPQSFLKDDSIDNKVLTRSDKARGKSDNVPSEEVVKKMKNYWRQLLNAKLITQRKFDNLTKAERGGLSELDKAGFIKRQLVETRQITKHVAQILDSRMNTKYDENDKLIREVKVITLKSKLVSDFRKDFQFYKVREINNYHHAHDAYLNAVVGTALIKKYPKLESEFVYGDYKVYDVRKMIAKSEQEIGKATAKYFFYSNIMNFFKTEITLANGEIRKRPLIETNGETGEIVWDKGRDFATVRKVLSMPQVNIVKKTEVQTGGFSKESILPKRNSDKLIARKKDWDPKKYGGFDSPTVAYSVLVVAKVEKGKSKKLKSVKELLGITIMERSSFEKNPIDFLEAKGYKEVKKDLIIKLPKYSLFELENGRKRMLASAGELQKGNELALPSKYVNFLYLASHYEKLKGSPEDNEQKQLFVEQHKHYLDEIIEQISEFSKRVILADANLDKVLSAYNKHRDKPIREQAENIIHLFTLTNLGAPAAFKYFDTTIDRKRYTSTKEVLDATLIHQSITGLYETRIDLSQLGGDGGEAAAKGGSPAPGGVLNLEEEYRLHEKPVPSSIDPSWLQLFPTVWAERAGMGLANQVPPVVVELRSGASPVAVRQYPMSKEAREGIRPHIQRFLDLGVLVPCQSPWNTPLLPVKKPGTNDYRPVQDLREINKRVQDIHPTVPNPYNLLSSLPPSHTWYSVLDLKDAFFCLKLHPNSQPLFAFEWRDPEKGNTGQLTWTRLPQGFKNSPTLFDEALHRDLAPFRALNPQVVLLQYVDDLLVAAPTYRDCKEGTQKLLQELSKLGYRVSAKKAQLCQKEVTYLGYLLKEGKRWLTPARKATVMKIPPPTTPRQVREFLGTAGFCRLWIPGFASLAAPLYPLTKESIPFIWTEEHQKAFDRIKEALLSAPALALPDLTKPFTLYVDERAGVARGVLTQTLGPWRRPVAYLSKKLDPVASGWPTCLKAVAAVALLLKDADKLTLGQNVTVIASHSLESIVRQPPDRWMTNARMTHYQSLLLNERVSFAPPAVLNPATLLPVESEATPVHRCSEILAEETGTRRDLKDQPLPGVPAWYTDGSSFIAEGKRRAGAAIVDGKRTVWASSLPEGTSAQKAELVALTQALRLAEGKDINIYTDSRYAFATAHIHGAIYKQRGLLTSAGKDIKNKEEILALLEAIHLPKRVAIIHCPGHQKGNDPVATGNRRADEAAKQAALSTRVLAETTKPAGKRTADGSEFEKRTADGSEFESPKKKAKVE

SEQ ID NO: 7226 - protein, 2094 aa, synthetic construct
MPAAKRVKLDGGDKKYSIGLDIGTNSVGWAVITDEYKVPSKKFKVLGNTDRHSIKKNLIGALLFDSGETAEATRLKRTARRRYTRRKNRICYLQEIFSNEMAKVDDSFFHRLEESFLVEEDKKHERHPIFGNIVDEVAYHEKYPTIYHLRKKLVDSTDKADLRLIYLALAHMIKFRGHFLIEGDLNPDNSDVDKLFIQLVQTYNQLFEENPINASGVDAKAILSARLSKSRRLENLIAQLPGEKKNGLFGNLIALSLGLTPNFKSNFDLAEDAKLQLSKDTYDDDLDNLLAQIGDQYADLFLAAKNLSDAILLSDILRVNTEITKAPLSASMIKRYDEHHQDLTLLKALVRQQLPEKYKEIFFDQSKNGYAGYIDGGASQEEFYKFIKPILEKMDGTEELLVKLNREDLLRKQRTFDNGSIPHQIHLGELHAILRRQEDFYPFLKDNREKIEKILTFRIPYYVGPLARGNSRFAWMTRKSEETITPWNFEEVVDKGASAQSFIERMTNFDKNLPNEKVLPKHSLLYEYFTVYNELTKVKYVTEGMRKPAFLSGEQKKAIVDLLFKTNRKVTVKQLKEDYFKKIECFDSVEISGVEDRFNASLGTYHDLLKIIKDKDFLDNEENEDILEDIVLTLTLFEDREMIEERLKTYAHLFDDKVMKQLKRRRYTGWGRLSRKLINGIRDKQSGKTILDFLKSDGFANRNFMQLIHDDSLTFKEDIQKAQVSGQGDSLHEHIANLAGSPAIKKGILQTVKVVDELVKVMGRHKPENIVIEMARENQTTQKGQKNSRERMKRIEEGIKELGSQILKEHPVENTQLQNEKLYLYYLQNGRDMYVDQELDINRLSDYDVDHIVPQSFLKDDSIDNKVLTRSDKARGKSDNVPSEEVVKKMKNYWRQLLNAKLITQRKFDNLTKAERGGLSELDKAGFIKRQLVETRQITKHVAQILDSRMNTKYDENDKLIREVKVITLKSKLVSDFRKDFQFYKVREINNYHHAHDAYLNAVVGTALIKKYPKLESEFVYGDYKVYDVRKMIAKSEQEIGKATAKYFFYSNIMNFFKTEITLANGEIRKRPLIETNGETGEIVWDKGRDFATVRKVLSMPQVNIVKKTEVQTGGFSKESILPKRNSDKLIARKKDWDPKKYGGFDSPTVAYSVLVVAKVEKGKSKKLKSVKELLGITIMERSSFEKNPIDFLEAKGYKEVKKDLIIKLPKYSLFELENGRKRMLASAGELQKGNELALPSKYVNFLYLASHYEKLKGSPEDNEQKQLFVEQHKHYLDEIIEQISEFSKRVILADANLDKVLSAYNKHRDKPIREQAENIIHLFTLTNLGAPAAFKYFDTTIDRKRYTSTKEVLDATLIHQSITGLYETRIDLSQLGGDGGEAAAKGGSPAPGGVLNLEEEYRLHEKPVPSSIDPSWLQLFPTVWAERAGMGLANQVPPVVVELRSGASPVAVRQYPMSKEAREGIRPHIQRFLDLGVLVPCQSPWNTPLLPVKKPGTNDYRPVQDLREINKRVQDIHPTVPNPYNLLSSLPPSHTWYSVLDLKDAFFCLKLHPNSQPLFAFEWRDPEKGNTGQLTWTRLPQGFKNSPTLFNEALHRDLAPFRALNPQVVLLQYVDDLLVAAPTYRDCKEGTQKLLQELSKLGYRVSAKKAQLCQKEVTYLGYLLKEGKRWLTPARKATVMKIPPPTTPRQVREFLGKAGFCRLFIPGFASLAAPLYPLTKPSIPFIWTEEHQKAFDRIKEALLSAPALALPDLTKPFTLYVDERAGVARGVLTQTLGPWRRPVAYLSKKLDPVASGWPTCLKAVAAVALLLKDADKLTLGQNVTVIASHSLESIVRQPPDRWMTNARMTHYQSLLLNERVSFAPPAVLNPATLLPVESEATPVHRCSEILAEETGTRRDLKDQPLPGVPAWYTDGSSFIAEGKRRAGAAIVDGKRTVWASSLPEGTSAQKAELVALTQALRLAEGKDINIYTDSRYAFATAHIHGAIYKQRGWLTSAGKDIKNKEEILALLEAIHLPKRVAIIHCPGHQKGNDPVATGNRRADEAAKQAALSTRVLAETTKPAGKRTADGSEFEKRTADGSEFESPKKKAKVE

SEQ ID NO: 7227 - protein, 2096 aa, synthetic construct
MPAAKRVKLDGGDKKYSIGLDIGTNSVGWAVITDEYKVPSKKFKVLGNTDRHSIKKNLIGALLFDSGETAEATRLKRTARRRYTRRKNRICYLQEIFSNEMAKVDDSFFHRLEESFLVEEDKKHERHPIFGNIVDEVAYHEKYPTIYHLRKKLVDSTDKADLRLIYLALAHMIKFRGHFLIEGDLNPDNSDVDKLFIQLVQTYNQLFEENPINASGVDAKAILSARLSKSRRLENLIAQLPGEKKNGLFGNLIALSLGLTPNFKSNFDLAEDAKLQLSKDTYDDDLDNLLAQIGDQYADLFLAAKNLSDAILLSDILRVNTEITKAPLSASMIKRYDEHHQDLTLLKALVRQQLPEKYKEIFFDQSKNGYAGYIDGGASQEEFYKFIKPILEKMDGTEELLVKLNREDLLRKQRTFDNGSIPHQIHLGELHAILRRQEDFYPFLKDNREKIEKILTFRIPYYVGPLARGNSRFAWMTRKSEETITPWNFEEVVDKGASAQSFIERMTNFDKNLPNEKVLPKHSLLYEYFTVYNELTKVKYVTEGMRKPAFLSGEQKKAIVDLLFKTNRKVTVKQLKEDYFKKIECFDSVEISGVEDRFNASLGTYHDLLKIIKDKDFLDNEENEDILEDIVLTLTLFEDREMIEERLKTYAHLFDDKVMKQLKRRRYTGWGRLSRKLINGIRDKQSGKTILDFLKSDGFANRNFMQLIHDDSLTFKEDIQKAQVSGQGDSLHEHIANLAGSPAIKKGILQTVKVVDELVKVMGRHKPENIVIEMARENQTTQKGQKNSRERMKRIEEGIKELGSQILKEHPVENTQLQNEKLYLYYLQNGRDMYVDQELDINRLSDYDVDHIVPQSFLKDDSIDNKVLTRSDKARGKSDNVPSEEVVKKMKNYWRQLLNAKLITQRKFDNLTKAERGGLSELDKAGFIKRQLVETRQITKHVAQILDSRMNTKYDENDKLIREVKVITLKSKLVSDFRKDFQFYKVREINNYHHAHDAYLNAVVGTALIKKYPKLESEFVYGDYKVYDVRKMIAKSEQEIGKATAKYFFYSNIMNFFKTEITLANGEIRKRPLIETNGETGEIVWDKGRDFATVRKVLSMPQVNIVKKTEVQTGGFSKESILPKRNSDKLIARKKDWDPKKYGGFDSPTVAYSVLVVAKVEKGKSKKLKSVKELLGITIMERSSFEKNPIDFLEAKGYKEVKKDLIIKLPKYSLFELENGRKRMLASAGELQKGNELALPSKYVNFLYLASHYEKLKGSPEDNEQKQLFVEQHKHYLDEIIEQISEFSKRVILADANLDKVLSAYNKHRDKPIREQAENIIHLFTLTNLGAPAAFKYFDTTIDRKRYTSTKEVLDATLIHQSITGLYETRIDLSQLGGDGGEAAAKGGSPAPGGTLNIEDEYRLHETSKEPDVPLGSTWLSDFPQAWAETGGMGLAVRQAPLIIPLKATSTPVSIKQYPMSQEARLGIKPHIQRLLDQGILVPCQSPWNTPLLPVKKPGTNDYRPVQDLREVNKRVEDIHPTVPNPYNLLSGLPPSHQWYTVLDLKDAFFCLRLHPTSQPLFAFEWRDPEMGISGQLTWTRLPQGFKNSPTLFNEALHRDLADFRIQHPDLILLQYVDDLLLAATSEQDCQRGTRALLQTLGNLGYRASAKKAQICQKQVKYLGYLLKEGQRWLTEARKETVMGQPTPKTPRQLREFLGTAGFCRLWIPGFAEMAAPLYPLTKPGTLFNWGPDQQKAYQEIKQALLTAPALGLPDLTKPFELFVDEKQGYAKGVLTQKLGPWRRPVAYLSKKLDPVAAGWPPCLRMVAAIAVLTKDAGKLTMGQPLVILAPHAVEALVKQPPDRWLSNARMTHYQAMLLDTDRVQFGPVVALNPATLLPLPEKEAPHDCLEILAETHGTRPDLTDQPIPDADYTWYTDGSSFLQEGQRRAGAAVTTETEVIWARALPAGTSAQRAELIALTQALKMAEGKKLNVYTDSRYAFATAHVHGEIYRRRGWLTSEGREIKNKNEILALLKALFLPKRLSIIHCPGHQKGNSAEARGNRMADQAAREAAMKAVLETSTLLAGKRTADGSEFEKRTADGSEFESPKKKAKVE

SEQ ID NO: 7228 - protein, 2087 aa, synthetic construct
MPAAKRVKLDGGDKKYSIGLDIGTNSVGWAVITDEYKVPSKKFKVLGNTDRHSIKKNLIGALLFDSGETAEATRLKRTARRRYTRRKNRICYLQEIFSNEMAKVDDSFFHRLEESFLVEEDKKHERHPIFGNIVDEVAYHEKYPTIYHLRKKLVDSTDKADLRLIYLALAHMIKFRGHFLIEGDLNPDNSDVDKLFIQLVQTYNQLFEENPINASGVDAKAILSARLSKSRRLENLIAQLPGEKKNGLFGNLIALSLGLTPNFKSNFDLAEDAKLQLSKDTYDDDLDNLLAQIGDQYADLFLAAKNLSDAILLSDILRVNTEITKAPLSASMIKRYDEHHQDLTLLKALVRQQLPEKYKEIFFDQSKNGYAGYIDGGASQEEFYKFIKPILEKMDGTEELLVKLNREDLLRKQRTFDNGSIPHQIHLGELHAILRRQEDFYPFLKDNREKIEKILTFRIPYYVGPLARGNSRFAWMTRKSEETITPWNFEEVVDKGASAQSFIERMTNFDKNLPNEKVLPKHSLLYEYFTVYNELTKVKYVTEGMRKPAFLSGEQKKAIVDLLFKTNRKVTVKQLKEDYFKKIECFDSVEISGVEDRFNASLGTYHDLLKIIKDKDFLDNEENEDILEDIVLTLTLFEDREMIEERLKTYAHLFDDKVMKQLKRRRYTGWGRLSRKLINGIRDKQSGKTILDFLKSDGFANRNFMQLIHDDSLTFKEDIQKAQVSGQGDSLHEHIANLAGSPAIKKGILQTVKVVDELVKVMGRHKPENIVIEMARENQTTQKGQKNSRERMKRIEEGIKELGSQILKEHPVENTQLQNEKLYLYYLQNGRDMYVDQELDINRLSDYDVDHIVPQSFLKDDSIDNKVLTRSDKARGKSDNVPSEEVVKKMKNYWRQLLNAKLITQRKFDNLTKAERGGLSELDKAGFIKRQLVETRQITKHVAQILDSRMNTKYDENDKLIREVKVITLKSKLVSDFRKDFQFYKVREINNYHHAHDAYLNAVVGTALIKKYPKLESEFVYGDYKVYDVRKMIAKSEQEIGKATAKYFFYSNIMNFFKTEITLANGEIRKRPLIETNGETGEIVWDKGRDFATVRKVLSMPQVNIVKKTEVQTGGFSKESILPKRNSDKLIARKKDWDPKKYGGFDSPTVAYSVLVVAKVEKGKSKKLKSVKELLGITIMERSSFEKNPIDFLEAKGYKEVKKDLIIKLPKYSLFELENGRKRMLASAGELQKGNELALPSKYVNFLYLASHYEKLKGSPEDNEQKQLFVEQHKHYLDEIIEQISEFSKRVILADANLDKVLSAYNKHRDKPIREQAENIIHLFTLTNLGAPAAFKYFDTTIDRKRYTSTKEVLDATLIHQSITGLYETRIDLSQLGGDGGEAAAKPAPGGSGGVPWILKKPLELTIKLDLEEQQGTLLNNSILSKKGKEELKQLFEKYSALWQSWENQVGHRRIRPHKIATGTVKPTPQKQYHINPKAKPDIQIVINDLLKQGVLIQKESTMNTPVYPVPKPNGRWRMVLDYRAVNKVTPLIAVQNQHSYGILGSLFKGRYKTTIDLSNGFWAHPIVPEDYWITAFTWQGKQYCWTVLPQGFLNSPGLFNGDVVDLLQGIPNVEVYVDDVYISHDSEKEHLEYLDILFNRLKEAGYIISLKKSNIANSIVDFLGFQITNEGRGLTDTFKEKLENITAPTTLKQLQSILGLLNFARNFIPDFTELIAPLYALIPKSPKNYVPWQIEHSTTLETLITKLNGAEYLQGRKGDKTLIMKVNASYTTGYIRYYNEGEKKPISYVSIVFSKTELKFTELEKLLTTVHKGLLKALDLSMGQNIHVYSPIVSMQNIQKTPQTAKKALASRWLSWLSYLEDPRIRFFYDPQMPALKDLPAVDTGKDNKKHPSNFQHIFYTDGSAITSPTKEGHLNAGMGIVYFINKDGNLQKQQEWSISLGNHTAQFAEIAAFEFALKKCLPLGGNILVVTDSNYVAKAYNEELDVWASNGFVNNRKKPLKHISKWKSVADLKRLRPDVVVTHEPGHQKLDSSPHAYGNNLADQLATQASFKVHAGKRTADGSEFEKRTADGSEFESPKKKAKVE

SEQ ID NO: 7229 - protein, 2176 aa, synthetic construct
MPAAKRVKLDGGDKKYSIGLDIGTNSVGWAVITDEYKVPSKKFKVLGNTDRHSIKKNLIGALLFDSGETAEATRLKRTARRRYTRRKNRICYLQEIFSNEMAKVDDSFFHRLEESFLVEEDKKHERHPIFGNIVDEVAYHEKYPTIYHLRKKLVDSTDKADLRLIYLALAHMIKFRGHFLIEGDLNPDNSDVDKLFIQLVQTYNQLFEENPINASGVDAKAILSARLSKSRRLENLIAQLPGEKKNGLFGNLIALSLGLTPNFKSNFDLAEDAKLQLSKDTYDDDLDNLLAQIGDQYADLFLAAKNLSDAILLSDILRVNTEITKAPLSASMIKRYDEHHQDLTLLKALVRQQLPEKYKEIFFDQSKNGYAGYIDGGASQEEFYKFIKPILEKMDGTEELLVKLNREDLLRKQRTFDNGSIPHQIHLGELHAILRRQEDFYPFLKDNREKIEKILTFRIPYYVGPLARGNSRFAWMTRKSEETITPWNFEEVVDKGASAQSFIERMTNFDKNLPNEKVLPKHSLLYEYFTVYNELTKVKYVTEGMRKPAFLSGEQKKAIVDLLFKTNRKVTVKQLKEDYFKKIECFDSVEISGVEDRFNASLGTYHDLLKIIKDKDFLDNEENEDILEDIVLTLTLFEDREMIEERLKTYAHLFDDKVMKQLKRRRYTGWGRLSRKLINGIRDKQSGKTILDFLKSDGFANRNFMQLIHDDSLTFKEDIQKAQVSGQGDSLHEHIANLAGSPAIKKGILQTVKVVDELVKVMGRHKPENIVIEMARENQTTQKGQKNSRERMKRIEEGIKELGSQILKEHPVENTQLQNEKLYLYYLQNGRDMYVDQELDINRLSDYDVDHIVPQSFLKDDSIDNKVLTRSDKARGKSDNVPSEEVVKKMKNYWRQLLNAKLITQRKFDNLTKAERGGLSELDKAGFIKRQLVETRQITKHVAQILDSRMNTKYDENDKLIREVKVITLKSKLVSDFRKDFQFYKVREINNYHHAHDAYLNAVVGTALIKKYPKLESEFVYGDYKVYDVRKMIAKSEQEIGKATAKYFFYSNIMNFFKTEITLANGEIRKRPLIETNGETGEIVWDKGRDFATVRKVLSMPQVNIVKKTEVQTGGFSKESILPKRNSDKLIARKKDWDPKKYGGFDSPTVAYSVLVVAKVEKGKSKKLKSVKELLGITIMERSSFEKNPIDFLEAKGYKEVKKDLIIKLPKYSLFELENGRKRMLASAGELQKGNELALPSKYVNFLYLASHYEKLKGSPEDNEQKQLFVEQHKHYLDEIIEQISEFSKRVILADANLDKVLSAYNKHRDKPIREQAENIIHLFTLTNLGAPAAFKYFDTTIDRKRYTSTKEVLDATLIHQSITGLYETRIDLSQLGGDGGEAAAKPAPGGSGGMNPLQLLQPLPAEIKGTKLLAHWNSGATITCIPESFLEDEQPIKKTLIKTIHGEKQQNVYYVTFKVKGRKVEAEVIASPYEYILLSPTDVPWLTQQPLQLTILVPLQEYQEKILSKTALPEDQKQQLKTLFVKYDNLWQHWENQVGHRKIRPHNIATGDYPPRPQKQYPINPKAKPSIQIVIDDLLKQGVLTPQNSTMNTPVYPVPKPDGRWRMVLDYREVNKTIPLTAAQNQHSAGILATIVRQKYKTTLDLANGFWAHPITPESYWLTAFTWQGKQYCWTRLPQGFLNSPALFNADVVDLLKEIPNVQVYVDDIYLSHDDPKEHVQQLEKVFQILLQAGYVVSLKKSEIGQKTVEFLGFNITKEGRGLTDTFKTKLLNITPPKDLKQLQSILGLLNFARNFIPNFAELVQPLYNLIAPAKGKYIEWSEENTKQLNMVIEALNTASNLEERLPEQRLVIKVNTSPSAGYVRYYNETGKKPIMYLNYVFSKAELKFSMLEKLLTTMHKALIKAMDLAMGQEILVYSPIVSMTKIQKTPLPERKALPIRWITWMTYLEDPRIQFHYDKTLPELKHIPDVYTSSQSPVKHPSQYEGVFYTDGSAIKSPDPTKSNNAGMGIVHATYKPEYQVLNQWSIPLGNHTAQMAEIAAVEFACKKALKIPGPVLVITDSFYVAESANKELPYWKSNGFVNNKKKPLKHISKWKSIAECLSMKPDITIQHEKGISLQIPVFILKGNALADKLATQGSYVVNAGKRTADGSEFEKRTADGSEFESPKKKAKVE

SEQ ID NO: 7230 - protein, 2094 aa, synthetic construct
MPAAKRVKLDGGDKKYSIGLDIGTNSVGWAVITDEYKVPSKKFKVLGNTDRHSIKKNLIGALLFDSGETAEATRLKRTARRRYTRRKNRICYLQEIFSNEMAKVDDSFFHRLEESFLVEEDKKHERHPIFGNIVDEVAYHEKYPTIYHLRKKLVDSTDKADLRLIYLALAHMIKFRGHFLIEGDLNPDNSDVDKLFIQLVQTYNQLFEENPINASGVDAKAILSARLSKSRRLENLIAQLPGEKKNGLFGNLIALSLGLTPNFKSNFDLAEDAKLQLSKDTYDDDLDNLLAQIGDQYADLFLAAKNLSDAILLSDILRVNTEITKAPLSASMIKRYDEHHQDLTLLKALVRQQLPEKYKEIFFDQSKNGYAGYIDGGASQEEFYKFIKPILEKMDGTEELLVKLNREDLLRKQRTFDNGSIPHQIHLGELHAILRRQEDFYPFLKDNREKIEKILTFRIPYYVGPLARGNSRFAWMTRKSEETITPWNFEEVVDKGASAQSFIERMTNFDKNLPNEKVLPKHSLLYEYFTVYNELTKVKYVTEGMRKPAFLSGEQKKAIVDLLFKTNRKVTVKQLKEDYFKKIECFDSVEISGVEDRFNASLGTYHDLLKIIKDKDFLDNEENEDILEDIVLTLTLFEDREMIEERLKTYAHLFDDKVMKQLKRRRYTGWGRLSRKLINGIRDKQSGKTILDFLKSDGFANRNFMQLIHDDSLTFKEDIQKAQVSGQGDSLHEHIANLAGSPAIKKGILQTVKVVDELVKVMGRHKPENIVIEMARENQTTQKGQKNSRERMKRIEEGIKELGSQILKEHPVENTQLQNEKLYLYYLQNGRDMYVDQELDINRLSDYDVDHIVPQSFLKDDSIDNKVLTRSDKARGKSDNVPSEEVVKKMKNYWRQLLNAKLITQRKFDNLTKAERGGLSELDKAGFIKRQLVETRQITKHVAQILDSRMNTKYDENDKLIREVKVITLKSKLVSDFRKDFQFYKVREINNYHHAHDAYLNAVVGTALIKKYPKLESEFVYGDYKVYDVRKMIAKSEQEIGKATAKYFFYSNIMNFFKTEITLANGEIRKRPLIETNGETGEIVWDKGRDFATVRKVLSMPQVNIVKKTEVQTGGFSKESILPKRNSDKLIARKKDWDPKKYGGFDSPTVAYSVLVVAKVEKGKSKKLKSVKELLGITIMERSSFEKNPIDFLEAKGYKEVKKDLIIKLPKYSLFELENGRKRMLASAGELQKGNELALPSKYVNFLYLASHYEKLKGSPEDNEQKQLFVEQHKHYLDEIIEQISEFSKRVILADANLDKVLSAYNKHRDKPIREQAENIIHLFTLTNLGAPAAFKYFDTTIDRKRYTSTKEVLDATLIHQSITGLYETRIDLSQLGGDGGEAAAKPAPGGSGGVLNLEEEYRLHEKPVPSSIDPSWLQLFPTVWAERAGMGLANQVPPVVVELRSGASPVAVRQYPMSKEAREGIRPHIQKFLDLGVLVPCRSPWNTPLLPVKKPGTNDYRPVQDLREINKRVQDIHPTVPNPYNLLSSLPPSYTWYSVLDLKDAFFCLRLHPNSQPLFAFEWKDPEKGNTGQLTWTRLPQGFKNSPTLFNEALHRDLAPFRALNPQVVLLQYVDDLLVAAPTYEDCKKGTQKLLQELSKLGYRVSAKKAQLCQREVTYLGYLLKEGKRWLTPARKATVMKIPVPTTPRQVREFLGTAGFCRLWIPGFASLAAPLYPLTKPSIPFIWTEEHQQAFDHIKKALLSAPALALPDLTKPFTLYIDERAGVARGVLTQTLGPWRRPVAYLSKKLDPVASGWPTCLKAVAAVALLLKDADKLTLGQNVTVIASHSLESIVRQPPDRWMTNARMTHYQSLLLNERVSFAPPAVLNPATLLPVESEATPVHRCSEILAEETGTRRDLEDQPLPGVPTWYTDGSSFITEGKRRAGAPIVDGKRTVWASSLPEGTSAQKAELVALTQALRLAEGKNINIYTDSRYAFATAHIHGAIYKQRGWLTSAGKDIKNKEEILALLEAIHLPRRVAIIHCPGHQRGSNPVATGNRRADEAAKQAALSTRVLAGTTKPAGKRTADGSEFEKRTADGSEFESPKKKAKVE

SEQ ID NO: 7231 - protein, 2127 aa, synthetic construct
MPAAKRVKLDGGDKKYSIGLDIGTNSVGWAVITDEYKVPSKKFKVLGNTDRHSIKKNLIGALLFDSGETAEATRLKRTARRRYTRRKNRICYLQEIFSNEMAKVDDSFFHRLEESFLVEEDKKHERHPIFGNIVDEVAYHEKYPTIYHLRKKLVDSTDKADLRLIYLALAHMIKFRGHFLIEGDLNPDNSDVDKLFIQLVQTYNQLFEENPINASGVDAKAILSARLSKSRRLENLIAQLPGEKKNGLFGNLIALSLGLTPNFKSNFDLAEDAKLQLSKDTYDDDLDNLLAQIGDQYADLFLAAKNLSDAILLSDILRVNTEITKAPLSASMIKRYDEHHQDLTLLKALVRQQLPEKYKEIFFDQSKNGYAGYIDGGASQEEFYKFIKPILEKMDGTEELLVKLNREDLLRKQRTFDNGSIPHQIHLGELHAILRRQEDFYPFLKDNREKIEKILTFRIPYYVGPLARGNSRFAWMTRKSEETITPWNFEEVVDKGASAQSFIERMTNFDKNLPNEKVLPKHSLLYEYFTVYNELTKVKYVTEGMRKPAFLSGEQKKAIVDLLFKTNRKVTVKQLKEDYFKKIECFDSVEISGVEDRFNASLGTYHDLLKIIKDKDFLDNEENEDILEDIVLTLTLFEDREMIEERLKTYAHLFDDKVMKQLKRRRYTGWGRLSRKLINGIRDKQSGKTILDFLKSDGFANRNFMQLIHDDSLTFKEDIQKAQVSGQGDSLHEHIANLAGSPAIKKGILQTVKVVDELVKVMGRHKPENIVIEMARENQTTQKGQKNSRERMKRIEEGIKELGSQILKEHPVENTQLQNEKLYLYYLQNGRDMYVDQELDINRLSDYDVDHIVPQSFLKDDSIDNKVLTRSDKARGKSDNVPSEEVVKKMKNYWRQLLNAKLITQRKFDNLTKAERGGLSELDKAGFIKRQLVETRQITKHVAQILDSRMNTKYDENDKLIREVKVITLKSKLVSDFRKDFQFYKVREINNYHHAHDAYLNAVVGTALIKKYPKLESEFVYGDYKVYDVRKMIAKSEQEIGKATAKYFFYSNIMNFFKTEITLANGEIRKRPLIETNGETGEIVWDKGRDFATVRKVLSMPQVNIVKKTEVQTGGFSKESILPKRNSDKLIARKKDWDPKKYGGFDSPTVAYSVLVVAKVEKGKSKKLKSVKELLGITIMERSSFEKNPIDFLEAKGYKEVKKDLIIKLPKYSLFELENGRKRMLASAGELQKGNELALPSKYVNFLYLASHYEKLKGSPEDNEQKQLFVEQHKHYLDEIIEQISEFSKRVILADANLDKVLSAYNKHRDKPIREQAENIIHLFTLTNLGAPAAFKYFDTTIDRKRYTSTKEVLDATLIHQSITGLYETRIDLSQLGGDGGEAAAKPAPGGSGGLLGRDLLTKLKAQIQFSTEGPQVTWEDRPAMCLVLNLEEEYRLHEKPVPPSIDPSWLQLFPMVWAEKAGMGLANQVPPVVVELKSDASPVAVRQYPMSKEAREGIRPHIQRFLDLGILVPCQSPWNTPLLPVKKPGTNDYRPVQDLREVNKRVQDIHPTVPNPYNLLSSLPPSHTWYSVLDLKDAFFCLKLHPNSQPLFAFEWRDPEKGNTGQLTWTRLPQGFKNSPTLFNEALHRDLASFRALNPQVVMLQYVDDLLVAAPTYRDCKEGTRRLLQELSKLGYRVSAKKAQLCREEVTYLGYLLKGGKRWLTPARKATVMKIPTPTTPRQVREFLGTAGFCRLWIPGFASLAAPLYPLTRPKVPFTWTEAHQEAFGRIKEALLSAPALALPDLTKPFALYVDEKEGVARGVLTQTLGPWRRPVAYLSKKLDPVASGWPTCLKAIAAVALLLKDADKLTLGQNVLVIAPHNLESIVRQPPDRWMTNARMTHYQSLLLNERVSFAPPAILNPATLLPVESDDTPIHICSEILAEETGTRPDLRDQPLPGVPAWYTDGSSFIMDGRRQAGAAIVDNKRTVWASNLPEGTSAQKAELIALTQALRLAEGKSINIYTDSRYAFATAHVHGAIYKQRGWLTSAGKDIKNKEEILALLEAIHLPKRVAIIHCPGHQRGTDPVATGNRKADEAAKQAAQSTRILTETTKNAGKRTADGSEFEKRTADGSEFESPKKKAKVE

SEQ ID NO: 7232 - protein, 2218 aa, synthetic construct
MPAAKRVKLDGGDKKYSIGLDIGTNSVGWAVITDEYKVPSKKFKVLGNTDRHSIKKNLIGALLFDSGETAEATRLKRTARRRYTRRKNRICYLQEIFSNEMAKVDDSFFHRLEESFLVEEDKKHERHPIFGNIVDEVAYHEKYPTIYHLRKKLVDSTDKADLRLIYLALAHMIKFRGHFLIEGDLNPDNSDVDKLFIQLVQTYNQLFEENPINASGVDAKAILSARLSKSRRLENLIAQLPGEKKNGLFGNLIALSLGLTPNFKSNFDLAEDAKLQLSKDTYDDDLDNLLAQIGDQYADLFLAAKNLSDAILLSDILRVNTEITKAPLSASMIKRYDEHHQDLTLLKALVRQQLPEKYKEIFFDQSKNGYAGYIDGGASQEEFYKFIKPILEKMDGTEELLVKLNREDLLRKQRTFDNGSIPHQIHLGELHAILRRQEDFYPFLKDNREKIEKILTFRIPYYVGPLARGNSRFAWMTRKSEETITPWNFEEVVDKGASAQSFIERMTNFDKNLPNEKVLPKHSLLYEYFTVYNELTKVKYVTEGMRKPAFLSGEQKKAIVDLLFKTNRKVTVKQLKEDYFKKIECFDSVEISGVEDRFNASLGTYHDLLKIIKDKDFLDNEENEDILEDIVLTLTLFEDREMIEERLKTYAHLFDDKVMKQLKRRRYTGWGRLSRKLINGIRDKQSGKTILDFLKSDGFANRNFMQLIHDDSLTFKEDIQKAQVSGQGDSLHEHIANLAGSPAIKKGILQTVKVVDELVKVMGRHKPENIVIEMARENQTTQKGQKNSRERMKRIEEGIKELGSQILKEHPVENTQLQNEKLYLYYLQNGRDMYVDQELDINRLSDYDVDHIVPQSFLKDDSIDNKVLTRSDKARGKSDNVPSEEVVKKMKNYWRQLLNAKLITQRKFDNLTKAERGGLSELDKAGFIKRQLVETRQITKHVAQILDSRMNTKYDENDKLIREVKVITLKSKLVSDFRKDFQFYKVREINNYHHAHDAYLNAVVGTALIKKYPKLESEFVYGDYKVYDVRKMIAKSEQEIGKATAKYFFYSNIMNFFKTEITLANGEIRKRPLIETNGETGEIVWDKGRDFATVRKVLSMPQVNIVKKTEVQTGGFSKESILPKRNSDKLIARKKDWDPKKYGGFDSPTVAYSVLVVAKVEKGKSKKLKSVKELLGITIMERSSFEKNPIDFLEAKGYKEVKKDLIIKLPKYSLFELENGRKRMLASAGELQKGNELALPSKYVNFLYLASHYEKLKGSPEDNEQKQLFVEQHKHYLDEIIEQISEFSKRVILADANLDKVLSAYNKHRDKPIREQAENIIHLFTLTNLGAPAAFKYFDTTIDRKRYTSTKEVLDATLIHQSITGLYETRIDLSQLGGDGGEAAAKPAPGGSGGTLGDQGSRGSDPLPEPRVTLTVEGIPTEFLVNTGAEHSVLTKPMGKMGSKRTVVAGATGSKVYPWTTKRLLKIGQKQVTHSFLVIPECPAPLLGRDLLTKLKAQIQFSTEGPQVTWEDRPAMCLVLNLEEEYRLHEKPVPPSIDPSWLQLFPMVWAEKAGMGLANQVPPVVVELKSDASPVAVRQYPMSKEAREGIRPHIQRFLDLGILVPCQSPWNTPLLPVKKPGTNDYRPVQDLREVNKRVQDIHPTVPNPYNLLSSLPPSHTWYSVLDLKDAFFCLKLHPNSQPLFAFEWRDPEKGNTGQLTWTRLPQGFKNSPTLFNEALHRDLASFRALNPQVVMLQYVDDLLVAAPTYRDCKEGTRRLLQELSKLGYRVSAKKAQLCREEVTYLGYLLKGGKRWLTPARKATVMKIPTPTTPRQVREFLGTAGFCRLWIPGFASLAAPLYPLTRPKVPFTWTEAHQEAFGRIKEALLSAPALALPDLTKPFALYVDEKEGVARGVLTQTLGPWRRPVAYLSKKLDPVASGWPTCLKAIAAVALLLKDADKLTLGQNVLVIAPHNLESIVRQPPDRWMTNARMTHYQSLLLNERVSFAPPAILNPATLLPVESDDTPIHICSEILAEETGTRPDLRDQPLPGVPAWYTDGSSFIMDGRRQAGAAIVDNKRTVWASNLPEGTSAQKAELIALTQALRLAEGKSINIYTDSRYAFATAHVHGAIYKQRGWLTSAGKDIKNKEEILALLEAIHLPKRVAIIHCPGHQRGTDPVATGNRKADEAAKQAAQSTRILTETTKNAGKRTADGSEFEKRTADGSEFESPKKKAKVE

SEQ ID NO: 7233 - protein, 2096 aa, synthetic construct
MPAAKRVKLDGGDKKYSIGLDIGTNSVGWAVITDEYKVPSKKFKVLGNTDRHSIKKNLIGALLFDSGETAEATRLKRTARRRYTRRKNRICYLQEIFSNEMAKVDDSFFHRLEESFLVEEDKKHERHPIFGNIVDEVAYHEKYPTIYHLRKKLVDSTDKADLRLIYLALAHMIKFRGHFLIEGDLNPDNSDVDKLFIQLVQTYNQLFEENPINASGVDAKAILSARLSKSRRLENLIAQLPGEKKNGLFGNLIALSLGLTPNFKSNFDLAEDAKLQLSKDTYDDDLDNLLAQIGDQYADLFLAAKNLSDAILLSDILRVNTEITKAPLSASMIKRYDEHHQDLTLLKALVRQQLPEKYKEIFFDQSKNGYAGYIDGGASQEEFYKFIKPILEKMDGTEELLVKLNREDLLRKQRTFDNGSIPHQIHLGELHAILRRQEDFYPFLKDNREKIEKILTFRIPYYVGPLARGNSRFAWMTRKSEETITPWNFEEVVDKGASAQSFIERMTNFDKNLPNEKVLPKHSLLYEYFTVYNELTKVKYVTEGMRKPAFLSGEQKKAIVDLLFKTNRKVTVKQLKEDYFKKIECFDSVEISGVEDRFNASLGTYHDLLKIIKDKDFLDNEENEDILEDIVLTLTLFEDREMIEERLKTYAHLFDDKVMKQLKRRRYTGWGRLSRKLINGIRDKQSGKTILDFLKSDGFANRNFMQLIHDDSLTFKEDIQKAQVSGQGDSLHEHIANLAGSPAIKKGILQTVKVVDELVKVMGRHKPENIVIEMARENQTTQKGQKNSRERMKRIEEGIKELGSQILKEHPVENTQLQNEKLYLYYLQNGRDMYVDQELDINRLSDYDVDHIVPQSFLKDDSIDNKVLTRSDKARGKSDNVPSEEVVKKMKNYWRQLLNAKLITQRKFDNLTKAERGGLSELDKAGFIKRQLVETRQITKHVAQILDSRMNTKYDENDKLIREVKVITLKSKLVSDFRKDFQFYKVREINNYHHAHDAYLNAVVGTALIKKYPKLESEFVYGDYKVYDVRKMIAKSEQEIGKATAKYFFYSNIMNFFKTEITLANGEIRKRPLIETNGETGEIVWDKGRDFATVRKVLSMPQVNIVKKTEVQTGGFSKESILPKRNSDKLIARKKDWDPKKYGGFDSPTVAYSVLVVAKVEKGKSKKLKSVKELLGITIMERSSFEKNPIDFLEAKGYKEVKKDLIIKLPKYSLFELENGRKRMLASAGELQKGNELALPSKYVNFLYLASHYEKLKGSPEDNEQKQLFVEQHKHYLDEIIEQISEFSKRVILADANLDKVLSAYNKHRDKPIREQAENIIHLFTLTNLGAPAAFKYFDTTIDRKRYTSTKEVLDATLIHQSITGLYETRIDLSQLGGDGGEAAAKPAPGGSGGTLGIEDEYRLHETSTEPDVSLGSTWLSDFPQAWAETGGMGLAVRQAPLIIPLKATSTPVSIQQYPMSHEARLGIKPHIQRLLDQGILVPCQSPWNTPLLPVKKPGTNDYRPVQDLREVNKRVEDIHPTVPNPYNLLSGLPPSHQWYTVLDLKDAFFCLRLHPTSQPLFAFEWRDPGMGISGQLTWTRLPQGFKNSPTLFNEALHRDLADFRIQHPDLILLQYVDDILLAATSELDCQQGTRALLQTLGDLGYRASAKKAQICQKQVKYLGYLLREGQRWLTEARKETVMGQPVPKTPRQLREFLGTAGFCRLWIPGFAEMAAPLYPLTKPGTLFSWGPDQQKAYQEIKQALLTAPALGLPDLTKPFELFVDEKQGYAKGVLTQKLGPWRRPVAYLSKKLDPVAAGWPPCLRMVAAIAVLTKDAGKLTMGQPLVILAPHAVEALVKQPPDRWLSNARMTHYQAMLLDTDRVQFGPVVALNPATLLPLPEEGAPHDCLEILAETHGTRPDLTDQPIPDADHTWYTDGSSFLQEGQRKAGAAVTTETEVIWAGALPAGTSAQRAELIALTQALKMAEGKRLNVYTDSRYAFATAHIHGEIYRRRGWLTSEGREIKNKSEILALLKALFLPKRLSIIHCLGHQKGDSAEARGNRLADQAAREAAIKTPPDTSTLLAGKRTADGSEFEKRTADGSEFESPKKKAKVE

SEQ ID NO: 7234 - protein, 2096 aa, synthetic construct
MPAAKRVKLDGGDKKYSIGLDIGTNSVGWAVITDEYKVPSKKFKVLGNTDRHSIKKNLIGALLFDSGETAEATRLKRTARRRYTRRKNRICYLQEIFSNEMAKVDDSFFHRLEESFLVEEDKKHERHPIFGNIVDEVAYHEKYPTIYHLRKKLVDSTDKADLRLIYLALAHMIKFRGHFLIEGDLNPDNSDVDKLFIQLVQTYNQLFEENPINASGVDAKAILSARLSKSRRLENLIAQLPGEKKNGLFGNLIALSLGLTPNFKSNFDLAEDAKLQLSKDTYDDDLDNLLAQIGDQYADLFLAAKNLSDAILLSDILRVNTEITKAPLSASMIKRYDEHHQDLTLLKALVRQQLPEKYKEIFFDQSKNGYAGYIDGGASQEEFYKFIKPILEKMDGTEELLVKLNREDLLRKQRTFDNGSIPHQIHLGELHAILRRQEDFYPFLKDNREKIEKILTFRIPYYVGPLARGNSRFAWMTRKSEETITPWNFEEVVDKGASAQSFIERMTNFDKNLPNEKVLPKHSLLYEYFTVYNELTKVKYVTEGMRKPAFLSGEQKKAIVDLLFKTNRKVTVKQLKEDYFKKIECFDSVEISGVEDRFNASLGTYHDLLKIIKDKDFLDNEENEDILEDIVLTLTLFEDREMIEERLKTYAHLFDDKVMKQLKRRRYTGWGRLSRKLINGIRDKQSGKTILDFLKSDGFANRNFMQLIHDDSLTFKEDIQKAQVSGQGDSLHEHIANLAGSPAIKKGILQTVKVVDELVKVMGRHKPENIVIEMARENQTTQKGQKNSRERMKRIEEGIKELGSQILKEHPVENTQLQNEKLYLYYLQNGRDMYVDQELDINRLSDYDVDHIVPQSFLKDDSIDNKVLTRSDKARGKSDNVPSEEVVKKMKNYWRQLLNAKLITQRKFDNLTKAERGGLSELDKAGFIKRQLVETRQITKHVAQILDSRMNTKYDENDKLIREVKVITLKSKLVSDFRKDFQFYKVREINNYHHAHDAYLNAVVGTALIKKYPKLESEFVYGDYKVYDVRKMIAKSEQEIGKATAKYFFYSNIMNFFKTEITLANGEIRKRPLIETNGETGEIVWDKGRDFATVRKVLSMPQVNIVKKTEVQTGGFSKESILPKRNSDKLIARKKDWDPKKYGGFDSPTVAYSVLVVAKVEKGKSKKLKSVKELLGITIMERSSFEKNPIDFLEAKGYKEVKKDLIIKLPKYSLFELENGRKRMLASAGELQKGNELALPSKYVNFLYLASHYEKLKGSPEDNEQKQLFVEQHKHYLDEIIEQISEFSKRVILADANLDKVLSAYNKHRDKPIREQAENIIHLFTLTNLGAPAAFKYFDTTIDRKRYTSTKEVLDATLIHQSITGLYETRIDLSQLGGDGGEAAAKPAPGGSGGTLGIEDEYRLHETSTEPDVSLGSTWLSDFPQAWAETGGMGLAVRQAPLIIPLKATSTPVSIQQYPMSHEARLGIKPHIQRLLDQGILVPCQSPWNTPLLPVKKPGTNDYRPVQDLREVNKRVEDIHPTVPNPYNLLSGLPPSHQWYTVLDLKDAFFCLRLHPTSQPLFAFEWRDPGMGISGQLTWTRLPQGFKNSPTLFDEALHRDLADFRIQHPDLILLQYVDDILLAATSELDCQQGTRALLQTLGDLGYRASAKKAQICQKQVKYLGYLLREGQRWLTEARKETVMGQPVPKTPRQLREFLGTAGFCRLWIPGFAEMAAPLYPLTKTGTLFSWGPDQQKAYQEIKQALLTAPALGLPDLTKPFELFVDEKQGYAKGVLTQKLGPWRRPVAYLSKKLDPVAAGWPPCLRMVAAIAVLTKDAGKLTMGQPLVILAPHAVEALVKQPPDRWLSNARMTHYQAMLLDTDRVQFGPVVALNPATLLPLPEEGAPHDCLEILAETHGTRPDLTDQPIPDADHTWYTDGSSFLQEGQRKAGAAVTTETEVIWAGALPAGTSAQRAELIALTQALKMAEGKRLNVYTDSRYAFATAHIHGEIYRRRGLLTSEGREIKNKSEILALLKALFLPKRLSIIHCLGHQKGDSAEARGNRLADQAAREAAIKTPPDTSTLLAGKRTADGSEFEKRTADGSEFESPKKKAKVE

SEQ ID NO: 7235 - protein, 2096 aa, synthetic construct; identical to SEQ ID NO: 7233

SEQ ID NO: 7236 - protein, 2096 aa, synthetic construct
MPAAKRVKLDGGDKKYSIGLDIGTNSVGWAVITDEYKVPSKKFKVLGNTDRHSIKKNLIGALLFDSGETAEATRLKRTARRRYTRRKNRICYLQEIFSNEMAKVDDSFFHRLEESFLVEEDKKHERHPIFGNIVDEVAYHEKYPTIYHLRKKLVDSTDKADLRLIYLALAHMIKFRGHFLIEGDLNPDNSDVDKLFIQLVQTYNQLFEENPINASGVDAKAILSARLSKSRRLENLIAQLPGEKKNGLFGNLIALSLGLTPNFKSNFDLAEDAKLQLSKDTYDDDLDNLLAQIGDQYADLFLAAKNLSDAILLSDILRVNTEITKAPLSASMIKRYDEHHQDLTLLKALVRQQLPEKYKEIFFDQSKNGYAGYIDGGASQEEFYKFIKPILEKMDGTEELLVKLNREDLLRKQRTFDNGSIPHQIHLGELHAILRRQEDFYPFLKDNREKIEKILTFRIPYYVGPLARGNSRFAWMTRKSEETITPWNFEEVVDKGASAQSFIERMTNFDKNLPNEKVLPKHSLLYEYFTVYNELTKVKYVTEGMRKPAFLSGEQKKAIVDLLFKTNRKVTVKQLKEDYFKKIECFDSVEISGVEDRFNASLGTYHDLLKIIKDKDFLDNEENEDILEDIVLTLTLFEDREMIEERLKTYAHLFDDKVMKQLKRRRYTGWGRLSRKLINGIRDKQSGKTILDFLKSDGFANRNFMQLIHDDSLTFKEDIQKAQVSGQGDSLHEHIANLAGSPAIKKGILQTVKVVDELVKVMGRHKPENIVIEMARENQTTQKGQKNSRERMKRIEEGIKELGSQILKEHPVENTQLQNEKLYLYYLQNGRDMYVDQELDINRLSDYDVDHIVPQSFLKDDSIDNKVLTRSDKARGKSDNVPSEEVVKKMKNYWRQLLNAKLITQRKFDNLTKAERGGLSELDKAGFIKRQLVETRQITKHVAQILDSRMNTKYDENDKLIREVKVITLKSKLVSDFRKDFQFYKVREINNYHHAHDAYLNAVVGTALIKKYPKLESEFVYGDYKVYDVRKMIAKSEQEIGKATAKYFFYSNIMNFFKTEITLANGEIRKRPLIETNGETGEIVWDKGRDFATVRKVLSMPQVNIVKKTEVQTGGFSKESILPKRNSDKLIARKKDWDPKKYGGFDSPTVAYSVLVVAKVEKGKSKKLKSVKELLGITIMERSSFEKNPIDFLEAKGYKEVKKDLIIKLPKYSLFELENGRKRMLASAGELQKGNELALPSKYVNFLYLASHYEKLKGSPEDNEQKQLFVEQHKHYLDEIIEQISEFSKRVILADANLDKVLSAYNKHRDKPIREQAENIIHLFTLTNLGAPAAFKYFDTTIDRKRYTSTKEVLDATLIHQSITGLYETRIDLSQLGGDGGEAAAKPAPGGSGGTLNIEDEYRLHEISTEPDVSPGSTWLSDFPQAWAETGGMGLAVRQAPLIIPLKATSTPVSIKQYPMSQEAKLGIKPHIQRLLDQGILVPCQSPWNTPLLPVKKPGTNDYRPVQGLREVNKRVEDIHPTVPNPYNLLSGLPTSHRWYTVLDLKDAFFCLRLHPTSQPLFASEWRDPGMGISGQLTWTRLPQGFKNSPTLFNEALHRGLADFRIQHPDLILLQYVDDLLLAATSELDCQQGTRALLKTLGNLGYRASAKKAQICQKQVKYLGYLLREGQRWLTEARKETVMGQPTPKTPRQLREFLGKAGFCRLFIPRFAEMAAPLYPLTKPGTLFNWGPDQQKAYHEIKQALLTAPALGLPDLTKPFELFVDEKQGYAKGVLTQKLGPWRRPVAYLSKKLDPVAAGWPPCLRMVAAIAVLTKDAGKLTMGQPLVILAPHAVEALVKQPPDRWLSNARMTHYQAMLLDTDRVQFGPVVALNPATLLPLPEEGAPHDCLEILAETHGTEPDLTDQPIPDADHTWYTDGSSFLQEGQRKAGAAVTTETEVIWARALPAGTSAQRAELIALTQALKMAEGKRLNVYTDSRYAFATAHIHGEIYKRRGWLTSEGREIKNKSEILALLKALFLPKRLSIIHCLGHQKGDSAEARGNRLADQAAREAAIKTPPDTSTLLAGKRTADGSEFEKRTADGSEFESPKKKAKVE

SEQ ID NO: 7237 - protein, 2116 aa, synthetic construct
MPAAKRVKLDGGDKKYSIGLDIGTNSVGWAVITDEYKVPSKKFKVLGNTDRHSIKKNLIGALLFDSGETAEATRLKRTARRRYTRRKNRICYLQEIFSNEMAKVDDSFFHRLEESFLVEEDKKHERHPIFGNIVDEVAYHEKYPTIYHLRKKLVDSTDKADLRLIYLALAHMIKFRGHFLIEGDLNPDNSDVDKLFIQLVQTYNQLFEENPINASGVDAKAILSARLSKSRRLENLIAQLPGEKKNGLFGNLIALSLGLTPNFKSNFDLAEDAKLQLSKDTYDDDLDNLLAQIGDQYADLFLAAKNLSDAILLSDILRVNTEITKAPLSASMIKRYDEHHQDLTLLKALVRQQLPEKYKEIFFDQSKNGYAGYIDGGASQEEFYKFIKPILEKMDGTEELLVKLNREDLLRKQRTFDNGSIPHQIHLGELHAILRRQEDFYPFLKDNREKIEKILTFRIPYYVGPLARGNSRFAWMTRKSEETITPWNFEEVVDKGASAQSFIERMTNFDKNLPNEKVLPKHSLLYEYFTVYNELTKVKYVTEGMRKPAFLSGEQKKAIVDLLFKTNRKVTVKQLKEDYFKKIECFDSVEISGVEDRFNASLGTYHDLLKIIKDKDFLDNEENEDILEDIVLTLTLFEDREMIEERLKTYAHLFDDKVMKQLKRRRYTGWGRLSRKLINGIRDKQSGKTILDFLKSDGFANRNFMQLIHDDSLTFKEDIQKAQVSGQGDSLHEHIANLAGSPAIKKGILQTVKVVDELVKVMGRHKPENIVIEMARENQTTQKGQKNSRERMKRIEEGIKELGSQILKEHPVENTQLQNEKLYLYYLQNGRDMYVDQELDINRLSDYDVDHIVPQSFLKDDSIDNKVLTRSDKARGKSDNVPSEEVVKKMKNYWRQLLNAKLITQRKFDNLTKAERGGLSELDKAGFIKRQLVETRQITKHVAQILDSRMNTKYDENDKLIREVKVITLKSKLVSDFRKDFQFYKVREINNYHHAHDAYLNAVVGTALIKKYPKLESEFVYGDYKVYDVRKMIAKSEQEIGKATAKYFFYSNIMNFFKTEITLANGEIRKRPLIETNGETGEIVWDKGRDFATVRKVLSMPQVNIVKKTEVQTGGFSKESILPKRNSDKLIARKKDWDPKKYGGFDSPTVAYSVLVVAKVEKGKSKKLKSVKELLGITIMERSSFEKNPIDFLEAKGYKEVKKDLIIKLPKYSLFELENGRKRMLASAGELQKGNELALPSKYVNFLYLASHYEKLKGSPEDNEQKQLFVEQHKHYLDEIIEQISEFSKRVILADANLDKVLSAYNKHRDKPIREQAENIIHLFTLTNLGAPAAFKYFDTTIDRKRYTSTKEVLDATLIHQSITGLYETRIDLSQLGGDGGEAAAKPAPGGSGGVQEISDSRPMLHIYLNGRRFLGLLDTGADKTCIAGRDWPANWPIHQTESSLQGLGMACGVARSSQPLRWQHEDKSGIIHPFVIPTLPFTLWGRDIMKDIKVRLMTDSPDDSQDLMIGAIESNLFADQISWKSDQPVWLNQWPLKQEKLQALQQLVTEQLQLGHLEESNSPWNTPVFVIKKKSGKWRLLQDLRAVNATMHDMGALQPGLPSPVAVPKGWEIIIIDLQDCFFNIKLHPEDCKRFAFSVPSPNFKRPYQRFQWKVLPQGMKNSPTLCQKFVDKAILTVRDKYQDSYIVHYMDDILLAHPSRSIVDEILTSMIQALNKHGLVVSTEKIQKYDNLKYLGTHIQGDSVSYQKLQIRTDKLRTLNDFQKLLGNINWIRPFLKLTTGELKPLFEILNGDSNPISTRKLTPEACKALQLMNERLSTARVKRLDLSQPWSLCILKTEYTPTACLWQDGVVEWIHLPHISPKVITPYDIFCTQLIIKGRHRSKELFSKDPDYIVVPYTKVQFDLLLQEKEDWPISLLGFLGEVHFHLPKDPLLTFTLQTAIIFPHMTSTTPLEKGIVIFTDGSANGRSVTYIQGREPIIKENTQNTAQQAEIVAVITAFEEVSQPFNLYTDSKYVTGLFPEIETATLSPRTKIYTELKHLQRLIHKRQEKFYIGHIRGHTGLPGPLAQGNAYADSLTRILTAAGKRTADGSEFEKRTADGSEFESPKKKAKVE

SEQ ID NO: 7238 - protein, 2087 aa, synthetic construct
MPAAKRVKLDGGDKKYSIGLDIGTNSVGWAVITDEYKVPSKKFKVLGNTDRHSIKKNLIGALLFDSGETAEATRLKRTARRRYTRRKNRICYLQEIFSNEMAKVDDSFFHRLEESFLVEEDKKHERHPIFGNIVDEVAYHEKYPTIYHLRKKLVDSTDKADLRLIYLALAHMIKFRGHFLIEGDLNPDNSDVDKLFIQLVQTYNQLFEENPINASGVDAKAILSARLSKSRRLENLIAQLPGEKKNGLFGNLIALSLGLTPNFKSNFDLAEDAKLQLSKDTYDDDLDNLLAQIGDQYADLFLAAKNLSDAILLSDILRVNTEITKAPLSASMIKRYDEHHQDLTLLKALVRQQLPEKYKEIFFDQSKNGYAGYIDGGASQEEFYKFIKPILEKMDGTEELLVKLNREDLLRKQRTFDNGSIPHQIHLGELHAILRRQEDFYPFLKDNREKIEKILTFRIPYYVGPLARGNSRFAWMTRKSEETITPWNFEEVVDKGASAQSFIERMTNFDKNLPNEKVLPKHSLLYEYFTVYNELTKVKYVTEGMRKPAFLSGEQKKAIVDLLFKTNRKVTVKQLKEDYFKKIECFDSVEISGVEDRFNASLGTYHDLLKIIKDKDFLDNEENEDILEDIVLTLTLFEDREMIEERLKTYAHLFDDKVMKQLKRRRYTGWGRLSRKLINGIRDKQSGKTILDFLKSDGFANRNFMQLIHDDSLTFKEDIQKAQVSGQGDSLHEHIANLAGSPAIKKGILQTVKVVDELVKVMGRHKPENIVIEMARENQTTQKGQKNSRERMKRIEEGIKELGSQILKEHPVENTQLQNEKLYLYYLQNGRDMYVDQELDINRLSDYDVDHIVPQSFLKDDSIDNKVLTRSDKARGKSDNVPSEEVVKKMKNYWRQLLNAKLITQRKFDNLTKAERGGLSELDKAGFIKRQLVETRQITKHVAQILDSRMNTKYDENDKLIREVKVITLKSKLVSDFRKDFQFYKVREINNYHHAHDAYLNAVVGTALIKKYPKLESEFVYGDYKVYDVRKMIAKSEQEIGKATAKYFFYSNIMNFFKTEITLANGEIRKRPLIETNGETGEIVWDKGRDFATVRKVLSMPQVNIVKKTEVQTGGFSKESILPKRNSDKLIARKKDWDPKKYGGFDSPTVAYSVLVVAKVEKGKSKKLKSVKELLGITIMERSSFEKNPIDFLEAKGYKEVKKDLIIKLPKYSLFELENGRKRMLASAGELQKGNELALPSKYVNFLYLASHYEKLKGSPEDNEQKQLFVEQHKHYLDEIIEQISEFSKRVILADANLDKVLSAYNKHRDKPIREQAENIIHLFTLTNLGAPAAFKYFDTTIDRKRYTSTKEVLDATLIHQSITGLYETRIDLSQLGGDGGEAAAKPAPGGSGGIPWLMKKPLQLTTLVPLQEYEERLLKQTMLTGSYKEKLQSLFLKYDALWQHWENQVGHRRIKPHHIATGTVNPRPQKQYPINPKAKASIQTVINDLLKQGVLIQQNSIMNTPVYPVPKPDGKWRMVLDYREVNKTIPLIAAQNQHSAGILSSIFRGKYKTTLDLSNGFWAHSITPESYWLTAFTWLGQQYCWTRLPQGFLNSPALFNADVVDLLKEVPNVQVYVDDIYISHDDPREHLEQLEKVFSLLLNAGYVVSLKKSEIAQHEVEFLGFNITKEGRGLTETFKQKLLNITPPRDLKQLQSILGKLNFARNFIPNFSELVKPLYNIIATAPGKYITWTTDNSQQLQNIISMLNSAENLEERNPEVRLIMKVNTSPSAGYIRFYNEFAKRPIMYLNYVYTKAEVKFTNTEKLLTTIHKGLIKALDLGMGQEILVYSPIVSMTKIQKTPLPERKALPIRWITWMSYLEDPRIQFHYDKTLPELQQVPTVTDDIIAKIKHPSEFSMVFYTDGSAIKHPNVNKSHNAGMGIAQVQFKPEFTVINTWSIPLGDHTAQLAEVAAVEFACKKALKIDGPVLIVTDSFYVAESVNKELPYWQSNGFFNNKKKPLKHVSKWKSIADCIQLKPDIIIIHEKGHQPTASTFHTEGNNLADKLATQGSYVVNAGKRTADGSEFEKRTADGSEFESPKKKAKVE

SEQ ID NO: 7239 - protein, 2176 aa, synthetic construct
MPAAKRVKLDGGDKKYSIGLDIGTNSVGWAVITDEYKVPSKKFKVLGNTDRHSIKKNLIGALLFDSGETAEATRLKRTARRRYTRRKNRICYLQEIFSNEMAKVDDSFFHRLEESFLVEEDKKHERHPIFGNIVDEVAYHEKYPTIYHLRKKLVDSTDKADLRLIYLALAHMIKFRGHFLIEGDLNPDNSDVDKLFIQLVQTYNQLFEENPINASGVDAKAILSARLSKSRRLENLIAQLPGEKKNGLFGNLIALSLGLTPNFKSNFDLAEDAKLQLSKDTYDDDLDNLLAQIGDQYADLFLAAKNLSDAILLSDILRVNTEITKAPLSASMIKRYDEHHQDLTLLKALVRQQLPEKYKEIFFDQSKNGYAGYIDGGASQEEFYKFIKPILEKMDGTEELLVKLNREDLLRKQRTFDNGSIPHQIHLGELHAILRRQEDFYPFLKDNREKIEKILTFRIPYYVGPLARGNSRFAWMTRKSEETITPWNFEEVVDKGASAQSFIERMTNFDKNLPNEKVLPKHSLLYEYFTVYNELTKVKYVTEGMRKPAFLSGEQKKAIVDLLFKTNRKVTVKQLKEDYFKKIECFDSVEISGVEDRFNASLGTYHDLLKIIKDKDFLDNEENEDILEDIVLTLTLFEDREMIEERLKTYAHLFDDKVMKQLKRRRYTGWGRLSRKLINGIRDKQSGKTILDFLKSDGFANRNFMQLIHDDSLTFKEDIQKAQVSGQGDSLHEHIANLAGSPAIKKGILQTVKVVDELVKVMGRHKPENIVIEMARENQTTQKGQKNSRERMKRIEEGIKELGSQILKEHPVENTQLQNEKLYLYYLQNGRDMYVDQELDINRLSDYDVDHIVPQSFLKDDSIDNKVLTRSDKARGKSDNVPSEEVVKKMKNYWRQLLNAKLITQRKFDNLTKAERGGLSELDKAGFIKRQLVETRQITKHVAQILDSRMNTKYDENDKLIREVKVITLKSKLVSDFRKDFQFYKVREINNYHHAHDAYLNAVVGTALIKKYPKLESEFVYGDYKVYDVRKMIAKSEQEIGKATAKYFFYSNIMNFFKTEITLANGEIRKRPLIETNGETGEIVWDKGRDFATVRKVLSMPQVNIVKKTEVQTGGFSKESILPKRNSDKLIARKKDWDPKKYGGFDSPTVAYSVLVVAKVEKGKSKKLKSVKELLGITIMERSSFEKNPIDFLEAKGYKEVKKDLIIKLPKYSLFELENGRKRMLASAGELQKGNELALPSKYVNFLYLASHYEKLKGSPEDNEQKQLFVEQHKHYLDEIIEQISEFSKRVILADANLDKVLSAYNKHRDKPIREQAENIIHLFTLTNLGAPAAFKYFDTTIDRKRYTSTKEVLDATLIHQSITGLYETRIDLSQLGGDGGEAAAKPAPGGSGGMDPLQLLQPLEAEIKGTKLKAHWNSGATITCVPQAFLEEEVPIKNIWIKTIHGEKEQPVYYLTFKIQGRKVEAEVISSPYDYILVSPSDIPWLMKKPLQLTTLVPLQEYEERLLKQTMLTGSYKEKLQSLFLKYDALWQHWENQVGHRRIKPHHIATGTVNPRPQKQYPINPKAKASIQTVINDLLKQGVLIQQNSIMNTPVYPVPKPDGKWRMVLDYREVNKTIPLIAAQNQHSAGILSSIFRGKYKTTLDLSNGFWAHSITPESYWLTAFTWLGQQYCWTRLPQGFLNSPALFNADVVDLLKEVPNVQVYVDDIYISHDDPREHLEQLEKVFSLLLNAGYVVSLKKSEIAQHEVEFLGFNITKEGRGLTETFKQKLLNITPPRDLKQLQSILGLLNFARNFIPNFSELVKPLYNIIATAPGKYITWTTDNSQQLQNIISMLNSAENLEERNPEVRLIMKVNTSPSAGYIRFYNEFAKRPIMYLNYVYTKAEVKFTNTEKLLTTIHKGLIKALDLGMGQEILVYSPIVSMTKIQKTPLPERKALPIRWITWMSYLEDPRIQFHYDKTLPELQQVPTVTDDIIAKIKHPSEFSMVFYTDGSAIKHPNVNKSHNAGMGIAQVQFKPEFTVINTWSIPLGDHTAQLAEVAAVEFACKKALKIDGPVLIVTDSFYVAESVNKELPYWQSNGFFNNKKKPLKHVSKWKSIADCIQLKPDIIIIHEKGHQPTASTFHTEGNNLADKLATQGSYVVNAGKRTADGSEFEKRTADGSEFESPKKKAKVE

SEQ ID NO: 7240 - protein, 2094 aa, synthetic construct
MPAAKRVKLDGGDKKYSIGLDIGTNSVGWAVITDEYKVPSKKFKVLGNTDRHSIKKNLIGALLFDSGETAEATRLKRTARRRYTRRKNRICYLQEIFSNEMAKVDDSFFHRLEESFLVEEDKKHERHPIFGNIVDEVAYHEKYPTIYHLRKKLVDSTDKADLRLIYLALAHMIKFRGHFLIEGDLNPDNSDVDKLFIQLVQTYNQLFEENPINASGVDAKAILSARLSKSRRLENLIAQLPGEKKNGLFGNLIALSLGLTPNFKSNFDLAEDAKLQLSKDTYDDDLDNLLAQIGDQYADLFLAAKNLSDAILLSDILRVNTEITKAPLSASMIKRYDEHHQDLTLLKALVRQQLPEKYKEIFFDQSKNGYAGYIDGGASQEEFYKFIKPILEKMDGTEELLVKLNREDLLRKQRTFDNGSIPHQIHLGELHAILRRQEDFYPFLKDNREKIEKILTFRIPYYVGPLARGNSRFAWMTRKSEETITPWNFEEVVDKGASAQSFIERMTNFDKNLPNEKVLPKHSLLYEYFTVYNELTKVKYVTEGMRKPAFLSGEQKKAIVDLLFKTNRKVTVKQLKEDYFKKIECFDSVEISGVEDRFNASLGTYHDLLKIIKDKDFLDNEENEDILEDIVLTLTLFEDREMIEERLKTYAHLFDDKVMKQLKRRRYTGWGRLSRKLINGIRDKQSGKTILDFLKSDGFANRNFMQLIHDDSLTFKEDIQKAQVSGQGDSLHEHIANLAGSPAIKKGILQTVKVVDELVKVMGRHKPENIVIEMARENQTTQKGQKNSRERMKRIEEGIKELGSQILKEHPVENTQLQNEKLYLYYLQNGRDMYVDQELDINRLSDYDVDHIVPQSFLKDDSIDNKVLTRSDKARGKSDNVPSEEVVKKMKNYWRQLLNAKLITQRKFDNLTKAERGGLSELDKAGFIKRQLVETRQITKHVAQILDSRMNTKYDENDKLIREVKVITLKSKLVSDFRKDFQFYKVREINNYHHAHDAYLNAVVGTALIKKYPKLESEFVYGDYKVYDVRKMIAKSEQEIGKATAKYFFYSNIMNFFKTEITLANGEIRKRPLIETNGETGEIVWDKGRDFATVRKVLSMPQVNIVKKTEVQTGGFSKESILPKRNSDKLIARKKDWDPKKYGGFDSPTVAYSVLVVAKVEKGKSKKLKSVKELLGITIMERSSFEKNPIDFLEAKGYKEVKKDLIIKLPKYSLFELENGRKRMLASAGELQKGNELALPSKYVNFLYLASHYEKLKGSPEDNEQKQLFVEQHKHYLDEIIEQISEFSKRVILADANLDKVLSAYNKHRDKPIREQAENIIHLFTLTNLGAPAAFKYFDTTIDRKRYTSTKEVLDATLIHQSITGLYETRIDLSQLGGDGGEAAAKPAPGGSGGVLNLEEEYRLHEKPVPSSIDPSWLQLFPTVWAERAGMGLANQVPPVVVELRSGASPVAVRQYPMSKEAREGIRPHIQRFLDLGVLVPCQSPWNTPLLPVKKPGTNDYRPVQDLREINKRVQDIHPTVPNPYNLLSSLPPSHTWYSVLDLKDAFFCLKLHPNSQPLFAFEWRDPEKGNTGQLTWTRLPQGFKNSPTLFNEALHRDLAPFRALNPQVVLLQYVDDLLVAAPTYRDCKEGTQKLLQELSKLGYRVSAKKAQLCQKEVTYLGYLLKEGKRWLTPARKATVMKIPPPTTPRQVREFLGTAGFCRLWIPGFASLAAPLYPLTKPSIPFIWTEEHQKAFDRIKEALLSAPALALPDLTKPFTLYVDERAGVARGVLTQTLGPWRRPVAYLSKKLDPVASGWPTCLKAVAAVALLLKDADKLTLGQNVTVIASHSLESIVRQPPDRWMTNARMTHYQSLLLNERVSFAPPAVLNPATLLPVESEATPVHRCSEILAEETGTRRDLKDQPLPGVPAWYTDGSSFIAEGKRRAGAAIVDGKRTVWASSLPEGTSAQKAELVALTQALRLAEGKDINIYTDSRYAFATAHIHGAIYKQRGWLTSAGKDIKNKEEILALLEAIHLPKRVAIIHCPGHQKGNDPVATGNRRADEAAKQAALSTRVLAETTKPAGKRTADGSEFEKRTADGSEFESPKKKAKVE

SEQ ID NO: 7241 - protein, 2096 aa, synthetic construct
MPAAKRVKLDGGDKKYSIGLDIGTNSVGWAVITDEYKVPSKKFKVLGNTDRHSIKKNLIGALLFDSGETAEATRLKRTARRRYTRRKNRICYLQEIFSNEMAKVDDSFFHRLEESFLVEEDKKHERHPIFGNIVDEVAYHEKYPTIYHLRKKLVDSTDKADLRLIYLALAHMIKFRGHFLIEGDLNPDNSDVDKLFIQLVQTYNQLFEENPINASGVDAKAILSARLSKSRRLENLIAQLPGEKKNGLFGNLIALSLGLTPNFKSNFDLAEDAKLQLSKDTYDDDLDNLLAQIGDQYADLFLAAKNLSDAILLSDILRVNTEITKAPLSASMIKRYDEHHQDLTLLKALVRQQLPEKYKEIFFDQSKNGYAGYIDGGASQEEFYKFIKPILEKMDGTEELLVKLNREDLLRKQRTFDNGSIPHQIHLGELHAILRRQEDFYPFLKDNREKIEKILTFRIPYYVGPLARGNSRFAWMTRKSEETITPWNFEEVVDKGASAQSFIERMTNFDKNLPNEKVLPKHSLLYEYFTVYNELTKVKYVTEGMRKPAFLSGEQKKAIVDLLFKTNRKVTVKQLKEDYFKKIECFDSVEISGVEDRFNASLGTYHDLLKIIKDKDFLDNEENEDILEDIVLTLTLFEDREMIEERLKTYAHLFDDKVMKQLKRRRYTGWGRLSRKLINGIRDKQSGKTILDFLKSDGFANRNFMQLIHDDSLTFKEDIQKAQVSGQGDSLHEHIANLAGSPAIKKGILQTVKVVDELVKVMGRHKPENIVIEMARENQTTQKGQKNSRERMKRIEEGIKELGSQILKEHPVENTQLQNEKLYLYYLQNGRDMYVDQELDINRLSDYDVDHIVPQSFLKDDSIDNKVLTRSDKARGKSDNVPSEEVVKKMKNYWRQLLNAKLITQRKFDNLTKAERGGLSELDKAGFIKRQLVETRQITKHVAQILDSRMNTKYDENDKLIREVKVITLKSKLVSDFRKDFQFYKVREINNYHHAHDAYLNAVVGTALIKKYPKLESEFVYGDYKVYDVRKMIAKSEQEIGKATAKYFFYSNIMNFFKTEITLANGEIRKRPLIETNGETGEIVWDKGRDFATVRKVLSMPQVNIVKKTEVQTGGFSKESILPKRNSDKLIARKKDWDPKKYGGFDSPTVAYSVLVVAKVEKGKSKKLKSVKELLGITIMERSSFEKNPIDFLEAKGYKEVKKDLIIKLPKYSLFELENGRKRMLASAGELQKGNELALPSKYVNFLYLASHYEKLKGSPEDNEQKQLFVEQHKHYLDEIIEQISEFSKRVILADANLDKVLSAYNKHRDKPIREQAENIIHLFTLTNLGAPAAFKYFDTTIDRKRYTSTKEVLDATLIHQSITGLYETRIDLSQLGGDGGEAAAKPAPGGSGGTLNIEDEYRLHETSKEPDVPLGSTWLSDFPQAWAETGGMGLAVRQAPLIIPLKATSTPVSIKQYPMSQEARLGIKPHIQRLLDQGILVPCQSPWNTPLLPVKKPGTNDYRPVQDLREVNKRVEDIHPTVPNPYNLLSGLPPSHQWYTVLDLKDAFFCLRLHPTSQPLFAFEWRDPEMGISGQLTWTRLPQGFKNSPTLFDEALHRDLADFRIQHPDLILLQYVDDLLLAATSEQDCQRGTRALLQTLGNLGYRASAKKAQICQKQVKYLGYLLKEGQRWLTEARKETVMGQPTPKTPRQLREFLGTAGFCRLWIPGFAEMAAPLYPLTKTGTLFNWGPDQQKAYQEIKQALLTAPALGLPDLTKPFELFVDEKQGYAKGVLTQKLGPWRRPVAYLSKKLDPVAAGWPPCLRMVAAIAVLTKDAGKLTMGQPLVILAPHAVEALVKQPPDRWLSNARMTHYQAMLLDTDRVQFGPVVALNPATLLPLPEKEAPHDCLEILAETHGTRPDLTDQPIPDADYTWYTDGSSFLQEGQRRAGAAVTTETEVIWARALPAGTSAQRAELIALTQALKMAEGKKLNVYTDSRYAFATAHVHGEIYRRRGLLTSEGREIKNKNEILALLKALFLPKRLSIIHCPGHQKGNSAEARGNRMADQAAREAAMKAVLETSTLLAGKRTADGSEFEKRTADGSEFESPKKKAKVE

SEQ ID NO: 7242 - protein, 2096 aa, synthetic construct; identical to SEQ ID NO: 4527

SEQ ID NO: 7243 - protein, 2098 aa, synthetic construct
MPAAKRVKLDGGDKKYSIGLDIGTNSVGWAVITDEYKVPSKKFKVLGNTDRHSIKKNLIGALLFDSGETAEATRLKRTARRRYTRRKNRICYLQEIFSNEMAKVDDSFFHRLEESFLVEEDKKHERHPIFGNIVDEVAYHEKYPTIYHLRKKLVDSTDKADLRLIYLALAHMIKFRGHFLIEGDLNPDNSDVDKLFIQLVQTYNQLFEENPINASGVDAKAILSARLSKSRRLENLIAQLPGEKKNGLFGNLIALSLGLTPNFKSNFDLAEDAKLQLSKDTYDDDLDNLLAQIGDQYADLFLAAKNLSDAILLSDILRVNTEITKAPLSASMIKRYDEHHQDLTLLKALVRQQLPEKYKEIFFDQSKNGYAGYIDGGASQEEFYKFIKPILEKMDGTEELLVKLNREDLLRKQRTFDNGSIPHQIHLGELHAILRRQEDFYPFLKDNREKIEKILTFRIPYYVGPLARGNSRFAWMTRKSEETITPWNFEEVVDKGASAQSFIERMTNFDKNLPNEKVLPKHSLLYEYFTVYNELTKVKYVTEGMRKPAFLSGEQKKAIVDLLFKTNRKVTVKQLKEDYFKKIECFDSVEISGVEDRFNASLGTYHDLLKIIKDKDFLDNEENEDILEDIVLTLTLFEDREMIEERLKTYAHLFDDKVMKQLKRRRYTGWGRLSRKLINGIRDKQSGKTILDFLKSDGFANRNFMQLIHDDSLTFKEDIQKAQVSGQGDSLHEHIANLAGSPAIKKGILQTVKVVDELVKVMGRHKPENIVIEMARENQTTQKGQKNSRERMKRIEEGIKELGSQILKEHPVENTQLQNEKLYLYYLQNGRDMYVDQELDINRLSDYDVDHIVPQSFLKDDSIDNKVLTRSDKARGKSDNVPSEEVVKKMKNYWRQLLNAKLITQRKFDNLTKAERGGLSELDKAGFIKRQLVETRQITKHVAQILDSRMNTKYDENDKLIREVKVITLKSKLVSDFRKDFQFYKVREINNYHHAHDAYLNAVVGTALIKKYPKLESEFVYGDYKVYDVRKMIAKSEQEIGKATAKYFFYSNIMNFFKTEITLANGEIRKRPLIETNGETGEIVWDKGRDFATVRKVLSMPQVNIVKKTEVQTGGFSKESILPKRNSDKLIARKKDWDPKKYGGFDSPTVAYSVLVVAKVEKGKSKKLKSVKELLGITIMERSSFEKNPIDFLEAKGYKEVKKDLIIKLPKYSLFELENGRKRMLASAGELQKGNELALPSKYVNFLYLASHYEKLKGSPEDNEQKQLFVEQHKHYLDEIIEQISEFSKRVILADANLDKVLSAYNKHRDKPIREQAENIIHLFTLTNLGAPAAFKYFDTTIDRKRYTSTKEVLDATLIHQSITGLYETRIDLSQLGGDGGPAPGGSEAAAKGGTAPLEEEYRLFLEAPIQNVTLLEQWKREIPKVWAEINPPGLASTQAPIHVQLLSTALPVRVRQYPITLEAKRSLRETIRKFRAAGILRPVHSPWNTPLLPVRKSGTSEYRMVQDLREVNKRVETIHPTVPNPYTLLSLLPPDRIWYSVLDLKDAFFCIPLAPESQLIFAFEWADAEEGESGQLTWTRLPQGFKNSPTLFDEALNRDLQGFRLDHPSVSLLQYVDDLLIAADTQAACLSATRDLLMTLAELGYRVSGKKAQLCQEEVTYLGFKIHKGSRSLSNSRTQAILQIPVPKTKRQVREFLGTIGYCRLWIPGFAELAQPLYAATRGGNDPLVWGEKEEEAFQSLKLALTQPPALALPSLDKPFQLFVEETSGAAKGVLTQALGPWKRPVAYLSKRLDPVAAGWPRCLRAIAAAALLTREASKLTFGQDIEITSSHNLESLLRSPPDKWLTNARITQYQVLLLDPPRVRFKQTAALNPATLLPETDDTLPIHHCLDTLDSLTSTRPDLTDQPLAQAEATLFTDGSSYIRDGKRYAGAAVVTLDSVIWAEPLPIGTSAQKAELIALTKALEWSKDKSVNIYTDSRYAFATLHVHGMIYRERGLLTAGGKAIKNAPEILALLTAVWLPKRVAVMHCKGHQKDDAPTSTGNRRADEVAREVAIRPLSTQATISAGKRTADGSEFEKRTADGSEFESPKKKAKVE

SEQ ID NO: 7244 - protein, 2098 aa, synthetic construct
MPAAKRVKLDGGDKKYSIGLDIGTNSVGWAVITDEYKVPSKKFKVLGNTDRHSIKKNLIGALLFDSGETAEATRLKRTARRRYTRRKNRICYLQEIFSNEMAKVDDSFFHRLEESFLVEEDKKHERHPIFGNIVDEVAYHEKYPTIYHLRKKLVDSTDKADLRLIYLALAHMIKFRGHFLIEGDLNPDNSDVDKLFIQLVQTYNQLFEENPINASGVDAKAILSARLSKSRRLENLIAQLPGEKKNGLFGNLIALSLGLTPNFKSNFDLAEDAKLQLSKDTYDDDLDNLLAQIGDQYADLFLAAKNLSDAILLSDILRVNTEITKAPLSASMIKRYDEHHQDLTLLKALVRQQLPEKYKEIFFDQSKNGYAGYIDGGASQEEFYKFIKPILEKMDGTEELLVKLNREDLLRKQRTFDNGSIPHQIHLGELHAILRRQEDFYPFLKDNREKIEKILTFRIPYYVGPLARGNSRFAWMTRKSEETITPWNFEEVVDKGASAQSFIERMTNFDKNLPNEKVLPKHSLLYEYFTVYNELTKVKYVTEGMRKPAFLSGEQKKAIVDLLFKTNRKVTVKQLKEDYFKKIECFDSVEISGVEDRFNASLGTYHDLLKIIKDKDFLDNEENEDILEDIVLTLTLFEDREMIEERLKTYAHLFDDKVMKQLKRRRYTGWGRLSRKLINGIRDKQSGKTILDFLKSDGFANRNFMQLIHDDSLTFKEDIQKAQVSGQGDSLHEHIANLAGSPAIKKGILQTVKVVDELVKVMGRHKPENIVIEMARENQTTQKGQKNSRERMKRIEEGIKELGSQILKEHPVENTQLQNEKLYLYYLQNGRDMYVDQELDINRLSDYDVDHIVPQSFLKDDSIDNKVLTRSDKARGKSDNVPSEEVVKKMKNYWRQLLNAKLITQRKFDNLTKAERGGLSELDKAGFIKRQLVETRQITKHVAQILDSRMNTKYDENDKLIREVKVITLKSKLVSDFRKDFQFYKVREINNYHHAHDAYLNAVVGTALIKKYPKLESEFVYGDYKVYDVRKMIAKSEQEIGKATAKYFFYSNIMNFFKTEITLANGEIRKRPLIETNGETGEIVWDKGRDFATVRKVLSMPQVNIVKKTEVQTGGFSKESILPKRNSDKLIARKKDWDPKKYGGFDSPTVAYSVLVVAKVEKGKSKKLKSVKELLGITIMERSSFEKNPIDFLEAKGYKEVKKDLIIKLPKYSLFELENGRKRMLASAGELQKGNELALPSKYVNFLYLASHYEKLKGSPEDNEQKQLFVEQHKHYLDEIIEQISEFSKRVILADANLDKVLSAYNKHRDKPIREQAENIIHLFTLTNLGAPAAFKYFDTTIDRKRYTSTKEVLDATLIHQSITGLYETRIDLSQLGGDGGPAPGGSEAAAKGGTAPLEEEYRLFLEAPIQNVTLLEQWKREIPKVWAEINPPGLASTQAPIHVQLLSTALPVRVRQYPITLEAKRSLRETIRKFRAAGILRPVHSPWNTPLLPVRKSGTSEYRMVQDLREVNKRVETIHPTVPNPYTLLSLLPPDRIWYSVLDLKDAFFCIPLAPESQLIFAFEWADAEEGESGQLTWTRLPQGFKNSPTLFNEALNRDLQGFRLDHPSVSLLQYVDDLLIAADTQAACLSATRDLLMTLAELGYRVSGKKAQLCQEEVTYLGFKIHKGSRSLSNSRTQAILQIPVPKTKRQVREFLGTIGYCRLWIPGFAELAQPLYAATRPGNDPLVWGEKEEEAFQSLKLALTQPPALALPSLDKPFQLFVEETSGAAKGVLTQALGPWKRPVAYLSKRLDPVAAGWPRCLRAIAAAALLTREASKLTFGQDIEITSSHNLESLLRSPPDKWLTNARITQYQVLLLDPPRVRFKQTAALNPATLLPETDDTLPIHHCLDTLDSLTSTRPDLTDQPLAQAEATLFTDGSSYIRDGKRYAGAAVVTLDSVIWAEPLPIGTSAQKAELIALTKALEWSKDKSVNIYTDSRYAFATLHVHGMIYRERGWLTAGGKAIKNAPEILALLTAVWLPKRVAVMHCKGHQKDDAPTSTGNRRADEVAREVAIRPLSTQATISAGKRTADGSEFEKRTADGSEFESPKKKAKVE

SEQ ID NO: 7245 - protein, 2095 aa, synthetic construct
MPAAKRVKLDGGDKKYSIGLDIGTNSVGWAVITDEYKVPSKKFKVLGNTDRHSIKKNLIGALLFDSGETAEATRLKRTARRRYTRRKNRICYLQEIFSNEMAKVDDSFFHRLEESFLVEEDKKHERHPIFGNIVDEVAYHEKYPTIYHLRKKLVDSTDKADLRLIYLALAHMIKFRGHFLIEGDLNPDNSDVDKLFIQLVQTYNQLFEENPINASGVDAKAILSARLSKSRRLENLIAQLPGEKKNGLFGNLIALSLGLTPNFKSNFDLAEDAKLQLSKDTYDDDLDNLLAQIGDQYADLFLAAKNLSDAILLSDILRVNTEITKAPLSASMIKRYDEHHQDLTLLKALVRQQLPEKYKEIFFDQSKNGYAGYIDGGASQEEFYKFIKPILEKMDGTEELLVKLNREDLLRKQRTFDNGSIPHQIHLGELHAILRRQEDFYPFLKDNREKIEKILTFRIPYYVGPLARGNSRFAWMTRKSEETITPWNFEEVVDKGASAQSFIERMTNFDKNLPNEKVLPKHSLLYEYFTVYNELTKVKYVTEGMRKPAFLSGEQKKAIVDLLFKTNRKVTVKQLKEDYFKKIECFDSVEISGVEDRFNASLGTYHDLLKIIKDKDFLDNEENEDILEDIVLTLTLFEDREMIEERLKTYAHLFDDKVMKQLKRRRYTGWGRLSRKLINGIRDKQSGKTILDFLKSDGFANRNFMQLIHDDSLTFKEDIQKAQVSGQGDSLHEHIANLAGSPAIKKGILQTVKVVDELVKVMGRHKPENIVIEMARENQTTQKGQKNSRERMKRIEEGIKELGSQILKEHPVENTQLQNEKLYLYYLQNGRDMYVDQELDINRLSDYDVDHIVPQSFLKDDSIDNKVLTRSDKARGKSDNVPSEEVVKKMKNYWRQLLNAKLITQRKFDNLTKAERGGLSELDKAGFIKRQLVETRQITKHVAQILDSRMNTKYDENDKLIREVKVITLKSKLVSDFRKDFQFYKVREINNYHHAHDAYLNAVVGTALIKKYPKLESEFVYGDYKVYDVRKMIAKSEQEIGKATAKYFFYSNIMNFFKTEITLANGEIRKRPLIETNGETGEIVWDKGRDFATVRKVLSMPQVNIVKKTEVQTGGFSKESILPKRNSDKLIARKKDWDPKKYGGFDSPTVAYSVLVVAKVEKGKSKKLKSVKELLGITIMERSSFEKNPIDFLEAKGYKEVKKDLIIKLPKYSLFELENGRKRMLASAGELQKGNELALPSKYVNFLYLASHYEKLKGSPEDNEQKQLFVEQHKHYLDEIIEQISEFSKRVILADANLDKVLSAYNKHRDKPIREQAENIIHLFTLTNLGAPAAFKYFDTTIDRKRYTSTKEVLDATLIHQSITGLYETRIDLSQLGGDGGPAPGGSEAAAKGGTLQLEEEYRLFEPESTQKQEMDIWLKNFPQAWAETGGMGTAHCQAPVLIQLKATATPISIRQYPMPHEAYQGIKPHIRRMLDQGILKPCQSPWNTPLLPVKKPGTEDYRPVQDLREVNKRVEDIHPTVPNPYNLLSTLPPSHPWYTVLDLKDAFFCLRLHSESQLLFAFEWRDPEIGLSGQLTWTRLPQGFKNSPTLFNEALHSDLADFRVRYPALVLLQYVDDLLLAAATRTECLEGTKALLETLGNKGYRASAKKAQICLQEVTYLGYSLKDGQRWLTKARKEAILSIPVPKNSRQVREFLGTAGYCRLWIPGFAELAAPLYPLTRPGTLFQWGTEQQLAFEDIKKALLSSPALGLPDITKPFELFIDENSGFAKGVLVQKLGPWKRPVAYLSKKLDTVASGWPPCLRMVAAIAILVKDAGKLTLGQPLTILTSHPVEALVRQPPNKWLSNARMTHYQAMLLDAERVHFGPTVSLNPATLLPLPSGGNHHDCLQILAETHGTRPDLTDQPLPDADLTWYTDGSSFIRNGEREAGAAVTTESEVIWAAPLPPGTSAQRAELIALTQALKMAEGKKLTVYTDSRYAFATTHVHGEIYRRRGWLTSEGKEIKNKNEILALLEALFLPKRLSIIHCPGHQKGDSPQAKGNRLADDTAKKAATETHSSLTVLPAGKRTADGSEFEKRTADGSEFESPKKKAKVE

SEQ ID NO: 7246 - protein, 2096 aa, synthetic construct
MPAAKRVKLDGGDKKYSIGLDIGTNSVGWAVITDEYKVPSKKFKVLGNTDRHSIKKNLIGALLFDSGETAEATRLKRTARRRYTRRKNRICYLQEIFSNEMAKVDDSFFHRLEESFLVEEDKKHERHPIFGNIVDEVAYHEKYPTIYHLRKKLVDSTDKADLRLIYLALAHMIKFRGHFLIEGDLNPDNSDVDKLFIQLVQTYNQLFEENPINASGVDAKAILSARLSKSRRLENLIAQLPGEKKNGLFGNLIALSLGLTPNFKSNFDLAEDAKLQLSKDTYDDDLDNLLAQIGDQYADLFLAAKNLSDAILLSDILRVNTEITKAPLSASMIKRYDEHHQDLTLLKALVRQQLPEKYKEIFFDQSKNGYAGYIDGGASQEEFYKFIKPILEKMDGTEELLVKLNREDLLRKQRTFDNGSIPHQIHLGELHAILRRQEDFYPFLKDNREKIEKILTFRIPYYVGPLARGNSRFAWMTRKSEETITPWNFEEVVDKGASAQSFIERMTNFDKNLPNEKVLPKHSLLYEYFTVYNELTKVKYVTEGMRKPAFLSGEQKKAIVDLLFKTNRKVTVKQLKEDYFKKIECFDSVEISGVEDRFNASLGTYHDLLKIIKDKDFLDNEENEDILEDIVLTLTLFEDREMIEERLKTYAHLFDDKVMKQLKRRRYTGWGRLSRKLINGIRDKQSGKTILDFLKSDGFANRNFMQLIHDDSLTFKEDIQKAQVSGQGDSLHEHIANLAGSPAIKKGILQTVKVVDELVKVMGRHKPENIVIEMARENQTTQKGQKNSRERMKRIEEGIKELGSQILKEHPVENTQLQNEKLYLYYLQNGRDMYVDQELDINRLSDYDVDHIVPQSFLKDDSIDNKVLTRSDKARGKSDNVPSEEVVKKMKNYWRQLLNAKLITQRKFDNLTKAERGGLSELDKAGFIKRQLVETRQITKHVAQILDSRMNTKYDENDKLIREVKVITLKSKLVSDFRKDFQFYKVREINNYHHAHDAYLNAVVGTALIKKYPKLESEFVYGDYKVYDVRKMIAKSEQEIGKATAKYFFYSNIMNFFKTEITLANGEIRKRPLIETNGETGEIVWDKGRDFATVRKVLSMPQVNIVKKTEVQTGGFSKESILPKRNSDKLIARKKDWDPKKYGGFDSPTVAYSVLVVAKVEKGKSKKLKSVKELLGITIMERSSFEKNPIDFLEAKGYKEVKKDLIIKLPKYSLFELENGRKRMLASAGELQKGNELALPSKYVNFLYLASHYEKLKGSPEDNEQKQLFVEQHKHYLDEIIEQISEFSKRVILADANLDKVLSAYNKHRDKPIREQAENIIHLFTLTNLGAPAAFKYFDTTIDRKRYTSTKEVLDATLIHQSITGLYETRIDLSQLGGDGGPAPGGSEAAAKGGTLGIEDEYRLHETSTEPDVSLGSTWLSDFPQAWAETGGMGLAVRQAPLIIPLKATSTPVSIQQYPMSHEARLGIKPHIQRLLDQGILVPCQSPWNTPLLPVKKPGTNDYRPVQDLREVNKRVEDIHPTVPNPYNLLSGLPPSHQWYTVLDLKDAFFCLRLHPTSQPLFAFEWRDPGMGISGQLTWTRLPQGFKNSPTLFNEALHRDLADFRIQHPDLILLQYVDDILLAATSELDCQQGTRALLQTLGDLGYRASAKKAQICQKQVKYLGYLLREGQRWLTEARKETVMGQPVPKTPRQLREFLGTAGFCRLWIPGFAEMAAPLYPLTKPGTLFSWGPDQQKAYQEIKQALLTAPALGLPDLTKPFELFVDEKQGYAKGVLTQKLGPWRRPVAYLSKKLDPVAAGWPPCLRMVAAIAVLTKDAGKLTMGQPLVILAPHAVEALVKQPPDRWLSNARMTHYQAMLLDTDRVQFGPVVALNPATLLPLPEEGAPHDCLEILAETHGTRPDLTDQPIPDADHTWYTDGSSFLQEGQRKAGAAVTTETEVIWAGALPAGTSAQRAELIALTQALKMAEGKRLNVYTDSRYAFATAHIHGEIYRRRGWLTSEGREIKNKSEILALLKALFLPKRLSIIHCLGHQKGDSAEARGNRLADQAAREAAIKTPPDTSTLLAGKRTADGSEFEKRTADGSEFESPKKKAKVE

SEQ ID NO: 7247 - protein, 2096 aa, synthetic construct
MPAAKRVKLDGGDKKYSIGLDIGTNSVGWAVITDEYKVPSKKFKVLGNTDRHSIKKNLIGALLFDSGETAEATRLKRTARRRYTRRKNRICYLQEIFSNEMAKVDDSFFHRLEESFLVEEDKKHERHPIFGNIVDEVAYHEKYPTIYHLRKKLVDSTDKADLRLIYLALAHMIKFRGHFLIEGDLNPDNSDVDKLFIQLVQTYNQLFEENPINASGVDAKAILSARLSKSRRLENLIAQLPGEKKNGLFGNLIALSLGLTPNFKSNFDLAEDAKLQLSKDTYDDDLDNLLAQIGDQYADLFLAAKNLSDAILLSDILRVNTEITKAPLSASMIKRYDEHHQDLTLLKALVRQQLPEKYKEIFFDQSKNGYAGYIDGGASQEEFYKFIKPILEKMDGTEELLVKLNREDLLRKQRTFDNGSIPHQIHLGELHAILRRQEDFYPFLKDNREKIEKILTFRIPYYVGPLARGNSRFAWMTRKSEETITPWNFEEVVDKGASAQSFIERMTNFDKNLPNEKVLPKHSLLYEYFTVYNELTKVKYVTEGMRKPAFLSGEQKKAIVDLLFKTNRKVTVKQLKEDYFKKIECFDSVEISGVEDRFNASLGTYHDLLKIIKDKDFLDNEENEDILEDIVLTLTLFEDREMIEERLKTYAHLFDDKVMKQLKRRRYTGWGRLSRKLINGIRDKQSGKTILDFLKSDGFANRNFMQLIHDDSLTFKEDIQKAQVSGQGDSLHEHIANLAGSPAIKKGILQTVKVVDELVKVMGRHKPENIVIEMARENQTTQKGQKNSRERMKRIEEGIKELGSQILKEHPVENTQLQNEKLYLYYLQNGRDMYVDQELDINRLSDYDVDHIVPQSFLKDDSIDNKVLTRSDKARGKSDNVPSEEVVKKMKNYWRQLLNAKLITQRKFDNLTKAERGGLSELDKAGFIKRQLVETRQITKHVAQILDSRMNTKYDENDKLIREVKVITLKSKLVSDFRKDFQFYKVREINNYHHAHDAYLNAVVGTALIKKYPKLESEFVYGDYKVYDVRKMIAKSEQEIGKATAKYFFYSNIMNFFKTEITLANGEIRKRPLIETNGETGEIVWDKGRDFATVRKVLSMPQVNIVKKTEVQTGGFSKESILPKRNSDKLIARKKDWDPKKYGGFDSPTVAYSVLVVAKVEKGKSKKLKSVKELLGITIMERSSFEKNPIDFLEAKGYKEVKKDLIIKLPKYSLFELENGRKRMLASAGELQKGNELALPSKYVNFLYLASHYEKLKGSPEDNEQKQLFVEQHKHYLDEIIEQISEFSKRVILADANLDKVLSAYNKHRDKPIREQAENIIHLFTLTNLGAPAAFKYFDTTIDRKRYTSTKEVLDATLIHQSITGLYETRIDLSQLGGDGGPAPGGSEAAAKGGTLNIEDEYRLHETSKGPDVPLGSTWLSDFPQAWAETGGMGLAVRQAPLIIPLKATSTPVSIKQYPMSQEARLGIKPHIQRLLDQGILVPCQSPWNTPLLPVKKPGTNDYRPVQDLREVNKRVEDIHPTVPNPYNLLSGLPPSHQWYTVLDLKDAFFCLRLHPTSQSLFAFEWRDPEMGISGQLTWTRLPQGFKNSPTLFDEALHRDLADFRIQHPDLILLQYVDDLLLAATSELDCQQGTRALLQTLGDLGYRASAKKAQICQKQVKYLGYLLKEGQRWLTEARKETVMGQPTPKTPRQLREFLGTAGFCRLWIPGFAEMAAPLYPLTKTGTLFEWGPDQQKAYQEIKQALLTAPALGLPDLTKPFELFVDEKQGYAKGVLTQKLGPWRRPVAYLSKKLDPVAAGWPPCLRMVAAIAVLTKDAGKLTMGQPLVILAPHAVEALVKQPPDRWLSNARMTHYQALLLDTDRVQFGPIVALNPATLLPLPEEGLQHDCLDILAEAHGTRPDLTDQPLPDADHTWYTDGSSFLQEGQRKAGAAVTTETEVVWAKALPAGTSAQRAELIALTQALKMAEGKKLNVYTDSRYAFATAHIHGEIYRRRGLLTSEGKEIKNKDEILALLKALFLPKRLSIIHCPGHQKGNRAEARGNRMADQAAREVATRETPETSTLLAGKRTADGSEFEKRTADGSEFESPKKKAKVE

SEQ ID NO: 7248 - protein, 2090 aa, synthetic construct
MPAAKRVKLDGGDKKYSIGLDIGTNSVGWAVITDEYKVPSKKFKVLGNTDRHSIKKNLIGALLFDSGETAEATRLKRTARRRYTRRKNRICYLQEIFSNEMAKVDDSFFHRLEESFLVEEDKKHERHPIFGNIVDEVAYHEKYPTIYHLRKKLVDSTDKADLRLIYLALAHMIKFRGHFLIEGDLNPDNSDVDKLFIQLVQTYNQLFEENPINASGVDAKAILSARLSKSRRLENLIAQLPGEKKNGLFGNLIALSLGLTPNFKSNFDLAEDAKLQLSKDTYDDDLDNLLAQIGDQYADLFLAAKNLSDAILLSDILRVNTEITKAPLSASMIKRYDEHHQDLTLLKALVRQQLPEKYKEIFFDQSKNGYAGYIDGGASQEEFYKFIKPILEKMDGTEELLVKLNREDLLRKQRTFDNGSIPHQIHLGELHAILRRQEDFYPFLKDNREKIEKILTFRIPYYVGPLARGNSRFAWMTRKSEETITPWNFEEVVDKGASAQSFIERMTNFDKNLPNEKVLPKHSLLYEYFTVYNELTKVKYVTEGMRKPAFLSGEQKKAIVDLLFKTNRKVTVKQLKEDYFKKIECFDSVEISGVEDRFNASLGTYHDLLKIIKDKDFLDNEENEDILEDIVLTLTLFEDREMIEERLKTYAHLFDDKVMKQLKRRRYTGWGRLSRKLINGIRDKQSGKTILDFLKSDGFANRNFMQLIHDDSLTFKEDIQKAQVSGQGDSLHEHIANLAGSPAIKKGILQTVKVVDELVKVMGRHKPENIVIEMARENQTTQKGQKNSRERMKRIEEGIKELGSQILKEHPVENTQLQNEKLYLYYLQNGRDMYVDQELDINRLSDYDVDHIVPQSFLKDDSIDNKVLTRSDKARGKSDNVPSEEVVKKMKNYWRQLLNAKLITQRKFDNLTKAERGGLSELDKAGFIKRQLVETRQITKHVAQILDSRMNTKYDENDKLIREVKVITLKSKLVSDFRKDFQFYKVREINNYHHAHDAYLNAVVGTALIKKYPKLESEFVYGDYKVYDVRKMIAKSEQEIGKATAKYFFYSNIMNFFKTEITLANGEIRKRPLIETNGETGEIVWDKGRDFATVRKVLSMPQVNIVKKTEVQTGGFSKESILPKRNSDKLIARKKDWDPKKYGGFDSPTVAYSVLVVAKVEKGKSKKLKSVKELLGITIMERSSFEKNPIDFLEAKGYKEVKKDLIIKLPKYSLFELENGRKRMLASAGELQKGNELALPSKYVNFLYLASHYEKLKGSPEDNEQKQLFVEQHKHYLDEIIEQISEFSKRVILADANLDKVLSAYNKHRDKPIREQAENIIHLFTLTNLGAPAAFKYFDTTIDRKRYTSTKEVLDATLIHQSITGLYETRIDLSQLGGDGGPAPGGSEAAAKGGTLQLDDEYRLYSPLVKPDQNIQFWLEQFPQAWAETAGMGLAKQVPPQVIQLKASATPVSVRQYPLSKEAQEGIRPHVQRLIQQGILVPVQSPWNTPLLPVRKPGTNDYRPVQDLREVNKRVQDIHPTVPNPYNLLCALPPQRSWYTVLDLKDAFFCLRLHPTSQPLFAFEWRDPGTGRTGQLTWTRLPQGFKNSPTIFDEALHRDLANFRIQHPQVTLLQYVDDLLLAGATKQDCLEGTKALLLELSDLGYRASAKKAQICRREVTYLGYSLRDGQRWLTEARKKTVVQIPAPTTAKQVREFLGTAGFCRLWIPGFATLAAPLYPLTKEKGEFSWAPEHQKAFDAIKKALLSAPALALPDVTKPFTLYVDERKGVARGVLTQTLGPWRRPVAYLSKKLDPVASGWPVCLKAIAAVAILVKDADKLTLGQNITVIAPHALENIVRQPPDRWMTNARMTHYQSLLLTERVTFAPPAALNPATLLPEETDEPVTHDCHQLLIEETGVRKDLTDIPLTGEVLTWFTDGSSYVVEGKRMAGAAVVDGTRTIWASSLPEGTSAQKAELMALTQALRLAEGKSINIYTDSRYAFATAHVHGAIYKQRGLLTSAGREIKNKEEILSLLEALHLPKRLAIIHCPGHQKAKDPISRGNQMADRVAKQAAQGVNLLAGKRTADGSEFEKRTADGSEFESPKKKAKVE

SEQ ID NO: 7249 - protein, 2176 aa, synthetic construct
MPAAKRVKLDGGDKKYSIGLDIGTNSVGWAVITDEYKVPSKKFKVLGNTDRHSIKKNLIGALLFDSGETAEATRLKRTARRRYTRRKNRICYLQEIFSNEMAKVDDSFFHRLEESFLVEEDKKHERHPIFGNIVDEVAYHEKYPTIYHLRKKLVDSTDKADLRLIYLALAHMIKFRGHFLIEGDLNPDNSDVDKLFIQLVQTYNQLFEENPINASGVDAKAILSARLSKSRRLENLIAQLPGEKKNGLFGNLIALSLGLTPNFKSNFDLAEDAKLQLSKDTYDDDLDNLLAQIGDQYADLFLAAKNLSDAILLSDILRVNTEITKAPLSASMIKRYDEHHQDLTLLKALVRQQLPEKYKEIFFDQSKNGYAGYIDGGASQEEFYKFIKPILEKMDGTEELLVKLNREDLLRKQRTFDNGSIPHQIHLGELHAILRRQEDFYPFLKDNREKIEKILTFRIPYYVGPLARGNSRFAWMTRKSEETITPWNFEEVVDKGASAQSFIERMTNFDKNLPNEKVLPKHSLLYEYFTVYNELTKVKYVTEGMRKPAFLSGEQKKAIVDLLFKTNRKVTVKQLKEDYFKKIECFDSVEISGVEDRFNASLGTYHDLLKIIKDKDFLDNEENEDILEDIVLTLTLFEDREMIEERLKTYAHLFDDKVMKQLKRRRYTGWGRLSRKLINGIRDKQSGKTILDFLKSDGFANRNFMQLIHDDSLTFKEDIQKAQVSGQGDSLHEHIANLAGSPAIKKGILQTVKVVDELVKVMGRHKPENIVIEMARENQTTQKGQKNSRERMKRIEEGIKELGSQILKEHPVENTQLQNEKLYLYYLQNGRDMYVDQELDINRLSDYDVDHIVPQSFLKDDSIDNKVLTRSDKARGKSDNVPSEEVVKKMKNYWRQLLNAKLITQRKFDNLTKAERGGLSELDKAGFIKRQLVETRQITKHVAQILDSRMNTKYDENDKLIREVKVITLKSKLVSDFRKDFQFYKVREINNYHHAHDAYLNAVVGTALIKKYPKLESEFVYGDYKVYDVRKMIAKSEQEIGKATAKYFFYSNIMNFFKTEITLANGEIRKRPLIETNGETGEIVWDKGRDFATVRKVLSMPQVNIVKKTEVQTGGFSKESILPKRNSDKLIARKKDWDPKKYGGFDSPTVAYSVLVVAKVEKGKSKKLKSVKELLGITIMERSSFEKNPIDFLEAKGYKEVKKDLIIKLPKYSLFELENGRKRMLASAGELQKGNELALPSKYVNFLYLASHYEKLKGSPEDNEQKQLFVEQHKHYLDEIIEQISEFSKRVILADANLDKVLSAYNKHRDKPIREQAENIIHLFTLTNLGAPAAFKYFDTTIDRKRYTSTKEVLDATLIHQSITGLYETRIDLSQLGGDGGPAPGGSEAAAKGGMDPLQLLQPLEAEIKGTKLKAHWNSGATITCVPEAFLEDERPIQTMLIKTIHGEKQQDVYYLTFKVQGRKVEAEVLASPYDYILLNPSDVPWLMKKPLQLTVLVPLHEYQERLLQQTALPKEQKELLQKLFLKYDALWQHWENQVGHRRIKPHNIATGTLAPRPQKQYPINPKAKPSIQIVIDDLLKQGVLIQQNSTMNTPVYPVPKPDGKWRMVLDYREVNKTIPLIAAQNQHSAGILSSIYRGKYKTTLDLTNGFWAHPITPESYWLTAFTWQGKQYCWTRLPQGFLNSPALFTADVVDLLKEIPNVQAYVDDIYISHDDPQEHLEQLEKIFSILLNAGYVVSLKKSEIAQREVEFLGFNITKEGRGLTDTFKQKLLNITPPKDLKQLQSILGLLNFARNFIPNYSELVKPLYTIVANANGKFISWTEDNSNQLQHIISVLNQADNLEERNPETRLIIKVNSSPSAGYIRYYNEGSKRPIMYVNYIFSKAEAKFTQTEKLLTTMHKGLIKAMDLAMGQEILVYSPIVSMTKIQRTPLPERKALPVRWITWMTYLEDPRIQFHYDKSLPELQQIPNVTEDVIAKTKHPSEFAMVFYTDGSAIKHPDVNKSHSAGMGIAQVQFIPEYKIVHQWSIPLGDHTAQLAEIAAVEFACKKALKISGPVLIVTDSFYVAESANKELPYWKSNGFLNNKKKPLRHVSKWKSIAECLQLKPDIIIMHEKGHQQPMTTLHTEGNNLADKLATQGSYVVHAGKRTADGSEFEKRTADGSEFESPKKKAKVE

SEQ ID NO: 7250 - protein, 2094 aa, synthetic construct
MPAAKRVKLDGGDKKYSIGLDIGTNSVGWAVITDEYKVPSKKFKVLGNTDRHSIKKNLIGALLFDSGETAEATRLKRTARRRYTRRKNRICYLQEIFSNEMAKVDDSFFHRLEESFLVEEDKKHERHPIFGNIVDEVAYHEKYPTIYHLRKKLVDSTDKADLRLIYLALAHMIKFRGHFLIEGDLNPDNSDVDKLFIQLVQTYNQLFEENPINASGVDAKAILSARLSKSRRLENLIAQLPGEKKNGLFGNLIALSLGLTPNFKSNFDLAEDAKLQLSKDTYDDDLDNLLAQIGDQYADLFLAAKNLSDAILLSDILRVNTEITKAPLSASMIKRYDEHHQDLTLLKALVRQQLPEKYKEIFFDQSKNGYAGYIDGGASQEEFYKFIKPILEKMDGTEELLVKLNREDLLRKQRTFDNGSIPHQIHLGELHAILRRQEDFYPFLKDNREKIEKILTFRIPYYVGPLARGNSRFAWMTRKSEETITPWNFEEVVDKGASAQSFIERMTNFDKNLPNEKVLPKHSLLYEYFTVYNELTKVKYVTEGMRKPAFLSGEQKKAIVDLLFKTNRKVTVKQLKEDYFKKIECFDSVEISGVEDRFNASLGTYHDLLKIIKDKDFLDNEENEDILEDIVLTLTLFEDREMIEERLKTYAHLFDDKVMKQLKRRRYTGWGRLSRKLINGIRDKQSGKTILDFLKSDGFANRNFMQLIHDDSLTFKEDIQKAQVSGQGDSLHEHIANLAGSPAIKKGILQTVKVVDELVKVMGRHKPENIVIEMARENQTTQKGQKNSRERMKRIEEGIKELGSQILKEHPVENTQLQNEKLYLYYLQNGRDMYVDQELDINRLSDYDVDHIVPQSFLKDDSIDNKVLTRSDKARGKSDNVPSEEVVKKMKNYWRQLLNAKLITQRKFDNLTKAERGGLSELDKAGFIKRQLVETRQITKHVAQILDSRMNTKYDENDKLIREVKVITLKSKLVSDFRKDFQFYKVREINNYHHAHDAYLNAVVGTALIKKYPKLESEFVYGDYKVYDVRKMIAKSEQEIGKATAKYFFYSNIMNFFKTEITLANGEIRKRPLIETNGETGEIVWDKGRDFATVRKVLSMPQVNIVKKTEVQTGGFSKESILPKRNSDKLIARKKDWDPKKYGGFDSPTVAYSVLVVAKVEKGKSKKLKSVKELLGITIMERSSFEKNPIDFLEAKGYKEVKKDLIIKLPKYSLFELENGRKRMLASAGELQKGNELALPSKYVNFLYLASHYEKLKGSPEDNEQKQLFVEQHKHYLDEIIEQISEFSKRVILADANLDKVLSAYNKHRDKPIREQAENIIHLFTLTNLGAPAAFKYFDTTIDRKRYTSTKEVLDATLIHQSITGLYETRIDLSQLGGDGGPAPGGSEAAAKGGVLNLEEEYRLHEKPVPSSIDPSWLQLFPTVWAERAGMGLANQVPPVVVELRSGASPVAVRQYPMSKEAREGIRPHIQRFLDLGVLVPCQSPWNTPLLPVKKPGTNDYRPVQDLREINKRVQDIHPTVPNPYNLLSSLPPSHTWYSVLDLKDAFFCLKLHPNSQPLFAFEWRDPEKGNTGQLTWTRLPQGFKNSPTLFNEALHRDLAPFRALNPQVVLLQYVDDLLVAAPTYRDCKEGTQKLLQELSKLGYRVSAKKAQLCQKEVTYLGYLLKEGKRWLTPARKATVMKIPPPTTPRQVREFLGKAGFCRLFIPGFASLAAPLYPLTKPSIPFIWTEEHQKAFDRIKEALLSAPALALPDLTKPFTLYVDERAGVARGVLTQTLGPWRRPVAYLSKKLDPVASGWPTCLKAVAAVALLLKDADKLTLGQNVTVIASHSLESIVRQPPDRWMTNARMTHYQSLLLNERVSFAPPAVLNPATLLPVESEATPVHRCSEILAEETGTRRDLKDQPLPGVPAWYTDGSSFIAEGKRRAGAAIVDGKRTVWASSLPEGTSAQKAELVALTQALRLAEGKDINIYTDSRYAFATAHIHGAIYKQRGWLTSAGKDIKNKEEILALLEAIHLPKRVAIIHCPGHQKGNDPVATGNRRADEAAKQAALSTRVLAETTKPAGKRTADGSEFEKRTADGSEFESPKKKAKVE

SEQ ID NO: 7251 - protein, 2096 aa, synthetic construct
MPAAKRVKLDGGDKKYSIGLDIGTNSVGWAVITDEYKVPSKKFKVLGNTDRHSIKKNLIGALLFDSGETAEATRLKRTARRRYTRRKNRICYLQEIFSNEMAKVDDSFFHRLEESFLVEEDKKHERHPIFGNIVDEVAYHEKYPTIYHLRKKLVDSTDKADLRLIYLALAHMIKFRGHFLIEGDLNPDNSDVDKLFIQLVQTYNQLFEENPINASGVDAKAILSARLSKSRRLENLIAQLPGEKKNGLFGNLIALSLGLTPNFKSNFDLAEDAKLQLSKDTYDDDLDNLLAQIGDQYADLFLAAKNLSDAILLSDILRVNTEITKAPLSASMIKRYDEHHQDLTLLKALVRQQLPEKYKEIFFDQSKNGYAGYIDGGASQEEFYKFIKPILEKMDGTEELLVKLNREDLLRKQRTFDNGSIPHQIHLGELHAILRRQEDFYPFLKDNREKIEKILTFRIPYYVGPLARGNSRFAWMTRKSEETITPWNFEEVVDKGASAQSFIERMTNFDKNLPNEKVLPKHSLLYEYFTVYNELTKVKYVTEGMRKPAFLSGEQKKAIVDLLFKTNRKVTVKQLKEDYFKKIECFDSVEISGVEDRFNASLGTYHDLLKIIKDKDFLDNEENEDILEDIVLTLTLFEDREMIEERLKTYAHLFDDKVMKQLKRRRYTGWGRLSRKLINGIRDKQSGKTILDFLKSDGFANRNFMQLIHDDSLTFKEDIQKAQVSGQGDSLHEHIANLAGSPAIKKGILQTVKVVDELVKVMGRHKPENIVIEMARENQTTQKGQKNSRERMKRIEEGIKELGSQILKEHPVENTQLQNEKLYLYYLQNGRDMYVDQELDINRLSDYDVDHIVPQSFLKDDSIDNKVLTRSDKARGKSDNVPSEEVVKKMKNYWRQLLNAKLITQRKFDNLTKAERGGLSELDKAGFIKRQLVETRQITKHVAQILDSRMNTKYDENDKLIREVKVITLKSKLVSDFRKDFQFYKVREINNYHHAHDAYLNAVVGTALIKKYPKLESEFVYGDYKVYDVRKMIAKSEQEIGKATAKYFFYSNIMNFFKTEITLANGEIRKRPLIETNGETGEIVWDKGRDFATVRKVLSMPQVNIVKKTEVQTGGFSKESILPKRNSDKLIARKKDWDPKKYGGFDSPTVAYSVLVVAKVEKGKSKKLKSVKELLGITIMERSSFEKNPIDFLEAKGYKEVKKDLIIKLPKYSLFELENGRKRMLASAGELQKGNELALPSKYVNFLYLASHYEKLKGSPEDNEQKQLFVEQHKHYLDEIIEQISEFSKRVILADANLDKVLSAYNKHRDKPIREQAENIIHLFTLTNLGAPAAFKYFDTTIDRKRYTSTKEVLDATLIHQSITGLYETRIDLSQLGGDGGPAPGGSEAAAKGGTLNIEDEYRLHETSKEPDVPLGSTWLSDFPQAWAETGGMGLAVRQAPLIIPLKATSTPVSIKQYPMSQEARLGIKPHIQRLLDQGILVPCQSPWNTPLLPVKKPGTNDYRPVQDLREVNKRVEDIHPTVPNPYNLLSGLPPSHQWYTVLDLKDAFFCLRLHPTSQPLFAFEWRDPEMGISGQLTWTRLPQGFKNSPTLFDEALHRDLADFRIQHPDLILLQYVDDLLLAATSEQDCQRGTRALLQTLGNLGYRASAKKAQICQKQVKYLGYLLKEGQRWLTEARKETVMGQPTPKTPRQLREFLGTAGFCRLWIPGFAEMAAPLYPLTKTGTLFNWGPDQQKAYQEIKQALLTAPALGLPDLTKPFELFVDEKQGYAKGVLTQKLGPWRRPVAYLSKKLDPVAAGWPPCLRMVAAIAVLTKDAGKLTMGQPLVILAPHAVEALVKQPPDRWLSNARMTHYQAMLLDTDRVQFGPVVALNPATLLPLPEKEAPHDCLEILAETHGTRPDLTDQPIPDADYTWYTDGSSFLQEGQRRAGAAVTTETEVIWARALPAGTSAQRAELIALTQALKMAEGKKLNVYTDSRYAFATAHVHGEIYRRRGLLTSEGREIKNKNEILALLKALFLPKRLSIIHCPGHQKGNSAEARGNRMADQAAREAAMKAVLETSTLLAGKRTADGSEFEKRTADGSEFESPKKKAKVE

SEQ ID NO: 7252 - protein, 2096 aa, synthetic construct
MPAAKRVKLDGGDKKYSIGLDIGTNSVGWAVITDEYKVPSKKFKVLGNTDRHSIKKNLIGALLFDSGETAEATRLKRTARRRYTRRKNRICYLQEIFSNEMAKVDDSFFHRLEESFLVEEDKKHERHPIFGNIVDEVAYHEKYPTIYHLRKKLVDSTDKADLRLIYLALAHMIKFRGHFLIEGDLNPDNSDVDKLFIQLVQTYNQLFEENPINASGVDAKAILSARLSKSRRLENLIAQLPGEKKNGLFGNLIALSLGLTPNFKSNFDLAEDAKLQLSKDTYDDDLDNLLAQIGDQYADLFLAAKNLSDAILLSDILRVNTEITKAPLSASMIKRYDEHHQDLTLLKALVRQQLPEKYKEIFFDQSKNGYAGYIDGGASQEEFYKFIKPILEKMDGTEELLVKLNREDLLRKQRTFDNGSIPHQIHLGELHAILRRQEDFYPFLKDNREKIEKILTFRIPYYVGPLARGNSRFAWMTRKSEETITPWNFEEVVDKGASAQSFIERMTNFDKNLPNEKVLPKHSLLYEYFTVYNELTKVKYVTEGMRKPAFLSGEQKKAIVDLLFKTNRKVTVKQLKEDYFKKIECFDSVEISGVEDRFNASLGTYHDLLKIIKDKDFLDNEENEDILEDIVLTLTLFEDREMIEERLKTYAHLFDDKVMKQLKRRRYTGWGRLSRKLINGIRDKQSGKTILDFLKSDGFANRNFMQLIHDDSLTFKEDIQKAQVSGQGDSLHEHIANLAGSPAIKKGILQTVKVVDELVKVMGRHKPENIVIEMARENQTTQKGQKNSRERMKRIEEGIKELGSQILKEHPVENTQLQNEKLYLYYLQNGRDMYVDQELDINRLSDYDVDHIVPQSFLKDDSIDNKVLTRSDKARGKSDNVPSEEVVKKMKNYWRQLLNAKLITQRKFDNLTKAERGGLSELDKAGFIKRQLVETRQITKHVAQILDSRMNTKYDENDKLIREVKVITLKSKLVSDFRKDFQFYKVREINNYHHAHDAYLNAVVGTALIKKYPKLESEFVYGDYKVYDVRKMIAKSEQEIGKATAKYFFYSNIMNFFKTEITLANGEIRKRPLIETNGETGEIVWDKGRDFATVRKVLSMPQVNIVKKTEVQTGGFSKESILPKRNSDKLIARKKDWDPKKYGGFDSPTVAYSVLVVAKVEKGKSKKLKSVKELLGITIMERSSFEKNPIDFLEAKGYKEVKKDLIIKLPKYSLFELENGRKRMLASAGELQKGNELALPSKYVNFLYLASHYEKLKGSPEDNEQKQLFVEQHKHYLDEIIEQISEFSKRVILADANLDKVLSAYNKHRDKPIREQAENIIHLFTLTNLGAPAAFKYFDTTIDRKRYTSTKEVLDATLIHQSITGLYETRIDLSQLGGDGGPAPGGSEAAAKGGTLNIEDEYRLHETSKEPDVPLGSTWLSDFPQAWAETGGMGLAVRQAPLIIPLKATSTPVSIKQYPMSQEARLGIKPHIQRLLDQGILVPCQSPWNTPLLPVKKPGTNDYRPVQDLREVNKRVEDIHPTVPNPYNLLSGLPPSHQWYTVLDLKDAFFCLRLHPTSQPLFAFEWRDPEMGISGQLTWTRLPQGFKNSPTLFNEALHRDLADFRIQHPDLILLQYVDDLLLAATSEQDCQRGTRALLQTLGNLGYRASAKKAQICQKQVKYLGYLLKEGQRWLTEARKETVMGQPTPKTPRQLREFLGTAGFCRLWIPGFAEMAAPLYPLTKPGTLFNWGPDQQKAYQEIKQALLTAPALGLPDLTKPFELFVDEKQGYAKGVLTQKLGPWRRPVAYLSKKLDPVAAGWPPCLRMVAAIAVLTKDAGKLTMGQPLVILAPHAVEALVKQPPDRWLSNARMTHYQAMLLDTDRVQFGPVVALNPATLLPLPEKEAPHDCLEILAETHGTRPDLTDQPIPDADYTWYTDGSSFLQEGQRRAGAAVTTETEVIWARALPAGTSAQRAELIALTQALKMAEGKKLNVYTDSRYAFATAHVHGEIYRRRGWLTSEGREIKNKNEILALLKALFLPKRLSIIHCPGHQKGNSAEARGNRMADQAAREAAMKAVLETSTLLAGKRTADGSEFEKRTADGSEFESPKKKAKVE

SEQ ID NO: 7253 - protein, 2098 aa, synthetic construct
MPAAKRVKLDGGDKKYSIGLDIGTNSVGWAVITDEYKVPSKKFKVLGNTDRHSIKKNLIGALLFDSGETAEATRLKRTARRRYTRRKNRICYLQEIFSNEMAKVDDSFFHRLEESFLVEEDKKHERHPIFGNIVDEVAYHEKYPTIYHLRKKLVDSTDKADLRLIYLALAHMIKFRGHFLIEGDLNPDNSDVDKLFIQLVQTYNQLFEENPINASGVDAKAILSARLSKSRRLENLIAQLPGEKKNGLFGNLIALSLGLTPNFKSNFDLAEDAKLQLSKDTYDDDLDNLLAQIGDQYADLFLAAKNLSDAILLSDILRVNTEITKAPLSASMIKRYDEHHQDLTLLKALVRQQLPEKYKEIFFDQSKNGYAGYIDGGASQEEFYKFIKPILEKMDGTEELLVKLNREDLLRKQRTFDNGSIPHQIHLGELHAILRRQEDFYPFLKDNREKIEKILTFRIPYYVGPLARGNSRFAWMTRKSEETITPWNFEEVVDKGASAQSFIERMTNFDKNLPNEKVLPKHSLLYEYFTVYNELTKVKYVTEGMRKPAFLSGEQKKAIVDLLFKTNRKVTVKQLKEDYFKKIECFDSVEISGVEDRFNASLGTYHDLLKIIKDKDFLDNEENEDILEDIVLTLTLFEDREMIEERLKTYAHLFDDKVMKQLKRRRYTGWGRLSRKLINGIRDKQSGKTILDFLKSDGFANRNFMQLIHDDSLTFKEDIQKAQVSGQGDSLHEHIANLAGSPAIKKGILQTVKVVDELVKVMGRHKPENIVIEMARENQTTQKGQKNSRERMKRIEEGIKELGSQILKEHPVENTQLQNEKLYLYYLQNGRDMYVDQELDINRLSDYDVDHIVPQSFLKDDSIDNKVLTRSDKARGKSDNVPSEEVVKKMKNYWRQLLNAKLITQRKFDNLTKAERGGLSELDKAGFIKRQLVETRQITKHVAQILDSRMNTKYDENDKLIREVKVITLKSKLVSDFRKDFQFYKVREINNYHHAHDAYLNAVVGTALIKKYPKLESEFVYGDYKVYDVRKMIAKSEQEIGKATAKYFFYSNIMNFFKTEITLANGEIRKRPLIETNGETGEIVWDKGRDFATVRKVLSMPQVNIVKKTEVQTGGFSKESILPKRNSDKLIARKKDWDPKKYGGFDSPTVAYSVLVVAKVEKGKSKKLKSVKELLGITIMERSSFEKNPIDFLEAKGYKEVKKDLIIKLPKYSLFELENGRKRMLASAGELQKGNELALPSKYVNFLYLASHYEKLKGSPEDNEQKQLFVEQHKHYLDEIIEQISEFSKRVILADANLDKVLSAYNKHRDKPIREQAENIIHLFTLTNLGAPAAFKYFDTTIDRKRYTSTKEVLDATLIHQSITGLYETRIDLSQLGGDGGPAPEAAAKGGSGGTAPLEEEYRLFLEAPIQNVTLLEQWKREIPKVWAEINPPGLASTQAPIHVQLLSTALPVRVRQYPITLEAKRSLRETIRKFRAAGILRPVHSPWNTPLLPVRKSGTSEYRMVQDLREVNKRVETIHPTVPNPYTLLSLLPPDRIWYSVLDLKDAFFCIPLAPESQLIFAFEWADAEEGESGQLTWTRLPQGFKNSPTLFDEALNRDLQGFRLDHPSVSLLQYVDDLLIAADTQAACLSATRDLLMTLAELGYRVSGKKAQLCQEEVTYLGFKIHKGSRSLSNSRTQAILQIPVPKTKRQVREFLGTIGYCRLWIPGFAELAQPLYAATRGGNDPLVWGEKEEEAFQSLKLALTQPPALALPSLDKPFQLFVEETSGAAKGVLTQALGPWKRPVAYLSKRLDPVAAGWPRCLRAIAAAALLTREASKLTFGQDIEITSSHNLESLLRSPPDKWLTNARITQYQVLLLDPPRVRFKQTAALNPATLLPETDDTLPIHHCLDTLDSLTSTRPDLTDQPLAQAEATLFTDGSSYIRDGKRYAGAAVVTLDSVIWAEPLPIGTSAQKAELIALTKALEWSKDKSVNIYTDSRYAFATLHVHGMIYRERGLLTAGGKAIKNAPEILALLTAVWLPKRVAVMHCKGHQKDDAPTSTGNRRADEVAREVAIRPLSTQATISAGKRTADGSEFEKRTADGSEFESPKKKAKVE

SEQ ID NO: 7254 - protein, 2173 aa, synthetic construct
MPAAKRVKLDGGDKKYSIGLDIGTNSVGWAVITDEYKVPSKKFKVLGNTDRHSIKKNLIGALLFDSGETAEATRLKRTARRRYTRRKNRICYLQEIFSNEMAKVDDSFFHRLEESFLVEEDKKHERHPIFGNIVDEVAYHEKYPTIYHLRKKLVDSTDKADLRLIYLALAHMIKFRGHFLIEGDLNPDNSDVDKLFIQLVQTYNQLFEENPINASGVDAKAILSARLSKSRRLENLIAQLPGEKKNGLFGNLIALSLGLTPNFKSNFDLAEDAKLQLSKDTYDDDLDNLLAQIGDQYADLFLAAKNLSDAILLSDILRVNTEITKAPLSASMIKRYDEHHQDLTLLKALVRQQLPEKYKEIFFDQSKNGYAGYIDGGASQEEFYKFIKPILEKMDGTEELLVKLNREDLLRKQRTFDNGSIPHQIHLGELHAILRRQEDFYPFLKDNREKIEKILTFRIPYYVGPLARGNSRFAWMTRKSEETITPWNFEEVVDKGASAQSFIERMTNFDKNLPNEKVLPKHSLLYEYFTVYNELTKVKYVTEGMRKPAFLSGEQKKAIVDLLFKTNRKVTVKQLKEDYFKKIECFDSVEISGVEDRFNASLGTYHDLLKIIKDKDFLDNEENEDILEDIVLTLTLFEDREMIEERLKTYAHLFDDKVMKQLKRRRYTGWGRLSRKLINGIRDKQSGKTILDFLKSDGFANRNFMQLIHDDSLTFKEDIQKAQVSGQGDSLHEHIANLAGSPAIKKGILQTVKVVDELVKVMGRHKPENIVIEMARENQTTQKGQKNSRERMKRIEEGIKELGSQILKEHPVENTQLQNEKLYLYYLQNGRDMYVDQELDINRLSDYDVDHIVPQSFLKDDSIDNKVLTRSDKARGKSDNVPSEEVVKKMKNYWRQLLNAKLITQRKFDNLTKAERGGLSELDKAGFIKRQLVETRQITKHVAQILDSRMNTKYDENDKLIREVKVITLKSKLVSDFRKDFQFYKVREINNYHHAHDAYLNAVVGTALIKKYPKLESEFVYGDYKVYDVRKMIAKSEQEIGKATAKYFFYSNIMNFFKTEITLANGEIRKRPLIETNGETGEIVWDKGRDFATVRKVLSMPQVNIVKKTEVQTGGFSKESILPKRNSDKLIARKKDWDPKKYGGFDSPTVAYSVLVVAKVEKGKSKKLKSVKELLGITIMERSSFEKNPIDFLEAKGYKEVKKDLIIKLPKYSLFELENGRKRMLASAGELQKGNELALPSKYVNFLYLASHYEKLKGSPEDNEQKQLFVEQHKHYLDEIIEQISEFSKRVILADANLDKVLSAYNKHRDKPIREQAENIIHLFTLTNLGAPAAFKYFDTTIDRKRYTSTKEVLDATLIHQSITGLYETRIDLSQLGGDGGPAPEAAAKGGSGGMDLLKPLTVERKGVKIKGYWNSQADITCVPKDLLQGEEPVRQQNVTTIHGTQEGDVYYVNLKIDGRRINTEVIGTTLDYAIITPGDVPWILKKPLELTIKLDLEEQQGTLLNNSILSKKGKEELKQLFEKYSALWQSWENQVGHRRIRPHKIATGTVKPTPQKQYHINPKAKPDIQIVINDLLKQGVLIQKESTMNTPVYPVPKPNGRWRMVLDYRAVNKVTPLIAVQNQHSYGILGSLFKGRYKTTIDLSNGFWAHPIVPEDYWITAFTWQGKQYCWTVLPQGFLNSPGLFTGDVVDLLQGIPNVEVYVDDVYISHDSEKEHLEYLDILFNRLKEAGYIISLKKSNIANSIVDFLGFQITNEGRGLTDTFKEKLENITAPTTLKQLQSILGLLNFARNFIPDFTELIAPLYALIPKSTKNYVPWQIEHSTTLETLITKLNGAEYLQGRKGDKTLIMKVNASYTTGYIRYYNEGEKKPISYVSIVFSKTELKFTELEKLLTTVHKGLLKALDLSMGQNIHVYSPIVSMQNIQKTPQTAKKALASRWLSWLSYLEDPRIRFFYDPQMPALKDLPAVDTGKDNKKHPSNFQHIFYTDGSAITSPTKEGHLNAGMGIVYFINKDGNLQKQQEWSISLGNHTAQFAEIAAFEFALKKCLPLGGNILVVTDSNYVAKAYNEELDVWASNGFVNNRKKPLKHISKWKSVADLKRLRPDVVVTHEPGHQKLDSSPHAYGNNLADQLATQASFKVHAGKRTADGSEFEKRTADGSEFESPKKKAKVE

SEQ ID NO: 7255 - protein, 2087 aa, synthetic construct
MPAAKRVKLDGGDKKYSIGLDIGTNSVGWAVITDEYKVPSKKFKVLGNTDRHSIKKNLIGALLFDSGETAEATRLKRTARRRYTRRKNRICYLQEIFSNEMAKVDDSFFHRLEESFLVEEDKKHERHPIFGNIVDEVAYHEKYPTIYHLRKKLVDSTDKADLRLIYLALAHMIKFRGHFLIEGDLNPDNSDVDKLFIQLVQTYNQLFEENPINASGVDAKAILSARLSKSRRLENLIAQLPGEKKNGLFGNLIALSLGLTPNFKSNFDLAEDAKLQLSKDTYDDDLDNLLAQIGDQYADLFLAAKNLSDAILLSDILRVNTEITKAPLSASMIKRYDEHHQDLTLLKALVRQQLPEKYKEIFFDQSKNGYAGYIDGGASQEEFYKFIKPILEKMDGTEELLVKLNREDLLRKQRTFDNGSIPHQIHLGELHAILRRQEDFYPFLKDNREKIEKILTFRIPYYVGPLARGNSRFAWMTRKSEETITPWNFEEVVDKGASAQSFIERMTNFDKNLPNEKVLPKHSLLYEYFTVYNELTKVKYVTEGMRKPAFLSGEQKKAIVDLLFKTNRKVTVKQLKEDYFKKIECFDSVEISGVEDRFNASLGTYHDLLKIIKDKDFLDNEENEDILEDIVLTLTLFEDREMIEERLKTYAHLFDDKVMKQLKRRRYTGWGRLSRKLINGIRDKQSGKTILDFLKSDGFANRNFMQLIHDDSLTFKEDIQKAQVSGQGDSLHEHIANLAGSPAIKKGILQTVKVVDELVKVMGRHKPENIVIEMARENQTTQKGQKNSRERMKRIEEGIKELGSQILKEHPVENTQLQNEKLYLYYLQNGRDMYVDQELDINRLSDYDVDHIVPQSFLKDDSIDNKVLTRSDKARGKSDNVPSEEVVKKMKNYWRQLLNAKLITQRKFDNLTKAERGGLSELDKAGFIKRQLVETRQITKHVAQILDSRMNTKYDENDKLIREVKVITLKSKLVSDFRKDFQFYKVREINNYHHAHDAYLNAVVGTALIKKYPKLESEFVYGDYKVYDVRKMIAKSEQEIGKATAKYFFYSNIMNFFKTEITLANGEIRKRPLIETNGETGEIVWDKGRDFATVRKVLSMPQVNIVKKTEVQTGGFSKESILPKRNSDKLIARKKDWDPKKYGGFDSPTVAYSVLVVAKVEKGKSKKLKSVKELLGITIMERSSFEKNPIDFLEAKGYKEVKKDLIIKLPKYSLFELENGRKRMLASAGELQKGNELALPSKYVNFLYLASHYEKLKGSPEDNEQKQLFVEQHKHYLDEIIEQISEFSKRVILADANLDKVLSAYNKHRDKPIREQAENIIHLFTLTNLGAPAAFKYFDTTIDRKRYTSTKEVLDATLIHQSITGLYETRIDLSQLGGDGGPAPEAAAKGGSGGVPWILKKPLELTIKLDLEEQQGTLLNNSILSKKGKEELKQLFEKYSALWQSWENQVGHRRIRPHKIATGTVKPTPQKQYHINPKAKPDIQIVINDLLKQGVLIQKESTMNTPVYPVPKPNGRWRMVLDYRAVNKVTPLIAVQNQHSYGILGSLFKGRYKTTIDLSNGFWAHPIVPEDYWITAFTWQGKQYCWTVLPQGFLNSPGLFTGDVVDLLQGIPNVEVYVDDVYISHDSEKEHLEYLDILFNRLKEAGYIISLKKSNIANSIVDFLGFQITNEGRGLTDTFKEKLENITAPTTLKQLQSILGLLNFARNFIPDFTELIAPLYALIPKSTKNYVPWQIEHSTTLETLITKLNGAEYLQGRKGDKTLIMKVNASYTTGYIRYYNEGEKKPISYVSIVFSKTELKFTELEKLLTTVHKGLLKALDLSMGQNIHVYSPIVSMQNIQKTPQTAKKALASRWLSWLSYLEDPRIRFFYDPQMPALKDLPAVDTGKDNKKHPSNFQHIFYTDGSAITSPTKEGHLNAGMGIVYFINKDGNLQKQQEWSISLGNHTAQFAEIAAFEFALKKCLPLGGNILVVTDSNYVAKAYNEELDVWASNGFVNNRKKPLKHISKWKSVADLKRLRPDVVVTHEPGHQKLDSSPHAYGNNLADQLATQASFKVHAGKRTADGSEFEKRTADGSEFESPKKKAKVE

SEQ ID NO: 7256 - protein, 2095 aa, synthetic construct
MPAAKRVKLDGGDKKYSIGLDIGTNSVGWAVITDEYKVPSKKFKVLGNTDRHSIKKNLIGALLFDSGETAEATRLKRTARRRYTRRKNRICYLQEIFSNEMAKVDDSFFHRLEESFLVEEDKKHERHPIFGNIVDEVAYHEKYPTIYHLRKKLVDSTDKADLRLIYLALAHMIKFRGHFLIEGDLNPDNSDVDKLFIQLVQTYNQLFEENPINASGVDAKAILSARLSKSRRLENLIAQLPGEKKNGLFGNLIALSLGLTPNFKSNFDLAEDAKLQLSKDTYDDDLDNLLAQIGDQYADLFLAAKNLSDAILLSDILRVNTEITKAPLSASMIKRYDEHHQDLTLLKALVRQQLPEKYKEIFFDQSKNGYAGYIDGGASQEEFYKFIKPILEKMDGTEELLVKLNREDLLRKQRTFDNGSIPHQIHLGELHAILRRQEDFYPFLKDNREKIEKILTFRIPYYVGPLARGNSRFAWMTRKSEETITPWNFEEVVDKGASAQSFIERMTNFDKNLPNEKVLPKHSLLYEYFTVYNELTKVKYVTEGMRKPAFLSGEQKKAIVDLLFKTNRKVTVKQLKEDYFKKIECFDSVEISGVEDRFNASLGTYHDLLKIIKDKDFLDNEENEDILEDIVLTLTLFEDREMIEERLKTYAHLFDDKVMKQLKRRRYTGWGRLSRKLINGIRDKQSGKTILDFLKSDGFANRNFMQLIHDDSLTFKEDIQKAQVSGQGDSLHEHIANLAGSPAIKKGILQTVKVVDELVKVMGRHKPENIVIEMARENQTTQKGQKNSRERMKRIEEGIKELGSQILKEHPVENTQLQNEKLYLYYLQNGRDMYVDQELDINRLSDYDVDHIVPQSFLKDDSIDNKVLTRSDKARGKSDNVPSEEVVKKMKNYWRQLLNAKLITQRKFDNLTKAERGGLSELDKAGFIKRQLVETRQITKHVAQILDSRMNTKYDENDKLIREVKVITLKSKLVSDFRKDFQFYKVREINNYHHAHDAYLNAVVGTALIKKYPKLESEFVYGDYKVYDVRKMIAKSEQEIGKATAKYFFYSNIMNFFKTEITLANGEIRKRPLIETNGETGEIVWDKGRDFATVRKVLSMPQVNIVKKTEVQTGGFSKESILPKRNSDKLIARKKDWDPKKYGGFDSPTVAYSVLVVAKVEKGKSKKLKSVKELLGITIMERSSFEKNPIDFLEAKGYKEVKKDLIIKLPKYSLFELENGRKRMLASAGELQKGNELALPSKYVNFLYLASHYEKLKGSPEDNEQKQLFVEQHKHYLDEIIEQISEFSKRVILADANLDKVLSAYNKHRDKPIREQAENIIHLFTLTNLGAPAAFKYFDTTIDRKRYTSTKEVLDATLIHQSITGLYETRIDLSQLGGDGGPAPEAAAKGGSGGTLQLEEEYRLFEPESTQKQEMDIWLKNFPQAWAETGGMGTAHCQAPVLIQLKATATPISIRQYPMPHEAYQGIKPHIRRMLDQGILKPCQSPWNTPLLPVKKPGTEDYRPVQDLREVNKRVEDIHPTVPNPYNLLSTLPPSHPWYTVLDLKDAFFCLRLHSESQLLFAFEWRDPEIGLSGQLTWTRLPQGFKNSPTLFNEALHSDLADFRVRYPALVLLQYVDDLLLAAATRTECLEGTKALLETLGNKGYRASAKKAQICLQEVTYLGYSLKDGQRWLTKARKEAILSIPVPKNSRQVREFLGTAGYCRLWIPGFAELAAPLYPLTRPGTLFQWGTEQQLAFEDIKKALLSSPALGLPDITKPFELFIDENSGFAKGVLVQKLGPWKRPVAYLSKKLDTVASGWPPCLRMVAAIAILVKDAGKLTLGQPLTILTSHPVEALVRQPPNKWLSNARMTHYQAMLLDAERVHFGPTVSLNPATLLPLPSGGNHHDCLQILAETHGTRPDLTDQPLPDADLTWYTDGSSFIRNGEREAGAAVTTESEVIWAAPLPPGTSAQRAELIALTQALKMAEGKKLTVYTDSRYAFATTHVHGEIYRRRGWLTSEGKEIKNKNEILALLEALFLPKRLSIIHCPGHQKGDSPQAKGNRLADDTAKKAATETHSSLTVLPAGKRTADGSEFEKRTADGSEFESPKKKAKVE

SEQ ID NO: 7257 - protein, 2094 aa, synthetic construct
MPAAKRVKLDGGDKKYSIGLDIGTNSVGWAVITDEYKVPSKKFKVLGNTDRHSIKKNLIGALLFDSGETAEATRLKRTARRRYTRRKNRICYLQEIFSNEMAKVDDSFFHRLEESFLVEEDKKHERHPIFGNIVDEVAYHEKYPTIYHLRKKLVDSTDKADLRLIYLALAHMIKFRGHFLIEGDLNPDNSDVDKLFIQLVQTYNQLFEENPINASGVDAKAILSARLSKSRRLENLIAQLPGEKKNGLFGNLIALSLGLTPNFKSNFDLAEDAKLQLSKDTYDDDLDNLLAQIGDQYADLFLAAKNLSDAILLSDILRVNTEITKAPLSASMIKRYDEHHQDLTLLKALVRQQLPEKYKEIFFDQSKNGYAGYIDGGASQEEFYKFIKPILEKMDGTEELLVKLNREDLLRKQRTFDNGSIPHQIHLGELHAILRRQEDFYPFLKDNREKIEKILTFRIPYYVGPLARGNSRFAWMTRKSEETITPWNFEEVVDKGASAQSFIERMTNFDKNLPNEKVLPKHSLLYEYFTVYNELTKVKYVTEGMRKPAFLSGEQKKAIVDLLFKTNRKVTVKQLKEDYFKKIECFDSVEISGVEDRFNASLGTYHDLLKIIKDKDFLDNEENEDILEDIVLTLTLFEDREMIEERLKTYAHLFDDKVMKQLKRRRYTGWGRLSRKLINGIRDKQSGKTILDFLKSDGFANRNFMQLIHDDSLTFKEDIQKAQVSGQGDSLHEHIANLAGSPAIKKGILQTVKVVDELVKVMGRHKPENIVIEMARENQTTQKGQKNSRERMKRIEEGIKELGSQILKEHPVENTQLQNEKLYLYYLQNGRDMYVDQELDINRLSDYDVDHIVPQSFLKDDSIDNKVLTRSDKARGKSDNVPSEEVVKKMKNYWRQLLNAKLITQRKFDNLTKAERGGLSELDKAGFIKRQLVETRQITKHVAQILDSRMNTKYDENDKLIREVKVITLKSKLVSDFRKDFQFYKVREINNYHHAHDAYLNAVVGTALIKKYPKLESEFVYGDYKVYDVRKMIAKSEQEIGKATAKYFFYSNIMNFFKTEITLANGEIRKRPLIETNGETGEIVWDKGRDFATVRKVLSMPQVNIVKKTEVQTGGFSKESILPKRNSDKLIARKKDWDPKKYGGFDSPTVAYSVLVVAKVEKGKSKKLKSVKELLGITIMERSSFEKNPIDFLEAKGYKEVKKDLIIKLPKYSLFELENGRKRMLASAGELQKGNELALPSKYVNFLYLASHYEKLKGSPEDNEQKQLFVEQHKHYLDEIIEQISEFSKRVILADANLDKVLSAYNKHRDKPIREQAENIIHLFTLTNLGAPAAFKYFDTTIDRKRYTSTKEVLDATLIHQSITGLYETRIDLSQLGGDGGPAPEAAAKGGSGGVLNLEEEYRLHEKPVPSSIDPSWLQLFPTVWAERAGMGLANQVPPVVVELRSGASPVAVRQYPMSKEAREGIRPHIQKFLDLGVLVPCRSPWNTPLLPVKKPGTNDYRPVQDLREINKRVQDIHPTVPNPYNLLSSLPPSYTWYSVLDLKDAFFCLRLHPNSQPLFAFEWKDPEKGNTGQLTWTRLPQGFKNSPTLFNEALHRDLAPFRALNPQVVLLQYVDDLLVAAPTYEDCKKGTQKLLQELSKLGYRVSAKKAQLCQREVTYLGYLLKEGKRWLTPARKATVMKIPVPTTPRQVREFLGKAGFCRLFIPGFASLAAPLYPLTKPSIPFIWTEEHQQAFDHIKKALLSAPALALPDLTKPFTLYIDERAGVARGVLTQTLGPWRRPVAYLSKKLDPVASGWPTCLKAVAAVALLLKDADKLTLGQNVTVIASHSLESIVRQPPDRWMTNARMTHYQSLLLNERVSFAPPAVLNPATLLPVESEATPVHRCSEILAEETGTRRDLEDQPLPGVPTWYTDGSSFITEGKRRAGAPIVDGKRTVWASSLPEGTSAQKAELVALTQALRLAEGKNINIYTDSRYAFATAHIHGAIYKQRGWLTSAGKDIKNKEEILALLEAIHLPRRVAIIHCPGHQRGSNPVATGNRRADEAAKQAALSTRVLAGTTKPAGKRTADGSEFEKRTADGSEFESPKKKAKVE

SEQ ID NO: 7258 - protein, 2127 aa, synthetic construct
MPAAKRVKLDGGDKKYSIGLDIGTNSVGWAVITDEYKVPSKKFKVLGNTDRHSIKKNLIGALLFDSGETAEATRLKRTARRRYTRRKNRICYLQEIFSNEMAKVDDSFFHRLEESFLVEEDKKHERHPIFGNIVDEVAYHEKYPTIYHLRKKLVDSTDKADLRLIYLALAHMIKFRGHFLIEGDLNPDNSDVDKLFIQLVQTYNQLFEENPINASGVDAKAILSARLSKSRRLENLIAQLPGEKKNGLFGNLIALSLGLTPNFKSNFDLAEDAKLQLSKDTYDDDLDNLLAQIGDQYADLFLAAKNLSDAILLSDILRVNTEITKAPLSASMIKRYDEHHQDLTLLKALVRQQLPEKYKEIFFDQSKNGYAGYIDGGASQEEFYKFIKPILEKMDGTEELLVKLNREDLLRKQRTFDNGSIPHQIHLGELHAILRRQEDFYPFLKDNREKIEKILTFRIPYYVGPLARGNSRFAWMTRKSEETITPWNFEEVVDKGASAQSFIERMTNFDKNLPNEKVLPKHSLLYEYFTVYNELTKVKYVTEGMRKPAFLSGEQKKAIVDLLFKTNRKVTVKQLKEDYFKKIECFDSVEISGVEDRFNASLGTYHDLLKIIKDKDFLDNEENEDILEDIVLTLTLFEDREMIEERLKTYAHLFDDKVMKQLKRRRYTGWGRLSRKLINGIRDKQSGKTILDFLKSDGFANRNFMQLIHDDSLTFKEDIQKAQVSGQGDSLHEHIANLAGSPAIKKGILQTVKVVDELVKVMGRHKPENIVIEMARENQTTQKGQKNSRERMKRIEEGIKELGSQILKEHPVENTQLQNEKLYLYYLQNGRDMYVDQELDINRLSDYDVDHIVPQSFLKDDSIDNKVLTRSDKARGKSDNVPSEEVVKKMKNYWRQLLNAKLITQRKFDNLTKAERGGLSELDKAGFIKRQLVETRQITKHVAQILDSRMNTKYDENDKLIREVKVITLKSKLVSDFRKDFQFYKVREINNYHHAHDAYLNAVVGTALIKKYPKLESEFVYGDYKVYDVRKMIAKSEQEIGKATAKYFFYSNIMNFFKTEITLANGEIRKRPLIETNGETGEIVWDKGRDFATVRKVLSMPQVNIVKKTEVQTGGFSKESILPKRNSDKLIARKKDWDPKKYGGFDSPTVAYSVLVVAKVEKGKSKKLKSVKELLGITIMERSSFEKNPIDFLEAKGYKEVKKDLIIKLPKYSLFELENGRKRMLASAGELQKGNELALPSKYVNFLYLASHYEKLKGSPEDNEQKQLFVEQHKHYLDEIIEQISEFSKRVILADANLDKVLSAYNKHRDKPIREQAENIIHLFTLTNLGAPAAFKYFDTTIDRKRYTSTKEVLDATLIHQSITGLYETRIDLSQLGGDGGPAPEAAAKGGSGGLLGRDLLTKLKAQIQFSTEGPQVTWEDRPAMCLVLNLEEEYRLHEKPVPPSIDPSWLQLFPMVWAEKAGMGLANQVPPVVVELKSDASPVAVRQYPMSKEAREGIRPHIQRFLDLGILVPCQSPWNTPLLPVKKPGTNDYRPVQDLREVNKRVQDIHPTVPNPYNLLSSLPPSHTWYSVLDLKDAFFCLKLHPNSQPLFAFEWRDPEKGNTGQLTWTRLPQGFKNSPTLFNEALHRDLASFRALNPQVVMLQYVDDLLVAAPTYRDCKEGTRRLLQELSKLGYRVSAKKAQLCREEVTYLGYLLKGGKRWLTPARKATVMKIPTPTTPRQVREFLGKAGFCRLFIPGFASLAAPLYPLTRPKVPFTWTEAHQEAFGRIKEALLSAPALALPDLTKPFALYVDEKEGVARGVLTQTLGPWRRPVAYLSKKLDPVASGWPTCLKAIAAVALLLKDADKLTLGQNVLVIAPHNLESIVRQPPDRWMTNARMTHYQSLLLNERVSFAPPAILNPATLLPVESDDTPIHICSEILAEETGTRPDLRDQPLPGVPAWYTDGSSFIMDGRRQAGAAIVDNKRTVWASNLPEGTSAQKAELIALTQALRLAEGKSINIYTDSRYAFATAHVHGAIYKQRGWLTSAGKDIKNKEEILALLEAIHLPKRVAIIHCPGHQRGTDPVATGNRKADEAAKQAAQSTRILTETTKNAGKRTADGSEFEKRTADGSEFESPKKKAKVE

SEQ ID NO: 7259 - protein, 2218 aa, synthetic construct
MPAAKRVKLDGGDKKYSIGLDIGTNSVGWAVITDEYKVPSKKFKVLGNTDRHSIKKNLIGALLFDSGETAEATRLKRTARRRYTRRKNRICYLQEIFSNEMAKVDDSFFHRLEESFLVEEDKKHERHPIFGNIVDEVAYHEKYPTIYHLRKKLVDSTDKADLRLIYLALAHMIKFRGHFLIEGDLNPDNSDVDKLFIQLVQTYNQLFEENPINASGVDAKAILSARLSKSRRLENLIAQLPGEKKNGLFGNLIALSLGLTPNFKSNFDLAEDAKLQLSKDTYDDDLDNLLAQIGDQYADLFLAAKNLSDAILLSDILRVNTEITKAPLSASMIKRYDEHHQDLTLLKALVRQQLPEKYKEIFFDQSKNGYAGYIDGGASQEEFYKFIKPILEKMDGTEELLVKLNREDLLRKQRTFDNGSIPHQIHLGELHAILRRQEDFYPFLKDNREKIEKILTFRIPYYVGPLARGNSRFAWMTRKSEETITPWNFEEVVDKGASAQSFIERMTNFDKNLPNEKVLPKHSLLYEYFTVYNELTKVKYVTEGMRKPAFLSGEQKKAIVDLLFKTNRKVTVKQLKEDYFKKIECFDSVEISGVEDRFNASLGTYHDLLKIIKDKDFLDNEENEDILEDIVLTLTLFEDREMIEERLKTYAHLFDDKVMKQLKRRRYTGWGRLSRKLINGIRDKQSGKTILDFLKSDGFANRNFMQLIHDDSLTFKEDIQKAQVSGQGDSLHEHIANLAGSPAIKKGILQTVKVVDELVKVMGRHKPENIVIEMARENQTTQKGQKNSRERMKRIEEGIKELGSQILKEHPVENTQLQNEKLYLYYLQNGRDMYVDQELDINRLSDYDVDHIVPQSFLKDDSIDNKVLTRSDKARGKSDNVPSEEVVKKMKNYWRQLLNAKLITQRKFDNLTKAERGGLSELDKAGFIKRQLVETRQITKHVAQILDSRMNTKYDENDKLIREVKVITLKSKLVSDFRKDFQFYKVREINNYHHAHDAYLNAVVGTALIKKYPKLESEFVYGDYKVYDVRKMIAKSEQEIGKATAKYFFYSNIMNFFKTEITLANGEIRKRPLIETNGETGEIVWDKGRDFATVRKVLSMPQVNIVKKTEVQTGGFSKESILPKRNSDKLIARKKDWDPKKYGGFDSPTVAYSVLVVAKVEKGKSKKLKSVKELLGITIMERSSFEKNPIDFLEAKGYKEVKKDLIIKLPKYSLFELENGRKRMLASAGELQKGNELALPSKYVNFLYLASHYEKLKGSPEDNEQKQLFVEQHKHYLDEIIEQISEFSKRVILADANLDKVLSAYNKHRDKPIREQAENIIHLFTLTNLGAPAAFKYFDTTIDRKRYTSTKEVLDATLIHQSITGLYETRIDLSQLGGDGGPAPEAAAKGGSGGTLGDQGSRGSDPLPEPRVTLTVEGIPTEFLVNTGAEHSVLTKPMGKMGSKRTVVAGATGSKVYPWTTKRLLKIGQKQVTHSFLVIPECPAPLLGRDLLTKLKAQIQFSTEGPQVTWEDRPAMCLVLNLEEEYRLHEKPVPPSIDPSWLQLFPMVWAEKAGMGLANQVPPVVVELKSDASPVAVRQYPMSKEAREGIRPHIQRFLDLGILVPCQSPWNTPLLPVKKPGTNDYRPVQDLREVNKRVQDIHPTVPNPYNLLSSLPPSHTWYSVLDLKDAFFCLKLHPNSQPLFAFEWRDPEKGNTGQLTWTRLPQGFKNSPTLFNEALHRDLASFRALNPQVVMLQYVDDLLVAAPTYRDCKEGTRRLLQELSKLGYRVSAKKAQLCREEVTYLGYLLKGGKRWLTPARKATVMKIPTPTTPRQVREFLGTAGFCRLWIPGFASLAAPLYPLTRPKVPFTWTEAHQEAFGRIKEALLSAPALALPDLTKPFALYVDEKEGVARGVLTQTLGPWRRPVAYLSKKLDPVASGWPTCLKAIAAVALLLKDADKLTLGQNVLVIAPHNLESIVRQPPDRWMTNARMTHYQSLLLNERVSFAPPAILNPATLLPVESDDTPIHICSEILAEETGTRPDLRDQPLPGVPAWYTDGSSFIMDGRRQAGAAIVDNKRTVWASNLPEGTSAQKAELIALTQALRLAEGKSINIYTDSRYAFATAHVHGAIYKQRGWLTSAGKDIKNKEEILALLEAIHLPKRVAIIHCPGHQRGTDPVATGNRKADEAAKQAAQSTRILTETTKNAGKRTADGSEFEKRTADGSEFESPKKKAKVE

SEQ ID NO: 7260 - protein, 2218 aa, synthetic construct
MPAAKRVKLDGGDKKYSIGLDIGTNSVGWAVITDEYKVPSKKFKVLGNTDRHSIKKNLIGALLFDSGETAEATRLKRTARRRYTRRKNRICYLQEIFSNEMAKVDDSFFHRLEESFLVEEDKKHERHPIFGNIVDEVAYHEKYPTIYHLRKKLVDSTDKADLRLIYLALAHMIKFRGHFLIEGDLNPDNSDVDKLFIQLVQTYNQLFEENPINASGVDAKAILSARLSKSRRLENLIAQLPGEKKNGLFGNLIALSLGLTPNFKSNFDLAEDAKLQLSKDTYDDDLDNLLAQIGDQYADLFLAAKNLSDAILLSDILRVNTEITKAPLSASMIKRYDEHHQDLTLLKALVRQQLPEKYKEIFFDQSKNGYAGYIDGGASQEEFYKFIKPILEKMDGTEELLVKLNREDLLRKQRTFDNGSIPHQIHLGELHAILRRQEDFYPFLKDNREKIEKILTFRIPYYVGPLARGNSRFAWMTRKSEETITPWNFEEVVDKGASAQSFIERMTNFDKNLPNEKVLPKHSLLYEYFTVYNELTKVKYVTEGMRKPAFLSGEQKKAIVDLLFKTNRKVTVKQLKEDYFKKIECFDSVEISGVEDRFNASLGTYHDLLKIIKDKDFLDNEENEDILEDIVLTLTLFEDREMIEERLKTYAHLFDDKVMKQLKRRRYTGWGRLSRKLINGIRDKQSGKTILDFLKSDGFANRNFMQLIHDDSLTFKEDIQKAQVSGQGDSLHEHIANLAGSPAIKKGILQTVKVVDELVKVMGRHKPENIVIEMARENQTTQKGQKNSRERMKRIEEGIKELGSQILKEHPVENTQLQNEKLYLYYLQNGRDMYVDQELDINRLSDYDVDHIVPQSFLKDDSIDNKVLTRSDKARGKSDNVPSEEVVKKMKNYWRQLLNAKLITQRKFDNLTKAERGGLSELDKAGFIKRQLVETRQITKHVAQILDSRMNTKYDENDKLIREVKVITLKSKLVSDFRKDFQFYKVREINNYHHAHDAYLNAVVGTALIKKYPKLESEFVYGDYKVYDVRKMIAKSEQEIGKATAKYFFYSNIMNFFKTEITLANGEIRKRPLIETNGETGEIVWDKGRDFATVRKVLSMPQVNIVKKTEVQTGGFSKESILPKRNSDKLIARKKDWDPKKYGGFDSPTVAYSVLVVAKVEKGKSKKLKSVKELLGITIMERSSFEKNPIDFLEAKGYKEVKKDLIIKLPKYSLFELENGRKRMLASAGELQKGNELALPSKYVNFLYLASHYEKLKGSPEDNEQKQLFVEQHKHYLDEIIEQISEFSKRVILADANLDKVLSAYNKHRDKPIREQAENIIHLFTLTNLGAPAAFKYFDTTIDRKRYTSTKEVLDATLIHQSITGLYETRIDLSQLGGDGGPAPEAAAKGGSGGTLGDQGSRGSDPLPEPRVTLTVEGIPTEFLVNTGAEHSVLTKPMGKMGSKRTVVAGATGSKVYPWTTKRLLKIGQKQVTHSFLVIPECPAPLLGRDLLTKLKAQIQFSTEGPQVTWEDRPAMCLVLNLEEEYRLHEKPVPPSIDPSWLQLFPMVWAEKAGMGLANQVPPVVVELKSDASPVAVRQYPMSKEAREGIRPHIQRFLDLGILVPCQSPWNTPLLPVKKPGTNDYRPVQDLREVNKRVQDIHPTVPNPYNLLSSLPPSHTWYSVLDLKDAFFCLKLHPNSQPLFAFEWRDPEKGNTGQLTWTRLPQGFKNSPTLFNEALHRDLASFRALNPQVVMLQYVDDLLVAAPTYRDCKEGTRRLLQELSKLGYRVSAKKAQLCREEVTYLGYLLKGGKRWLTPARKATVMKIPTPTTPRQVREFLGKAGFCRLFIPGFASLAAPLYPLTRPKVPFTWTEAHQEAFGRIKEALLSAPALALPDLTKPFALYVDEKEGVARGVLTQTLGPWRRPVAYLSKKLDPVASGWPTCLKAIAAVALLLKDADKLTLGQNVLVIAPHNLESIVRQPPDRWMTNARMTHYQSLLLNERVSFAPPAILNPATLLPVESDDTPIHICSEILAEETGTRPDLRDQPLPGVPAWYTDGSSFIMDGRRQAGAAIVDNKRTVWASNLPEGTSAQKAELIALTQALRLAEGKSINIYTDSRYAFATAHVHGAIYKQRGWLTSAGKDIKNKEEILALLEAIHLPKRVAIIHCPGHQRGTDPVATGNRKADEAAKQAAQSTRILTETTKNAGKRTADGSEFEKRTADGSEFESPKKKAKVE

SEQ ID NO: 7261 - protein, 2096 aa, synthetic construct
MPAAKRVKLDGGDKKYSIGLDIGTNSVGWAVITDEYKVPSKKFKVLGNTDRHSIKKNLIGALLFDSGETAEATRLKRTARRRYTRRKNRICYLQEIFSNEMAKVDDSFFHRLEESFLVEEDKKHERHPIFGNIVDEVAYHEKYPTIYHLRKKLVDSTDKADLRLIYLALAHMIKFRGHFLIEGDLNPDNSDVDKLFIQLVQTYNQLFEENPINASGVDAKAILSARLSKSRRLENLIAQLPGEKKNGLFGNLIALSLGLTPNFKSNFDLAEDAKLQLSKDTYDDDLDNLLAQIGDQYADLFLAAKNLSDAILLSDILRVNTEITKAPLSASMIKRYDEHHQDLTLLKALVRQQLPEKYKEIFFDQSKNGYAGYIDGGASQEEFYKFIKPILEKMDGTEELLVKLNREDLLRKQRTFDNGSIPHQIHLGELHAILRRQEDFYPFLKDNREKIEKILTFRIPYYVGPLARGNSRFAWMTRKSEETITPWNFEEVVDKGASAQSFIERMTNFDKNLPNEKVLPKHSLLYEYFTVYNELTKVKYVTEGMRKPAFLSGEQKKAIVDLLFKTNRKVTVKQLKEDYFKKIECFDSVEISGVEDRFNASLGTYHDLLKIIKDKDFLDNEENEDILEDIVLTLTLFEDREMIEERLKTYAHLFDDKVMKQLKRRRYTGWGRLSRKLINGIRDKQSGKTILDFLKSDGFANRNFMQLIHDDSLTFKEDIQKAQVSGQGDSLHEHIANLAGSPAIKKGILQTVKVVDELVKVMGRHKPENIVIEMARENQTTQKGQKNSRERMKRIEEGIKELGSQILKEHPVENTQLQNEKLYLYYLQNGRDMYVDQELDINRLSDYDVDHIVPQSFLKDDSIDNKVLTRSDKARGKSDNVPSEEVVKKMKNYWRQLLNAKLITQRKFDNLTKAERGGLSELDKAGFIKRQLVETRQITKHVAQILDSRMNTKYDENDKLIREVKVITLKSKLVSDFRKDFQFYKVREINNYHHAHDAYLNAVVGTALIKKYPKLESEFVYGDYKVYDVRKMIAKSEQEIGKATAKYFFYSNIMNFFKTEITLANGEIRKRPLIETNGETGEIVWDKGRDFATVRKVLSMPQVNIVKKTEVQTGGFSKESILPKRNSDKLIARKKDWDPKKYGGFDSPTVAYSVLVVAKVEKGKSKKLKSVKELLGITIMERSSFEKNPIDFLEAKGYKEVKKDLIIKLPKYSLFELENGRKRMLASAGELQKGNELALPSKYVNFLYLASHYEKLKGSPEDNEQKQLFVEQHKHYLDEIIEQISEFSKRVILADANLDKVLSAYNKHRDKPIREQAENIIHLFTLTNLGAPAAFKYFDTTIDRKRYTSTKEVLDATLIHQSITGLYETRIDLSQLGGDGGPAPEAAAKGGSGGTLNLEDEYRLYETSAEPEVSPGSTWLSDFPQAWAETGGMGLAVRQAPLIIPLKATSTPVSIKQYPMSQEAKLGIKPHIQRLLDQGILVPCQSPWNTPLLPVKKPGTNDYRPVQDLREVNKRVEDIHPTVPNPYNLLSGLPPSHRWYTVLDLKDAFFCLRLHPTSQPLFAFEWRDPGMGISGQLTWTRLPQGFKNSPTLFNEALHRDLADFRIQHPDLILLQYVDDILLAATSELDCQQGTRALLLTLGNLGYRASAKKAQLCQKQVKYLGYLLKEGQRWLTEARKETVMGQPTPKTPRQLREFLGTAGFCRLWIPGFAEMAAPLYPLTKPGTLFNWGPDQQKAYQEIKQALLTAPALGLPDLTKPFELFVDEKQGYAKGVLTQKLGPWRRPVAYLSKKLDPVAAGWPPCLRMVAAIAVLRKDAGKLTMGQPLVILAPHAVEALVKQPPDRWLSNARMTHYQAMLLDTDRVQFGPVVALNPATLLPLPEEGAPHDCLEILAETHGTRPDLTDQPIPDADHTWYTDGSSFLQEGQRKAGAAVTTETEVIWARALPAGTSAQRAELIALTQALKMAEGKRLNVYTDSRYAFATAHIHGEIYRRRGWLTSEGREIKNKSEILALLKALFLPKRLSIIHCLGHQKGDSAEARGNRLADQAAREAAIKTPPDTSTLLAGKRTADGSEFEKRTADGSEFESPKKKAKVE

SEQ ID NO: 7262 - protein, 2096 aa, synthetic construct; identical to SEQ ID NO: 4528

SEQ ID NO: 7263 - protein, 2096 aa, synthetic construct
MPAAKRVKLDGGDKKYSIGLDIGTNSVGWAVITDEYKVPSKKFKVLGNTDRHSIKKNLIGALLFDSGETAEATRLKRTARRRYTRRKNRICYLQEIFSNEMAKVDDSFFHRLEESFLVEEDKKHERHPIFGNIVDEVAYHEKYPTIYHLRKKLVDSTDKADLRLIYLALAHMIKFRGHFLIEGDLNPDNSDVDKLFIQLVQTYNQLFEENPINASGVDAKAILSARLSKSRRLENLIAQLPGEKKNGLFGNLIALSLGLTPNFKSNFDLAEDAKLQLSKDTYDDDLDNLLAQIGDQYADLFLAAKNLSDAILLSDILRVNTEITKAPLSASMIKRYDEHHQDLTLLKALVRQQLPEKYKEIFFDQSKNGYAGYIDGGASQEEFYKFIKPILEKMDGTEELLVKLNREDLLRKQRTFDNGSIPHQIHLGELHAILRRQEDFYPFLKDNREKIEKILTFRIPYYVGPLARGNSRFAWMTRKSEETITPWNFEEVVDKGASAQSFIERMTNFDKNLPNEKVLPKHSLLYEYFTVYNELTKVKYVTEGMRKPAFLSGEQKKAIVDLLFKTNRKVTVKQLKEDYFKKIECFDSVEISGVEDRFNASLGTYHDLLKIIKDKDFLDNEENEDILEDIVLTLTLFEDREMIEERLKTYAHLFDDKVMKQLKRRRYTGWGRLSRKLINGIRDKQSGKTILDFLKSDGFANRNFMQLIHDDSLTFKEDIQKAQVSGQGDSLHEHIANLAGSPAIKKGILQTVKVVDELVKVMGRHKPENIVIEMARENQTTQKGQKNSRERMKRIEEGIKELGSQILKEHPVENTQLQNEKLYLYYLQNGRDMYVDQELDINRLSDYDVDHIVPQSFLKDDSIDNKVLTRSDKARGKSDNVPSEEVVKKMKNYWRQLLNAKLITQRKFDNLTKAERGGLSELDKAGFIKRQLVETRQITKHVAQILDSRMNTKYDENDKLIREVKVITLKSKLVSDFRKDFQFYKVREINNYHHAHDAYLNAVVGTALIKKYPKLESEFVYGDYKVYDVRKMIAKSEQEIGKATAKYFFYSNIMNFFKTEITLANGEIRKRPLIETNGETGEIVWDKGRDFATVRKVLSMPQVNIVKKTEVQTGGFSKESILPKRNSDKLIARKKDWDPKKYGGFDSPTVAYSVLVVAKVEKGKSKKLKSVKELLGITIMERSSFEKNPIDFLEAKGYKEVKKDLIIKLPKYSLFELENGRKRMLASAGELQKGNELALPSKYVNFLYLASHYEKLKGSPEDNEQKQLFVEQHKHYLDEIIEQISEFSKRVILADANLDKVLSAYNKHRDKPIREQAENIIHLFTLTNLGAPAAFKYFDTTIDRKRYTSTKEVLDATLIHQSITGLYETRIDLSQLGGDGGPAPEAAAKGGSGGTLGIEDEYRLHETSTEPDVSLGSTWLSDFPQAWAETGGMGLAVRQAPLIIPLKATSTPVSIQQYPMSHEARLGIKPHIQRLLDQGILVPCQSPWNTPLLPVKKPGTNDYRPVQDLREVNKRVEDIHPTVPNPYNLLSGLPPSHQWYTVLDLKDAFFCLRLHPTSQPLFAFEWRDPGMGISGQLTWTRLPQGFKNSPTLFNEALHRDLADFRIQHPDLILLQYVDDILLAATSELDCQQGTRALLQTLGDLGYRASAKKAQICQKQVKYLGYLLREGQRWLTEARKETVMGQPVPKTPRQLREFLGTAGFCRLWIPGFAEMAAPLYPLTKPGTLFSWGPDQQKAYQEIKQALLTAPALGLPDLTKPFELFVDEKQGYAKGVLTQKLGPWRRPVAYLSKKLDPVAAGWPPCLRMVAAIAVLTKDAGKLTMGQPLVILAPHAVEALVKQPPDRWLSNARMTHYQAMLLDTDRVQFGPVVALNPATLLPLPEEGAPHDCLEILAETHGTRPDLTDQPIPDADHTWYTDGSSFLQEGQRKAGAAVTTETEVIWAGALPAGTSAQRAELIALTQALKMAEGKRLNVYTDSRYAFATAHIHGEIYRRRGWLTSEGREIKNKSEILALLKALFLPKRLSIIHCLGHQKGDSAEARGNRLADQAAREAAIKTPPDTSTLLAGKRTADGSEFEKRTADGSEFESPKKKAKVE

SEQ ID NO: 7264 - protein, 2096 aa, synthetic construct
MPAAKRVKLDGGDKKYSIGLDIGTNSVGWAVITDEYKVPSKKFKVLGNTDRHSIKKNLIGALLFDSGETAEATRLKRTARRRYTRRKNRICYLQEIFSNEMAKVDDSFFHRLEESFLVEEDKKHERHPIFGNIVDEVAYHEKYPTIYHLRKKLVDSTDKADLRLIYLALAHMIKFRGHFLIEGDLNPDNSDVDKLFIQLVQTYNQLFEENPINASGVDAKAILSARLSKSRRLENLIAQLPGEKKNGLFGNLIALSLGLTPNFKSNFDLAEDAKLQLSKDTYDDDLDNLLAQIGDQYADLFLAAKNLSDAILLSDILRVNTEITKAPLSASMIKRYDEHHQDLTLLKALVRQQLPEKYKEIFFDQSKNGYAGYIDGGASQEEFYKFIKPILEKMDGTEELLVKLNREDLLRKQRTFDNGSIPHQIHLGELHAILRRQEDFYPFLKDNREKIEKILTFRIPYYVGPLARGNSRFAWMTRKSEETITPWNFEEVVDKGASAQSFIERMTNFDKNLPNEKVLPKHSLLYEYFTVYNELTKVKYVTEGMRKPAFLSGEQKKAIVDLLFKTNRKVTVKQLKEDYFKKIECFDSVEISGVEDRFNASLGTYHDLLKIIKDKDFLDNEENEDILEDIVLTLTLFEDREMIEERLKTYAHLFDDKVMKQLKRRRYTGWGRLSRKLINGIRDKQSGKTILDFLKSDGFANRNFMQLIHDDSLTFKEDIQKAQVSGQGDSLHEHIANLAGSPAIKKGILQTVKVVDELVKVMGRHKPENIVIEMARENQTTQKGQKNSRERMKRIEEGIKELGSQILKEHPVENTQLQNEKLYLYYLQNGRDMYVDQELDINRLSDYDVDHIVPQSFLKDDSIDNKVLTRSDKARGKSDNVPSEEVVKKMKNYWRQLLNAKLITQRKFDNLTKAERGGLSELDKAGFIKRQLVETRQITKHVAQILDSRMNTKYDENDKLIREVKVITLKSKLVSDFRKDFQFYKVREINNYHHAHDAYLNAVVGTALIKKYPKLESEFVYGDYKVYDVRKMIAKSEQEIGKATAKYFFYSNIMNFFKTEITLANGEIRKRPLIETNGETGEIVWDKGRDFATVRKVLSMPQVNIVKKTEVQTGGFSKESILPKRNSDKLIARKKDWDPKKYGGFDSPTVAYSVLVVAKVEKGKSKKLKSVKELLGITIMERSSFEKNPIDFLEAKGYKEVKKDLIIKLPKYSLFELENGRKRMLASAGELQKGNELALPSKYVNFLYLASHYEKLKGSPEDNEQKQLFVEQHKHYLDEIIEQISEFSKRVILADANLDKVLSAYNKHRDKPIREQAENIIHLFTLTNLGAPAAFKYFDTTIDRKRYTSTKEVLDATLIHQSITGLYETRIDLSQLGGDGGPAPEAAAKGGSGGTLNIEDEYRLHETSKGPDVPLGSTWLSDFPQAWAETGGMGLAVRQAPLIIPLKATSTPVSIKQYPMSQEARLGIKPHIQRLLDQGILVPCQSPWNTPLLPVKKPGTNDYRPVQDLREVNKRVEDIHPTVPNPYNLLSGLPPSHQWYTVLDLKDAFFCLRLHPTSQSLFAFEWRDPEMGISGQLTWTRLPQGFKNSPTLFNEALHRDLADFRIQHPDLILLQYVDDLLLAATSELDCQQGTRALLQTLGDLGYRASAKKAQICQKQVKYLGYLLKEGQRWLTEARKETVMGQPTPKTPRQLREFLGTAGFCRLWIPGFAEMAAPLYPLTKPGTLFEWGPDQQKAYQEIKQALLTAPALGLPDLTKPFELFVDEKQGYAKGVLTQKLGPWRRPVAYLSKKLDPVAAGWPPCLRMVAAIAVLTKDAGKLTMGQPLVILAPHAVEALVKQPPDRWLSNARMTHYQALLLDTDRVQFGPIVALNPATLLPLPEEGLQHDCLDILAEAHGTRPDLTDQPLPDADHTWYTDGSSFLQEGQRKAGAAVTTETEVVWAKALPAGTSAQRAELIALTQALKMAEGKKLNVYTDSRYAFATAHIHGEIYRRRGWLTSEGKEIKNKDEILALLKALFLPKRLSIIHCPGHQKGNRAEARGNRMADQAAREVATRETPETSTLLAGKRTADGSEFEKRTADGSEFESPKKKAKVE

SEQ ID NO: 7265 - protein, 2088 aa, synthetic construct; identical to SEQ ID NO: 4529

SEQ ID NO: 7266 - protein, 2090 aa, synthetic construct
MPAAKRVKLDGGDKKYSIGLDIGTNSVGWAVITDEYKVPSKKFKVLGNTDRHSIKKNLIGALLFDSGETAEATRLKRTARRRYTRRKNRICYLQEIFSNEMAKVDDSFFHRLEESFLVEEDKKHERHPIFGNIVDEVAYHEKYPTIYHLRKKLVDSTDKADLRLIYLALAHMIKFRGHFLIEGDLNPDNSDVDKLFIQLVQTYNQLFEENPINASGVDAKAILSARLSKSRRLENLIAQLPGEKKNGLFGNLIALSLGLTPNFKSNFDLAEDAKLQLSKDTYDDDLDNLLAQIGDQYADLFLAAKNLSDAILLSDILRVNTEITKAPLSASMIKRYDEHHQDLTLLKALVRQQLPEKYKEIFFDQSKNGYAGYIDGGASQEEFYKFIKPILEKMDGTEELLVKLNREDLLRKQRTFDNGSIPHQIHLGELHAILRRQEDFYPFLKDNREKIEKILTFRIPYYVGPLARGNSRFAWMTRKSEETITPWNFEEVVDKGASAQSFIERMTNFDKNLPNEKVLPKHSLLYEYFTVYNELTKVKYVTEGMRKPAFLSGEQKKAIVDLLFKTNRKVTVKQLKEDYFKKIECFDSVEISGVEDRFNASLGTYHDLLKIIKDKDFLDNEENEDILEDIVLTLTLFEDREMIEERLKTYAHLFDDKVMKQLKRRRYTGWGRLSRKLINGIRDKQSGKTILDFLKSDGFANRNFMQLIHDDSLTFKEDIQKAQVSGQGDSLHEHIANLAGSPAIKKGILQTVKVVDELVKVMGRHKPENIVIEMARENQTTQKGQKNSRERMKRIEEGIKELGSQILKEHPVENTQLQNEKLYLYYLQNGRDMYVDQELDINRLSDYDVDHIVPQSFLKDDSIDNKVLTRSDKARGKSDNVPSEEVVKKMKNYWRQLLNAKLITQRKFDNLTKAERGGLSELDKAGFIKRQLVETRQITKHVAQILDSRMNTKYDENDKLIREVKVITLKSKLVSDFRKDFQFYKVREINNYHHAHDAYLNAVVGTALIKKYPKLESEFVYGDYKVYDVRKMIAKSEQEIGKATAKYFFYSNIMNFFKTEITLANGEIRKRPLIETNGETGEIVWDKGRDFATVRKVLSMPQVNIVKKTEVQTGGFSKESILPKRNSDKLIARKKDWDPKKYGGFDSPTVAYSVLVVAKVEKGKSKKLKSVKELLGITIMERSSFEKNPIDFLEAKGYKEVKKDLIIKLPKYSLFELENGRKRMLASAGELQKGNELALPSKYVNFLYLASHYEKLKGSPEDNEQKQLFVEQHKHYLDEIIEQISEFSKRVILADANLDKVLSAYNKHRDKPIREQAENIIHLFTLTNLGAPAAFKYFDTTIDRKRYTSTKEVLDATLIHQSITGLYETRIDLSQLGGDGGPAPEAAAKGGSGGTLQLDDEYRLYSPLVKPDQNIQFWLEQFPQAWAETAGMGLAKQVPPQVIQLKASATPVSVRQYPLSKEAQEGIRPHVQRLIQQGILVPVQSPWNTPLLPVRKPGTNDYRPVQDLREVNKRVQDIHPTVPNPYNLLCALPPQRSWYTVLDLKDAFFCLRLHPTSQPLFAFEWRDPGTGRTGQLTWTRLPQGFKNSPTIFDEALHRDLANFRIQHPQVTLLQYVDDLLLAGATKQDCLEGTKALLLELSDLGYRASAKKAQICRREVTYLGYSLRDGQRWLTEARKKTVVQIPAPTTAKQVREFLGTAGFCRLWIPGFATLAAPLYPLTKEKGEFSWAPEHQKAFDAIKKALLSAPALALPDVTKPFTLYVDERKGVARGVLTQTLGPWRRPVAYLSKKLDPVASGWPVCLKAIAAVAILVKDADKLTLGQNITVIAPHALENIVRQPPDRWMTNARMTHYQSLLLTERVTFAPPAALNPATLLPEETDEPVTHDCHQLLIEETGVRKDLTDIPLTGEVLTWFTDGSSYVVEGKRMAGAAVVDGTRTIWASSLPEGTSAQKAELMALTQALRLAEGKSINIYTDSRYAFATAHVHGAIYKQRGLLTSAGREIKNKEEILSLLEALHLPKRLAIIHCPGHQKAKDPISRGNQMADRVAKQAAQGVNLLAGKRTADGSEFEKRTADGSEFESPKKKAKVE

SEQ ID NO: 7267 - protein, 2088 aa, synthetic construct; identical to SEQ ID NO: 4529

SEQ ID NO: 7268 - protein, 2176 aa, synthetic construct
MPAAKRVKLDGGDKKYSIGLDIGTNSVGWAVITDEYKVPSKKFKVLGNTDRHSIKKNLIGALLFDSGETAEATRLKRTARRRYTRRKNRICYLQEIFSNEMAKVDDSFFHRLEESFLVEEDKKHERHPIFGNIVDEVAYHEKYPTIYHLRKKLVDSTDKADLRLIYLALAHMIKFRGHFLIEGDLNPDNSDVDKLFIQLVQTYNQLFEENPINASGVDAKAILSARLSKSRRLENLIAQLPGEKKNGLFGNLIALSLGLTPNFKSNFDLAEDAKLQLSKDTYDDDLDNLLAQIGDQYADLFLAAKNLSDAILLSDILRVNTEITKAPLSASMIKRYDEHHQDLTLLKALVRQQLPEKYKEIFFDQSKNGYAGYIDGGASQEEFYKFIKPILEKMDGTEELLVKLNREDLLRKQRTFDNGSIPHQIHLGELHAILRRQEDFYPFLKDNREKIEKILTFRIPYYVGPLARGNSRFAWMTRKSEETITPWNFEEVVDKGASAQSFIERMTNFDKNLPNEKVLPKHSLLYEYFTVYNELTKVKYVTEGMRKPAFLSGEQKKAIVDLLFKTNRKVTVKQLKEDYFKKIECFDSVEISGVEDRFNASLGTYHDLLKIIKDKDFLDNEENEDILEDIVLTLTLFEDREMIEERLKTYAHLFDDKVMKQLKRRRYTGWGRLSRKLINGIRDKQSGKTILDFLKSDGFANRNFMQLIHDDSLTFKEDIQKAQVSGQGDSLHEHIANLAGSPAIKKGILQTVKVVDELVKVMGRHKPENIVIEMARENQTTQKGQKNSRERMKRIEEGIKELGSQILKEHPVENTQLQNEKLYLYYLQNGRDMYVDQELDINRLSDYDVDHIVPQSFLKDDSIDNKVLTRSDKARGKSDNVPSEEVVKKMKNYWRQLLNAKLITQRKFDNLTKAERGGLSELDKAGFIKRQLVETRQITKHVAQILDSRMNTKYDENDKLIREVKVITLKSKLVSDFRKDFQFYKVREINNYHHAHDAYLNAVVGTALIKKYPKLESEFVYGDYKVYDVRKMIAKSEQEIGKATAKYFFYSNIMNFFKTEITLANGEIRKRPLIETNGETGEIVWDKGRDFATVRKVLSMPQVNIVKKTEVQTGGFSKESILPKRNSDKLIARKKDWDPKKYGGFDSPTVAYSVLVVAKVEKGKSKKLKSVKELLGITIMERSSFEKNPIDFLEAKGYKEVKKDLIIKLPKYSLFELENGRKRMLASAGELQKGNELALPSKYVNFLYLASHYEKLKGSPEDNEQKQLFVEQHKHYLDEIIEQISEFSKRVILADANLDKVLSAYNKHRDKPIREQAENIIHLFTLTNLGAPAAFKYFDTTIDRKRYTSTKEVLDATLIHQSITGLYETRIDLSQLGGDGGPAPEAAAKGGSGGMDPLQLLQPLEAEIKGTKLKAHWNSGATITCVPEAFLEDERPIQTMLIKTIHGEKQQDVYYLTFKVQGRKVEAEVLASPYDYILLNPSDVPWLMKKPLQLTVLVPLHEYQERLLQQTALPKEQKELLQKLFLKYDALWQHWENQVGHRRIKPHNIATGTLAPRPQKQYPINPKAKPSIQIVIDDLLKQGVLIQQNSTMNTPVYPVPKPDGKWRMVLDYREVNKTIPLIAAQNQHSAGILSSIYRGKYKTTLDLTNGFWAHPITPESYWLTAFTWQGKQYCWTRLPQGFLNSPALFTADVVDLLKEIPNVQAYVDDIYISHDDPQEHLEQLEKIFSILLNAGYVVSLKKSEIAQREVEFLGFNITKEGRGLTDTFKQKLLNITPPKDLKQLQSILGLLNFARNFIPNYSELVKPLYTIVANANGKFISWTEDNSNQLQHIISVLNQADNLEERNPETRLIIKVNSSPSAGYIRYYNEGSKRPIMYVNYIFSKAEAKFTQTEKLLTTMHKGLIKAMDLAMGQEILVYSPIVSMTKIQRTPLPERKALPVRWITWMTYLEDPRIQFHYDKSLPELQQIPNVTEDVIAKTKHPSEFAMVFYTDGSAIKHPDVNKSHSAGMGIAQVQFIPEYKIVHQWSIPLGDHTAQLAEIAAVEFACKKALKISGPVLIVTDSFYVAESANKELPYWKSNGFLNNKKKPLRHVSKWKSIAECLQLKPDIIIMHEKGHQQPMTTLHTEGNNLADKLATQGSYVVHAGKRTADGSEFEKRTADGSEFESPKKKAKVE

SEQ ID NO: 7269 - protein, 2087 aa, synthetic construct
MPAAKRVKLDGGDKKYSIGLDIGTNSVGWAVITDEYKVPSKKFKVLGNTDRHSIKKNLIGALLFDSGETAEATRLKRTARRRYTRRKNRICYLQEIFSNEMAKVDDSFFHRLEESFLVEEDKKHERHPIFGNIVDEVAYHEKYPTIYHLRKKLVDSTDKADLRLIYLALAHMIKFRGHFLIEGDLNPDNSDVDKLFIQLVQTYNQLFEENPINASGVDAKAILSARLSKSRRLENLIAQLPGEKKNGLFGNLIALSLGLTPNFKSNFDLAEDAKLQLSKDTYDDDLDNLLAQIGDQYADLFLAAKNLSDAILLSDILRVNTEITKAPLSASMIKRYDEHHQDLTLLKALVRQQLPEKYKEIFFDQSKNGYAGYIDGGASQEEFYKFIKPILEKMDGTEELLVKLNREDLLRKQRTFDNGSIPHQIHLGELHAILRRQEDFYPFLKDNREKIEKILTFRIPYYVGPLARGNSRFAWMTRKSEETITPWNFEEVVDKGASAQSFIERMTNFDKNLPNEKVLPKHSLLYEYFTVYNELTKVKYVTEGMRKPAFLSGEQKKAIVDLLFKTNRKVTVKQLKEDYFKKIECFDSVEISGVEDRFNASLGTYHDLLKIIKDKDFLDNEENEDILEDIVLTLTLFEDREMIEERLKTYAHLFDDKVMKQLKRRRYTGWGRLSRKLINGIRDKQSGKTILDFLKSDGFANRNFMQLIHDDSLTFKEDIQKAQVSGQGDSLHEHIANLAGSPAIKKGILQTVKVVDELVKVMGRHKPENIVIEMARENQTTQKGQKNSRERMKRIEEGIKELGSQILKEHPVENTQLQNEKLYLYYLQNGRDMYVDQELDINRLSDYDVDHIVPQSFLKDDSIDNKVLTRSDKARGKSDNVPSEEVVKKMKNYWRQLLNAKLITQRKFDNLTKAERGGLSELDKAGFIKRQLVETRQITKHVAQILDSRMNTKYDENDKLIREVKVITLKSKLVSDFRKDFQFYKVREINNYHHAHDAYLNAVVGTALIKKYPKLESEFVYGDYKVYDVRKMIAKSEQEIGKATAKYFFYSNIMNFFKTEITLANGEIRKRPLIETNGETGEIVWDKGRDFATVRKVLSMPQVNIVKKTEVQTGGFSKESILPKRNSDKLIARKKDWDPKKYGGFDSPTVAYSVLVVAKVEKGKSKKLKSVKELLGITIMERSSFEKNPIDFLEAKGYKEVKKDLIIKLPKYSLFELENGRKRMLASAGELQKGNELALPSKYVNFLYLASHYEKLKGSPEDNEQKQLFVEQHKHYLDEIIEQISEFSKRVILADANLDKVLSAYNKHRDKPIREQAENIIHLFTLTNLGAPAAFKYFDTTIDRKRYTSTKEVLDATLIHQSITGLYETRIDLSQLGGDGGPAPEAAAKGGSGGIPWLMKKPLQLTTLVPLQEYEERLLKQTMLTGSYKEKLQSLFLKYDALWQHWENQVGHRRIKPHHIATGTVNPRPQKQYPINPKAKASIQTVINDLLKQGVLIQQNSIMNTPVYPVPKPDGKWRMVLDYREVNKTIPLIAAQNQHSAGILSSIFRGKYKTTLDLSNGFWAHSITPESYWLTAFTWLGQQYCWTRLPQGFLNSPALFNADVVDLLKEVPNVQVYVDDIYISHDDPREHLEQLEKVFSLLLNAGYVVSLKKSEIAQHEVEFLGFNITKEGRGLTETFKQKLLNITPPRDLKQLQSILGKLNFARNFIPNFSELVKPLYNIIATAPGKYITWTTDNSQQLQNIISMLNSAENLEERNPEVRLIMKVNTSPSAGYIRFYNEFAKRPIMYLNYVYTKAEVKFTNTEKLLTTIHKGLIKALDLGMGQEILVYSPIVSMTKIQKTPLPERKALPIRWITWMSYLEDPRIQFHYDKTLPELQQVPTVTDDIIAKIKHPSEFSMVFYTDGSAIKHPNVNKSHNAGMGIAQVQFKPEFTVINTWSIPLGDHTAQLAEVAAVEFACKKALKIDGPVLIVTDSFYVAESVNKELPYWQSNGFFNNKKKPLKHVSKWKSIADCIQLKPDIIIIHEKGHQPTASTFHTEGNNLADKLATQGSYVVNAGKRTADGSEFEKRTADGSEFESPKKKAKVE

SEQ ID NO: 7270 - protein, 2176 aa, synthetic construct
MPAAKRVKLDGGDKKYSIGLDIGTNSVGWAVITDEYKVPSKKFKVLGNTDRHSIKKNLIGALLFDSGETAEATRLKRTARRRYTRRKNRICYLQEIFSNEMAKVDDSFFHRLEESFLVEEDKKHERHPIFGNIVDEVAYHEKYPTIYHLRKKLVDSTDKADLRLIYLALAHMIKFRGHFLIEGDLNPDNSDVDKLFIQLVQTYNQLFEENPINASGVDAKAILSARLSKSRRLENLIAQLPGEKKNGLFGNLIALSLGLTPNFKSNFDLAEDAKLQLSKDTYDDDLDNLLAQIGDQYADLFLAAKNLSDAILLSDILRVNTEITKAPLSASMIKRYDEHHQDLTLLKALVRQQLPEKYKEIFFDQSKNGYAGYIDGGASQEEFYKFIKPILEKMDGTEELLVKLNREDLLRKQRTFDNGSIPHQIHLGELHAILRRQEDFYPFLKDNREKIEKILTFRIPYYVGPLARGNSRFAWMTRKSEETITPWNFEEVVDKGASAQSFIERMTNFDKNLPNEKVLPKHSLLYEYFTVYNELTKVKYVTEGMRKPAFLSGEQKKAIVDLLFKTNRKVTVKQLKEDYFKKIECFDSVEISGVEDRFNASLGTYHDLLKIIKDKDFLDNEENEDILEDIVLTLTLFEDREMIEERLKTYAHLFDDKVMKQLKRRRYTGWGRLSRKLINGIRDKQSGKTILDFLKSDGFANRNFMQLIHDDSLTFKEDIQKAQVSGQGDSLHEHIANLAGSPAIKKGILQTVKVVDELVKVMGRHKPENIVIEMARENQTTQKGQKNSRERMKRIEEGIKELGSQILKEHPVENTQLQNEKLYLYYLQNGRDMYVDQELDINRLSDYDVDHIVPQSFLKDDSIDNKVLTRSDKARGKSDNVPSEEVVKKMKNYWRQLLNAKLITQRKFDNLTKAERGGLSELDKAGFIKRQLVETRQITKHVAQILDSRMNTKYDENDKLIREVKVITLKSKLVSDFRKDFQFYKVREINNYHHAHDAYLNAVVGTALIKKYPKLESEFVYGDYKVYDVRKMIAKSEQEIGKATAKYFFYSNIMNFFKTEITLANGEIRKRPLIETNGETGEIVWDKGRDFATVRKVLSMPQVNIVKKTEVQTGGFSKESILPKRNSDKLIARKKDWDPKKYGGFDSPTVAYSVLVVAKVEKGKSKKLKSVKELLGITIMERSSFEKNPIDFLEAKGYKEVKKDLIIKLPKYSLFELENGRKRMLASAGELQKGNELALPSKYVNFLYLASHYEKLKGSPEDNEQKQLFVEQHKHYLDEIIEQISEFSKRVILADANLDKVLSAYNKHRDKPIREQAENIIHLFTLTNLGAPAAFKYFDTTIDRKRYTSTKEVLDATLIHQSITGLYETRIDLSQLGGDGGPAPEAAAKGGSGGMDPLQLLQPLEAEIKGTKLKAHWNSGATITCVPQAFLEEEVPIKNIWIKTIHGEKEQPVYYLTFKIQGRKVEAEVISSPYDYILVSPSDIPWLMKKPLQLTTLVPLQEYEERLLKQTMLTGSYKEKLQSLFLKYDALWQHWENQVGHRRIKPHHIATGTVNPRPQKQYPINPKAKASIQTVINDLLKQGVLIQQNSIMNTPVYPVPKPDGKWRMVLDYREVNKTIPLIAAQNQHSAGILSSIFRGKYKTTLDLSNGFWAHSITPESYWLTAFTWLGQQYCWTRLPQGFLNSPALFNADVVDLLKEVPNVQVYVDDIYISHDDPREHLEQLEKVFSLLLNAGYVVSLKKSEIAQHEVEFLGFNITKEGRGLTETFKQKLLNITPPRDLKQLQSILGKLNFARNFIPNFSELVKPLYNIIATAPGKYITWTTDNSQQLQNIISMLNSAENLEERNPEVRLIMKVNTSPSAGYIRFYNEFAKRPIMYLNYVYTKAEVKFTNTEKLLTTIHKGLIKALDLGMGQEILVYSPIVSMTKIQKTPLPERKALPIRWITWMSYLEDPRIQFHYDKTLPELQQVPTVTDDIIAKIKHPSEFSMVFYTDGSAIKHPNVNKSHNAGMGIAQVQFKPEFTVINTWSIPLGDHTAQLAEVAAVEFACKKALKIDGPVLIVTDSFYVAESVNKELPYWQSNGFFNNKKKPLKHVSKWKSIADCIQLKPDIIIIHEKGHQPTASTFHTEGNNLADKLATQGSYVVNAGKRTADGSEFEKRTADGSEFESPKKKAKVE

SEQ ID NO: 7271 - protein, 2094 aa, synthetic construct
MPAAKRVKLDGGDKKYSIGLDIGTNSVGWAVITDEYKVPSKKFKVLGNTDRHSIKKNLIGALLFDSGETAEATRLKRTARRRYTRRKNRICYLQEIFSNEMAKVDDSFFHRLEESFLVEEDKKHERHPIFGNIVDEVAYHEKYPTIYHLRKKLVDSTDKADLRLIYLALAHMIKFRGHFLIEGDLNPDNSDVDKLFIQLVQTYNQLFEENPINASGVDAKAILSARLSKSRRLENLIAQLPGEKKNGLFGNLIALSLGLTPNFKSNFDLAEDAKLQLSKDTYDDDLDNLLAQIGDQYADLFLAAKNLSDAILLSDILRVNTEITKAPLSASMIKRYDEHHQDLTLLKALVRQQLPEKYKEIFFDQSKNGYAGYIDGGASQEEFYKFIKPILEKMDGTEELLVKLNREDLLRKQRTFDNGSIPHQIHLGELHAILRRQEDFYPFLKDNREKIEKILTFRIPYYVGPLARGNSRFAWMTRKSEETITPWNFEEVVDKGASAQSFIERMTNFDKNLPNEKVLPKHSLLYEYFTVYNELTKVKYVTEGMRKPAFLSGEQKKAIVDLLFKTNRKVTVKQLKEDYFKKIECFDSVEISGVEDRFNASLGTYHDLLKIIKDKDFLDNEENEDILEDIVLTLTLFEDREMIEERLKTYAHLFDDKVMKQLKRRRYTGWGRLSRKLINGIRDKQSGKTILDFLKSDGFANRNFMQLIHDDSLTFKEDIQKAQVSGQGDSLHEHIANLAGSPAIKKGILQTVKVVDELVKVMGRHKPENIVIEMARENQTTQKGQKNSRERMKRIEEGIKELGSQILKEHPVENTQLQNEKLYLYYLQNGRDMYVDQELDINRLSDYDVDHIVPQSFLKDDSIDNKVLTRSDKARGKSDNVPSEEVVKKMKNYWRQLLNAKLITQRKFDNLTKAERGGLSELDKAGFIKRQLVETRQITKHVAQILDSRMNTKYDENDKLIREVKVITLKSKLVSDFRKDFQFYKVREINNYHHAHDAYLNAVVGTALIKKYPKLESEFVYGDYKVYDVRKMIAKSEQEIGKATAKYFFYSNIMNFFKTEITLANGEIRKRPLIETNGETGEIVWDKGRDFATVRKVLSMPQVNIVKKTEVQTGGFSKESILPKRNSDKLIARKKDWDPKKYGGFDSPTVAYSVLVVAKVEKGKSKKLKSVKELLGITIMERSSFEKNPIDFLEAKGYKEVKKDLIIKLPKYSLFELENGRKRMLASAGELQKGNELALPSKYVNFLYLASHYEKLKGSPEDNEQKQLFVEQHKHYLDEIIEQISEFSKRVILADANLDKVLSAYNKHRDKPIREQAENIIHLFTLTNLGAPAAFKYFDTTIDRKRYTSTKEVLDATLIHQSITGLYETRIDLSQLGGDGGPAPEAAAKGGSGGVLNLEEEYRLHEKPVPSSIDPSWLQLFPTVWAERAGMGLANQVPPVVVELRSGASPVAVRQYPMSKEAREGIRPHIQRFLDLGVLVPCQSPWNTPLLPVKKPGTNDYRPVQDLREINKRVQDIHPTVPNPYNLLSSLPPSHTWYSVLDLKDAFFCLKLHPNSQPLFAFEWRDPEKGNTGQLTWTRLPQGFKNSPTLFDEALHRDLAPFRALNPQVVLLQYVDDLLVAAPTYRDCKEGTQKLLQELSKLGYRVSAKKAQLCQKEVTYLGYLLKEGKRWLTPARKATVMKIPPPTTPRQVREFLGTAGFCRLWIPGFASLAAPLYPLTKESIPFIWTEEHQKAFDRIKEALLSAPALALPDLTKPFTLYVDERAGVARGVLTQTLGPWRRPVAYLSKKLDPVASGWPTCLKAVAAVALLLKDADKLTLGQNVTVIASHSLESIVRQPPDRWMTNARMTHYQSLLLNERVSFAPPAVLNPATLLPVESEATPVHRCSEILAEETGTRRDLKDQPLPGVPAWYTDGSSFIAEGKRRAGAAIVDGKRTVWASSLPEGTSAQKAELVALTQALRLAEGKDINIYTDSRYAFATAHIHGAIYKQRGLLTSAGKDIKNKEEILALLEAIHLPKRVAIIHCPGHQKGNDPVATGNRRADEAAKQAALSTRVLAETTKPAGKRTADGSEFEKRTADGSEFESPKKKAKVE

SEQ ID NO: 7272 - protein, 2096 aa, synthetic construct
MPAAKRVKLDGGDKKYSIGLDIGTNSVGWAVITDEYKVPSKKFKVLGNTDRHSIKKNLIGALLFDSGETAEATRLKRTARRRYTRRKNRICYLQEIFSNEMAKVDDSFFHRLEESFLVEEDKKHERHPIFGNIVDEVAYHEKYPTIYHLRKKLVDSTDKADLRLIYLALAHMIKFRGHFLIEGDLNPDNSDVDKLFIQLVQTYNQLFEENPINASGVDAKAILSARLSKSRRLENLIAQLPGEKKNGLFGNLIALSLGLTPNFKSNFDLAEDAKLQLSKDTYDDDLDNLLAQIGDQYADLFLAAKNLSDAILLSDILRVNTEITKAPLSASMIKRYDEHHQDLTLLKALVRQQLPEKYKEIFFDQSKNGYAGYIDGGASQEEFYKFIKPILEKMDGTEELLVKLNREDLLRKQRTFDNGSIPHQIHLGELHAILRRQEDFYPFLKDNREKIEKILTFRIPYYVGPLARGNSRFAWMTRKSEETITPWNFEEVVDKGASAQSFIERMTNFDKNLPNEKVLPKHSLLYEYFTVYNELTKVKYVTEGMRKPAFLSGEQKKAIVDLLFKTNRKVTVKQLKEDYFKKIECFDSVEISGVEDRFNASLGTYHDLLKIIKDKDFLDNEENEDILEDIVLTLTLFEDREMIEERLKTYAHLFDDKVMKQLKRRRYTGWGRLSRKLINGIRDKQSGKTILDFLKSDGFANRNFMQLIHDDSLTFKEDIQKAQVSGQGDSLHEHIANLAGSPAIKKGILQTVKVVDELVKVMGRHKPENIVIEMARENQTTQKGQKNSRERMKRIEEGIKELGSQILKEHPVENTQLQNEKLYLYYLQNGRDMYVDQELDINRLSDYDVDHIVPQSFLKDDSIDNKVLTRSDKARGKSDNVPSEEVVKKMKNYWRQLLNAKLITQRKFDNLTKAERGGLSELDKAGFIKRQLVETRQITKHVAQILDSRMNTKYDENDKLIREVKVITLKSKLVSDFRKDFQFYKVREINNYHHAHDAYLNAVVGTALIKKYPKLESEFVYGDYKVYDVRKMIAKSEQEIGKATAKYFFYSNIMNFFKTEITLANGEIRKRPLIETNGETGEIVWDKGRDFATVRKVLSMPQVNIVKKTEVQTGGFSKESILPKRNSDKLIARKKDWDPKKYGGFDSPTVAYSVLVVAKVEKGKSKKLKSVKELLGITIMERSSFEKNPIDFLEAKGYKEVKKDLIIKLPKYSLFELENGRKRMLASAGELQKGNELALPSKYVNFLYLASHYEKLKGSPEDNEQKQLFVEQHKHYLDEIIEQISEFSKRVILADANLDKVLSAYNKHRDKPIREQAENIIHLFTLTNLGAPAAFKYFDTTIDRKRYTSTKEVLDATLIHQSITGLYETRIDLSQLGGDGGPAPEAAAKGGSGGTLNIEDEYRLHETSKEPDVPLGSTWLSDFPQAWAETGGMGLAVRQAPLIIPLKATSTPVSIKQYPMSQEARLGIKPHIQRLLDQGILVPCQSPWNTPLLPVKKPGTNDYRPVQDLREVNKRVEDIHPTVPNPYNLLSGLPPSHQWYTVLDLKDAFFCLRLHPTSQPLFAFEWRDPEMGISGQLTWTRLPQGFKNSPTLFNEALHRDLADFRIQHPDLILLQYVDDLLLAATSEQDCQRGTRALLQTLGNLGYRASAKKAQICQKQVKYLGYLLKEGQRWLTEARKETVMGQPTPKTPRQLREFLGTAGFCRLWIPGFAEMAAPLYPLTKPGTLFNWGPDQQKAYQEIKQALLTAPALGLPDLTKPFELFVDEKQGYAKGVLTQKLGPWRRPVAYLSKKLDPVAAGWPPCLRMVAAIAVLTKDAGKLTMGQPLVILAPHAVEALVKQPPDRWLSNARMTHYQAMLLDTDRVQFGPVVALNPATLLPLPEKEAPHDCLEILAETHGTRPDLTDQPIPDADYTWYTDGSSFLQEGQRRAGAAVTTETEVIWARALPAGTSAQRAELIALTQALKMAEGKKLNVYTDSRYAFATAHVHGEIYRRRGWLTSEGREIKNKNEILALLKALFLPKRLSIIHCPGHQKGNSAEARGNRMADQAAREAAMKAVLETSTLLAGKRTADGSEFEKRTADGSEFESPKKKAKVE

SEQ ID NO: 7273 - protein, 2098 aa, synthetic construct
MPAAKRVKLDGGDKKYSIGLDIGTNSVGWAVITDEYKVPSKKFKVLGNTDRHSIKKNLIGALLFDSGETAEATRLKRTARRRYTRRKNRICYLQEIFSNEMAKVDDSFFHRLEESFLVEEDKKHERHPIFGNIVDEVAYHEKYPTIYHLRKKLVDSTDKADLRLIYLALAHMIKFRGHFLIEGDLNPDNSDVDKLFIQLVQTYNQLFEENPINASGVDAKAILSARLSKSRRLENLIAQLPGEKKNGLFGNLIALSLGLTPNFKSNFDLAEDAKLQLSKDTYDDDLDNLLAQIGDQYADLFLAAKNLSDAILLSDILRVNTEITKAPLSASMIKRYDEHHQDLTLLKALVRQQLPEKYKEIFFDQSKNGYAGYIDGGASQEEFYKFIKPILEKMDGTEELLVKLNREDLLRKQRTFDNGSIPHQIHLGELHAILRRQEDFYPFLKDNREKIEKILTFRIPYYVGPLARGNSRFAWMTRKSEETITPWNFEEVVDKGASAQSFIERMTNFDKNLPNEKVLPKHSLLYEYFTVYNELTKVKYVTEGMRKPAFLSGEQKKAIVDLLFKTNRKVTVKQLKEDYFKKIECFDSVEISGVEDRFNASLGTYHDLLKIIKDKDFLDNEENEDILEDIVLTLTLFEDREMIEERLKTYAHLFDDKVMKQLKRRRYTGWGRLSRKLINGIRDKQSGKTILDFLKSDGFANRNFMQLIHDDSLTFKEDIQKAQVSGQGDSLHEHIANLAGSPAIKKGILQTVKVVDELVKVMGRHKPENIVIEMARENQTTQKGQKNSRERMKRIEEGIKELGSQILKEHPVENTQLQNEKLYLYYLQNGRDMYVDQELDINRLSDYDVDHIVPQSFLKDDSIDNKVLTRSDKARGKSDNVPSEEVVKKMKNYWRQLLNAKLITQRKFDNLTKAERGGLSELDKAGFIKRQLVETRQITKHVAQILDSRMNTKYDENDKLIREVKVITLKSKLVSDFRKDFQFYKVREINNYHHAHDAYLNAVVGTALIKKYPKLESEFVYGDYKVYDVRKMIAKSEQEIGKATAKYFFYSNIMNFFKTEITLANGEIRKRPLIETNGETGEIVWDKGRDFATVRKVLSMPQVNIVKKTEVQTGGFSKESILPKRNSDKLIARKKDWDPKKYGGFDSPTVAYSVLVVAKVEKGKSKKLKSVKELLGITIMERSSFEKNPIDFLEAKGYKEVKKDLIIKLPKYSLFELENGRKRMLASAGELQKGNELALPSKYVNFLYLASHYEKLKGSPEDNEQKQLFVEQHKHYLDEIIEQISEFSKRVILADANLDKVLSAYNKHRDKPIREQAENIIHLFTLTNLGAPAAFKYFDTTIDRKRYTSTKEVLDATLIHQSITGLYETRIDLSQLGGDGGGGGGSSEAAAKGGTAPLEEEYRLFLEAPIQNVTLLEQWKREIPKVWAEINPPGLASTQAPIHVQLLSTALPVRVRQYPITLEAKRSLRETIRKFRAAGILRPVHSPWNTPLLPVRKSGTSEYRMVQDLREVNKRVETIHPTVPNPYTLLSLLPPDRIWYSVLDLKDAFFCIPLAPESQLIFAFEWADAEEGESGQLTWTRLPQGFKNSPTLFNEALNRDLQGFRLDHPSVSLLQYVDDLLIAADTQAACLSATRDLLMTLAELGYRVSGKKAQLCQEEVTYLGFKIHKGSRSLSNSRTQAILQIPVPKTKRQVREFLGTIGYCRLWIPGFAELAQPLYAATRPGNDPLVWGEKEEEAFQSLKLALTQPPALALPSLDKPFQLFVEETSGAAKGVLTQALGPWKRPVAYLSKRLDPVAAGWPRCLRAIAAAALLTREASKLTFGQDIEITSSHNLESLLRSPPDKWLTNARITQYQVLLLDPPRVRFKQTAALNPATLLPETDDTLPIHHCLDTLDSLTSTRPDLTDQPLAQAEATLFTDGSSYIRDGKRYAGAAVVTLDSVIWAEPLPIGTSAQKAELIALTKALEWSKDKSVNIYTDSRYAFATLHVHGMIYRERGWLTAGGKAIKNAPEILALLTAVWLPKRVAVMHCKGHQKDDAPTSTGNRRADEVAREVAIRPLSTQATISAGKRTADGSEFEKRTADGSEFESPKKKAKVE

SEQ ID NO: 7274 - protein, 2218 aa, synthetic construct
MPAAKRVKLDGGDKKYSIGLDIGTNSVGWAVITDEYKVPSKKFKVLGNTDRHSIKKNLIGALLFDSGETAEATRLKRTARRRYTRRKNRICYLQEIFSNEMAKVDDSFFHRLEESFLVEEDKKHERHPIFGNIVDEVAYHEKYPTIYHLRKKLVDSTDKADLRLIYLALAHMIKFRGHFLIEGDLNPDNSDVDKLFIQLVQTYNQLFEENPINASGVDAKAILSARLSKSRRLENLIAQLPGEKKNGLFGNLIALSLGLTPNFKSNFDLAEDAKLQLSKDTYDDDLDNLLAQIGDQYADLFLAAKNLSDAILLSDILRVNTEITKAPLSASMIKRYDEHHQDLTLLKALVRQQLPEKYKEIFFDQSKNGYAGYIDGGASQEEFYKFIKPILEKMDGTEELLVKLNREDLLRKQRTFDNGSIPHQIHLGELHAILRRQEDFYPFLKDNREKIEKILTFRIPYYVGPLARGNSRFAWMTRKSEETITPWNFEEVVDKGASAQSFIERMTNFDKNLPNEKVLPKHSLLYEYFTVYNELTKVKYVTEGMRKPAFLSGEQKKAIVDLLFKTNRKVTVKQLKEDYFKKIECFDSVEISGVEDRFNASLGTYHDLLKIIKDKDFLDNEENEDILEDIVLTLTLFEDREMIEERLKTYAHLFDDKVMKQLKRRRYTGWGRLSRKLINGIRDKQSGKTILDFLKSDGFANRNFMQLIHDDSLTFKEDIQKAQVSGQGDSLHEHIANLAGSPAIKKGILQTVKVVDELVKVMGRHKPENIVIEMARENQTTQKGQKNSRERMKRIEEGIKELGSQILKEHPVENTQLQNEKLYLYYLQNGRDMYVDQELDINRLSDYDVDHIVPQSFLKDDSIDNKVLTRSDKARGKSDNVPSEEVVKKMKNYWRQLLNAKLITQRKFDNLTKAERGGLSELDKAGFIKRQLVETRQITKHVAQILDSRMNTKYDENDKLIREVKVITLKSKLVSDFRKDFQFYKVREINNYHHAHDAYLNAVVGTALIKKYPKLESEFVYGDYKVYDVRKMIAKSEQEIGKATAKYFFYSNIMNFFKTEITLANGEIRKRPLIETNGETGEIVWDKGRDFATVRKVLSMPQVNIVKKTEVQTGGFSKESILPKRNSDKLIARKKDWDPKKYGGFDSPTVAYSVLVVAKVEKGKSKKLKSVKELLGITIMERSSFEKNPIDFLEAKGYKEVKKDLIIKLPKYSLFELENGRKRMLASAGELQKGNELALPSKYVNFLYLASHYEKLKGSPEDNEQKQLFVEQHKHYLDEIIEQISEFSKRVILADANLDKVLSAYNKHRDKPIREQAENIIHLFTLTNLGAPAAFKYFDTTIDRKRYTSTKEVLDATLIHQSITGLYETRIDLSQLGGDGGGGGGSSEAAAKGGTLGDQGSRGSDPLPEPRVTLTVEGIPTEFLVNTGAEHSVLTKPMGKMGSKRTVVAGATGSKVYPWTTKRLLKIGQKQVTHSFLVIPECPAPLLGRDLLTKLKAQIQFSTEGPQVTWEDRPAMCLVLNLEEEYRLHEKPVPPSIDPSWLQLFPMVWAEKAGMGLANQVPPVVVELKSDASPVAVRQYPMSKEAREGIRPHIQRFLDLGILVPCQSPWNTPLLPVKKPGTNDYRPVQDLREVNKRVQDIHPTVPNPYNLLSSLPPSHTWYSVLDLKDAFFCLKLHPNSQPLFAFEWRDPEKGNTGQLTWTRLPQGFKNSPTLFNEALHRDLASFRALNPQVVMLQYVDDLLVAAPTYRDCKEGTRRLLQELSKLGYRVSAKKAQLCREEVTYLGYLLKGGKRWLTPARKATVMKIPTPTTPRQVREFLGTAGFCRLWIPGFASLAAPLYPLTRPKVPFTWTEAHQEAFGRIKEALLSAPALALPDLTKPFALYVDEKEGVARGVLTQTLGPWRRPVAYLSKKLDPVASGWPTCLKAIAAVALLLKDADKLTLGQNVLVIAPHNLESIVRQPPDRWMTNARMTHYQSLLLNERVSFAPPAILNPATLLPVESDDTPIHICSEILAEETGTRPDLRDQPLPGVPAWYTDGSSFIMDGRRQAGAAIVDNKRTVWASNLPEGTSAQKAELIALTQALRLAEGKSINIYTDSRYAFATAHVHGAIYKQRGWLTSAGKDIKNKEEILALLEAIHLPKRVAIIHCPGHQRGTDPVATGNRKADEAAKQAAQSTRILTETTKNAGKRTADGSEFEKRTADGSEFESPKKKAKVE

SEQ ID NO: 7275 - protein, 2096 aa, synthetic construct
MPAAKRVKLDGGDKKYSIGLDIGTNSVGWAVITDEYKVPSKKFKVLGNTDRHSIKKNLIGALLFDSGETAEATRLKRTARRRYTRRKNRICYLQEIFSNEMAKVDDSFFHRLEESFLVEEDKKHERHPIFGNIVDEVAYHEKYPTIYHLRKKLVDSTDKADLRLIYLALAHMIKFRGHFLIEGDLNPDNSDVDKLFIQLVQTYNQLFEENPINASGVDAKAILSARLSKSRRLENLIAQLPGEKKNGLFGNLIALSLGLTPNFKSNFDLAEDAKLQLSKDTYDDDLDNLLAQIGDQYADLFLAAKNLSDAILLSDILRVNTEITKAPLSASMIKRYDEHHQDLTLLKALVRQQLPEKYKEIFFDQSKNGYAGYIDGGASQEEFYKFIKPILEKMDGTEELLVKLNREDLLRKQRTFDNGSIPHQIHLGELHAILRRQEDFYPFLKDNREKIEKILTFRIPYYVGPLARGNSRFAWMTRKSEETITPWNFEEVVDKGASAQSFIERMTNFDKNLPNEKVLPKHSLLYEYFTVYNELTKVKYVTEGMRKPAFLSGEQKKAIVDLLFKTNRKVTVKQLKEDYFKKIECFDSVEISGVEDRFNASLGTYHDLLKIIKDKDFLDNEENEDILEDIVLTLTLFEDREMIEERLKTYAHLFDDKVMKQLKRRRYTGWGRLSRKLINGIRDKQSGKTILDFLKSDGFANRNFMQLIHDDSLTFKEDIQKAQVSGQGDSLHEHIANLAGSPAIKKGILQTVKVVDELVKVMGRHKPENIVIEMARENQTTQKGQKNSRERMKRIEEGIKELGSQILKEHPVENTQLQNEKLYLYYLQNGRDMYVDQELDINRLSDYDVDHIVPQSFLKDDSIDNKVLTRSDKARGKSDNVPSEEVVKKMKNYWRQLLNAKLITQRKFDNLTKAERGGLSELDKAGFIKRQLVETRQITKHVAQILDSRMNTKYDENDKLIREVKVITLKSKLVSDFRKDFQFYKVREINNYHHAHDAYLNAVVGTALIKKYPKLESEFVYGDYKVYDVRKMIAKSEQEIGKATAKYFFYSNIMNFFKTEITLANGEIRKRPLIETNGETGEIVWDKGRDFATVRKVLSMPQVNIVKKTEVQTGGFSKESILPKRNSDKLIARKKDWDPKKYGGFDSPTVAYSVLVVAKVEKGKSKKLKSVKELLGITIMERSSFEKNPIDFLEAKGYKEVKKDLIIKLPKYSLFELENGRKRMLASAGELQKGNELALPSKYVNFLYLASHYEKLKGSPEDNEQKQLFVEQHKHYLDEIIEQISEFSKRVILADANLDKVLSAYNKHRDKPIREQAENIIHLFTLTNLGAPAAFKYFDTTIDRKRYTSTKEVLDATLIHQSITGLYETRIDLSQLGGDGGGGGGSSEAAAKGGTLNLEDEYRLYETSAEPEVSPGSTWLSDFPQAWAETGGMGLAVRQAPLIIPLKATSTPVSIKQYPMSQEAKLGIKPHIQRLLDQGILVPCQSPWNTPLLPVKKPGTNDYRPVQDLREVNKRVEDIHPTVPNPYNLLSGLPPSHRWYTVLDLKDAFFCLRLHPTSQPLFAFEWRDPGMGISGQLTWTRLPQGFKNSPTLFNEALHRDLADFRIQHPDLILLQYVDDILLAATSELDCQQGTRALLLTLGNLGYRASAKKAQLCQKQVKYLGYLLKEGQRWLTEARKETVMGQPTPKTPRQLREFLGKAGFCRLFIPGFAEMAAPLYPLTKPGTLFNWGPDQQKAYQEIKQALLTAPALGLPDLTKPFELFVDEKQGYAKGVLTQKLGPWRRPVAYLSKKLDPVAAGWPPCLRMVAAIAVLRKDAGKLTMGQPLVILAPHAVEALVKQPPDRWLSNARMTHYQAMLLDTDRVQFGPVVALNPATLLPLPEEGAPHDCLEILAETHGTRPDLTDQPIPDADHTWYTDGSSFLQEGQRKAGAAVTTETEVIWARALPAGTSAQRAELIALTQALKMAEGKRLNVYTDSRYAFATAHIHGEIYRRRGWLTSEGREIKNKSEILALLKALFLPKRLSIIHCLGHQKGDSAEARGNRLADQAAREAAIKTPPDTSTLLAGKRTADGSEFEKRTADGSEFESPKKKAKVE

SEQ ID NO: 7276 - protein, 2096 aa, synthetic construct
MPAAKRVKLDGGDKKYSIGLDIGTNSVGWAVITDEYKVPSKKFKVLGNTDRHSIKKNLIGALLFDSGETAEATRLKRTARRRYTRRKNRICYLQEIFSNEMAKVDDSFFHRLEESFLVEEDKKHERHPIFGNIVDEVAYHEKYPTIYHLRKKLVDSTDKADLRLIYLALAHMIKFRGHFLIEGDLNPDNSDVDKLFIQLVQTYNQLFEENPINASGVDAKAILSARLSKSRRLENLIAQLPGEKKNGLFGNLIALSLGLTPNFKSNFDLAEDAKLQLSKDTYDDDLDNLLAQIGDQYADLFLAAKNLSDAILLSDILRVNTEITKAPLSASMIKRYDEHHQDLTLLKALVRQQLPEKYKEIFFDQSKNGYAGYIDGGASQEEFYKFIKPILEKMDGTEELLVKLNREDLLRKQRTFDNGSIPHQIHLGELHAILRRQEDFYPFLKDNREKIEKILTFRIPYYVGPLARGNSRFAWMTRKSEETITPWNFEEVVDKGASAQSFIERMTNFDKNLPNEKVLPKHSLLYEYFTVYNELTKVKYVTEGMRKPAFLSGEQKKAIVDLLFKTNRKVTVKQLKEDYFKKIECFDSVEISGVEDRFNASLGTYHDLLKIIKDKDFLDNEENEDILEDIVLTLTLFEDREMIEERLKTYAHLFDDKVMKQLKRRRYTGWGRLSRKLINGIRDKQSGKTILDFLKSDGFANRNFMQLIHDDSLTFKEDIQKAQVSGQGDSLHEHIANLAGSPAIKKGILQTVKVVDELVKVMGRHKPENIVIEMARENQTTQKGQKNSRERMKRIEEGIKELGSQILKEHPVENTQLQNEKLYLYYLQNGRDMYVDQELDINRLSDYDVDHIVPQSFLKDDSIDNKVLTRSDKARGKSDNVPSEEVVKKMKNYWRQLLNAKLITQRKFDNLTKAERGGLSELDKAGFIKRQLVETRQITKHVAQILDSRMNTKYDENDKLIREVKVITLKSKLVSDFRKDFQFYKVREINNYHHAHDAYLNAVVGTALIKKYPKLESEFVYGDYKVYDVRKMIAKSEQEIGKATAKYFFYSNIMNFFKTEITLANGEIRKRPLIETNGETGEIVWDKGRDFATVRKVLSMPQVNIVKKTEVQTGGFSKESILPKRNSDKLIARKKDWDPKKYGGFDSPTVAYSVLVVAKVEKGKSKKLKSVKELLGITIMERSSFEKNPIDFLEAKGYKEVKKDLIIKLPKYSLFELENGRKRMLASAGELQKGNELALPSKYVNFLYLASHYEKLKGSPEDNEQKQLFVEQHKHYLDEIIEQISEFSKRVILADANLDKVLSAYNKHRDKPIREQAENIIHLFTLTNLGAPAAFKYFDTTIDRKRYTSTKEVLDATLIHQSITGLYETRIDLSQLGGDGGGGGGSSEAAAKGGTLNIEDEYRLHETSKEPDVSLGSTWLSDFPQAWAETGGMGLAVRQAPLIIPLKATSTPVSIKQYPMSQEARLGIKPHIQRLLDQGILVPCQSPWNTPLLPVKKPGTNDYRPVQDLREVNKRVEDIHPTVPNPYNLLSGLPPSHQWYTVLDLKDAFFCLRLHPTSQPLFAFEWRDPEMGISGQLTWTRLPQGFKNSPTLFNEALHRDLAGFRIQHPDLILLQYVDDLLLAATSELDCQQGTRALLQTLGDLGYRASAKKAQICQKQVKYLGYLLKEGQRWLTEARKETVMGQPIPKTPRQLREFLGTAGFCRLWIPGFAEMAAPLYPLTKPGTLFNWGPDQQKAFQEIKQALLTAPALGLPDLTKPFELFVDEKQGYAKGVLTQKLGPWRRPVAYLSKKLDPVAAGWPPCLRMVAAIAVLTKDAGKLTMGQPLVILAPHAVEALVKQPPDRWLSNARMTHYQALLLDTDRVQFGPVVALNPATLLPLPEEGLQHDCLDILAEAHGTRSDLMDQPLPDADHTWYTDGSSFLQEGQRKAGAAVTTETEVIWARALPAGTSAQRAELIALTQALKMAEGKKLNVYTDSRYAFATAHIHGEIYRRRGWLTSEGKEIKNKDEILALLKALFLPKRLSIIHCPGHQKGNSAEARGNRMADQAAREVATRETPETSTLLAGKRTADGSEFEKRTADGSEFESPKKKAKVE

SEQ ID NO: 7277 - protein, 2096 aa, synthetic construct
MPAAKRVKLDGGDKKYSIGLDIGTNSVGWAVITDEYKVPSKKFKVLGNTDRHSIKKNLIGALLFDSGETAEATRLKRTARRRYTRRKNRICYLQEIFSNEMAKVDDSFFHRLEESFLVEEDKKHERHPIFGNIVDEVAYHEKYPTIYHLRKKLVDSTDKADLRLIYLALAHMIKFRGHFLIEGDLNPDNSDVDKLFIQLVQTYNQLFEENPINASGVDAKAILSARLSKSRRLENLIAQLPGEKKNGLFGNLIALSLGLTPNFKSNFDLAEDAKLQLSKDTYDDDLDNLLAQIGDQYADLFLAAKNLSDAILLSDILRVNTEITKAPLSASMIKRYDEHHQDLTLLKALVRQQLPEKYKEIFFDQSKNGYAGYIDGGASQEEFYKFIKPILEKMDGTEELLVKLNREDLLRKQRTFDNGSIPHQIHLGELHAILRRQEDFYPFLKDNREKIEKILTFRIPYYVGPLARGNSRFAWMTRKSEETITPWNFEEVVDKGASAQSFIERMTNFDKNLPNEKVLPKHSLLYEYFTVYNELTKVKYVTEGMRKPAFLSGEQKKAIVDLLFKTNRKVTVKQLKEDYFKKIECFDSVEISGVEDRFNASLGTYHDLLKIIKDKDFLDNEENEDILEDIVLTLTLFEDREMIEERLKTYAHLFDDKVMKQLKRRRYTGWGRLSRKLINGIRDKQSGKTILDFLKSDGFANRNFMQLIHDDSLTFKEDIQKAQVSGQGDSLHEHIANLAGSPAIKKGILQTVKVVDELVKVMGRHKPENIVIEMARENQTTQKGQKNSRERMKRIEEGIKELGSQILKEHPVENTQLQNEKLYLYYLQNGRDMYVDQELDINRLSDYDVDHIVPQSFLKDDSIDNKVLTRSDKARGKSDNVPSEEVVKKMKNYWRQLLNAKLITQRKFDNLTKAERGGLSELDKAGFIKRQLVETRQITKHVAQILDSRMNTKYDENDKLIREVKVITLKSKLVSDFRKDFQFYKVREINNYHHAHDAYLNAVVGTALIKKYPKLESEFVYGDYKVYDVRKMIAKSEQEIGKATAKYFFYSNIMNFFKTEITLANGEIRKRPLIETNGETGEIVWDKGRDFATVRKVLSMPQVNIVKKTEVQTGGFSKESILPKRNSDKLIARKKDWDPKKYGGFDSPTVAYSVLVVAKVEKGKSKKLKSVKELLGITIMERSSFEKNPIDFLEAKGYKEVKKDLIIKLPKYSLFELENGRKRMLASAGELQKGNELALPSKYVNFLYLASHYEKLKGSPEDNEQKQLFVEQHKHYLDEIIEQISEFSKRVILADANLDKVLSAYNKHRDKPIREQAENIIHLFTLTNLGAPAAFKYFDTTIDRKRYTSTKEVLDATLIHQSITGLYETRIDLSQLGGDGGGGGGSSEAAAKGGTLNIEDEHRLHETSKEPDVSLGSTWLSDFPQAWAETGGMGLAVRQAPLIIPLKATSTPVSIKQYPMSQEARLGIKPHIQRLLDQGILVPCQSPWNTPLLPVKKPGTNDYRPVQDLREVNKRVEDIHPTVPNPYNLLSGLPPSHQWYTVLDLKDAFFCLRLHPTSQPLFAFEWRDPEMGISGQLTWTRLPQGFKNSPTLFDEALHRDLADFRIQHPDLILLQYVDDLLLAATSELDCQQGTRALLQTLGNLGYRASAKKAQICQKQVKYLGYLLKEGQRWLTEARKETVMGQPTPKTPRQLREFLGTAGFCRLWIPGFAEMAAPLYPLTKTGTLFNWGPDQQKAYQEIKQALLTAPALGLPDLTKPFELFVDEKQGYAKGVLTQKLGPWRRPVAYLSKKLDPVAAGWPPCLRMVAAIAVLTKDAGKLTMGQPLVILAPHAVEALVKQPPDRWLSNARMTHYQALLLDTDRVQFGPVVALNPATLLPLPEEGLQHNCLDILAEAHGTRPDLTDQPLPDADHTWYTDGSSLLQEGQRKAGAAVTTETEVIWAKALPAGTSAQRAELIALTQALKMAEGKKLNVYTDSRYAFATAHIHGEIYRRRGLLTSEGKEIKNKDEILALLKALFLPKRLSIIHCPGHQKGHSAEARGNRMADQAARKAAITETPDTSTLLAGKRTADGSEFEKRTADGSEFESPKKKAKVE

SEQ ID NO: 7278 - protein, 2088 aa, synthetic construct
MPAAKRVKLDGGDKKYSIGLDIGTNSVGWAVITDEYKVPSKKFKVLGNTDRHSIKKNLIGALLFDSGETAEATRLKRTARRRYTRRKNRICYLQEIFSNEMAKVDDSFFHRLEESFLVEEDKKHERHPIFGNIVDEVAYHEKYPTIYHLRKKLVDSTDKADLRLIYLALAHMIKFRGHFLIEGDLNPDNSDVDKLFIQLVQTYNQLFEENPINASGVDAKAILSARLSKSRRLENLIAQLPGEKKNGLFGNLIALSLGLTPNFKSNFDLAEDAKLQLSKDTYDDDLDNLLAQIGDQYADLFLAAKNLSDAILLSDILRVNTEITKAPLSASMIKRYDEHHQDLTLLKALVRQQLPEKYKEIFFDQSKNGYAGYIDGGASQEEFYKFIKPILEKMDGTEELLVKLNREDLLRKQRTFDNGSIPHQIHLGELHAILRRQEDFYPFLKDNREKIEKILTFRIPYYVGPLARGNSRFAWMTRKSEETITPWNFEEVVDKGASAQSFIERMTNFDKNLPNEKVLPKHSLLYEYFTVYNELTKVKYVTEGMRKPAFLSGEQKKAIVDLLFKTNRKVTVKQLKEDYFKKIECFDSVEISGVEDRFNASLGTYHDLLKIIKDKDFLDNEENEDILEDIVLTLTLFEDREMIEERLKTYAHLFDDKVMKQLKRRRYTGWGRLSRKLINGIRDKQSGKTILDFLKSDGFANRNFMQLIHDDSLTFKEDIQKAQVSGQGDSLHEHIANLAGSPAIKKGILQTVKVVDELVKVMGRHKPENIVIEMARENQTTQKGQKNSRERMKRIEEGIKELGSQILKEHPVENTQLQNEKLYLYYLQNGRDMYVDQELDINRLSDYDVDHIVPQSFLKDDSIDNKVLTRSDKARGKSDNVPSEEVVKKMKNYWRQLLNAKLITQRKFDNLTKAERGGLSELDKAGFIKRQLVETRQITKHVAQILDSRMNTKYDENDKLIREVKVITLKSKLVSDFRKDFQFYKVREINNYHHAHDAYLNAVVGTALIKKYPKLESEFVYGDYKVYDVRKMIAKSEQEIGKATAKYFFYSNIMNFFKTEITLANGEIRKRPLIETNGETGEIVWDKGRDFATVRKVLSMPQVNIVKKTEVQTGGFSKESILPKRNSDKLIARKKDWDPKKYGGFDSPTVAYSVLVVAKVEKGKSKKLKSVKELLGITIMERSSFEKNPIDFLEAKGYKEVKKDLIIKLPKYSLFELENGRKRMLASAGELQKGNELALPSKYVNFLYLASHYEKLKGSPEDNEQKQLFVEQHKHYLDEIIEQISEFSKRVILADANLDKVLSAYNKHRDKPIREQAENIIHLFTLTNLGAPAAFKYFDTTIDRKRYTSTKEVLDATLIHQSITGLYETRIDLSQLGGDGGGGGGSSEAAAKGGLDDEYRLYSPLVKPDQNIQFWLEQFPQAWAETAGMGLAKQVPPQVIQLKASATPVSVRQYPLSKEAQEGIRPHVQRLIQQGILVPVQSPWNTPLLPVRKPGTNDYRPVQDLREVNKRVQDIHPTVPNPYNLLCALPPQRSWYTVLDLKDAFFCLRLHPTSQPLFAFEWRDPGTGRTGQLTWTRLPQGFKNSPTIFNEALHRDLANFRIQHPQVTLLQYVDDLLLAGATKQDCLEGTKALLLELSDLGYRASAKKAQICRREVTYLGYSLRDGQRWLTEARKKTVVQIPAPTTAKQVREFLGKAGFCRLFIPGFATLAAPLYPLTKPKGEFSWAPEHQKAFDAIKKALLSAPALALPDVTKPFTLYVDERKGVARGVLTQTLGPWRRPVAYLSKKLDPVASGWPVCLKAIAAVAILVKDADKLTLGQNITVIAPHALENIVRQPPDRWMTNARMTHYQSLLLTERVTFAPPAALNPATLLPEETDEPVTHDCHQLLIEETGVRKDLTDIPLTGEVLTWFTDGSSYVVEGKRMAGAAVVDGTRTIWASSLPEGTSAQKAELMALTQALRLAEGKSINIYTDSRYAFATAHVHGAIYKQRGWLTSAGREIKNKEEILSLLEALHLPKRLAIIHCPGHQKAKDPISRGNQMADRVAKQAAQGVNLLPAGKRTADGSEFEKRTADGSEFESPKKKAKVE

SEQ ID NO: 7279 - protein, 2088 aa, synthetic construct; identical to SEQ ID NO: 7278

SEQ ID NO: 7280 - protein, 2090 aa, synthetic construct
MPAAKRVKLDGGDKKYSIGLDIGTNSVGWAVITDEYKVPSKKFKVLGNTDRHSIKKNLIGALLFDSGETAEATRLKRTARRRYTRRKNRICYLQEIFSNEMAKVDDSFFHRLEESFLVEEDKKHERHPIFGNIVDEVAYHEKYPTIYHLRKKLVDSTDKADLRLIYLALAHMIKFRGHFLIEGDLNPDNSDVDKLFIQLVQTYNQLFEENPINASGVDAKAILSARLSKSRRLENLIAQLPGEKKNGLFGNLIALSLGLTPNFKSNFDLAEDAKLQLSKDTYDDDLDNLLAQIGDQYADLFLAAKNLSDAILLSDILRVNTEITKAPLSASMIKRYDEHHQDLTLLKALVRQQLPEKYKEIFFDQSKNGYAGYIDGGASQEEFYKFIKPILEKMDGTEELLVKLNREDLLRKQRTFDNGSIPHQIHLGELHAILRRQEDFYPFLKDNREKIEKILTFRIPYYVGPLARGNSRFAWMTRKSEETITPWNFEEVVDKGASAQSFIERMTNFDKNLPNEKVLPKHSLLYEYFTVYNELTKVKYVTEGMRKPAFLSGEQKKAIVDLLFKTNRKVTVKQLKEDYFKKIECFDSVEISGVEDRFNASLGTYHDLLKIIKDKDFLDNEENEDILEDIVLTLTLFEDREMIEERLKTYAHLFDDKVMKQLKRRRYTGWGRLSRKLINGIRDKQSGKTILDFLKSDGFANRNFMQLIHDDSLTFKEDIQKAQVSGQGDSLHEHIANLAGSPAIKKGILQTVKVVDELVKVMGRHKPENIVIEMARENQTTQKGQKNSRERMKRIEEGIKELGSQILKEHPVENTQLQNEKLYLYYLQNGRDMYVDQELDINRLSDYDVDHIVPQSFLKDDSIDNKVLTRSDKARGKSDNVPSEEVVKKMKNYWRQLLNAKLITQRKFDNLTKAERGGLSELDKAGFIKRQLVETRQITKHVAQILDSRMNTKYDENDKLIREVKVITLKSKLVSDFRKDFQFYKVREINNYHHAHDAYLNAVVGTALIKKYPKLESEFVYGDYKVYDVRKMIAKSEQEIGKATAKYFFYSNIMNFFKTEITLANGEIRKRPLIETNGETGEIVWDKGRDFATVRKVLSMPQVNIVKKTEVQTGGFSKESILPKRNSDKLIARKKDWDPKKYGGFDSPTVAYSVLVVAKVEKGKSKKLKSVKELLGITIMERSSFEKNPIDFLEAKGYKEVKKDLIIKLPKYSLFELENGRKRMLASAGELQKGNELALPSKYVNFLYLASHYEKLKGSPEDNEQKQLFVEQHKHYLDEIIEQISEFSKRVILADANLDKVLSAYNKHRDKPIREQAENIIHLFTLTNLGAPAAFKYFDTTIDRKRYTSTKEVLDATLIHQSITGLYETRIDLSQLGGDGGGGGGSSEAAAKGGTLQLDDEYRLYSPLVKPDQNIQFWLEQFPQAWAETAGMGLAKQVPPQVIQLKASATPVSVRQYPLSKEAQEGIRPHVQRLIQQGILVPVQSPWNTPLLPVRKPGTNDYRPVQDLREVNKRVQDIHPTVPNPYNLLCALPPQRSWYTVLDLKDAFFCLRLHPTSQPLFAFEWRDPGTGRTGQLTWTRLPQGFKNSPTIFDEALHRDLANFRIQHPQVTLLQYVDDLLLAGATKQDCLEGTKALLLELSDLGYRASAKKAQICRREVTYLGYSLRDGQRWLTEARKKTVVQIPAPTTAKQVREFLGTAGFCRLWIPGFATLAAPLYPLTKEKGEFSWAPEHQKAFDAIKKALLSAPALALPDVTKPFTLYVDERKGVARGVLTQTLGPWRRPVAYLSKKLDPVASGWPVCLKAIAAVAILVKDADKLTLGQNITVIAPHALENIVRQPPDRWMTNARMTHYQSLLLTERVTFAPPAALNPATLLPEETDEPVTHDCHQLLIEETGVRKDLTDIPLTGEVLTWFTDGSSYVVEGKRMAGAAVVDGTRTIWASSLPEGTSAQKAELMALTQALRLAEGKSINIYTDSRYAFATAHVHGAIYKQRGLLTSAGREIKNKEEILSLLEALHLPKRLAIIHCPGHQKAKDPISRGNQMADRVAKQAAQGVNLLAGKRTADGSEFEKRTADGSEFESPKKKAKVE

SEQ ID NO: 7281 - protein, 2094 aa, synthetic construct
MPAAKRVKLDGGDKKYSIGLDIGTNSVGWAVITDEYKVPSKKFKVLGNTDRHSIKKNLIGALLFDSGETAEATRLKRTARRRYTRRKNRICYLQEIFSNEMAKVDDSFFHRLEESFLVEEDKKHERHPIFGNIVDEVAYHEKYPTIYHLRKKLVDSTDKADLRLIYLALAHMIKFRGHFLIEGDLNPDNSDVDKLFIQLVQTYNQLFEENPINASGVDAKAILSARLSKSRRLENLIAQLPGEKKNGLFGNLIALSLGLTPNFKSNFDLAEDAKLQLSKDTYDDDLDNLLAQIGDQYADLFLAAKNLSDAILLSDILRVNTEITKAPLSASMIKRYDEHHQDLTLLKALVRQQLPEKYKEIFFDQSKNGYAGYIDGGASQEEFYKFIKPILEKMDGTEELLVKLNREDLLRKQRTFDNGSIPHQIHLGELHAILRRQEDFYPFLKDNREKIEKILTFRIPYYVGPLARGNSRFAWMTRKSEETITPWNFEEVVDKGASAQSFIERMTNFDKNLPNEKVLPKHSLLYEYFTVYNELTKVKYVTEGMRKPAFLSGEQKKAIVDLLFKTNRKVTVKQLKEDYFKKIECFDSVEISGVEDRFNASLGTYHDLLKIIKDKDFLDNEENEDILEDIVLTLTLFEDREMIEERLKTYAHLFDDKVMKQLKRRRYTGWGRLSRKLINGIRDKQSGKTILDFLKSDGFANRNFMQLIHDDSLTFKEDIQKAQVSGQGDSLHEHIANLAGSPAIKKGILQTVKVVDELVKVMGRHKPENIVIEMARENQTTQKGQKNSRERMKRIEEGIKELGSQILKEHPVENTQLQNEKLYLYYLQNGRDMYVDQELDINRLSDYDVDHIVPQSFLKDDSIDNKVLTRSDKARGKSDNVPSEEVVKKMKNYWRQLLNAKLITQRKFDNLTKAERGGLSELDKAGFIKRQLVETRQITKHVAQILDSRMNTKYDENDKLIREVKVITLKSKLVSDFRKDFQFYKVREINNYHHAHDAYLNAVVGTALIKKYPKLESEFVYGDYKVYDVRKMIAKSEQEIGKATAKYFFYSNIMNFFKTEITLANGEIRKRPLIETNGETGEIVWDKGRDFATVRKVLSMPQVNIVKKTEVQTGGFSKESILPKRNSDKLIARKKDWDPKKYGGFDSPTVAYSVLVVAKVEKGKSKKLKSVKELLGITIMERSSFEKNPIDFLEAKGYKEVKKDLIIKLPKYSLFELENGRKRMLASAGELQKGNELALPSKYVNFLYLASHYEKLKGSPEDNEQKQLFVEQHKHYLDEIIEQISEFSKRVILADANLDKVLSAYNKHRDKPIREQAENIIHLFTLTNLGAPAAFKYFDTTIDRKRYTSTKEVLDATLIHQSITGLYETRIDLSQLGGDGGGGGGSSEAAAKGGVLNLEEEYRLHEKPVPSSIDPSWLQLFPTVWAERAGMGLANQVPPVVVELRSGASPVAVRQYPMSKEAREGIRPHIQRFLDLGVLVPCQSPWNTPLLPVKKPGTNDYRPVQDLREINKRVQDIHPTVPNPYNLLSSLPPSHTWYSVLDLKDAFFCLKLHPNSQPLFAFEWRDPEKGNTGQLTWTRLPQGFKNSPTLFNEALHRDLAPFRALNPQVVLLQYVDDLLVAAPTYRDCKEGTQKLLQELSKLGYRVSAKKAQLCQKEVTYLGYLLKEGKRWLTPARKATVMKIPPPTTPRQVREFLGKAGFCRLFIPGFASLAAPLYPLTKPSIPFIWTEEHQKAFDRIKEALLSAPALALPDLTKPFTLYVDERAGVARGVLTQTLGPWRRPVAYLSKKLDPVASGWPTCLKAVAAVALLLKDADKLTLGQNVTVIASHSLESIVRQPPDRWMTNARMTHYQSLLLNERVSFAPPAVLNPATLLPVESEATPVHRCSEILAEETGTRRDLKDQPLPGVPAWYTDGSSFIAEGKRRAGAAIVDGKRTVWASSLPEGTSAQKAELVALTQALRLAEGKDINIYTDSRYAFATAHIHGAIYKQRGWLTSAGKDIKNKEEILALLEAIHLPKRVAIIHCPGHQKGNDPVATGNRRADEAAKQAALSTRVLAETTKPAGKRTADGSEFEKRTADGSEFESPKKKAKVE

SEQ ID NO: 7282 - protein, 2096 aa, synthetic construct
MPAAKRVKLDGGDKKYSIGLDIGTNSVGWAVITDEYKVPSKKFKVLGNTDRHSIKKNLIGALLFDSGETAEATRLKRTARRRYTRRKNRICYLQEIFSNEMAKVDDSFFHRLEESFLVEEDKKHERHPIFGNIVDEVAYHEKYPTIYHLRKKLVDSTDKADLRLIYLALAHMIKFRGHFLIEGDLNPDNSDVDKLFIQLVQTYNQLFEENPINASGVDAKAILSARLSKSRRLENLIAQLPGEKKNGLFGNLIALSLGLTPNFKSNFDLAEDAKLQLSKDTYDDDLDNLLAQIGDQYADLFLAAKNLSDAILLSDILRVNTEITKAPLSASMIKRYDEHHQDLTLLKALVRQQLPEKYKEIFFDQSKNGYAGYIDGGASQEEFYKFIKPILEKMDGTEELLVKLNREDLLRKQRTFDNGSIPHQIHLGELHAILRRQEDFYPFLKDNREKIEKILTFRIPYYVGPLARGNSRFAWMTRKSEETITPWNFEEVVDKGASAQSFIERMTNFDKNLPNEKVLPKHSLLYEYFTVYNELTKVKYVTEGMRKPAFLSGEQKKAIVDLLFKTNRKVTVKQLKEDYFKKIECFDSVEISGVEDRFNASLGTYHDLLKIIKDKDFLDNEENEDILEDIVLTLTLFEDREMIEERLKTYAHLFDDKVMKQLKRRRYTGWGRLSRKLINGIRDKQSGKTILDFLKSDGFANRNFMQLIHDDSLTFKEDIQKAQVSGQGDSLHEHIANLAGSPAIKKGILQTVKVVDELVKVMGRHKPENIVIEMARENQTTQKGQKNSRERMKRIEEGIKELGSQILKEHPVENTQLQNEKLYLYYLQNGRDMYVDQELDINRLSDYDVDHIVPQSFLKDDSIDNKVLTRSDKARGKSDNVPSEEVVKKMKNYWRQLLNAKLITQRKFDNLTKAERGGLSELDKAGFIKRQLVETRQITKHVAQILDSRMNTKYDENDKLIREVKVITLKSKLVSDFRKDFQFYKVREINNYHHAHDAYLNAVVGTALIKKYPKLESEFVYGDYKVYDVRKMIAKSEQEIGKATAKYFFYSNIMNFFKTEITLANGEIRKRPLIETNGETGEIVWDKGRDFATVRKVLSMPQVNIVKKTEVQTGGFSKESILPKRNSDKLIARKKDWDPKKYGGFDSPTVAYSVLVVAKVEKGKSKKLKSVKELLGITIMERSSFEKNPIDFLEAKGYKEVKKDLIIKLPKYSLFELENGRKRMLASAGELQKGNELALPSKYVNFLYLASHYEKLKGSPEDNEQKQLFVEQHKHYLDEIIEQISEFSKRVILADANLDKVLSAYNKHRDKPIREQAENIIHLFTLTNLGAPAAFKYFDTTIDRKRYTSTKEVLDATLIHQSITGLYETRIDLSQLGGDGGGGGGSSEAAAKGGTLNIEDEYRLHETSKEPDVPLGSTWLSDFPQAWAETGGMGLAVRQAPLIIPLKATSTPVSIKQYPMSQEARLGIKPHIQRLLDQGILVPCQSPWNTPLLPVKKPGTNDYRPVQDLREVNKRVEDIHPTVPNPYNLLSGLPPSHQWYTVLDLKDAFFCLRLHPTSQPLFAFEWRDPEMGISGQLTWTRLPQGFKNSPTLFNEALHRDLADFRIQHPDLILLQYVDDLLLAATSEQDCQRGTRALLQTLGNLGYRASAKKAQICQKQVKYLGYLLKEGQRWLTEARKETVMGQPTPKTPRQLREFLGTAGFCRLWIPGFAEMAAPLYPLTKPGTLFNWGPDQQKAYQEIKQALLTAPALGLPDLTKPFELFVDEKQGYAKGVLTQKLGPWRRPVAYLSKKLDPVAAGWPPCLRMVAAIAVLTKDAGKLTMGQPLVILAPHAVEALVKQPPDRWLSNARMTHYQAMLLDTDRVQFGPVVALNPATLLPLPEKEAPHDCLEILAETHGTRPDLTDQPIPDADYTWYTDGSSFLQEGQRRAGAAVTTETEVIWARALPAGTSAQRAELIALTQALKMAEGKKLNVYTDSRYAFATAHVHGEIYRRRGWLTSEGREIKNKNEILALLKALFLPKRLSIIHCPGHQKGNSAEARGNRMADQAAREAAMKAVLETSTLLAGKRTADGSEFEKRTADGSEFESPKKKAKVE

SEQ ID NO: 7283 - protein, 2173 aa, synthetic construct
MPAAKRVKLDGGDKKYSIGLDIGTNSVGWAVITDEYKVPSKKFKVLGNTDRHSIKKNLIGALLFDSGETAEATRLKRTARRRYTRRKNRICYLQEIFSNEMAKVDDSFFHRLEESFLVEEDKKHERHPIFGNIVDEVAYHEKYPTIYHLRKKLVDSTDKADLRLIYLALAHMIKFRGHFLIEGDLNPDNSDVDKLFIQLVQTYNQLFEENPINASGVDAKAILSARLSKSRRLENLIAQLPGEKKNGLFGNLIALSLGLTPNFKSNFDLAEDAKLQLSKDTYDDDLDNLLAQIGDQYADLFLAAKNLSDAILLSDILRVNTEITKAPLSASMIKRYDEHHQDLTLLKALVRQQLPEKYKEIFFDQSKNGYAGYIDGGASQEEFYKFIKPILEKMDGTEELLVKLNREDLLRKQRTFDNGSIPHQIHLGELHAILRRQEDFYPFLKDNREKIEKILTFRIPYYVGPLARGNSRFAWMTRKSEETITPWNFEEVVDKGASAQSFIERMTNFDKNLPNEKVLPKHSLLYEYFTVYNELTKVKYVTEGMRKPAFLSGEQKKAIVDLLFKTNRKVTVKQLKEDYFKKIECFDSVEISGVEDRFNASLGTYHDLLKIIKDKDFLDNEENEDILEDIVLTLTLFEDREMIEERLKTYAHLFDDKVMKQLKRRRYTGWGRLSRKLINGIRDKQSGKTILDFLKSDGFANRNFMQLIHDDSLTFKEDIQKAQVSGQGDSLHEHIANLAGSPAIKKGILQTVKVVDELVKVMGRHKPENIVIEMARENQTTQKGQKNSRERMKRIEEGIKELGSQILKEHPVENTQLQNEKLYLYYLQNGRDMYVDQELDINRLSDYDVDHIVPQSFLKDDSIDNKVLTRSDKARGKSDNVPSEEVVKKMKNYWRQLLNAKLITQRKFDNLTKAERGGLSELDKAGFIKRQLVETRQITKHVAQILDSRMNTKYDENDKLIREVKVITLKSKLVSDFRKDFQFYKVREINNYHHAHDAYLNAVVGTALIKKYPKLESEFVYGDYKVYDVRKMIAKSEQEIGKATAKYFFYSNIMNFFKTEITLANGEIRKRPLIETNGETGEIVWDKGRDFATVRKVLSMPQVNIVKKTEVQTGGFSKESILPKRNSDKLIARKKDWDPKKYGGFDSPTVAYSVLVVAKVEKGKSKKLKSVKELLGITIMERSSFEKNPIDFLEAKGYKEVKKDLIIKLPKYSLFELENGRKRMLASAGELQKGNELALPSKYVNFLYLASHYEKLKGSPEDNEQKQLFVEQHKHYLDEIIEQISEFSKRVILADANLDKVLSAYNKHRDKPIREQAENIIHLFTLTNLGAPAAFKYFDTTIDRKRYTSTKEVLDATLIHQSITGLYETRIDLSQLGGDGGGGGEAAAKGSSGGMDLLKPLTVERKGVKIKGYWNSQADITCVPKDLLQGEEPVRQQNVTTIHGTQEGDVYYVNLKIDGRRINTEVIGTTLDYAIITPGDVPWILKKPLELTIKLDLEEQQGTLLNNSILSKKGKEELKQLFEKYSALWQSWENQVGHRRIRPHKIATGTVKPTPQKQYHINPKAKPDIQIVINDLLKQGVLIQKESTMNTPVYPVPKPNGRWRMVLDYRAVNKVTPLIAVQNQHSYGILGSLFKGRYKTTIDLSNGFWAHPIVPEDYWITAFTWQGKQYCWTVLPQGFLNSPGLFNGDVVDLLQGIPNVEVYVDDVYISHDSEKEHLEYLDILFNRLKEAGYIISLKKSNIANSIVDFLGFQITNEGRGLTDTFKEKLENITAPTTLKQLQSILGKLNFARNFIPDFTELIAPLYALIPKSPKNYVPWQIEHSTTLETLITKLNGAEYLQGRKGDKTLIMKVNASYTTGYIRYYNEGEKKPISYVSIVFSKTELKFTELEKLLTTVHKGLLKALDLSMGQNIHVYSPIVSMQNIQKTPQTAKKALASRWLSWLSYLEDPRIRFFYDPQMPALKDLPAVDTGKDNKKHPSNFQHIFYTDGSAITSPTKEGHLNAGMGIVYFINKDGNLQKQQEWSISLGNHTAQFAEIAAFEFALKKCLPLGGNILVVTDSNYVAKAYNEELDVWASNGFVNNRKKPLKHISKWKSVADLKRLRPDVVVTHEPGHQKLDSSPHAYGNNLADQLATQASFKVHAGKRTADGSEFEKRTADGSEFESPKKKAKVE

SEQ ID NO: 7284 - protein, 2095 aa, synthetic construct
MPAAKRVKLDGGDKKYSIGLDIGTNSVGWAVITDEYKVPSKKFKVLGNTDRHSIKKNLIGALLFDSGETAEATRLKRTARRRYTRRKNRICYLQEIFSNEMAKVDDSFFHRLEESFLVEEDKKHERHPIFGNIVDEVAYHEKYPTIYHLRKKLVDSTDKADLRLIYLALAHMIKFRGHFLIEGDLNPDNSDVDKLFIQLVQTYNQLFEENPINASGVDAKAILSARLSKSRRLENLIAQLPGEKKNGLFGNLIALSLGLTPNFKSNFDLAEDAKLQLSKDTYDDDLDNLLAQIGDQYADLFLAAKNLSDAILLSDILRVNTEITKAPLSASMIKRYDEHHQDLTLLKALVRQQLPEKYKEIFFDQSKNGYAGYIDGGASQEEFYKFIKPILEKMDGTEELLVKLNREDLLRKQRTFDNGSIPHQIHLGELHAILRRQEDFYPFLKDNREKIEKILTFRIPYYVGPLARGNSRFAWMTRKSEETITPWNFEEVVDKGASAQSFIERMTNFDKNLPNEKVLPKHSLLYEYFTVYNELTKVKYVTEGMRKPAFLSGEQKKAIVDLLFKTNRKVTVKQLKEDYFKKIECFDSVEISGVEDRFNASLGTYHDLLKIIKDKDFLDNEENEDILEDIVLTLTLFEDREMIEERLKTYAHLFDDKVMKQLKRRRYTGWGRLSRKLINGIRDKQSGKTILDFLKSDGFANRNFMQLIHDDSLTFKEDIQKAQVSGQGDSLHEHIANLAGSPAIKKGILQTVKVVDELVKVMGRHKPENIVIEMARENQTTQKGQKNSRERMKRIEEGIKELGSQILKEHPVENTQLQNEKLYLYYLQNGRDMYVDQELDINRLSDYDVDHIVPQSFLKDDSIDNKVLTRSDKARGKSDNVPSEEVVKKMKNYWRQLLNAKLITQRKFDNLTKAERGGLSELDKAGFIKRQLVETRQITKHVAQILDSRMNTKYDENDKLIREVKVITLKSKLVSDFRKDFQFYKVREINNYHHAHDAYLNAVVGTALIKKYPKLESEFVYGDYKVYDVRKMIAKSEQEIGKATAKYFFYSNIMNFFKTEITLANGEIRKRPLIETNGETGEIVWDKGRDFATVRKVLSMPQVNIVKKTEVQTGGFSKESILPKRNSDKLIARKKDWDPKKYGGFDSPTVAYSVLVVAKVEKGKSKKLKSVKELLGITIMERSSFEKNPIDFLEAKGYKEVKKDLIIKLPKYSLFELENGRKRMLASAGELQKGNELALPSKYVNFLYLASHYEKLKGSPEDNEQKQLFVEQHKHYLDEIIEQISEFSKRVILADANLDKVLSAYNKHRDKPIREQAENIIHLFTLTNLGAPAAFKYFDTTIDRKRYTSTKEVLDATLIHQSITGLYETRIDLSQLGGDGGGGGEAAAKGSSGGTLQLEEEYRLFEPESTQKQEMDIWLKNFPQAWAETGGMGTAHCQAPVLIQLKATATPISIRQYPMPHEAYQGIKPHIRRMLDQGILKPCQSPWNTPLLPVKKPGTEDYRPVQDLREVNKRVEDIHPTVPNPYNLLSTLPPSHPWYTVLDLKDAFFCLRLHSESQLLFAFEWRDPEIGLSGQLTWTRLPQGFKNSPTLFNEALHSDLADFRVRYPALVLLQYVDDLLLAAATRTECLEGTKALLETLGNKGYRASAKKAQICLQEVTYLGYSLKDGQRWLTKARKEAILSIPVPKNSRQVREFLGKAGYCRLFIPGFAELAAPLYPLTRPGTLFQWGTEQQLAFEDIKKALLSSPALGLPDITKPFELFIDENSGFAKGVLVQKLGPWKRPVAYLSKKLDTVASGWPPCLRMVAAIAILVKDAGKLTLGQPLTILTSHPVEALVRQPPNKWLSNARMTHYQAMLLDAERVHFGPTVSLNPATLLPLPSGGNHHDCLQILAETHGTRPDLTDQPLPDADLTWYTDGSSFIRNGEREAGAAVTTESEVIWAAPLPPGTSAQRAELIALTQALKMAEGKKLTVYTDSRYAFATTHVHGEIYRRRGWLTSEGKEIKNKNEILALLEALFLPKRLSIIHCPGHQKGDSPQAKGNRLADDTAKKAATETHSSLTVLPAGKRTADGSEFEKRTADGSEFESPKKKAKVE

SEQ ID NO: 7285 - protein, 2176 aa, synthetic construct
MPAAKRVKLDGGDKKYSIGLDIGTNSVGWAVITDEYKVPSKKFKVLGNTDRHSIKKNLIGALLFDSGETAEATRLKRTARRRYTRRKNRICYLQEIFSNEMAKVDDSFFHRLEESFLVEEDKKHERHPIFGNIVDEVAYHEKYPTIYHLRKKLVDSTDKADLRLIYLALAHMIKFRGHFLIEGDLNPDNSDVDKLFIQLVQTYNQLFEENPINASGVDAKAILSARLSKSRRLENLIAQLPGEKKNGLFGNLIALSLGLTPNFKSNFDLAEDAKLQLSKDTYDDDLDNLLAQIGDQYADLFLAAKNLSDAILLSDILRVNTEITKAPLSASMIKRYDEHHQDLTLLKALVRQQLPEKYKEIFFDQSKNGYAGYIDGGASQEEFYKFIKPILEKMDGTEELLVKLNREDLLRKQRTFDNGSIPHQIHLGELHAILRRQEDFYPFLKDNREKIEKILTFRIPYYVGPLARGNSRFAWMTRKSEETITPWNFEEVVDKGASAQSFIERMTNFDKNLPNEKVLPKHSLLYEYFTVYNELTKVKYVTEGMRKPAFLSGEQKKAIVDLLFKTNRKVTVKQLKEDYFKKIECFDSVEISGVEDRFNASLGTYHDLLKIIKDKDFLDNEENEDILEDIVLTLTLFEDREMIEERLKTYAHLFDDKVMKQLKRRRYTGWGRLSRKLINGIRDKQSGKTILDFLKSDGFANRNFMQLIHDDSLTFKEDIQKAQVSGQGDSLHEHIANLAGSPAIKKGILQTVKVVDELVKVMGRHKPENIVIEMARENQTTQKGQKNSRERMKRIEEGIKELGSQILKEHPVENTQLQNEKLYLYYLQNGRDMYVDQELDINRLSDYDVDHIVPQSFLKDDSIDNKVLTRSDKARGKSDNVPSEEVVKKMKNYWRQLLNAKLITQRKFDNLTKAERGGLSELDKAGFIKRQLVETRQITKHVAQILDSRMNTKYDENDKLIREVKVITLKSKLVSDFRKDFQFYKVREINNYHHAHDAYLNAVVGTALIKKYPKLESEFVYGDYKVYDVRKMIAKSEQEIGKATAKYFFYSNIMNFFKTEITLANGEIRKRPLIETNGETGEIVWDKGRDFATVRKVLSMPQVNIVKKTEVQTGGFSKESILPKRNSDKLIARKKDWDPKKYGGFDSPTVAYSVLVVAKVEKGKSKKLKSVKELLGITIMERSSFEKNPIDFLEAKGYKEVKKDLIIKLPKYSLFELENGRKRMLASAGELQKGNELALPSKYVNFLYLASHYEKLKGSPEDNEQKQLFVEQHKHYLDEIIEQISEFSKRVILADANLDKVLSAYNKHRDKPIREQAENIIHLFTLTNLGAPAAFKYFDTTIDRKRYTSTKEVLDATLIHQSITGLYETRIDLSQLGGDGGGGGEAAAKGSSGGMNPLQLLQPLPAEIKGTKLLAHWNSGATITCIPESFLEDEQPIKKTLIKTIHGEKQQNVYYVTFKVKGRKVEAEVIASPYEYILLSPTDVPWLTQQPLQLTILVPLQEYQEKILSKTALPEDQKQQLKTLFVKYDNLWQHWENQVGHRKIRPHNIATGDYPPRPQKQYPINPKAKPSIQIVIDDLLKQGVLTPQNSTMNTPVYPVPKPDGRWRMVLDYREVNKTIPLTAAQNQHSAGILATIVRQKYKTTLDLANGFWAHPITPESYWLTAFTWQGKQYCWTRLPQGFLNSPALFTADVVDLLKEIPNVQVYVDDIYLSHDDPKEHVQQLEKVFQILLQAGYVVSLKKSEIGQKTVEFLGFNITKEGRGLTDTFKTKLLNITPPKDLKQLQSILGLLNFARNFIPNFAELVQPLYNLIASAKGKYIEWSEENTKQLNMVIEALNTASNLEERLPEQRLVIKVNTSPSAGYVRYYNETGKKPIMYLNYVFSKAELKFSMLEKLLTTMHKALIKAMDLAMGQEILVYSPIVSMTKIQKTPLPERKALPIRWITWMTYLEDPRIQFHYDKTLPELKHIPDVYTSSQSPVKHPSQYEGVFYTDGSAIKSPDPTKSNNAGMGIVHATYKPEYQVLNQWSIPLGNHTAQMAEIAAVEFACKKALKIPGPVLVITDSFYVAESANKELPYWKSNGFVNNKKKPLKHISKWKSIAECLSMKPDITIQHEKGISLQIPVFILKGNALADKLATQGSYVVNAGKRTADGSEFEKRTADGSEFESPKKKAKVE

SEQ ID NO: 7286 - protein, 2127 aa, synthetic construct
MPAAKRVKLDGGDKKYSIGLDIGTNSVGWAVITDEYKVPSKKFKVLGNTDRHSIKKNLIGALLFDSGETAEATRLKRTARRRYTRRKNRICYLQEIFSNEMAKVDDSFFHRLEESFLVEEDKKHERHPIFGNIVDEVAYHEKYPTIYHLRKKLVDSTDKADLRLIYLALAHMIKFRGHFLIEGDLNPDNSDVDKLFIQLVQTYNQLFEENPINASGVDAKAILSARLSKSRRLENLIAQLPGEKKNGLFGNLIALSLGLTPNFKSNFDLAEDAKLQLSKDTYDDDLDNLLAQIGDQYADLFLAAKNLSDAILLSDILRVNTEITKAPLSASMIKRYDEHHQDLTLLKALVRQQLPEKYKEIFFDQSKNGYAGYIDGGASQEEFYKFIKPILEKMDGTEELLVKLNREDLLRKQRTFDNGSIPHQIHLGELHAILRRQEDFYPFLKDNREKIEKILTFRIPYYVGPLARGNSRFAWMTRKSEETITPWNFEEVVDKGASAQSFIERMTNFDKNLPNEKVLPKHSLLYEYFTVYNELTKVKYVTEGMRKPAFLSGEQKKAIVDLLFKTNRKVTVKQLKEDYFKKIECFDSVEISGVEDRFNASLGTYHDLLKIIKDKDFLDNEENEDILEDIVLTLTLFEDREMIEERLKTYAHLFDDKVMKQLKRRRYTGWGRLSRKLINGIRDKQSGKTILDFLKSDGFANRNFMQLIHDDSLTFKEDIQKAQVSGQGDSLHEHIANLAGSPAIKKGILQTVKVVDELVKVMGRHKPENIVIEMARENQTTQKGQKNSRERMKRIEEGIKELGSQILKEHPVENTQLQNEKLYLYYLQNGRDMYVDQELDINRLSDYDVDHIVPQSFLKDDSIDNKVLTRSDKARGKSDNVPSEEVVKKMKNYWRQLLNAKLITQRKFDNLTKAERGGLSELDKAGFIKRQLVETRQITKHVAQILDSRMNTKYDENDKLIREVKVITLKSKLVSDFRKDFQFYKVREINNYHHAHDAYLNAVVGTALIKKYPKLESEFVYGDYKVYDVRKMIAKSEQEIGKATAKYFFYSNIMNFFKTEITLANGEIRKRPLIETNGETGEIVWDKGRDFATVRKVLSMPQVNIVKKTEVQTGGFSKESILPKRNSDKLIARKKDWDPKKYGGFDSPTVAYSVLVVAKVEKGKSKKLKSVKELLGITIMERSSFEKNPIDFLEAKGYKEVKKDLIIKLPKYSLFELENGRKRMLASAGELQKGNELALPSKYVNFLYLASHYEKLKGSPEDNEQKQLFVEQHKHYLDEIIEQISEFSKRVILADANLDKVLSAYNKHRDKPIREQAENIIHLFTLTNLGAPAAFKYFDTTIDRKRYTSTKEVLDATLIHQSITGLYETRIDLSQLGGDGGGGGEAAAKGSSGGLLGRDLLTKLKAQIQFSTEGPQVTWEDRPAMCLVLNLEEEYRLHEKPVPPSIDPSWLQLFPMVWAEKAGMGLANQVPPVVVELKSDASPVAVRQYPMSKEAREGIRPHIQRFLDLGILVPCQSPWNTPLLPVKKPGTNDYRPVQDLREVNKRVQDIHPTVPNPYNLLSSLPPSHTWYSVLDLKDAFFCLKLHPNSQPLFAFEWRDPEKGNTGQLTWTRLPQGFKNSPTLFNEALHRDLASFRALNPQVVMLQYVDDLLVAAPTYRDCKEGTRRLLQELSKLGYRVSAKKAQLCREEVTYLGYLLKGGKRWLTPARKATVMKIPTPTTPRQVREFLGTAGFCRLWIPGFASLAAPLYPLTRPKVPFTWTEAHQEAFGRIKEALLSAPALALPDLTKPFALYVDEKEGVARGVLTQTLGPWRRPVAYLSKKLDPVASGWPTCLKAIAAVALLLKDADKLTLGQNVLVIAPHNLESIVRQPPDRWMTNARMTHYQSLLLNERVSFAPPAILNPATLLPVESDDTPIHICSEILAEETGTRPDLRDQPLPGVPAWYTDGSSFIMDGRRQAGAAIVDNKRTVWASNLPEGTSAQKAELIALTQALRLAEGKSINIYTDSRYAFATAHVHGAIYKQRGWLTSAGKDIKNKEEILALLEAIHLPKRVAIIHCPGHQRGTDPVATGNRKADEAAKQAAQSTRILTETTKNAGKRTADGSEFEKRTADGSEFESPKKKAKVE

SEQ ID NO: 7287 - protein, 2218 aa, synthetic construct
MPAAKRVKLDGGDKKYSIGLDIGTNSVGWAVITDEYKVPSKKFKVLGNTDRHSIKKNLIGALLFDSGETAEATRLKRTARRRYTRRKNRICYLQEIFSNEMAKVDDSFFHRLEESFLVEEDKKHERHPIFGNIVDEVAYHEKYPTIYHLRKKLVDSTDKADLRLIYLALAHMIKFRGHFLIEGDLNPDNSDVDKLFIQLVQTYNQLFEENPINASGVDAKAILSARLSKSRRLENLIAQLPGEKKNGLFGNLIALSLGLTPNFKSNFDLAEDAKLQLSKDTYDDDLDNLLAQIGDQYADLFLAAKNLSDAILLSDILRVNTEITKAPLSASMIKRYDEHHQDLTLLKALVRQQLPEKYKEIFFDQSKNGYAGYIDGGASQEEFYKFIKPILEKMDGTEELLVKLNREDLLRKQRTFDNGSIPHQIHLGELHAILRRQEDFYPFLKDNREKIEKILTFRIPYYVGPLARGNSRFAWMTRKSEETITPWNFEEVVDKGASAQSFIERMTNFDKNLPNEKVLPKHSLLYEYFTVYNELTKVKYVTEGMRKPAFLSGEQKKAIVDLLFKTNRKVTVKQLKEDYFKKIECFDSVEISGVEDRFNASLGTYHDLLKIIKDKDFLDNEENEDILEDIVLTLTLFEDREMIEERLKTYAHLFDDKVMKQLKRRRYTGWGRLSRKLINGIRDKQSGKTILDFLKSDGFANRNFMQLIHDDSLTFKEDIQKAQVSGQGDSLHEHIANLAGSPAIKKGILQTVKVVDELVKVMGRHKPENIVIEMARENQTTQKGQKNSRERMKRIEEGIKELGSQILKEHPVENTQLQNEKLYLYYLQNGRDMYVDQELDINRLSDYDVDHIVPQSFLKDDSIDNKVLTRSDKARGKSDNVPSEEVVKKMKNYWRQLLNAKLITQRKFDNLTKAERGGLSELDKAGFIKRQLVETRQITKHVAQILDSRMNTKYDENDKLIREVKVITLKSKLVSDFRKDFQFYKVREINNYHHAHDAYLNAVVGTALIKKYPKLESEFVYGDYKVYDVRKMIAKSEQEIGKATAKYFFYSNIMNFFKTEITLANGEIRKRPLIETNGETGEIVWDKGRDFATVRKVLSMPQVNIVKKTEVQTGGFSKESILPKRNSDKLIARKKDWDPKKYGGFDSPTVAYSVLVVAKVEKGKSKKLKSVKELLGITIMERSSFEKNPIDFLEAKGYKEVKKDLIIKLPKYSLFELENGRKRMLASAGELQKGNELALPSKYVNFLYLASHYEKLKGSPEDNEQKQLFVEQHKHYLDEIIEQISEFSKRVILADANLDKVLSAYNKHRDKPIREQAENIIHLFTLTNLGAPAAFKYFDTTIDRKRYTSTKEVLDATLIHQSITGLYETRIDLSQLGGDGGGGGEAAAKGSSGGTLGDQGSRGSDPLPEPRVTLTVEGIPTEFLVNTGAEHSVLTKPMGKMGSKRTVVAGATGSKVYPWTTKRLLKIGQKQVTHSFLVIPECPAPLLGRDLLTKLKAQIQFSTEGPQVTWEDRPAMCLVLNLEEEYRLHEKPVPPSIDPSWLQLFPMVWAEKAGMGLANQVPPVVVELKSDASPVAVRQYPMSKEAREGIRPHIQRFLDLGILVPCQSPWNTPLLPVKKPGTNDYRPVQDLREVNKRVQDIHPTVPNPYNLLSSLPPSHTWYSVLDLKDAFFCLKLHPNSQPLFAFEWRDPEKGNTGQLTWTRLPQGFKNSPTLFNEALHRDLASFRALNPQVVMLQYVDDLLVAAPTYRDCKEGTRRLLQELSKLGYRVSAKKAQLCREEVTYLGYLLKGGKRWLTPARKATVMKIPTPTTPRQVREFLGTAGFCRLWIPGFASLAAPLYPLTRPKVPFTWTEAHQEAFGRIKEALLSAPALALPDLTKPFALYVDEKEGVARGVLTQTLGPWRRPVAYLSKKLDPVASGWPTCLKAIAAVALLLKDADKLTLGQNVLVIAPHNLESIVRQPPDRWMTNARMTHYQSLLLNERVSFAPPAILNPATLLPVESDDTPIHICSEILAEETGTRPDLRDQPLPGVPAWYTDGSSFIMDGRRQAGAAIVDNKRTVWASNLPEGTSAQKAELIALTQALRLAEGKSINIYTDSRYAFATAHVHGAIYKQRGWLTSAGKDIKNKEEILALLEAIHLPKRVAIIHCPGHQRGTDPVATGNRKADEAAKQAAQSTRILTETTKNAGKRTADGSEFEKRTADGSEFESPKKKAKVE

SEQ ID NO: 7288 - protein, 2096 aa, synthetic construct
MPAAKRVKLDGGDKKYSIGLDIGTNSVGWAVITDEYKVPSKKFKVLGNTDRHSIKKNLIGALLFDSGETAEATRLKRTARRRYTRRKNRICYLQEIFSNEMAKVDDSFFHRLEESFLVEEDKKHERHPIFGNIVDEVAYHEKYPTIYHLRKKLVDSTDKADLRLIYLALAHMIKFRGHFLIEGDLNPDNSDVDKLFIQLVQTYNQLFEENPINASGVDAKAILSARLSKSRRLENLIAQLPGEKKNGLFGNLIALSLGLTPNFKSNFDLAEDAKLQLSKDTYDDDLDNLLAQIGDQYADLFLAAKNLSDAILLSDILRVNTEITKAPLSASMIKRYDEHHQDLTLLKALVRQQLPEKYKEIFFDQSKNGYAGYIDGGASQEEFYKFIKPILEKMDGTEELLVKLNREDLLRKQRTFDNGSIPHQIHLGELHAILRRQEDFYPFLKDNREKIEKILTFRIPYYVGPLARGNSRFAWMTRKSEETITPWNFEEVVDKGASAQSFIERMTNFDKNLPNEKVLPKHSLLYEYFTVYNELTKVKYVTEGMRKPAFLSGEQKKAIVDLLFKTNRKVTVKQLKEDYFKKIECFDSVEISGVEDRFNASLGTYHDLLKIIKDKDFLDNEENEDILEDIVLTLTLFEDREMIEERLKTYAHLFDDKVMKQLKRRRYTGWGRLSRKLINGIRDKQSGKTILDFLKSDGFANRNFMQLIHDDSLTFKEDIQKAQVSGQGDSLHEHIANLAGSPAIKKGILQTVKVVDELVKVMGRHKPENIVIEMARENQTTQKGQKNSRERMKRIEEGIKELGSQILKEHPVENTQLQNEKLYLYYLQNGRDMYVDQELDINRLSDYDVDHIVPQSFLKDDSIDNKVLTRSDKARGKSDNVPSEEVVKKMKNYWRQLLNAKLITQRKFDNLTKAERGGLSELDKAGFIKRQLVETRQITKHVAQILDSRMNTKYDENDKLIREVKVITLKSKLVSDFRKDFQFYKVREINNYHHAHDAYLNAVVGTALIKKYPKLESEFVYGDYKVYDVRKMIAKSEQEIGKATAKYFFYSNIMNFFKTEITLANGEIRKRPLIETNGETGEIVWDKGRDFATVRKVLSMPQVNIVKKTEVQTGGFSKESILPKRNSDKLIARKKDWDPKKYGGFDSPTVAYSVLVVAKVEKGKSKKLKSVKELLGITIMERSSFEKNPIDFLEAKGYKEVKKDLIIKLPKYSLFELENGRKRMLASAGELQKGNELALPSKYVNFLYLASHYEKLKGSPEDNEQKQLFVEQHKHYLDEIIEQISEFSKRVILADANLDKVLSAYNKHRDKPIREQAENIIHLFTLTNLGAPAAFKYFDTTIDRKRYTSTKEVLDATLIHQSITGLYETRIDLSQLGGDGGGGGEAAAKGSSGGTLNLEDEYRLYETSAEPEVSPGSTWLSDFPQAWAETGGMGLAVRQAPLIIPLKATSTPVSIKQYPMSQEAKLGIKPHIQRLLDQGILVPCQSPWNTPLLPVKKPGTNDYRPVQDLREVNKRVEDIHPTVPNPYNLLSGLPPSHRWYTVLDLKDAFFCLRLHPTSQPLFAFEWRDPGMGISGQLTWTRLPQGFKNSPTLFNEALHRDLADFRIQHPDLILLQYVDDILLAATSELDCQQGTRALLLTLGNLGYRASAKKAQLCQKQVKYLGYLLKEGQRWLTEARKETVMGQPTPKTPRQLREFLGTAGFCRLWIPGFAEMAAPLYPLTKPGTLFNWGPDQQKAYQEIKQALLTAPALGLPDLTKPFELFVDEKQGYAKGVLTQKLGPWRRPVAYLSKKLDPVAAGWPPCLRMVAAIAVLRKDAGKLTMGQPLVILAPHAVEALVKQPPDRWLSNARMTHYQAMLLDTDRVQFGPVVALNPATLLPLPEEGAPHDCLEILAETHGTRPDLTDQPIPDADHTWYTDGSSFLQEGQRKAGAAVTTETEVIWARALPAGTSAQRAELIALTQALKMAEGKRLNVYTDSRYAFATAHIHGEIYRRRGWLTSEGREIKNKSEILALLKALFLPKRLSIIHCLGHQKGDSAEARGNRLADQAAREAAIKTPPDTSTLLAGKRTADGSEFEKRTADGSEFESPKKKAKVE

SEQ ID NO: 7289 - protein, 2096 aa, synthetic construct
MPAAKRVKLDGGDKKYSIGLDIGTNSVGWAVITDEYKVPSKKFKVLGNTDRHSIKKNLIGALLFDSGETAEATRLKRTARRRYTRRKNRICYLQEIFSNEMAKVDDSFFHRLEESFLVEEDKKHERHPIFGNIVDEVAYHEKYPTIYHLRKKLVDSTDKADLRLIYLALAHMIKFRGHFLIEGDLNPDNSDVDKLFIQLVQTYNQLFEENPINASGVDAKAILSARLSKSRRLENLIAQLPGEKKNGLFGNLIALSLGLTPNFKSNFDLAEDAKLQLSKDTYDDDLDNLLAQIGDQYADLFLAAKNLSDAILLSDILRVNTEITKAPLSASMIKRYDEHHQDLTLLKALVRQQLPEKYKEIFFDQSKNGYAGYIDGGASQEEFYKFIKPILEKMDGTEELLVKLNREDLLRKQRTFDNGSIPHQIHLGELHAILRRQEDFYPFLKDNREKIEKILTFRIPYYVGPLARGNSRFAWMTRKSEETITPWNFEEVVDKGASAQSFIERMTNFDKNLPNEKVLPKHSLLYEYFTVYNELTKVKYVTEGMRKPAFLSGEQKKAIVDLLFKTNRKVTVKQLKEDYFKKIECFDSVEISGVEDRFNASLGTYHDLLKIIKDKDFLDNEENEDILEDIVLTLTLFEDREMIEERLKTYAHLFDDKVMKQLKRRRYTGWGRLSRKLINGIRDKQSGKTILDFLKSDGFANRNFMQLIHDDSLTFKEDIQKAQVSGQGDSLHEHIANLAGSPAIKKGILQTVKVVDELVKVMGRHKPENIVIEMARENQTTQKGQKNSRERMKRIEEGIKELGSQILKEHPVENTQLQNEKLYLYYLQNGRDMYVDQELDINRLSDYDVDHIVPQSFLKDDSIDNKVLTRSDKARGKSDNVPSEEVVKKMKNYWRQLLNAKLITQRKFDNLTKAERGGLSELDKAGFIKRQLVETRQITKHVAQILDSRMNTKYDENDKLIREVKVITLKSKLVSDFRKDFQFYKVREINNYHHAHDAYLNAVVGTALIKKYPKLESEFVYGDYKVYDVRKMIAKSEQEIGKATAKYFFYSNIMNFFKTEITLANGEIRKRPLIETNGETGEIVWDKGRDFATVRKVLSMPQVNIVKKTEVQTGGFSKESILPKRNSDKLIARKKDWDPKKYGGFDSPTVAYSVLVVAKVEKGKSKKLKSVKELLGITIMERSSFEKNPIDFLEAKGYKEVKKDLIIKLPKYSLFELENGRKRMLASAGELQKGNELALPSKYVNFLYLASHYEKLKGSPEDNEQKQLFVEQHKHYLDEIIEQISEFSKRVILADANLDKVLSAYNKHRDKPIREQAENIIHLFTLTNLGAPAAFKYFDTTIDRKRYTSTKEVLDATLIHQSITGLYETRIDLSQLGGDGGGGGEAAAKGSSGGTLGIEDEYRLHETSTEPDVSLGSTWLSDFPQAWAETGGMGLAVRQAPLIIPLKATSTPVSIQQYPMSHEARLGIKPHIQRLLDQGILVPCQSPWNTPLLPVKKPGTNDYRPVQDLREVNKRVEDIHPTVPNPYNLLSGLPPSHQWYTVLDLKDAFFCLRLHPTSQPLFAFEWRDPGMGISGQLTWTRLPQGFKNSPTLFDEALHRDLADFRIQHPDLILLQYVDDILLAATSELDCQQGTRALLQTLGDLGYRASAKKAQICQKQVKYLGYLLREGQRWLTEARKETVMGQPVPKTPRQLREFLGTAGFCRLWIPGFAEMAAPLYPLTKTGTLFSWGPDQQKAYQEIKQALLTAPALGLPDLTKPFELFVDEKQGYAKGVLTQKLGPWRRPVAYLSKKLDPVAAGWPPCLRMVAAIAVLTKDAGKLTMGQPLVILAPHAVEALVKQPPDRWLSNARMTHYQAMLLDTDRVQFGPVVALNPATLLPLPEEGAPHDCLEILAETHGTRPDLTDQPIPDADHTWYTDGSSFLQEGQRKAGAAVTTETEVIWAGALPAGTSAQRAELIALTQALKMAEGKRLNVYTDSRYAFATAHIHGEIYRRRGLLTSEGREIKNKSEILALLKALFLPKRLSIIHCLGHQKGDSAEARGNRLADQAAREAAIKTPPDTSTLLAGKRTADGSEFEKRTADGSEFESPKKKAKVE

SEQ ID NO: 7290 - protein, 2096 aa, synthetic construct
MPAAKRVKLDGGDKKYSIGLDIGTNSVGWAVITDEYKVPSKKFKVLGNTDRHSIKKNLIGALLFDSGETAEATRLKRTARRRYTRRKNRICYLQEIFSNEMAKVDDSFFHRLEESFLVEEDKKHERHPIFGNIVDEVAYHEKYPTIYHLRKKLVDSTDKADLRLIYLALAHMIKFRGHFLIEGDLNPDNSDVDKLFIQLVQTYNQLFEENPINASGVDAKAILSARLSKSRRLENLIAQLPGEKKNGLFGNLIALSLGLTPNFKSNFDLAEDAKLQLSKDTYDDDLDNLLAQIGDQYADLFLAAKNLSDAILLSDILRVNTEITKAPLSASMIKRYDEHHQDLTLLKALVRQQLPEKYKEIFFDQSKNGYAGYIDGGASQEEFYKFIKPILEKMDGTEELLVKLNREDLLRKQRTFDNGSIPHQIHLGELHAILRRQEDFYPFLKDNREKIEKILTFRIPYYVGPLARGNSRFAWMTRKSEETITPWNFEEVVDKGASAQSFIERMTNFDKNLPNEKVLPKHSLLYEYFTVYNELTKVKYVTEGMRKPAFLSGEQKKAIVDLLFKTNRKVTVKQLKEDYFKKIECFDSVEISGVEDRFNASLGTYHDLLKIIKDKDFLDNEENEDILEDIVLTLTLFEDREMIEERLKTYAHLFDDKVMKQLKRRRYTGWGRLSRKLINGIRDKQSGKTILDFLKSDGFANRNFMQLIHDDSLTFKEDIQKAQVSGQGDSLHEHIANLAGSPAIKKGILQTVKVVDELVKVMGRHKPENIVIEMARENQTTQKGQKNSRERMKRIEEGIKELGSQILKEHPVENTQLQNEKLYLYYLQNGRDMYVDQELDINRLSDYDVDHIVPQSFLKDDSIDNKVLTRSDKARGKSDNVPSEEVVKKMKNYWRQLLNAKLITQRKFDNLTKAERGGLSELDKAGFIKRQLVETRQITKHVAQILDSRMNTKYDENDKLIREVKVITLKSKLVSDFRKDFQFYKVREINNYHHAHDAYLNAVVGTALIKKYPKLESEFVYGDYKVYDVRKMIAKSEQEIGKATAKYFFYSNIMNFFKTEITLANGEIRKRPLIETNGETGEIVWDKGRDFATVRKVLSMPQVNIVKKTEVQTGGFSKESILPKRNSDKLIARKKDWDPKKYGGFDSPTVAYSVLVVAKVEKGKSKKLKSVKELLGITIMERSSFEKNPIDFLEAKGYKEVKKDLIIKLPKYSLFELENGRKRMLASAGELQKGNELALPSKYVNFLYLASHYEKLKGSPEDNEQKQLFVEQHKHYLDEIIEQISEFSKRVILADANLDKVLSAYNKHRDKPIREQAENIIHLFTLTNLGAPAAFKYFDTTIDRKRYTSTKEVLDATLIHQSITGLYETRIDLSQLGGDGGGGGEAAAKGSSGGTLGIEDEYRLHETSTEPDVSLGSTWLSDFPQAWAETGGMGLAVRQAPLIIPLKATSTPVSIQQYPMSHEARLGIKPHIQRLLDQGILVPCQSPWNTPLLPVKKPGTNDYRPVQDLREVNKRVEDIHPTVPNPYNLLSGLPPSHQWYTVLDLKDAFFCLRLHPTSQPLFAFEWRDPGMGISGQLTWTRLPQGFKNSPTLFNEALHRDLADFRIQHPDLILLQYVDDILLAATSELDCQQGTRALLQTLGDLGYRASAKKAQICQKQVKYLGYLLREGQRWLTEARKETVMGQPVPKTPRQLREFLGTAGFCRLWIPGFAEMAAPLYPLTKPGTLFSWGPDQQKAYQEIKQALLTAPALGLPDLTKPFELFVDEKQGYAKGVLTQKLGPWRRPVAYLSKKLDPVAAGWPPCLRMVAAIAVLTKDAGKLTMGQPLVILAPHAVEALVKQPPDRWLSNARMTHYQAMLLDTDRVQFGPVVALNPATLLPLPEEGAPHDCLEILAETHGTRPDLTDQPIPDADHTWYTDGSSFLQEGQRKAGAAVTTETEVIWAGALPAGTSAQRAELIALTQALKMAEGKRLNVYTDSRYAFATAHIHGEIYRRRGWLTSEGREIKNKSEILALLKALFLPKRLSIIHCLGHQKGDSAEARGNRLADQAAREAAIKTPPDTSTLLAGKRTADGSEFEKRTADGSEFESPKKKAKVE

SEQ ID NO: 7291 - protein, 2096 aa, synthetic construct
MPAAKRVKLDGGDKKYSIGLDIGTNSVGWAVITDEYKVPSKKFKVLGNTDRHSIKKNLIGALLFDSGETAEATRLKRTARRRYTRRKNRICYLQEIFSNEMAKVDDSFFHRLEESFLVEEDKKHERHPIFGNIVDEVAYHEKYPTIYHLRKKLVDSTDKADLRLIYLALAHMIKFRGHFLIEGDLNPDNSDVDKLFIQLVQTYNQLFEENPINASGVDAKAILSARLSKSRRLENLIAQLPGEKKNGLFGNLIALSLGLTPNFKSNFDLAEDAKLQLSKDTYDDDLDNLLAQIGDQYADLFLAAKNLSDAILLSDILRVNTEITKAPLSASMIKRYDEHHQDLTLLKALVRQQLPEKYKEIFFDQSKNGYAGYIDGGASQEEFYKFIKPILEKMDGTEELLVKLNREDLLRKQRTFDNGSIPHQIHLGELHAILRRQEDFYPFLKDNREKIEKILTFRIPYYVGPLARGNSRFAWMTRKSEETITPWNFEEVVDKGASAQSFIERMTNFDKNLPNEKVLPKHSLLYEYFTVYNELTKVKYVTEGMRKPAFLSGEQKKAIVDLLFKTNRKVTVKQLKEDYFKKIECFDSVEISGVEDRFNASLGTYHDLLKIIKDKDFLDNEENEDILEDIVLTLTLFEDREMIEERLKTYAHLFDDKVMKQLKRRRYTGWGRLSRKLINGIRDKQSGKTILDFLKSDGFANRNFMQLIHDDSLTFKEDIQKAQVSGQGDSLHEHIANLAGSPAIKKGILQTVKVVDELVKVMGRHKPENIVIEMARENQTTQKGQKNSRERMKRIEEGIKELGSQILKEHPVENTQLQNEKLYLYYLQNGRDMYVDQELDINRLSDYDVDHIVPQSFLKDDSIDNKVLTRSDKARGKSDNVPSEEVVKKMKNYWRQLLNAKLITQRKFDNLTKAERGGLSELDKAGFIKRQLVETRQITKHVAQILDSRMNTKYDENDKLIREVKVITLKSKLVSDFRKDFQFYKVREINNYHHAHDAYLNAVVGTALIKKYPKLESEFVYGDYKVYDVRKMIAKSEQEIGKATAKYFFYSNIMNFFKTEITLANGEIRKRPLIETNGETGEIVWDKGRDFATVRKVLSMPQVNIVKKTEVQTGGFSKESILPKRNSDKLIARKKDWDPKKYGGFDSPTVAYSVLVVAKVEKGKSKKLKSVKELLGITIMERSSFEKNPIDFLEAKGYKEVKKDLIIKLPKYSLFELENGRKRMLASAGELQKGNELALPSKYVNFLYLASHYEKLKGSPEDNEQKQLFVEQHKHYLDEIIEQISEFSKRVILADANLDKVLSAYNKHRDKPIREQAENIIHLFTLTNLGAPAAFKYFDTTIDRKRYTSTKEVLDATLIHQSITGLYETRIDLSQLGGDGGGGGEAAAKGSSGGTLNIEDEYRLHETSKEPDVSLGSTWLSDFPQAWAETGGMGLAVRQAPLIIPLKATSTPVSIKQYPMSQEARLGIKPHIQRLLDQGILVPCQSPWNTPLLPVKKPGTNDYRPVQDLREVNKRVEDIHPTVPNPYNLLSGLPPSHQWYTVLDLKDAFFCLRLHPTSQPLFAFEWRDPEMGISGQLTWTRLPQGFKNSPTLFNEALHRDLAGFRIQHPDLILLQYVDDLLLAATSELDCQQGTRALLQTLGDLGYRASAKKAQICQKQVKYLGYLLKEGQRWLTEARKETVMGQPIPKTPRQLREFLGTAGFCRLWIPGFAEMAAPLYPLTKPGTLFNWGPDQQKAFQEIKQALLTAPALGLPDLTKPFELFVDEKQGYAKGVLTQKLGPWRRPVAYLSKKLDPVAAGWPPCLRMVAAIAVLTKDAGKLTMGQPLVILAPHAVEALVKQPPDRWLSNARMTHYQALLLDTDRVQFGPVVALNPATLLPLPEEGLQHDCLDILAEAHGTRSDLMDQPLPDADHTWYTDGSSFLQEGQRKAGAAVTTETEVIWARALPAGTSAQRAELIALTQALKMAEGKKLNVYTDSRYAFATAHIHGEIYRRRGWLTSEGKEIKNKDEILALLKALFLPKRLSIIHCPGHQKGNSAEARGNRMADQAAREVATRETPETSTLLAGKRTADGSEFEKRTADGSEFESPKKKAKVE

SEQ ID NO: 7292 - protein, 2096 aa, synthetic construct
MPAAKRVKLDGGDKKYSIGLDIGTNSVGWAVITDEYKVPSKKFKVLGNTDRHSIKKNLIGALLFDSGETAEATRLKRTARRRYTRRKNRICYLQEIFSNEMAKVDDSFFHRLEESFLVEEDKKHERHPIFGNIVDEVAYHEKYPTIYHLRKKLVDSTDKADLRLIYLALAHMIKFRGHFLIEGDLNPDNSDVDKLFIQLVQTYNQLFEENPINASGVDAKAILSARLSKSRRLENLIAQLPGEKKNGLFGNLIALSLGLTPNFKSNFDLAEDAKLQLSKDTYDDDLDNLLAQIGDQYADLFLAAKNLSDAILLSDILRVNTEITKAPLSASMIKRYDEHHQDLTLLKALVRQQLPEKYKEIFFDQSKNGYAGYIDGGASQEEFYKFIKPILEKMDGTEELLVKLNREDLLRKQRTFDNGSIPHQIHLGELHAILRRQEDFYPFLKDNREKIEKILTFRIPYYVGPLARGNSRFAWMTRKSEETITPWNFEEVVDKGASAQSFIERMTNFDKNLPNEKVLPKHSLLYEYFTVYNELTKVKYVTEGMRKPAFLSGEQKKAIVDLLFKTNRKVTVKQLKEDYFKKIECFDSVEISGVEDRFNASLGTYHDLLKIIKDKDFLDNEENEDILEDIVLTLTLFEDREMIEERLKTYAHLFDDKVMKQLKRRRYTGWGRLSRKLINGIRDKQSGKTILDFLKSDGFANRNFMQLIHDDSLTFKEDIQKAQVSGQGDSLHEHIANLAGSPAIKKGILQTVKVVDELVKVMGRHKPENIVIEMARENQTTQKGQKNSRERMKRIEEGIKELGSQILKEHPVENTQLQNEKLYLYYLQNGRDMYVDQELDINRLSDYDVDHIVPQSFLKDDSIDNKVLTRSDKARGKSDNVPSEEVVKKMKNYWRQLLNAKLITQRKFDNLTKAERGGLSELDKAGFIKRQLVETRQITKHVAQILDSRMNTKYDENDKLIREVKVITLKSKLVSDFRKDFQFYKVREINNYHHAHDAYLNAVVGTALIKKYPKLESEFVYGDYKVYDVRKMIAKSEQEIGKATAKYFFYSNIMNFFKTEITLANGEIRKRPLIETNGETGEIVWDKGRDFATVRKVLSMPQVNIVKKTEVQTGGFSKESILPKRNSDKLIARKKDWDPKKYGGFDSPTVAYSVLVVAKVEKGKSKKLKSVKELLGITIMERSSFEKNPIDFLEAKGYKEVKKDLIIKLPKYSLFELENGRKRMLASAGELQKGNELALPSKYVNFLYLASHYEKLKGSPEDNEQKQLFVEQHKHYLDEIIEQISEFSKRVILADANLDKVLSAYNKHRDKPIREQAENIIHLFTLTNLGAPAAFKYFDTTIDRKRYTSTKEVLDATLIHQSITGLYETRIDLSQLGGDGGGGGEAAAKGSSGGTLNIEDEYRLHETSKGPDVPLGSTWLSDFPQAWAETGGMGLAVRQAPLIIPLKATSTPVSIKQYPMSQEARLGIKPHIQRLLDQGILVPCQSPWNTPLLPVKKPGTNDYRPVQDLREVNKRVEDIHPTVPNPYNLLSGLPPSHQWYTVLDLKDAFFCLRLHPTSQSLFAFEWRDPEMGISGQLTWTRLPQGFKNSPTLFNEALHRDLADFRIQHPDLILLQYVDDLLLAATSELDCQQGTRALLQTLGDLGYRASAKKAQICQKQVKYLGYLLKEGQRWLTEARKETVMGQPTPKTPRQLREFLGTAGFCRLWIPGFAEMAAPLYPLTKPGTLFEWGPDQQKAYQEIKQALLTAPALGLPDLTKPFELFVDEKQGYAKGVLTQKLGPWRRPVAYLSKKLDPVAAGWPPCLRMVAAIAVLTKDAGKLTMGQPLVILAPHAVEALVKQPPDRWLSNARMTHYQALLLDTDRVQFGPIVALNPATLLPLPEEGLQHDCLDILAEAHGTRPDLTDQPLPDADHTWYTDGSSFLQEGQRKAGAAVTTETEVVWAKALPAGTSAQRAELIALTQALKMAEGKKLNVYTDSRYAFATAHIHGEIYRRRGWLTSEGKEIKNKDEILALLKALFLPKRLSIIHCPGHQKGNRAEARGNRMADQAAREVATRETPETSTLLAGKRTADGSEFEKRTADGSEFESPKKKAKVE

SEQ ID NO: 7293 - protein, 2096 aa, synthetic construct; identical to SEQ ID NO: 4530

SEQ ID NO: 7294 - protein, 2096 aa, synthetic construct
MPAAKRVKLDGGDKKYSIGLDIGTNSVGWAVITDEYKVPSKKFKVLGNTDRHSIKKNLIGALLFDSGETAEATRLKRTARRRYTRRKNRICYLQEIFSNEMAKVDDSFFHRLEESFLVEEDKKHERHPIFGNIVDEVAYHEKYPTIYHLRKKLVDSTDKADLRLIYLALAHMIKFRGHFLIEGDLNPDNSDVDKLFIQLVQTYNQLFEENPINASGVDAKAILSARLSKSRRLENLIAQLPGEKKNGLFGNLIALSLGLTPNFKSNFDLAEDAKLQLSKDTYDDDLDNLLAQIGDQYADLFLAAKNLSDAILLSDILRVNTEITKAPLSASMIKRYDEHHQDLTLLKALVRQQLPEKYKEIFFDQSKNGYAGYIDGGASQEEFYKFIKPILEKMDGTEELLVKLNREDLLRKQRTFDNGSIPHQIHLGELHAILRRQEDFYPFLKDNREKIEKILTFRIPYYVGPLARGNSRFAWMTRKSEETITPWNFEEVVDKGASAQSFIERMTNFDKNLPNEKVLPKHSLLYEYFTVYNELTKVKYVTEGMRKPAFLSGEQKKAIVDLLFKTNRKVTVKQLKEDYFKKIECFDSVEISGVEDRFNASLGTYHDLLKIIKDKDFLDNEENEDILEDIVLTLTLFEDREMIEERLKTYAHLFDDKVMKQLKRRRYTGWGRLSRKLINGIRDKQSGKTILDFLKSDGFANRNFMQLIHDDSLTFKEDIQKAQVSGQGDSLHEHIANLAGSPAIKKGILQTVKVVDELVKVMGRHKPENIVIEMARENQTTQKGQKNSRERMKRIEEGIKELGSQILKEHPVENTQLQNEKLYLYYLQNGRDMYVDQELDINRLSDYDVDHIVPQSFLKDDSIDNKVLTRSDKARGKSDNVPSEEVVKKMKNYWRQLLNAKLITQRKFDNLTKAERGGLSELDKAGFIKRQLVETRQITKHVAQILDSRMNTKYDENDKLIREVKVITLKSKLVSDFRKDFQFYKVREINNYHHAHDAYLNAVVGTALIKKYPKLESEFVYGDYKVYDVRKMIAKSEQEIGKATAKYFFYSNIMNFFKTEITLANGEIRKRPLIETNGETGEIVWDKGRDFATVRKVLSMPQVNIVKKTEVQTGGFSKESILPKRNSDKLIARKKDWDPKKYGGFDSPTVAYSVLVVAKVEKGKSKKLKSVKELLGITIMERSSFEKNPIDFLEAKGYKEVKKDLIIKLPKYSLFELENGRKRMLASAGELQKGNELALPSKYVNFLYLASHYEKLKGSPEDNEQKQLFVEQHKHYLDEIIEQISEFSKRVILADANLDKVLSAYNKHRDKPIREQAENIIHLFTLTNLGAPAAFKYFDTTIDRKRYTSTKEVLDATLIHQSITGLYETRIDLSQLGGDGGGGGEAAAKGSSGGTLNIEDEHRLHETSKEPDVSLGSTWLSDFPQAWAETGGMGLAVRQAPLIIPLKATSTPVSIKQYPMSQEARLGIKPHIQRLLDQGILVPCQSPWNTPLLPVKKPGTNDYRPVQDLREVNKRVEDIHPTVPNPYNLLSGLPPSHQWYTVLDLKDAFFCLRLHPTSQPLFAFEWRDPEMGISGQLTWTRLPQGFKNSPTLFDEALHRDLADFRIQHPDLILLQYVDDLLLAATSELDCQQGTRALLQTLGNLGYRASAKKAQICQKQVKYLGYLLKEGQRWLTEARKETVMGQPTPKTPRQLREFLGTAGFCRLWIPGFAEMAAPLYPLTKTGTLFNWGPDQQKAYQEIKQALLTAPALGLPDLTKPFELFVDEKQGYAKGVLTQKLGPWRRPVAYLSKKLDPVAAGWPPCLRMVAAIAVLTKDAGKLTMGQPLVILAPHAVEALVKQPPDRWLSNARMTHYQALLLDTDRVQFGPVVALNPATLLPLPEEGLQHNCLDILAEAHGTRPDLTDQPLPDADHTWYTDGSSLLQEGQRKAGAAVTTETEVIWAKALPAGTSAQRAELIALTQALKMAEGKKLNVYTDSRYAFATAHIHGEIYRRRGLLTSEGKEIKNKDEILALLKALFLPKRLSIIHCPGHQKGHSAEARGNRMADQAARKAAITETPDTSTLLAGKRTADGSEFEKRTADGSEFESPKKKAKVE

SEQ ID NO: 7295 - protein, 2096 aa, synthetic construct; identical to SEQ ID NO: 4530

SEQ ID NO: 7296 - protein, 2090 aa, synthetic construct
MPAAKRVKLDGGDKKYSIGLDIGTNSVGWAVITDEYKVPSKKFKVLGNTDRHSIKKNLIGALLFDSGETAEATRLKRTARRRYTRRKNRICYLQEIFSNEMAKVDDSFFHRLEESFLVEEDKKHERHPIFGNIVDEVAYHEKYPTIYHLRKKLVDSTDKADLRLIYLALAHMIKFRGHFLIEGDLNPDNSDVDKLFIQLVQTYNQLFEENPINASGVDAKAILSARLSKSRRLENLIAQLPGEKKNGLFGNLIALSLGLTPNFKSNFDLAEDAKLQLSKDTYDDDLDNLLAQIGDQYADLFLAAKNLSDAILLSDILRVNTEITKAPLSASMIKRYDEHHQDLTLLKALVRQQLPEKYKEIFFDQSKNGYAGYIDGGASQEEFYKFIKPILEKMDGTEELLVKLNREDLLRKQRTFDNGSIPHQIHLGELHAILRRQEDFYPFLKDNREKIEKILTFRIPYYVGPLARGNSRFAWMTRKSEETITPWNFEEVVDKGASAQSFIERMTNFDKNLPNEKVLPKHSLLYEYFTVYNELTKVKYVTEGMRKPAFLSGEQKKAIVDLLFKTNRKVTVKQLKEDYFKKIECFDSVEISGVEDRFNASLGTYHDLLKIIKDKDFLDNEENEDILEDIVLTLTLFEDREMIEERLKTYAHLFDDKVMKQLKRRRYTGWGRLSRKLINGIRDKQSGKTILDFLKSDGFANRNFMQLIHDDSLTFKEDIQKAQVSGQGDSLHEHIANLAGSPAIKKGILQTVKVVDELVKVMGRHKPENIVIEMARENQTTQKGQKNSRERMKRIEEGIKELGSQILKEHPVENTQLQNEKLYLYYLQNGRDMYVDQELDINRLSDYDVDHIVPQSFLKDDSIDNKVLTRSDKARGKSDNVPSEEVVKKMKNYWRQLLNAKLITQRKFDNLTKAERGGLSELDKAGFIKRQLVETRQITKHVAQILDSRMNTKYDENDKLIREVKVITLKSKLVSDFRKDFQFYKVREINNYHHAHDAYLNAVVGTALIKKYPKLESEFVYGDYKVYDVRKMIAKSEQEIGKATAKYFFYSNIMNFFKTEITLANGEIRKRPLIETNGETGEIVWDKGRDFATVRKVLSMPQVNIVKKTEVQTGGFSKESILPKRNSDKLIARKKDWDPKKYGGFDSPTVAYSVLVVAKVEKGKSKKLKSVKELLGITIMERSSFEKNPIDFLEAKGYKEVKKDLIIKLPKYSLFELENGRKRMLASAGELQKGNELALPSKYVNFLYLASHYEKLKGSPEDNEQKQLFVEQHKHYLDEIIEQISEFSKRVILADANLDKVLSAYNKHRDKPIREQAENIIHLFTLTNLGAPAAFKYFDTTIDRKRYTSTKEVLDATLIHQSITGLYETRIDLSQLGGDGGGGGEAAAKGSSGGTLQLDDEYRLYSPLVKPDQNIQFWLEQFPQAWAETAGMGLAKQVPPQVIQLKASATPVSVRQYPLSKEAQEGIRPHVQRLIQQGILVPVQSPWNTPLLPVRKPGTNDYRPVQDLREVNKRVQDIHPTVPNPYNLLCALPPQRSWYTVLDLKDAFFCLRLHPTSQPLFAFEWRDPGTGRTGQLTWTRLPQGFKNSPTIFDEALHRDLANFRIQHPQVTLLQYVDDLLLAGATKQDCLEGTKALLLELSDLGYRASAKKAQICRREVTYLGYSLRDGQRWLTEARKKTVVQIPAPTTAKQVREFLGTAGFCRLWIPGFATLAAPLYPLTKEKGEFSWAPEHQKAFDAIKKALLSAPALALPDVTKPFTLYVDERKGVARGVLTQTLGPWRRPVAYLSKKLDPVASGWPVCLKAIAAVAILVKDADKLTLGQNITVIAPHALENIVRQPPDRWMTNARMTHYQSLLLTERVTFAPPAALNPATLLPEETDEPVTHDCHQLLIEETGVRKDLTDIPLTGEVLTWFTDGSSYVVEGKRMAGAAVVDGTRTIWASSLPEGTSAQKAELMALTQALRLAEGKSINIYTDSRYAFATAHVHGAIYKQRGLLTSAGREIKNKEEILSLLEALHLPKRLAIIHCPGHQKAKDPISRGNQMADRVAKQAAQGVNLLAGKRTADGSEFEKRTADGSEFESPKKKAKVE

SEQ ID NO: 7297 - protein, 2176 aa, synthetic construct
MPAAKRVKLDGGDKKYSIGLDIGTNSVGWAVITDEYKVPSKKFKVLGNTDRHSIKKNLIGALLFDSGETAEATRLKRTARRRYTRRKNRICYLQEIFSNEMAKVDDSFFHRLEESFLVEEDKKHERHPIFGNIVDEVAYHEKYPTIYHLRKKLVDSTDKADLRLIYLALAHMIKFRGHFLIEGDLNPDNSDVDKLFIQLVQTYNQLFEENPINASGVDAKAILSARLSKSRRLENLIAQLPGEKKNGLFGNLIALSLGLTPNFKSNFDLAEDAKLQLSKDTYDDDLDNLLAQIGDQYADLFLAAKNLSDAILLSDILRVNTEITKAPLSASMIKRYDEHHQDLTLLKALVRQQLPEKYKEIFFDQSKNGYAGYIDGGASQEEFYKFIKPILEKMDGTEELLVKLNREDLLRKQRTFDNGSIPHQIHLGELHAILRRQEDFYPFLKDNREKIEKILTFRIPYYVGPLARGNSRFAWMTRKSEETITPWNFEEVVDKGASAQSFIERMTNFDKNLPNEKVLPKHSLLYEYFTVYNELTKVKYVTEGMRKPAFLSGEQKKAIVDLLFKTNRKVTVKQLKEDYFKKIECFDSVEISGVEDRFNASLGTYHDLLKIIKDKDFLDNEENEDILEDIVLTLTLFEDREMIEERLKTYAHLFDDKVMKQLKRRRYTGWGRLSRKLINGIRDKQSGKTILDFLKSDGFANRNFMQLIHDDSLTFKEDIQKAQVSGQGDSLHEHIANLAGSPAIKKGILQTVKVVDELVKVMGRHKPENIVIEMARENQTTQKGQKNSRERMKRIEEGIKELGSQILKEHPVENTQLQNEKLYLYYLQNGRDMYVDQELDINRLSDYDVDHIVPQSFLKDDSIDNKVLTRSDKARGKSDNVPSEEVVKKMKNYWRQLLNAKLITQRKFDNLTKAERGGLSELDKAGFIKRQLVETRQITKHVAQILDSRMNTKYDENDKLIREVKVITLKSKLVSDFRKDFQFYKVREINNYHHAHDAYLNAVVGTALIKKYPKLESEFVYGDYKVYDVRKMIAKSEQEIGKATAKYFFYSNIMNFFKTEITLANGEIRKRPLIETNGETGEIVWDKGRDFATVRKVLSMPQVNIVKKTEVQTGGFSKESILPKRNSDKLIARKKDWDPKKYGGFDSPTVAYSVLVVAKVEKGKSKKLKSVKELLGITIMERSSFEKNPIDFLEAKGYKEVKKDLIIKLPKYSLFELENGRKRMLASAGELQKGNELALPSKYVNFLYLASHYEKLKGSPEDNEQKQLFVEQHKHYLDEIIEQISEFSKRVILADANLDKVLSAYNKHRDKPIREQAENIIHLFTLTNLGAPAAFKYFDTTIDRKRYTSTKEVLDATLIHQSITGLYETRIDLSQLGGDGGGGGEAAAKGSSGGMNPLQLLQPLPAEVKGTKLLAHWNSGATITCIPESFLEDEQPIKQTLIKTIHGEKQQNVYYLTFKVKGRKVEAEVIASPYEYILLSPTDVPWLTQQPLQLTILVPLQEYQDRILNKTALPEEQKQQLKALFTKYDNLWQHWENQVGHRKIRPHNIATGDYPPRPQKQYPINPKAKPSIQIVIDDLLKQGVLTPQNSTMNTPVYPVPKPDGRWRMVLDYREVNKTIPLTAAQNQHSAGILATIVRQKYKTTLDLANGFWAHPITPDSYWLTAFTWQGKQYCWTRLPQGFLNSPALFTADAVDLLKEVPNVQVYVDDIYLSHDNPHEHIQQLEKVFQILLQAGYVVSLKKSEIGQRTVEFLGFNITKEGRGLTDTFKTKLLNVTPPKDLKQLQSILGLLNFARNFIPNFAELVQTLYNLIASSKGKYIEWTEDNTKQLNKVIEALNTASNLEERLPDQRLVIKVNTSPSAGYVRYYNESGKKPIMYLNYVFSKAELKFSMLEKLLTTMHKALIKAMDLAMGQEILVYSPIVSMTKIQKTPLPERKALPIRWITWMTYLEDPRIQFHYDKTLPELKHIPDVYTSSIPPLKHPSQYEGVFCTDGSAIKSPDPTKSNNAGMGIVHAIYNPEYKILNQWSIPLGHHTAQMAEIAAVEFACKKALKVPGPVLVITDSFYVAESANKELPYWKSNGFVNNKKEPLKHISKWKSIAECLSIKPDITIQHEKGHQPINTSIHTEGNALADKLATQGSYVVNAGKRTADGSEFEKRTADGSEFESPKKKAKVE

SEQ ID NO: 7298 - protein, 2096 aa, synthetic construct
MPAAKRVKLDGGDKKYSIGLDIGTNSVGWAVITDEYKVPSKKFKVLGNTDRHSIKKNLIGALLFDSGETAEATRLKRTARRRYTRRKNRICYLQEIFSNEMAKVDDSFFHRLEESFLVEEDKKHERHPIFGNIVDEVAYHEKYPTIYHLRKKLVDSTDKADLRLIYLALAHMIKFRGHFLIEGDLNPDNSDVDKLFIQLVQTYNQLFEENPINASGVDAKAILSARLSKSRRLENLIAQLPGEKKNGLFGNLIALSLGLTPNFKSNFDLAEDAKLQLSKDTYDDDLDNLLAQIGDQYADLFLAAKNLSDAILLSDILRVNTEITKAPLSASMIKRYDEHHQDLTLLKALVRQQLPEKYKEIFFDQSKNGYAGYIDGGASQEEFYKFIKPILEKMDGTEELLVKLNREDLLRKQRTFDNGSIPHQIHLGELHAILRRQEDFYPFLKDNREKIEKILTFRIPYYVGPLARGNSRFAWMTRKSEETITPWNFEEVVDKGASAQSFIERMTNFDKNLPNEKVLPKHSLLYEYFTVYNELTKVKYVTEGMRKPAFLSGEQKKAIVDLLFKTNRKVTVKQLKEDYFKKIECFDSVEISGVEDRFNASLGTYHDLLKIIKDKDFLDNEENEDILEDIVLTLTLFEDREMIEERLKTYAHLFDDKVMKQLKRRRYTGWGRLSRKLINGIRDKQSGKTILDFLKSDGFANRNFMQLIHDDSLTFKEDIQKAQVSGQGDSLHEHIANLAGSPAIKKGILQTVKVVDELVKVMGRHKPENIVIEMARENQTTQKGQKNSRERMKRIEEGIKELGSQILKEHPVENTQLQNEKLYLYYLQNGRDMYVDQELDINRLSDYDVDHIVPQSFLKDDSIDNKVLTRSDKARGKSDNVPSEEVVKKMKNYWRQLLNAKLITQRKFDNLTKAERGGLSELDKAGFIKRQLVETRQITKHVAQILDSRMNTKYDENDKLIREVKVITLKSKLVSDFRKDFQFYKVREINNYHHAHDAYLNAVVGTALIKKYPKLESEFVYGDYKVYDVRKMIAKSEQEIGKATAKYFFYSNIMNFFKTEITLANGEIRKRPLIETNGETGEIVWDKGRDFATVRKVLSMPQVNIVKKTEVQTGGFSKESILPKRNSDKLIARKKDWDPKKYGGFDSPTVAYSVLVVAKVEKGKSKKLKSVKELLGITIMERSSFEKNPIDFLEAKGYKEVKKDLIIKLPKYSLFELENGRKRMLASAGELQKGNELALPSKYVNFLYLASHYEKLKGSPEDNEQKQLFVEQHKHYLDEIIEQISEFSKRVILADANLDKVLSAYNKHRDKPIREQAENIIHLFTLTNLGAPAAFKYFDTTIDRKRYTSTKEVLDATLIHQSITGLYETRIDLSQLGGDGGGGGEAAAKGSSGGTLNIEDEYRLHETSKEPDVPLGSTWLSDFPQAWAETGGMGLAVRQAPLIIPLKATSTPVSIKQYPMSQEARLGIKPHIQRLLDQGILVPCQSPWNTPLLPVKKPGTNDYRPVQDLREVNKRVEDIHPTVPNPYNLLSGLPPSHQWYTVLDLKDAFFCLRLHPTSQPLFAFEWRDPEMGISGQLTWTRLPQGFKNSPTLFNEALHRDLADFRIQHPDLILLQYVDDLLLAATSEQDCQRGTRALLQTLGNLGYRASAKKAQICQKQVKYLGYLLKEGQRWLTEARKETVMGQPTPKTPRQLREFLGTAGFCRLWIPGFAEMAAPLYPLTKPGTLFNWGPDQQKAYQEIKQALLTAPALGLPDLTKPFELFVDEKQGYAKGVLTQKLGPWRRPVAYLSKKLDPVAAGWPPCLRMVAAIAVLTKDAGKLTMGQPLVILAPHAVEALVKQPPDRWLSNARMTHYQAMLLDTDRVQFGPVVALNPATLLPLPEKEAPHDCLEILAETHGTRPDLTDQPIPDADYTWYTDGSSFLQEGQRRAGAAVTTETEVIWARALPAGTSAQRAELIALTQALKMAEGKKLNVYTDSRYAFATAHVHGEIYRRRGWLTSEGREIKNKNEILALLKALFLPKRLSIIHCPGHQKGNSAEARGNRMADQAAREAAMKAVLETSTLLAGKRTADGSEFEKRTADGSEFESPKKKAKVE

SEQ ID NO: 7299 - protein, 2102 aa, synthetic construct
MPAAKRVKLDGGDKKYSIGLDIGTNSVGWAVITDEYKVPSKKFKVLGNTDRHSIKKNLIGALLFDSGETAEATRLKRTARRRYTRRKNRICYLQEIFSNEMAKVDDSFFHRLEESFLVEEDKKHERHPIFGNIVDEVAYHEKYPTIYHLRKKLVDSTDKADLRLIYLALAHMIKFRGHFLIEGDLNPDNSDVDKLFIQLVQTYNQLFEENPINASGVDAKAILSARLSKSRRLENLIAQLPGEKKNGLFGNLIALSLGLTPNFKSNFDLAEDAKLQLSKDTYDDDLDNLLAQIGDQYADLFLAAKNLSDAILLSDILRVNTEITKAPLSASMIKRYDEHHQDLTLLKALVRQQLPEKYKEIFFDQSKNGYAGYIDGGASQEEFYKFIKPILEKMDGTEELLVKLNREDLLRKQRTFDNGSIPHQIHLGELHAILRRQEDFYPFLKDNREKIEKILTFRIPYYVGPLARGNSRFAWMTRKSEETITPWNFEEVVDKGASAQSFIERMTNFDKNLPNEKVLPKHSLLYEYFTVYNELTKVKYVTEGMRKPAFLSGEQKKAIVDLLFKTNRKVTVKQLKEDYFKKIECFDSVEISGVEDRFNASLGTYHDLLKIIKDKDFLDNEENEDILEDIVLTLTLFEDREMIEERLKTYAHLFDDKVMKQLKRRRYTGWGRLSRKLINGIRDKQSGKTILDFLKSDGFANRNFMQLIHDDSLTFKEDIQKAQVSGQGDSLHEHIANLAGSPAIKKGILQTVKVVDELVKVMGRHKPENIVIEMARENQTTQKGQKNSRERMKRIEEGIKELGSQILKEHPVENTQLQNEKLYLYYLQNGRDMYVDQELDINRLSDYDVDHIVPQSFLKDDSIDNKVLTRSDKARGKSDNVPSEEVVKKMKNYWRQLLNAKLITQRKFDNLTKAERGGLSELDKAGFIKRQLVETRQITKHVAQILDSRMNTKYDENDKLIREVKVITLKSKLVSDFRKDFQFYKVREINNYHHAHDAYLNAVVGTALIKKYPKLESEFVYGDYKVYDVRKMIAKSEQEIGKATAKYFFYSNIMNFFKTEITLANGEIRKRPLIETNGETGEIVWDKGRDFATVRKVLSMPQVNIVKKTEVQTGGFSKESILPKRNSDKLIARKKDWDPKKYGGFDSPTVAYSVLVVAKVEKGKSKKLKSVKELLGITIMERSSFEKNPIDFLEAKGYKEVKKDLIIKLPKYSLFELENGRKRMLASAGELQKGNELALPSKYVNFLYLASHYEKLKGSPEDNEQKQLFVEQHKHYLDEIIEQISEFSKRVILADANLDKVLSAYNKHRDKPIREQAENIIHLFTLTNLGAPAAFKYFDTTIDRKRYTSTKEVLDATLIHQSITGLYETRIDLSQLGGDGGGSSGGGEAAAKGGTVSLQDEHRLFDIPVTTSLPDVWLQDFPQAWAETGGLGRAKCQAPIIIDLKPTAVPVSIKQYPMSLEAHMGIRQHIIKFLELGVLRPCRSPWNTPLLPVKKPGTQDYRPVQDLREINKRTVDIHPTVPNPYNLLSTLKPDYSWYTVLDLKDAFFCLPLAPQSQELFAFEWKDPERGISGQLTWTRLPQGFKNSPTLFNEALHRDLTDFRTQHPEVTLLQYVDDLLLAAPTKKACTQGTRHLLQELGEKGYRASAKKAQICQTKVTYLGYILSEGKRWLTPGRIETVARIPPPRNPREVREFLGTAGFCRLWIPGFAELAAPLYALTKPSTPFTWQTEHQLAFEALKKALLSAPALGLPDTSKPFTLFLDERQGIAKGVLTQKLGPWKRPVAYLSKKLDPVAAGWPPCLRIMAATAMLVKDSAKLTLGQPLTVITPHTLEAIVRQPPDRWITNARLTHYQALLLDTDRVQFGPPVTLNPATLLPVPENQPSPHDCRQVLAETHGTREDLKDQELPDADHTWYTDGSSYLDSGTRRAGAAVVDGHNTIWAQSLPPGTSAQKAELIALTKALELSKGKKANIYTDSRYAFATAHTHGSIYERRGWLTSEGKEIKNKAEIIALLKALFLPQEVAIIHCPGHQKGQDPVAVGNRQADRVARQAAMAEVLTLATEPDNTSHITAGKRTADGSEFEKRTADGSEFESPKKKAKVE

SEQ ID NO: 7300 - protein, 2218 aa, synthetic construct
MPAAKRVKLDGGDKKYSIGLDIGTNSVGWAVITDEYKVPSKKFKVLGNTDRHSIKKNLIGALLFDSGETAEATRLKRTARRRYTRRKNRICYLQEIFSNEMAKVDDSFFHRLEESFLVEEDKKHERHPIFGNIVDEVAYHEKYPTIYHLRKKLVDSTDKADLRLIYLALAHMIKFRGHFLIEGDLNPDNSDVDKLFIQLVQTYNQLFEENPINASGVDAKAILSARLSKSRRLENLIAQLPGEKKNGLFGNLIALSLGLTPNFKSNFDLAEDAKLQLSKDTYDDDLDNLLAQIGDQYADLFLAAKNLSDAILLSDILRVNTEITKAPLSASMIKRYDEHHQDLTLLKALVRQQLPEKYKEIFFDQSKNGYAGYIDGGASQEEFYKFIKPILEKMDGTEELLVKLNREDLLRKQRTFDNGSIPHQIHLGELHAILRRQEDFYPFLKDNREKIEKILTFRIPYYVGPLARGNSRFAWMTRKSEETITPWNFEEVVDKGASAQSFIERMTNFDKNLPNEKVLPKHSLLYEYFTVYNELTKVKYVTEGMRKPAFLSGEQKKAIVDLLFKTNRKVTVKQLKEDYFKKIECFDSVEISGVEDRFNASLGTYHDLLKIIKDKDFLDNEENEDILEDIVLTLTLFEDREMIEERLKTYAHLFDDKVMKQLKRRRYTGWGRLSRKLINGIRDKQSGKTILDFLKSDGFANRNFMQLIHDDSLTFKEDIQKAQVSGQGDSLHEHIANLAGSPAIKKGILQTVKVVDELVKVMGRHKPENIVIEMARENQTTQKGQKNSRERMKRIEEGIKELGSQILKEHPVENTQLQNEKLYLYYLQNGRDMYVDQELDINRLSDYDVDHIVPQSFLKDDSIDNKVLTRSDKARGKSDNVPSEEVVKKMKNYWRQLLNAKLITQRKFDNLTKAERGGLSELDKAGFIKRQLVETRQITKHVAQILDSRMNTKYDENDKLIREVKVITLKSKLVSDFRKDFQFYKVREINNYHHAHDAYLNAVVGTALIKKYPKLESEFVYGDYKVYDVRKMIAKSEQEIGKATAKYFFYSNIMNFFKTEITLANGEIRKRPLIETNGETGEIVWDKGRDFATVRKVLSMPQVNIVKKTEVQTGGFSKESILPKRNSDKLIARKKDWDPKKYGGFDSPTVAYSVLVVAKVEKGKSKKLKSVKELLGITIMERSSFEKNPIDFLEAKGYKEVKKDLIIKLPKYSLFELENGRKRMLASAGELQKGNELALPSKYVNFLYLASHYEKLKGSPEDNEQKQLFVEQHKHYLDEIIEQISEFSKRVILADANLDKVLSAYNKHRDKPIREQAENIIHLFTLTNLGAPAAFKYFDTTIDRKRYTSTKEVLDATLIHQSITGLYETRIDLSQLGGDGGGSSGGGEAAAKGGTLGDQGSRGSDPLPEPRVTLTVEGIPTEFLVNTGAEHSVLTKPMGKMGSKRTVVAGATGSKVYPWTTKRLLKIGQKQVTHSFLVIPECPAPLLGRDLLTKLKAQIQFSTEGPQVTWEDRPAMCLVLNLEEEYRLHEKPVPPSIDPSWLQLFPMVWAEKAGMGLANQVPPVVVELKSDASPVAVRQYPMSKEAREGIRPHIQRFLDLGILVPCQSPWNTPLLPVKKPGTNDYRPVQDLREVNKRVQDIHPTVPNPYNLLSSLPPSHTWYSVLDLKDAFFCLKLHPNSQPLFAFEWRDPEKGNTGQLTWTRLPQGFKNSPTLFDEALHRDLASFRALNPQVVMLQYVDDLLVAAPTYRDCKEGTRRLLQELSKLGYRVSAKKAQLCREEVTYLGYLLKGGKRWLTPARKATVMKIPTPTTPRQVREFLGTAGFCRLWIPGFASLAAPLYPLTREKVPFTWTEAHQEAFGRIKEALLSAPALALPDLTKPFALYVDEKEGVARGVLTQTLGPWRRPVAYLSKKLDPVASGWPTCLKAIAAVALLLKDADKLTLGQNVLVIAPHNLESIVRQPPDRWMTNARMTHYQSLLLNERVSFAPPAILNPATLLPVESDDTPIHICSEILAEETGTRPDLRDQPLPGVPAWYTDGSSFIMDGRRQAGAAIVDNKRTVWASNLPEGTSAQKAELIALTQALRLAEGKSINIYTDSRYAFATAHVHGAIYKQRGLLTSAGKDIKNKEEILALLEAIHLPKRVAIIHCPGHQRGTDPVATGNRKADEAAKQAAQSTRILTETTKNAGKRTADGSEFEKRTADGSEFESPKKKAKVE

SEQ ID NO: 7301 - protein, 2127 aa, synthetic construct
MPAAKRVKLDGGDKKYSIGLDIGTNSVGWAVITDEYKVPSKKFKVLGNTDRHSIKKNLIGALLFDSGETAEATRLKRTARRRYTRRKNRICYLQEIFSNEMAKVDDSFFHRLEESFLVEEDKKHERHPIFGNIVDEVAYHEKYPTIYHLRKKLVDSTDKADLRLIYLALAHMIKFRGHFLIEGDLNPDNSDVDKLFIQLVQTYNQLFEENPINASGVDAKAILSARLSKSRRLENLIAQLPGEKKNGLFGNLIALSLGLTPNFKSNFDLAEDAKLQLSKDTYDDDLDNLLAQIGDQYADLFLAAKNLSDAILLSDILRVNTEITKAPLSASMIKRYDEHHQDLTLLKALVRQQLPEKYKEIFFDQSKNGYAGYIDGGASQEEFYKFIKPILEKMDGTEELLVKLNREDLLRKQRTFDNGSIPHQIHLGELHAILRRQEDFYPFLKDNREKIEKILTFRIPYYVGPLARGNSRFAWMTRKSEETITPWNFEEVVDKGASAQSFIERMTNFDKNLPNEKVLPKHSLLYEYFTVYNELTKVKYVTEGMRKPAFLSGEQKKAIVDLLFKTNRKVTVKQLKEDYFKKIECFDSVEISGVEDRFNASLGTYHDLLKIIKDKDFLDNEENEDILEDIVLTLTLFEDREMIEERLKTYAHLFDDKVMKQLKRRRYTGWGRLSRKLINGIRDKQSGKTILDFLKSDGFANRNFMQLIHDDSLTFKEDIQKAQVSGQGDSLHEHIANLAGSPAIKKGILQTVKVVDELVKVMGRHKPENIVIEMARENQTTQKGQKNSRERMKRIEEGIKELGSQILKEHPVENTQLQNEKLYLYYLQNGRDMYVDQELDINRLSDYDVDHIVPQSFLKDDSIDNKVLTRSDKARGKSDNVPSEEVVKKMKNYWRQLLNAKLITQRKFDNLTKAERGGLSELDKAGFIKRQLVETRQITKHVAQILDSRMNTKYDENDKLIREVKVITLKSKLVSDFRKDFQFYKVREINNYHHAHDAYLNAVVGTALIKKYPKLESEFVYGDYKVYDVRKMIAKSEQEIGKATAKYFFYSNIMNFFKTEITLANGEIRKRPLIETNGETGEIVWDKGRDFATVRKVLSMPQVNIVKKTEVQTGGFSKESILPKRNSDKLIARKKDWDPKKYGGFDSPTVAYSVLVVAKVEKGKSKKLKSVKELLGITIMERSSFEKNPIDFLEAKGYKEVKKDLIIKLPKYSLFELENGRKRMLASAGELQKGNELALPSKYVNFLYLASHYEKLKGSPEDNEQKQLFVEQHKHYLDEIIEQISEFSKRVILADANLDKVLSAYNKHRDKPIREQAENIIHLFTLTNLGAPAAFKYFDTTIDRKRYTSTKEVLDATLIHQSITGLYETRIDLSQLGGDGGGSSGGGEAAAKGGLLGRDLLTKLKAQIQFSTEGPQVTWEDRPAMCLVLNLEEEYRLHEKPVPPSIDPSWLQLFPMVWAEKAGMGLANQVPPVVVELKSDASPVAVRQYPMSKEAREGIRPHIQRFLDLGILVPCQSPWNTPLLPVKKPGTNDYRPVQDLREVNKRVQDIHPTVPNPYNLLSSLPPSHTWYSVLDLKDAFFCLKLHPNSQPLFAFEWRDPEKGNTGQLTWTRLPQGFKNSPTLFNEALHRDLASFRALNPQVVMLQYVDDLLVAAPTYRDCKEGTRRLLQELSKLGYRVSAKKAQLCREEVTYLGYLLKGGKRWLTPARKATVMKIPTPTTPRQVREFLGTAGFCRLWIPGFASLAAPLYPLTRPKVPFTWTEAHQEAFGRIKEALLSAPALALPDLTKPFALYVDEKEGVARGVLTQTLGPWRRPVAYLSKKLDPVASGWPTCLKAIAAVALLLKDADKLTLGQNVLVIAPHNLESIVRQPPDRWMTNARMTHYQSLLLNERVSFAPPAILNPATLLPVESDDTPIHICSEILAEETGTRPDLRDQPLPGVPAWYTDGSSFIMDGRRQAGAAIVDNKRTVWASNLPEGTSAQKAELIALTQALRLAEGKSINIYTDSRYAFATAHVHGAIYKQRGWLTSAGKDIKNKEEILALLEAIHLPKRVAIIHCPGHQRGTDPVATGNRKADEAAKQAAQSTRILTETTKNAGKRTADGSEFEKRTADGSEFESPKKKAKVE

SEQ ID NO: 7302 - protein, 2096 aa, synthetic construct
MPAAKRVKLDGGDKKYSIGLDIGTNSVGWAVITDEYKVPSKKFKVLGNTDRHSIKKNLIGALLFDSGETAEATRLKRTARRRYTRRKNRICYLQEIFSNEMAKVDDSFFHRLEESFLVEEDKKHERHPIFGNIVDEVAYHEKYPTIYHLRKKLVDSTDKADLRLIYLALAHMIKFRGHFLIEGDLNPDNSDVDKLFIQLVQTYNQLFEENPINASGVDAKAILSARLSKSRRLENLIAQLPGEKKNGLFGNLIALSLGLTPNFKSNFDLAEDAKLQLSKDTYDDDLDNLLAQIGDQYADLFLAAKNLSDAILLSDILRVNTEITKAPLSASMIKRYDEHHQDLTLLKALVRQQLPEKYKEIFFDQSKNGYAGYIDGGASQEEFYKFIKPILEKMDGTEELLVKLNREDLLRKQRTFDNGSIPHQIHLGELHAILRRQEDFYPFLKDNREKIEKILTFRIPYYVGPLARGNSRFAWMTRKSEETITPWNFEEVVDKGASAQSFIERMTNFDKNLPNEKVLPKHSLLYEYFTVYNELTKVKYVTEGMRKPAFLSGEQKKAIVDLLFKTNRKVTVKQLKEDYFKKIECFDSVEISGVEDRFNASLGTYHDLLKIIKDKDFLDNEENEDILEDIVLTLTLFEDREMIEERLKTYAHLFDDKVMKQLKRRRYTGWGRLSRKLINGIRDKQSGKTILDFLKSDGFANRNFMQLIHDDSLTFKEDIQKAQVSGQGDSLHEHIANLAGSPAIKKGILQTVKVVDELVKVMGRHKPENIVIEMARENQTTQKGQKNSRERMKRIEEGIKELGSQILKEHPVENTQLQNEKLYLYYLQNGRDMYVDQELDINRLSDYDVDHIVPQSFLKDDSIDNKVLTRSDKARGKSDNVPSEEVVKKMKNYWRQLLNAKLITQRKFDNLTKAERGGLSELDKAGFIKRQLVETRQITKHVAQILDSRMNTKYDENDKLIREVKVITLKSKLVSDFRKDFQFYKVREINNYHHAHDAYLNAVVGTALIKKYPKLESEFVYGDYKVYDVRKMIAKSEQEIGKATAKYFFYSNIMNFFKTEITLANGEIRKRPLIETNGETGEIVWDKGRDFATVRKVLSMPQVNIVKKTEVQTGGFSKESILPKRNSDKLIARKKDWDPKKYGGFDSPTVAYSVLVVAKVEKGKSKKLKSVKELLGITIMERSSFEKNPIDFLEAKGYKEVKKDLIIKLPKYSLFELENGRKRMLASAGELQKGNELALPSKYVNFLYLASHYEKLKGSPEDNEQKQLFVEQHKHYLDEIIEQISEFSKRVILADANLDKVLSAYNKHRDKPIREQAENIIHLFTLTNLGAPAAFKYFDTTIDRKRYTSTKEVLDATLIHQSITGLYETRIDLSQLGGDGGGSSGGGEAAAKGGTLNIEDEYRLHETSKGPDVPLGSTWLSDFPQAWAETGGMGLAVRQAPLIIPLKATSTPVSIKQYPMSQEARLGIKPHIQRLLDQGILVPCQSPWNTPLLPVKKPGTNDYRPVQDLREVNKRVEDIHPTVPNPYNLLSGLPPSHQWYTVLDLKDAFFCLRLHPTSQSLFAFEWRDPEMGISGQLTWTRLPQGFKNSPTLFNEALHRDLADFRIQHPDLILLQYVDDLLLAATSELDCQQGTRALLQTLGDLGYRASAKKAQICQKQVKYLGYLLKEGQRWLTEARKETVMGQPTPKTPRQLREFLGTAGFCRLWIPGFAEMAAPLYPLTKPGTLFEWGPDQQKAYQEIKQALLTAPALGLPDLTKPFELFVDEKQGYAKGVLTQKLGPWRRPVAYLSKKLDPVAAGWPPCLRMVAAIAVLTKDAGKLTMGQPLVILAPHAVEALVKQPPDRWLSNARMTHYQALLLDTDRVQFGPIVALNPATLLPLPEEGLQHDCLDILAEAHGTRPDLTDQPLPDADHTWYTDGSSFLQEGQRKAGAAVTTETEVVWAKALPAGTSAQRAELIALTQALKMAEGKKLNVYTDSRYAFATAHIHGEIYRRRGWLTSEGKEIKNKDEILALLKALFLPKRLSIIHCPGHQKGNRAEARGNRMADQAAREVATRETPETSTLLAGKRTADGSEFEKRTADGSEFESPKKKAKVE

SEQ ID NO: 7303 - protein, 2090 aa, synthetic construct
MPAAKRVKLDGGDKKYSIGLDIGTNSVGWAVITDEYKVPSKKFKVLGNTDRHSIKKNLIGALLFDSGETAEATRLKRTARRRYTRRKNRICYLQEIFSNEMAKVDDSFFHRLEESFLVEEDKKHERHPIFGNIVDEVAYHEKYPTIYHLRKKLVDSTDKADLRLIYLALAHMIKFRGHFLIEGDLNPDNSDVDKLFIQLVQTYNQLFEENPINASGVDAKAILSARLSKSRRLENLIAQLPGEKKNGLFGNLIALSLGLTPNFKSNFDLAEDAKLQLSKDTYDDDLDNLLAQIGDQYADLFLAAKNLSDAILLSDILRVNTEITKAPLSASMIKRYDEHHQDLTLLKALVRQQLPEKYKEIFFDQSKNGYAGYIDGGASQEEFYKFIKPILEKMDGTEELLVKLNREDLLRKQRTFDNGSIPHQIHLGELHAILRRQEDFYPFLKDNREKIEKILTFRIPYYVGPLARGNSRFAWMTRKSEETITPWNFEEVVDKGASAQSFIERMTNFDKNLPNEKVLPKHSLLYEYFTVYNELTKVKYVTEGMRKPAFLSGEQKKAIVDLLFKTNRKVTVKQLKEDYFKKIECFDSVEISGVEDRFNASLGTYHDLLKIIKDKDFLDNEENEDILEDIVLTLTLFEDREMIEERLKTYAHLFDDKVMKQLKRRRYTGWGRLSRKLINGIRDKQSGKTILDFLKSDGFANRNFMQLIHDDSLTFKEDIQKAQVSGQGDSLHEHIANLAGSPAIKKGILQTVKVVDELVKVMGRHKPENIVIEMARENQTTQKGQKNSRERMKRIEEGIKELGSQILKEHPVENTQLQNEKLYLYYLQNGRDMYVDQELDINRLSDYDVDHIVPQSFLKDDSIDNKVLTRSDKARGKSDNVPSEEVVKKMKNYWRQLLNAKLITQRKFDNLTKAERGGLSELDKAGFIKRQLVETRQITKHVAQILDSRMNTKYDENDKLIREVKVITLKSKLVSDFRKDFQFYKVREINNYHHAHDAYLNAVVGTALIKKYPKLESEFVYGDYKVYDVRKMIAKSEQEIGKATAKYFFYSNIMNFFKTEITLANGEIRKRPLIETNGETGEIVWDKGRDFATVRKVLSMPQVNIVKKTEVQTGGFSKESILPKRNSDKLIARKKDWDPKKYGGFDSPTVAYSVLVVAKVEKGKSKKLKSVKELLGITIMERSSFEKNPIDFLEAKGYKEVKKDLIIKLPKYSLFELENGRKRMLASAGELQKGNELALPSKYVNFLYLASHYEKLKGSPEDNEQKQLFVEQHKHYLDEIIEQISEFSKRVILADANLDKVLSAYNKHRDKPIREQAENIIHLFTLTNLGAPAAFKYFDTTIDRKRYTSTKEVLDATLIHQSITGLYETRIDLSQLGGDGGGSSGGGEAAAKGGTLQLDDEYRLYSPLVKPDQNIQFWLEQFPQAWAETAGMGLAKQVPPQVIQLKASATPVSVRQYPLSKEAQEGIRPHVQRLIQQGILVPVQSPWNTPLLPVRKPGTNDYRPVQDLREVNKRVQDIHPTVPNPYNLLCALPPQRSWYTVLDLKDAFFCLRLHPTSQPLFAFEWRDPGTGRTGQLTWTRLPQGFKNSPTIFDEALHRDLANFRIQHPQVTLLQYVDDLLLAGATKQDCLEGTKALLLELSDLGYRASAKKAQICRREVTYLGYSLRDGQRWLTEARKKTVVQIPAPTTAKQVREFLGTAGFCRLWIPGFATLAAPLYPLTKEKGEFSWAPEHQKAFDAIKKALLSAPALALPDVTKPFTLYVDERKGVARGVLTQTLGPWRRPVAYLSKKLDPVASGWPVCLKAIAAVAILVKDADKLTLGQNITVIAPHALENIVRQPPDRWMTNARMTHYQSLLLTERVTFAPPAALNPATLLPEETDEPVTHDCHQLLIEETGVRKDLTDIPLTGEVLTWFTDGSSYVVEGKRMAGAAVVDGTRTIWASSLPEGTSAQKAELMALTQALRLAEGKSINIYTDSRYAFATAHVHGAIYKQRGLLTSAGREIKNKEEILSLLEALHLPKRLAIIHCPGHQKAKDPISRGNQMADRVAKQAAQGVNLLAGKRTADGSEFEKRTADGSEFESPKKKAKVE

SEQ ID NO: 7304 - protein, 2087 aa, synthetic construct
MPAAKRVKLDGGDKKYSIGLDIGTNSVGWAVITDEYKVPSKKFKVLGNTDRHSIKKNLIGALLFDSGETAEATRLKRTARRRYTRRKNRICYLQEIFSNEMAKVDDSFFHRLEESFLVEEDKKHERHPIFGNIVDEVAYHEKYPTIYHLRKKLVDSTDKADLRLIYLALAHMIKFRGHFLIEGDLNPDNSDVDKLFIQLVQTYNQLFEENPINASGVDAKAILSARLSKSRRLENLIAQLPGEKKNGLFGNLIALSLGLTPNFKSNFDLAEDAKLQLSKDTYDDDLDNLLAQIGDQYADLFLAAKNLSDAILLSDILRVNTEITKAPLSASMIKRYDEHHQDLTLLKALVRQQLPEKYKEIFFDQSKNGYAGYIDGGASQEEFYKFIKPILEKMDGTEELLVKLNREDLLRKQRTFDNGSIPHQIHLGELHAILRRQEDFYPFLKDNREKIEKILTFRIPYYVGPLARGNSRFAWMTRKSEETITPWNFEEVVDKGASAQSFIERMTNFDKNLPNEKVLPKHSLLYEYFTVYNELTKVKYVTEGMRKPAFLSGEQKKAIVDLLFKTNRKVTVKQLKEDYFKKIECFDSVEISGVEDRFNASLGTYHDLLKIIKDKDFLDNEENEDILEDIVLTLTLFEDREMIEERLKTYAHLFDDKVMKQLKRRRYTGWGRLSRKLINGIRDKQSGKTILDFLKSDGFANRNFMQLIHDDSLTFKEDIQKAQVSGQGDSLHEHIANLAGSPAIKKGILQTVKVVDELVKVMGRHKPENIVIEMARENQTTQKGQKNSRERMKRIEEGIKELGSQILKEHPVENTQLQNEKLYLYYLQNGRDMYVDQELDINRLSDYDVDHIVPQSFLKDDSIDNKVLTRSDKARGKSDNVPSEEVVKKMKNYWRQLLNAKLITQRKFDNLTKAERGGLSELDKAGFIKRQLVETRQITKHVAQILDSRMNTKYDENDKLIREVKVITLKSKLVSDFRKDFQFYKVREINNYHHAHDAYLNAVVGTALIKKYPKLESEFVYGDYKVYDVRKMIAKSEQEIGKATAKYFFYSNIMNFFKTEITLANGEIRKRPLIETNGETGEIVWDKGRDFATVRKVLSMPQVNIVKKTEVQTGGFSKESILPKRNSDKLIARKKDWDPKKYGGFDSPTVAYSVLVVAKVEKGKSKKLKSVKELLGITIMERSSFEKNPIDFLEAKGYKEVKKDLIIKLPKYSLFELENGRKRMLASAGELQKGNELALPSKYVNFLYLASHYEKLKGSPEDNEQKQLFVEQHKHYLDEIIEQISEFSKRVILADANLDKVLSAYNKHRDKPIREQAENIIHLFTLTNLGAPAAFKYFDTTIDRKRYTSTKEVLDATLIHQSITGLYETRIDLSQLGGDGGGSSGGGEAAAKGGIPWLMKKPLQLTTLVPLQEYEERLLKQTMLTGSYKEKLQSLFLKYDALWQHWENQVGHRRIKPHHIATGTVNPRPQKQYPINPKAKASIQTVINDLLKQGVLIQQNSIMNTPVYPVPKPDGKWRMVLDYREVNKTIPLIAAQNQHSAGILSSIFRGKYKTTLDLSNGFWAHSITPESYWLTAFTWLGQQYCWTRLPQGFLNSPALFNADVVDLLKEVPNVQVYVDDIYISHDDPREHLEQLEKVFSLLLNAGYVVSLKKSEIAQHEVEFLGFNITKEGRGLTETFKQKLLNITPPRDLKQLQSILGKLNFARNFIPNFSELVKPLYNIIATAPGKYITWTTDNSQQLQNIISMLNSAENLEERNPEVRLIMKVNTSPSAGYIRFYNEFAKRPIMYLNYVYTKAEVKFTNTEKLLTTIHKGLIKALDLGMGQEILVYSPIVSMTKIQKTPLPERKALPIRWITWMSYLEDPRIQFHYDKTLPELQQVPTVTDDIIAKIKHPSEFSMVFYTDGSAIKHPNVNKSHNAGMGIAQVQFKPEFTVINTWSIPLGDHTAQLAEVAAVEFACKKALKIDGPVLIVTDSFYVAESVNKELPYWQSNGFFNNKKKPLKHVSKWKSIADCIQLKPDIIIIHEKGHQPTASTFHTEGNNLADKLATQGSYVVNAGKRTADGSEFEKRTADGSEFESPKKKAKVE

SEQ ID NO: 7305 - protein, 2176 aa, synthetic construct
MPAAKRVKLDGGDKKYSIGLDIGTNSVGWAVITDEYKVPSKKFKVLGNTDRHSIKKNLIGALLFDSGETAEATRLKRTARRRYTRRKNRICYLQEIFSNEMAKVDDSFFHRLEESFLVEEDKKHERHPIFGNIVDEVAYHEKYPTIYHLRKKLVDSTDKADLRLIYLALAHMIKFRGHFLIEGDLNPDNSDVDKLFIQLVQTYNQLFEENPINASGVDAKAILSARLSKSRRLENLIAQLPGEKKNGLFGNLIALSLGLTPNFKSNFDLAEDAKLQLSKDTYDDDLDNLLAQIGDQYADLFLAAKNLSDAILLSDILRVNTEITKAPLSASMIKRYDEHHQDLTLLKALVRQQLPEKYKEIFFDQSKNGYAGYIDGGASQEEFYKFIKPILEKMDGTEELLVKLNREDLLRKQRTFDNGSIPHQIHLGELHAILRRQEDFYPFLKDNREKIEKILTFRIPYYVGPLARGNSRFAWMTRKSEETITPWNFEEVVDKGASAQSFIERMTNFDKNLPNEKVLPKHSLLYEYFTVYNELTKVKYVTEGMRKPAFLSGEQKKAIVDLLFKTNRKVTVKQLKEDYFKKIECFDSVEISGVEDRFNASLGTYHDLLKIIKDKDFLDNEENEDILEDIVLTLTLFEDREMIEERLKTYAHLFDDKVMKQLKRRRYTGWGRLSRKLINGIRDKQSGKTILDFLKSDGFANRNFMQLIHDDSLTFKEDIQKAQVSGQGDSLHEHIANLAGSPAIKKGILQTVKVVDELVKVMGRHKPENIVIEMARENQTTQKGQKNSRERMKRIEEGIKELGSQILKEHPVENTQLQNEKLYLYYLQNGRDMYVDQELDINRLSDYDVDHIVPQSFLKDDSIDNKVLTRSDKARGKSDNVPSEEVVKKMKNYWRQLLNAKLITQRKFDNLTKAERGGLSELDKAGFIKRQLVETRQITKHVAQILDSRMNTKYDENDKLIREVKVITLKSKLVSDFRKDFQFYKVREINNYHHAHDAYLNAVVGTALIKKYPKLESEFVYGDYKVYDVRKMIAKSEQEIGKATAKYFFYSNIMNFFKTEITLANGEIRKRPLIETNGETGEIVWDKGRDFATVRKVLSMPQVNIVKKTEVQTGGFSKESILPKRNSDKLIARKKDWDPKKYGGFDSPTVAYSVLVVAKVEKGKSKKLKSVKELLGITIMERSSFEKNPIDFLEAKGYKEVKKDLIIKLPKYSLFELENGRKRMLASAGELQKGNELALPSKYVNFLYLASHYEKLKGSPEDNEQKQLFVEQHKHYLDEIIEQISEFSKRVILADANLDKVLSAYNKHRDKPIREQAENIIHLFTLTNLGAPAAFKYFDTTIDRKRYTSTKEVLDATLIHQSITGLYETRIDLSQLGGDGGGSSGGGEAAAKGGMDPLQLLQPLEAEIKGTKLKAHWNSGATITCVPQAFLEEEVPIKNIWIKTIHGEKEQPVYYLTFKIQGRKVEAEVISSPYDYILVSPSDIPWLMKKPLQLTTLVPLQEYEERLLKQTMLTGSYKEKLQSLFLKYDALWQHWENQVGHRRIKPHHIATGTVNPRPQKQYPINPKAKASIQTVINDLLKQGVLIQQNSIMNTPVYPVPKPDGKWRMVLDYREVNKTIPLIAAQNQHSAGILSSIFRGKYKTTLDLSNGFWAHSITPESYWLTAFTWLGQQYCWTRLPQGFLNSPALFNADVVDLLKEVPNVQVYVDDIYISHDDPREHLEQLEKVFSLLLNAGYVVSLKKSEIAQHEVEFLGFNITKEGRGLTETFKQKLLNITPPRDLKQLQSILGLLNFARNFIPNFSELVKPLYNIIATAPGKYITWTTDNSQQLQNIISMLNSAENLEERNPEVRLIMKVNTSPSAGYIRFYNEFAKRPIMYLNYVYTKAEVKFTNTEKLLTTIHKGLIKALDLGMGQEILVYSPIVSMTKIQKTPLPERKALPIRWITWMSYLEDPRIQFHYDKTLPELQQVPTVTDDIIAKIKHPSEFSMVFYTDGSAIKHPNVNKSHNAGMGIAQVQFKPEFTVINTWSIPLGDHTAQLAEVAAVEFACKKALKIDGPVLIVTDSFYVAESVNKELPYWQSNGFFNNKKKPLKHVSKWKSIADCIQLKPDIIIIHEKGHQPTASTFHTEGNNLADKLATQGSYVVNAGKRTADGSEFEKRTADGSEFESPKKKAKVE

SEQ ID NO: 7306 - protein, 2094 aa, synthetic construct
MPAAKRVKLDGGDKKYSIGLDIGTNSVGWAVITDEYKVPSKKFKVLGNTDRHSIKKNLIGALLFDSGETAEATRLKRTARRRYTRRKNRICYLQEIFSNEMAKVDDSFFHRLEESFLVEEDKKHERHPIFGNIVDEVAYHEKYPTIYHLRKKLVDSTDKADLRLIYLALAHMIKFRGHFLIEGDLNPDNSDVDKLFIQLVQTYNQLFEENPINASGVDAKAILSARLSKSRRLENLIAQLPGEKKNGLFGNLIALSLGLTPNFKSNFDLAEDAKLQLSKDTYDDDLDNLLAQIGDQYADLFLAAKNLSDAILLSDILRVNTEITKAPLSASMIKRYDEHHQDLTLLKALVRQQLPEKYKEIFFDQSKNGYAGYIDGGASQEEFYKFIKPILEKMDGTEELLVKLNREDLLRKQRTFDNGSIPHQIHLGELHAILRRQEDFYPFLKDNREKIEKILTFRIPYYVGPLARGNSRFAWMTRKSEETITPWNFEEVVDKGASAQSFIERMTNFDKNLPNEKVLPKHSLLYEYFTVYNELTKVKYVTEGMRKPAFLSGEQKKAIVDLLFKTNRKVTVKQLKEDYFKKIECFDSVEISGVEDRFNASLGTYHDLLKIIKDKDFLDNEENEDILEDIVLTLTLFEDREMIEERLKTYAHLFDDKVMKQLKRRRYTGWGRLSRKLINGIRDKQSGKTILDFLKSDGFANRNFMQLIHDDSLTFKEDIQKAQVSGQGDSLHEHIANLAGSPAIKKGILQTVKVVDELVKVMGRHKPENIVIEMARENQTTQKGQKNSRERMKRIEEGIKELGSQILKEHPVENTQLQNEKLYLYYLQNGRDMYVDQELDINRLSDYDVDHIVPQSFLKDDSIDNKVLTRSDKARGKSDNVPSEEVVKKMKNYWRQLLNAKLITQRKFDNLTKAERGGLSELDKAGFIKRQLVETRQITKHVAQILDSRMNTKYDENDKLIREVKVITLKSKLVSDFRKDFQFYKVREINNYHHAHDAYLNAVVGTALIKKYPKLESEFVYGDYKVYDVRKMIAKSEQEIGKATAKYFFYSNIMNFFKTEITLANGEIRKRPLIETNGETGEIVWDKGRDFATVRKVLSMPQVNIVKKTEVQTGGFSKESILPKRNSDKLIARKKDWDPKKYGGFDSPTVAYSVLVVAKVEKGKSKKLKSVKELLGITIMERSSFEKNPIDFLEAKGYKEVKKDLIIKLPKYSLFELENGRKRMLASAGELQKGNELALPSKYVNFLYLASHYEKLKGSPEDNEQKQLFVEQHKHYLDEIIEQISEFSKRVILADANLDKVLSAYNKHRDKPIREQAENIIHLFTLTNLGAPAAFKYFDTTIDRKRYTSTKEVLDATLIHQSITGLYETRIDLSQLGGDGGGSSGGGEAAAKGGVLNLEEEYRLHEKPVPSSIDPSWLQLFPTVWAERAGMGLANQVPPVVVELRSGASPVAVRQYPMSKEAREGIRPHIQRFLDLGVLVPCQSPWNTPLLPVKKPGTNDYRPVQDLREINKRVQDIHPTVPNPYNLLSSLPPSHTWYSVLDLKDAFFCLKLHPNSQPLFAFEWRDPEKGNTGQLTWTRLPQGFKNSPTLFNEALHRDLAPFRALNPQVVLLQYVDDLLVAAPTYRDCKEGTQKLLQELSKLGYRVSAKKAQLCQKEVTYLGYLLKEGKRWLTPARKATVMKIPPPTTPRQVREFLGTAGFCRLWIPGFASLAAPLYPLTKPSIPFIWTEEHQKAFDRIKEALLSAPALALPDLTKPFTLYVDERAGVARGVLTQTLGPWRRPVAYLSKKLDPVASGWPTCLKAVAAVALLLKDADKLTLGQNVTVIASHSLESIVRQPPDRWMTNARMTHYQSLLLNERVSFAPPAVLNPATLLPVESEATPVHRCSEILAEETGTRRDLKDQPLPGVPAWYTDGSSFIAEGKRRAGAAIVDGKRTVWASSLPEGTSAQKAELVALTQALRLAEGKDINIYTDSRYAFATAHIHGAIYKQRGWLTSAGKDIKNKEEILALLEAIHLPKRVAIIHCPGHQKGNDPVATGNRRADEAAKQAALSTRVLAETTKPAGKRTADGSEFEKRTADGSEFESPKKKAKVE

SEQ ID NO: 7307 - protein, 2102 aa, synthetic construct
MPAAKRVKLDGGDKKYSIGLDIGTNSVGWAVITDEYKVPSKKFKVLGNTDRHSIKKNLIGALLFDSGETAEATRLKRTARRRYTRRKNRICYLQEIFSNEMAKVDDSFFHRLEESFLVEEDKKHERHPIFGNIVDEVAYHEKYPTIYHLRKKLVDSTDKADLRLIYLALAHMIKFRGHFLIEGDLNPDNSDVDKLFIQLVQTYNQLFEENPINASGVDAKAILSARLSKSRRLENLIAQLPGEKKNGLFGNLIALSLGLTPNFKSNFDLAEDAKLQLSKDTYDDDLDNLLAQIGDQYADLFLAAKNLSDAILLSDILRVNTEITKAPLSASMIKRYDEHHQDLTLLKALVRQQLPEKYKEIFFDQSKNGYAGYIDGGASQEEFYKFIKPILEKMDGTEELLVKLNREDLLRKQRTFDNGSIPHQIHLGELHAILRRQEDFYPFLKDNREKIEKILTFRIPYYVGPLARGNSRFAWMTRKSEETITPWNFEEVVDKGASAQSFIERMTNFDKNLPNEKVLPKHSLLYEYFTVYNELTKVKYVTEGMRKPAFLSGEQKKAIVDLLFKTNRKVTVKQLKEDYFKKIECFDSVEISGVEDRFNASLGTYHDLLKIIKDKDFLDNEENEDILEDIVLTLTLFEDREMIEERLKTYAHLFDDKVMKQLKRRRYTGWGRLSRKLINGIRDKQSGKTILDFLKSDGFANRNFMQLIHDDSLTFKEDIQKAQVSGQGDSLHEHIANLAGSPAIKKGILQTVKVVDELVKVMGRHKPENIVIEMARENQTTQKGQKNSRERMKRIEEGIKELGSQILKEHPVENTQLQNEKLYLYYLQNGRDMYVDQELDINRLSDYDVDHIVPQSFLKDDSIDNKVLTRSDKARGKSDNVPSEEVVKKMKNYWRQLLNAKLITQRKFDNLTKAERGGLSELDKAGFIKRQLVETRQITKHVAQILDSRMNTKYDENDKLIREVKVITLKSKLVSDFRKDFQFYKVREINNYHHAHDAYLNAVVGTALIKKYPKLESEFVYGDYKVYDVRKMIAKSEQEIGKATAKYFFYSNIMNFFKTEITLANGEIRKRPLIETNGETGEIVWDKGRDFATVRKVLSMPQVNIVKKTEVQTGGFSKESILPKRNSDKLIARKKDWDPKKYGGFDSPTVAYSVLVVAKVEKGKSKKLKSVKELLGITIMERSSFEKNPIDFLEAKGYKEVKKDLIIKLPKYSLFELENGRKRMLASAGELQKGNELALPSKYVNFLYLASHYEKLKGSPEDNEQKQLFVEQHKHYLDEIIEQISEFSKRVILADANLDKVLSAYNKHRDKPIREQAENIIHLFTLTNLGAPAAFKYFDTTIDRKRYTSTKEVLDATLIHQSITGLYETRIDLSQLGGDGGGSSEAAAKGGGGGTVSLQDEHRLFDIPVTTSLPDVWLQDFPQAWAETGGLGRAKCQAPIIIDLKPTAVPVSIKQYPMSLEAHMGIRQHIIKFLELGVLRPCRSPWNTPLLPVKKPGTQDYRPVQDLREINKRTVDIHPTVPNPYNLLSTLKPDYSWYTVLDLKDAFFCLPLAPQSQELFAFEWKDPERGISGQLTWTRLPQGFKNSPTLFNEALHRDLTDFRTQHPEVTLLQYVDDLLLAAPTKKACTQGTRHLLQELGEKGYRASAKKAQICQTKVTYLGYILSEGKRWLTPGRIETVARIPPPRNPREVREFLGTAGFCRLWIPGFAELAAPLYALTKPSTPFTWQTEHQLAFEALKKALLSAPALGLPDTSKPFTLFLDERQGIAKGVLTQKLGPWKRPVAYLSKKLDPVAAGWPPCLRIMAATAMLVKDSAKLTLGQPLTVITPHTLEAIVRQPPDRWITNARLTHYQALLLDTDRVQFGPPVTLNPATLLPVPENQPSPHDCRQVLAETHGTREDLKDQELPDADHTWYTDGSSYLDSGTRRAGAAVVDGHNTIWAQSLPPGTSAQKAELIALTKALELSKGKKANIYTDSRYAFATAHTHGSIYERRGWLTSEGKEIKNKAEIIALLKALFLPQEVAIIHCPGHQKGQDPVAVGNRQADRVARQAAMAEVLTLATEPDNTSHITAGKRTADGSEFEKRTADGSEFESPKKKAKVE

SEQ ID NO: 7308 - protein, 2173 aa, synthetic construct
MPAAKRVKLDGGDKKYSIGLDIGTNSVGWAVITDEYKVPSKKFKVLGNTDRHSIKKNLIGALLFDSGETAEATRLKRTARRRYTRRKNRICYLQEIFSNEMAKVDDSFFHRLEESFLVEEDKKHERHPIFGNIVDEVAYHEKYPTIYHLRKKLVDSTDKADLRLIYLALAHMIKFRGHFLIEGDLNPDNSDVDKLFIQLVQTYNQLFEENPINASGVDAKAILSARLSKSRRLENLIAQLPGEKKNGLFGNLIALSLGLTPNFKSNFDLAEDAKLQLSKDTYDDDLDNLLAQIGDQYADLFLAAKNLSDAILLSDILRVNTEITKAPLSASMIKRYDEHHQDLTLLKALVRQQLPEKYKEIFFDQSKNGYAGYIDGGASQEEFYKFIKPILEKMDGTEELLVKLNREDLLRKQRTFDNGSIPHQIHLGELHAILRRQEDFYPFLKDNREKIEKILTFRIPYYVGPLARGNSRFAWMTRKSEETITPWNFEEVVDKGASAQSFIERMTNFDKNLPNEKVLPKHSLLYEYFTVYNELTKVKYVTEGMRKPAFLSGEQKKAIVDLLFKTNRKVTVKQLKEDYFKKIECFDSVEISGVEDRFNASLGTYHDLLKIIKDKDFLDNEENEDILEDIVLTLTLFEDREMIEERLKTYAHLFDDKVMKQLKRRRYTGWGRLSRKLINGIRDKQSGKTILDFLKSDGFANRNFMQLIHDDSLTFKEDIQKAQVSGQGDSLHEHIANLAGSPAIKKGILQTVKVVDELVKVMGRHKPENIVIEMARENQTTQKGQKNSRERMKRIEEGIKELGSQILKEHPVENTQLQNEKLYLYYLQNGRDMYVDQELDINRLSDYDVDHIVPQSFLKDDSIDNKVLTRSDKARGKSDNVPSEEVVKKMKNYWRQLLNAKLITQRKFDNLTKAERGGLSELDKAGFIKRQLVETRQITKHVAQILDSRMNTKYDENDKLIREVKVITLKSKLVSDFRKDFQFYKVREINNYHHAHDAYLNAVVGTALIKKYPKLESEFVYGDYKVYDVRKMIAKSEQEIGKATAKYFFYSNIMNFFKTEITLANGEIRKRPLIETNGETGEIVWDKGRDFATVRKVLSMPQVNIVKKTEVQTGGFSKESILPKRNSDKLIARKKDWDPKKYGGFDSPTVAYSVLVVAKVEKGKSKKLKSVKELLGITIMERSSFEKNPIDFLEAKGYKEVKKDLIIKLPKYSLFELENGRKRMLASAGELQKGNELALPSKYVNFLYLASHYEKLKGSPEDNEQKQLFVEQHKHYLDEIIEQISEFSKRVILADANLDKVLSAYNKHRDKPIREQAENIIHLFTLTNLGAPAAFKYFDTTIDRKRYTSTKEVLDATLIHQSITGLYETRIDLSQLGGDGGGSSEAAAKGGGGGMDLLKPLTVERKGVKIKGYWNSQADITCVPKDLLQGEEPVRQQNVTTIHGTQEGDVYYVNLKIDGRRINTEVIGTTLDYAIITPGDVPWILKKPLELTIKLDLEEQQGTLLNNSILSKKGKEELKQLFEKYSALWQSWENQVGHRRIRPHKIATGTVKPTPQKQYHINPKAKPDIQIVINDLLKQGVLIQKESTMNTPVYPVPKPNGRWRMVLDYRAVNKVTPLIAVQNQHSYGILGSLFKGRYKTTIDLSNGFWAHPIVPEDYWITAFTWQGKQYCWTVLPQGFLNSPGLFNGDVVDLLQGIPNVEVYVDDVYISHDSEKEHLEYLDILFNRLKEAGYIISLKKSNIANSIVDFLGFQITNEGRGLTDTFKEKLENITAPTTLKQLQSILGKLNFARNFIPDFTELIAPLYALIPKSPKNYVPWQIEHSTTLETLITKLNGAEYLQGRKGDKTLIMKVNASYTTGYIRYYNEGEKKPISYVSIVFSKTELKFTELEKLLTTVHKGLLKALDLSMGQNIHVYSPIVSMQNIQKTPQTAKKALASRWLSWLSYLEDPRIRFFYDPQMPALKDLPAVDTGKDNKKHPSNFQHIFYTDGSAITSPTKEGHLNAGMGIVYFINKDGNLQKQQEWSISLGNHTAQFAEIAAFEFALKKCLPLGGNILVVTDSNYVAKAYNEELDVWASNGFVNNRKKPLKHISKWKSVADLKRLRPDVVVTHEPGHQKLDSSPHAYGNNLADQLATQASFKVHAGKRTADGSEFEKRTADGSEFESPKKKAKVE

SEQ ID NO: 7309 - protein, 2095 aa, synthetic construct
MPAAKRVKLDGGDKKYSIGLDIGTNSVGWAVITDEYKVPSKKFKVLGNTDRHSIKKNLIGALLFDSGETAEATRLKRTARRRYTRRKNRICYLQEIFSNEMAKVDDSFFHRLEESFLVEEDKKHERHPIFGNIVDEVAYHEKYPTIYHLRKKLVDSTDKADLRLIYLALAHMIKFRGHFLIEGDLNPDNSDVDKLFIQLVQTYNQLFEENPINASGVDAKAILSARLSKSRRLENLIAQLPGEKKNGLFGNLIALSLGLTPNFKSNFDLAEDAKLQLSKDTYDDDLDNLLAQIGDQYADLFLAAKNLSDAILLSDILRVNTEITKAPLSASMIKRYDEHHQDLTLLKALVRQQLPEKYKEIFFDQSKNGYAGYIDGGASQEEFYKFIKPILEKMDGTEELLVKLNREDLLRKQRTFDNGSIPHQIHLGELHAILRRQEDFYPFLKDNREKIEKILTFRIPYYVGPLARGNSRFAWMTRKSEETITPWNFEEVVDKGASAQSFIERMTNFDKNLPNEKVLPKHSLLYEYFTVYNELTKVKYVTEGMRKPAFLSGEQKKAIVDLLFKTNRKVTVKQLKEDYFKKIECFDSVEISGVEDRFNASLGTYHDLLKIIKDKDFLDNEENEDILEDIVLTLTLFEDREMIEERLKTYAHLFDDKVMKQLKRRRYTGWGRLSRKLINGIRDKQSGKTILDFLKSDGFANRNFMQLIHDDSLTFKEDIQKAQVSGQGDSLHEHIANLAGSPAIKKGILQTVKVVDELVKVMGRHKPENIVIEMARENQTTQKGQKNSRERMKRIEEGIKELGSQILKEHPVENTQLQNEKLYLYYLQNGRDMYVDQELDINRLSDYDVDHIVPQSFLKDDSIDNKVLTRSDKARGKSDNVPSEEVVKKMKNYWRQLLNAKLITQRKFDNLTKAERGGLSELDKAGFIKRQLVETRQITKHVAQILDSRMNTKYDENDKLIREVKVITLKSKLVSDFRKDFQFYKVREINNYHHAHDAYLNAVVGTALIKKYPKLESEFVYGDYKVYDVRKMIAKSEQEIGKATAKYFFYSNIMNFFKTEITLANGEIRKRPLIETNGETGEIVWDKGRDFATVRKVLSMPQVNIVKKTEVQTGGFSKESILPKRNSDKLIARKKDWDPKKYGGFDSPTVAYSVLVVAKVEKGKSKKLKSVKELLGITIMERSSFEKNPIDFLEAKGYKEVKKDLIIKLPKYSLFELENGRKRMLASAGELQKGNELALPSKYVNFLYLASHYEKLKGSPEDNEQKQLFVEQHKHYLDEIIEQISEFSKRVILADANLDKVLSAYNKHRDKPIREQAENIIHLFTLTNLGAPAAFKYFDTTIDRKRYTSTKEVLDATLIHQSITGLYETRIDLSQLGGDGGGSSEAAAKGGGGGTLQLEEEYRLFEPESTQKQEMDIWLKNFPQAWAETGGMGTAHCQAPVLIQLKATATPISIRQYPMPHEAYQGIKPHIRRMLDQGILKPCQSPWNTPLLPVKKPGTEDYRPVQDLREVNKRVEDIHPTVPNPYNLLSTLPPSHPWYTVLDLKDAFFCLRLHSESQLLFAFEWRDPEIGLSGQLTWTRLPQGFKNSPTLFNEALHSDLADFRVRYPALVLLQYVDDLLLAAATRTECLEGTKALLETLGNKGYRASAKKAQICLQEVTYLGYSLKDGQRWLTKARKEAILSIPVPKNSRQVREFLGKAGYCRLFIPGFAELAAPLYPLTRPGTLFQWGTEQQLAFEDIKKALLSSPALGLPDITKPFELFIDENSGFAKGVLVQKLGPWKRPVAYLSKKLDTVASGWPPCLRMVAAIAILVKDAGKLTLGQPLTILTSHPVEALVRQPPNKWLSNARMTHYQAMLLDAERVHFGPTVSLNPATLLPLPSGGNHHDCLQILAETHGTRPDLTDQPLPDADLTWYTDGSSFIRNGEREAGAAVTTESEVIWAAPLPPGTSAQRAELIALTQALKMAEGKKLTVYTDSRYAFATTHVHGEIYRRRGWLTSEGKEIKNKNEILALLEALFLPKRLSIIHCPGHQKGDSPQAKGNRLADDTAKKAATETHSSLTVLPAGKRTADGSEFEKRTADGSEFESPKKKAKVE

SEQ ID NO: 7310 - protein, 2094 aa, synthetic construct
MPAAKRVKLDGGDKKYSIGLDIGTNSVGWAVITDEYKVPSKKFKVLGNTDRHSIKKNLIGALLFDSGETAEATRLKRTARRRYTRRKNRICYLQEIFSNEMAKVDDSFFHRLEESFLVEEDKKHERHPIFGNIVDEVAYHEKYPTIYHLRKKLVDSTDKADLRLIYLALAHMIKFRGHFLIEGDLNPDNSDVDKLFIQLVQTYNQLFEENPINASGVDAKAILSARLSKSRRLENLIAQLPGEKKNGLFGNLIALSLGLTPNFKSNFDLAEDAKLQLSKDTYDDDLDNLLAQIGDQYADLFLAAKNLSDAILLSDILRVNTEITKAPLSASMIKRYDEHHQDLTLLKALVRQQLPEKYKEIFFDQSKNGYAGYIDGGASQEEFYKFIKPILEKMDGTEELLVKLNREDLLRKQRTFDNGSIPHQIHLGELHAILRRQEDFYPFLKDNREKIEKILTFRIPYYVGPLARGNSRFAWMTRKSEETITPWNFEEVVDKGASAQSFIERMTNFDKNLPNEKVLPKHSLLYEYFTVYNELTKVKYVTEGMRKPAFLSGEQKKAIVDLLFKTNRKVTVKQLKEDYFKKIECFDSVEISGVEDRFNASLGTYHDLLKIIKDKDFLDNEENEDILEDIVLTLTLFEDREMIEERLKTYAHLFDDKVMKQLKRRRYTGWGRLSRKLINGIRDKQSGKTILDFLKSDGFANRNFMQLIHDDSLTFKEDIQKAQVSGQGDSLHEHIANLAGSPAIKKGILQTVKVVDELVKVMGRHKPENIVIEMARENQTTQKGQKNSRERMKRIEEGIKELGSQILKEHPVENTQLQNEKLYLYYLQNGRDMYVDQELDINRLSDYDVDHIVPQSFLKDDSIDNKVLTRSDKARGKSDNVPSEEVVKKMKNYWRQLLNAKLITQRKFDNLTKAERGGLSELDKAGFIKRQLVETRQITKHVAQILDSRMNTKYDENDKLIREVKVITLKSKLVSDFRKDFQFYKVREINNYHHAHDAYLNAVVGTALIKKYPKLESEFVYGDYKVYDVRKMIAKSEQEIGKATAKYFFYSNIMNFFKTEITLANGEIRKRPLIETNGETGEIVWDKGRDFATVRKVLSMPQVNIVKKTEVQTGGFSKESILPKRNSDKLIARKKDWDPKKYGGFDSPTVAYSVLVVAKVEKGKSKKLKSVKELLGITIMERSSFEKNPIDFLEAKGYKEVKKDLIIKLPKYSLFELENGRKRMLASAGELQKGNELALPSKYVNFLYLASHYEKLKGSPEDNEQKQLFVEQHKHYLDEIIEQISEFSKRVILADANLDKVLSAYNKHRDKPIREQAENIIHLFTLTNLGAPAAFKYFDTTIDRKRYTSTKEVLDATLIHQSITGLYETRIDLSQLGGDGGGSSEAAAKGGGGGVLNLEEEYRLHEKPVPSSIDPSWLQLFPTVWAERAGMGLANQVPPVVVELRSGASPVAVRQYPMSKEAREGIRPHIQKFLDLGVLVPCRSPWNTPLLPVKKPGTNDYRPVQDLREINKRVQDIHPTVPNPYNLLSSLPPSYTWYSVLDLKDAFFCLRLHPNSQPLFAFEWKDPEKGNTGQLTWTRLPQGFKNSPTLFNEALHRDLAPFRALNPQVVLLQYVDDLLVAAPTYEDCKKGTQKLLQELSKLGYRVSAKKAQLCQREVTYLGYLLKEGKRWLTPARKATVMKIPVPTTPRQVREFLGKAGFCRLFIPGFASLAAPLYPLTKPSIPFIWTEEHQQAFDHIKKALLSAPALALPDLTKPFTLYIDERAGVARGVLTQTLGPWRRPVAYLSKKLDPVASGWPTCLKAVAAVALLLKDADKLTLGQNVTVIASHSLESIVRQPPDRWMTNARMTHYQSLLLNERVSFAPPAVLNPATLLPVESEATPVHRCSEILAEETGTRRDLEDQPLPGVPTWYTDGSSFITEGKRRAGAPIVDGKRTVWASSLPEGTSAQKAELVALTQALRLAEGKNINIYTDSRYAFATAHIHGAIYKQRGWLTSAGKDIKNKEEILALLEAIHLPRRVAIIHCPGHQRGSNPVATGNRRADEAAKQAALSTRVLAGTTKPAGKRTADGSEFEKRTADGSEFESPKKKAKVE

SEQ ID NO: 7311 - protein, 2218 aa, synthetic construct
MPAAKRVKLDGGDKKYSIGLDIGTNSVGWAVITDEYKVPSKKFKVLGNTDRHSIKKNLIGALLFDSGETAEATRLKRTARRRYTRRKNRICYLQEIFSNEMAKVDDSFFHRLEESFLVEEDKKHERHPIFGNIVDEVAYHEKYPTIYHLRKKLVDSTDKADLRLIYLALAHMIKFRGHFLIEGDLNPDNSDVDKLFIQLVQTYNQLFEENPINASGVDAKAILSARLSKSRRLENLIAQLPGEKKNGLFGNLIALSLGLTPNFKSNFDLAEDAKLQLSKDTYDDDLDNLLAQIGDQYADLFLAAKNLSDAILLSDILRVNTEITKAPLSASMIKRYDEHHQDLTLLKALVRQQLPEKYKEIFFDQSKNGYAGYIDGGASQEEFYKFIKPILEKMDGTEELLVKLNREDLLRKQRTFDNGSIPHQIHLGELHAILRRQEDFYPFLKDNREKIEKILTFRIPYYVGPLARGNSRFAWMTRKSEETITPWNFEEVVDKGASAQSFIERMTNFDKNLPNEKVLPKHSLLYEYFTVYNELTKVKYVTEGMRKPAFLSGEQKKAIVDLLFKTNRKVTVKQLKEDYFKKIECFDSVEISGVEDRFNASLGTYHDLLKIIKDKDFLDNEENEDILEDIVLTLTLFEDREMIEERLKTYAHLFDDKVMKQLKRRRYTGWGRLSRKLINGIRDKQSGKTILDFLKSDGFANRNFMQLIHDDSLTFKEDIQKAQVSGQGDSLHEHIANLAGSPAIKKGILQTVKVVDELVKVMGRHKPENIVIEMARENQTTQKGQKNSRERMKRIEEGIKELGSQILKEHPVENTQLQNEKLYLYYLQNGRDMYVDQELDINRLSDYDVDHIVPQSFLKDDSIDNKVLTRSDKARGKSDNVPSEEVVKKMKNYWRQLLNAKLITQRKFDNLTKAERGGLSELDKAGFIKRQLVETRQITKHVAQILDSRMNTKYDENDKLIREVKVITLKSKLVSDFRKDFQFYKVREINNYHHAHDAYLNAVVGTALIKKYPKLESEFVYGDYKVYDVRKMIAKSEQEIGKATAKYFFYSNIMNFFKTEITLANGEIRKRPLIETNGETGEIVWDKGRDFATVRKVLSMPQVNIVKKTEVQTGGFSKESILPKRNSDKLIARKKDWDPKKYGGFDSPTVAYSVLVVAKVEKGKSKKLKSVKELLGITIMERSSFEKNPIDFLEAKGYKEVKKDLIIKLPKYSLFELENGRKRMLASAGELQKGNELALPSKYVNFLYLASHYEKLKGSPEDNEQKQLFVEQHKHYLDEIIEQISEFSKRVILADANLDKVLSAYNKHRDKPIREQAENIIHLFTLTNLGAPAAFKYFDTTIDRKRYTSTKEVLDATLIHQSITGLYETRIDLSQLGGDGGGSSEAAAKGGGGGTLGDQGSRGSDPLPEPRVTLTVEGIPTEFLVNTGAEHSVLTKPMGKMGSKRTVVAGATGSKVYPWTTKRLLKIGQKQVTHSFLVIPECPAPLLGRDLLTKLKAQIQFSTEGPQVTWEDRPAMCLVLNLEEEYRLHEKPVPPSIDPSWLQLFPMVWAEKAGMGLANQVPPVVVELKSDASPVAVRQYPMSKEAREGIRPHIQRFLDLGILVPCQSPWNTPLLPVKKPGTNDYRPVQDLREVNKRVQDIHPTVPNPYNLLSSLPPSHTWYSVLDLKDAFFCLKLHPNSQPLFAFEWRDPEKGNTGQLTWTRLPQGFKNSPTLFNEALHRDLASFRALNPQVVMLQYVDDLLVAAPTYRDCKEGTRRLLQELSKLGYRVSAKKAQLCREEVTYLGYLLKGGKRWLTPARKATVMKIPTPTTPRQVREFLGTAGFCRLWIPGFASLAAPLYPLTRPKVPFTWTEAHQEAFGRIKEALLSAPALALPDLTKPFALYVDEKEGVARGVLTQTLGPWRRPVAYLSKKLDPVASGWPTCLKAIAAVALLLKDADKLTLGQNVLVIAPHNLESIVRQPPDRWMTNARMTHYQSLLLNERVSFAPPAILNPATLLPVESDDTPIHICSEILAEETGTRPDLRDQPLPGVPAWYTDGSSFIMDGRRQAGAAIVDNKRTVWASNLPEGTSAQKAELIALTQALRLAEGKSINIYTDSRYAFATAHVHGAIYKQRGWLTSAGKDIKNKEEILALLEAIHLPKRVAIIHCPGHQRGTDPVATGNRKADEAAKQAAQSTRILTETTKNAGKRTADGSEFEKRTADGSEFESPKKKAKVE

SEQ ID NO: 7312 - protein, 2096 aa, synthetic construct
MPAAKRVKLDGGDKKYSIGLDIGTNSVGWAVITDEYKVPSKKFKVLGNTDRHSIKKNLIGALLFDSGETAEATRLKRTARRRYTRRKNRICYLQEIFSNEMAKVDDSFFHRLEESFLVEEDKKHERHPIFGNIVDEVAYHEKYPTIYHLRKKLVDSTDKADLRLIYLALAHMIKFRGHFLIEGDLNPDNSDVDKLFIQLVQTYNQLFEENPINASGVDAKAILSARLSKSRRLENLIAQLPGEKKNGLFGNLIALSLGLTPNFKSNFDLAEDAKLQLSKDTYDDDLDNLLAQIGDQYADLFLAAKNLSDAILLSDILRVNTEITKAPLSASMIKRYDEHHQDLTLLKALVRQQLPEKYKEIFFDQSKNGYAGYIDGGASQEEFYKFIKPILEKMDGTEELLVKLNREDLLRKQRTFDNGSIPHQIHLGELHAILRRQEDFYPFLKDNREKIEKILTFRIPYYVGPLARGNSRFAWMTRKSEETITPWNFEEVVDKGASAQSFIERMTNFDKNLPNEKVLPKHSLLYEYFTVYNELTKVKYVTEGMRKPAFLSGEQKKAIVDLLFKTNRKVTVKQLKEDYFKKIECFDSVEISGVEDRFNASLGTYHDLLKIIKDKDFLDNEENEDILEDIVLTLTLFEDREMIEERLKTYAHLFDDKVMKQLKRRRYTGWGRLSRKLINGIRDKQSGKTILDFLKSDGFANRNFMQLIHDDSLTFKEDIQKAQVSGQGDSLHEHIANLAGSPAIKKGILQTVKVVDELVKVMGRHKPENIVIEMARENQTTQKGQKNSRERMKRIEEGIKELGSQILKEHPVENTQLQNEKLYLYYLQNGRDMYVDQELDINRLSDYDVDHIVPQSFLKDDSIDNKVLTRSDKARGKSDNVPSEEVVKKMKNYWRQLLNAKLITQRKFDNLTKAERGGLSELDKAGFIKRQLVETRQITKHVAQILDSRMNTKYDENDKLIREVKVITLKSKLVSDFRKDFQFYKVREINNYHHAHDAYLNAVVGTALIKKYPKLESEFVYGDYKVYDVRKMIAKSEQEIGKATAKYFFYSNIMNFFKTEITLANGEIRKRPLIETNGETGEIVWDKGRDFATVRKVLSMPQVNIVKKTEVQTGGFSKESILPKRNSDKLIARKKDWDPKKYGGFDSPTVAYSVLVVAKVEKGKSKKLKSVKELLGITIMERSSFEKNPIDFLEAKGYKEVKKDLIIKLPKYSLFELENGRKRMLASAGELQKGNELALPSKYVNFLYLASHYEKLKGSPEDNEQKQLFVEQHKHYLDEIIEQISEFSKRVILADANLDKVLSAYNKHRDKPIREQAENIIHLFTLTNLGAPAAFKYFDTTIDRKRYTSTKEVLDATLIHQSITGLYETRIDLSQLGGDGGGSSEAAAKGGGGGLGIEDEYRLHETSTEPDVSLGSTWLSDFPQAWAETGGMGLAVRQAPLIIPLKATSTPVSIQQYPMSHEARLGIKPHIQRLLDQGILVPCQSPWNTPLLPVKKPGTNDYRPVQDLREVNKRVEDIHPTVPNPYNLLSGLPPSHQWYTVLDLKDAFFCLRLHPTSQPLFAFEWRDPGMGISGQLTWTRLPQGFKNSPTLFNEALHRDLADFRIQHPDLILLQYVDDILLAATSELDCQQGTRALLQTLGDLGYRASAKKAQICQKQVKYLGYLLREGQRWLTEARKETVMGQPVPKTPRQLREFLGKAGFCRLFIPGFAEMAAPLYPLTKPGTLFSWGPDQQKAYQEIKQALLTAPALGLPDLTKPFELFVDEKQGYAKGVLTQKLGPWRRPVAYLSKKLDPVAAGWPPCLRMVAAIAVLTKDAGKLTMGQPLVILAPHAVEALVKQPPDRWLSNARMTHYQAMLLDTDRVQFGPVVALNPATLLPLPEEGAPHDCLEILAETHGTRPDLTDQPIPDADHTWYTDGSSFLQEGQRKAGAAVTTETEVIWAGALPAGTSAQRAELIALTQALKMAEGKRLNVYTDSRYAFATAHIHGEIYRRRGWLTSEGREIKNKSEILALLKALFLPKRLSIIHCLGHQKGDSAEARGNRLADQAAREAAIKTPPDTSTLLIAGKRTADGSEFEKRTADGSEFESPKKKAKVE

SEQ ID NO: 7313 - protein, 2116 aa, synthetic construct
MPAAKRVKLDGGDKKYSIGLDIGTNSVGWAVITDEYKVPSKKFKVLGNTDRHSIKKNLIGALLFDSGETAEATRLKRTARRRYTRRKNRICYLQEIFSNEMAKVDDSFFHRLEESFLVEEDKKHERHPIFGNIVDEVAYHEKYPTIYHLRKKLVDSTDKADLRLIYLALAHMIKFRGHFLIEGDLNPDNSDVDKLFIQLVQTYNQLFEENPINASGVDAKAILSARLSKSRRLENLIAQLPGEKKNGLFGNLIALSLGLTPNFKSNFDLAEDAKLQLSKDTYDDDLDNLLAQIGDQYADLFLAAKNLSDAILLSDILRVNTEITKAPLSASMIKRYDEHHQDLTLLKALVRQQLPEKYKEIFFDQSKNGYAGYIDGGASQEEFYKFIKPILEKMDGTEELLVKLNREDLLRKQRTFDNGSIPHQIHLGELHAILRRQEDFYPFLKDNREKIEKILTFRIPYYVGPLARGNSRFAWMTRKSEETITPWNFEEVVDKGASAQSFIERMTNFDKNLPNEKVLPKHSLLYEYFTVYNELTKVKYVTEGMRKPAFLSGEQKKAIVDLLFKTNRKVTVKQLKEDYFKKIECFDSVEISGVEDRFNASLGTYHDLLKIIKDKDFLDNEENEDILEDIVLTLTLFEDREMIEERLKTYAHLFDDKVMKQLKRRRYTGWGRLSRKLINGIRDKQSGKTILDFLKSDGFANRNFMQLIHDDSLTFKEDIQKAQVSGQGDSLHEHIANLAGSPAIKKGILQTVKVVDELVKVMGRHKPENIVIEMARENQTTQKGQKNSRERMKRIEEGIKELGSQILKEHPVENTQLQNEKLYLYYLQNGRDMYVDQELDINRLSDYDVDHIVPQSFLKDDSIDNKVLTRSDKARGKSDNVPSEEVVKKMKNYWRQLLNAKLITQRKFDNLTKAERGGLSELDKAGFIKRQLVETRQITKHVAQILDSRMNTKYDENDKLIREVKVITLKSKLVSDFRKDFQFYKVREINNYHHAHDAYLNAVVGTALIKKYPKLESEFVYGDYKVYDVRKMIAKSEQEIGKATAKYFFYSNIMNFFKTEITLANGEIRKRPLIETNGETGEIVWDKGRDFATVRKVLSMPQVNIVKKTEVQTGGFSKESILPKRNSDKLIARKKDWDPKKYGGFDSPTVAYSVLVVAKVEKGKSKKLKSVKELLGITIMERSSFEKNPIDFLEAKGYKEVKKDLIIKLPKYSLFELENGRKRMLASAGELQKGNELALPSKYVNFLYLASHYEKLKGSPEDNEQKQLFVEQHKHYLDEIIEQISEFSKRVILADANLDKVLSAYNKHRDKPIREQAENIIHLFTLTNLGAPAAFKYFDTTIDRKRYTSTKEVLDATLIHQSITGLYETRIDLSQLGGDGGGSSEAAAKGGGGGTLNIEDEYRLHETSKEPDVSLGSTWLSDFPQAWAETGGMGLAVRQAPLIIPLKATSTPVSIKQYPMSQEARLGIKPHIQRLLDQGILVPCQSPWNTPLLPVKKPGTNDYRPVQDLREVNKRVEDIHPTVPNPYNLLSGLPPSHQWYTVLDLKDAFFCLRLHPTSQPLFAFEWRDPEMGISGQLTWTRLPQGFKNSPTLFNEALHRDLADFRIQHPDLILLQYVDDLLLAATSELDCQQGTRALLQTLGNLGYRASAKKAQICQKQVKYLGYLLKEGQRWLTEARKETVMGQPTPKTPRQLREFLGKAGFCRLFIPGFAEMAAPLYPLTKPGTLFNWGPDQQKAYQEIKQALLTAPALGLPDLTKPFELFVDEKQGYAKGVLTQKLGPWRRPVAYLSKKLDPVAAGWPPCLRMVAAIAVLTKDAGKLTMGQPLVILAPHAVEALVKQPPDRWLSNARMTHYQALLLDTDRVQFGPVVALNPATLLPLPEEGLQHNCLDILAEAHGTRPDLTDQPLPDADHTWYTDGSSLLQEGQRKAGAAVTTETEVIWAKALPAGTSAQRAELIALTQALKMAEGKKLNVYTDSRYAFATAHIHGEIYRRRGWLTSEGKEIKNKDEILALLKALFLPKRLSIIHCPGHQKGHSAEARGNRMADQAARKAAITETPDTSTLLIENSSPSGGSKRTADGSEFEAGKRTADGSEFEKRTADGSEFESPKKKAKVE

SEQ ID NO: 7314 - protein, 2116 aa, synthetic construct; identical to SEQ ID NO: 7313

SEQ ID NO: 7315 - protein, 2087 aa, synthetic construct
MPAAKRVKLDGGDKKYSIGLDIGTNSVGWAVITDEYKVPSKKFKVLGNTDRHSIKKNLIGALLFDSGETAEATRLKRTARRRYTRRKNRICYLQEIFSNEMAKVDDSFFHRLEESFLVEEDKKHERHPIFGNIVDEVAYHEKYPTIYHLRKKLVDSTDKADLRLIYLALAHMIKFRGHFLIEGDLNPDNSDVDKLFIQLVQTYNQLFEENPINASGVDAKAILSARLSKSRRLENLIAQLPGEKKNGLFGNLIALSLGLTPNFKSNFDLAEDAKLQLSKDTYDDDLDNLLAQIGDQYADLFLAAKNLSDAILLSDILRVNTEITKAPLSASMIKRYDEHHQDLTLLKALVRQQLPEKYKEIFFDQSKNGYAGYIDGGASQEEFYKFIKPILEKMDGTEELLVKLNREDLLRKQRTFDNGSIPHQIHLGELHAILRRQEDFYPFLKDNREKIEKILTFRIPYYVGPLARGNSRFAWMTRKSEETITPWNFEEVVDKGASAQSFIERMTNFDKNLPNEKVLPKHSLLYEYFTVYNELTKVKYVTEGMRKPAFLSGEQKKAIVDLLFKTNRKVTVKQLKEDYFKKIECFDSVEISGVEDRFNASLGTYHDLLKIIKDKDFLDNEENEDILEDIVLTLTLFEDREMIEERLKTYAHLFDDKVMKQLKRRRYTGWGRLSRKLINGIRDKQSGKTILDFLKSDGFANRNFMQLIHDDSLTFKEDIQKAQVSGQGDSLHEHIANLAGSPAIKKGILQTVKVVDELVKVMGRHKPENIVIEMARENQTTQKGQKNSRERMKRIEEGIKELGSQILKEHPVENTQLQNEKLYLYYLQNGRDMYVDQELDINRLSDYDVDHIVPQSFLKDDSIDNKVLTRSDKARGKSDNVPSEEVVKKMKNYWRQLLNAKLITQRKFDNLTKAERGGLSELDKAGFIKRQLVETRQITKHVAQILDSRMNTKYDENDKLIREVKVITLKSKLVSDFRKDFQFYKVREINNYHHAHDAYLNAVVGTALIKKYPKLESEFVYGDYKVYDVRKMIAKSEQEIGKATAKYFFYSNIMNFFKTEITLANGEIRKRPLIETNGETGEIVWDKGRDFATVRKVLSMPQVNIVKKTEVQTGGFSKESILPKRNSDKLIARKKDWDPKKYGGFDSPTVAYSVLVVAKVEKGKSKKLKSVKELLGITIMERSSFEKNPIDFLEAKGYKEVKKDLIIKLPKYSLFELENGRKRMLASAGELQKGNELALPSKYVNFLYLASHYEKLKGSPEDNEQKQLFVEQHKHYLDEIIEQISEFSKRVILADANLDKVLSAYNKHRDKPIREQAENIIHLFTLTNLGAPAAFKYFDTTIDRKRYTSTKEVLDATLIHQSITGLYETRIDLSQLGGDGGGSSEAAAKGGGGGIPWLMKKPLQLTTLVPLQEYEERLLKQTMLTGSYKEKLQSLFLKYDALWQHWENQVGHRRIKPHHIATGTVNPRPQKQYPINPKAKASIQTVINDLLKQGVLIQQNSIMNTPVYPVPKPDGKWRMVLDYREVNKTIPLIAAQNQHSAGILSSIFRGKYKTTLDLSNGFWAHSITPESYWLTAFTWLGQQYCWTRLPQGFLNSPALFNADVVDLLKEVPNVQVYVDDIYISHDDPREHLEQLEKVFSLLLNAGYVVSLKKSEIAQHEVEFLGFNITKEGRGLTETFKQKLLNITPPRDLKQLQSILGLLNFARNFIPNFSELVKPLYNIIATAPGKYITWTTDNSQQLQNIISMLNSAENLEERNPEVRLIMKVNTSPSAGYIRFYNEFAKRPIMYLNYVYTKAEVKFTNTEKLLTTIHKGLIKALDLGMGQEILVYSPIVSMTKIQKTPLPERKALPIRWITWMSYLEDPRIQFHYDKTLPELQQVPTVTDDIIAKIKHPSEFSMVFYTDGSAIKHPNVNKSHNAGMGIAQVQFKPEFTVINTWSIPLGDHTAQLAEVAAVEFACKKALKIDGPVLIVTDSFYVAESVNKELPYWQSNGFFNNKKKPLKHVSKWKSIADCIQLKPDIIIIHEKGHQPTASTFHTEGNNLADKLATQGSYVVNAGKRTADGSEFEKRTADGSEFESPKKKAKVE

SEQ ID NO: 7316 - protein, 2096 aa, synthetic construct
MPAAKRVKLDGGDKKYSIGLDIGTNSVGWAVITDEYKVPSKKFKVLGNTDRHSIKKNLIGALLFDSGETAEATRLKRTARRRYTRRKNRICYLQEIFSNEMAKVDDSFFHRLEESFLVEEDKKHERHPIFGNIVDEVAYHEKYPTIYHLRKKLVDSTDKADLRLIYLALAHMIKFRGHFLIEGDLNPDNSDVDKLFIQLVQTYNQLFEENPINASGVDAKAILSARLSKSRRLENLIAQLPGEKKNGLFGNLIALSLGLTPNFKSNFDLAEDAKLQLSKDTYDDDLDNLLAQIGDQYADLFLAAKNLSDAILLSDILRVNTEITKAPLSASMIKRYDEHHQDLTLLKALVRQQLPEKYKEIFFDQSKNGYAGYIDGGASQEEFYKFIKPILEKMDGTEELLVKLNREDLLRKQRTFDNGSIPHQIHLGELHAILRRQEDFYPFLKDNREKIEKILTFRIPYYVGPLARGNSRFAWMTRKSEETITPWNFEEVVDKGASAQSFIERMTNFDKNLPNEKVLPKHSLLYEYFTVYNELTKVKYVTEGMRKPAFLSGEQKKAIVDLLFKTNRKVTVKQLKEDYFKKIECFDSVEISGVEDRFNASLGTYHDLLKIIKDKDFLDNEENEDILEDIVLTLTLFEDREMIEERLKTYAHLFDDKVMKQLKRRRYTGWGRLSRKLINGIRDKQSGKTILDFLKSDGFANRNFMQLIHDDSLTFKEDIQKAQVSGQGDSLHEHIANLAGSPAIKKGILQTVKVVDELVKVMGRHKPENIVIEMARENQTTQKGQKNSRERMKRIEEGIKELGSQILKEHPVENTQLQNEKLYLYYLQNGRDMYVDQELDINRLSDYDVDHIVPQSFLKDDSIDNKVLTRSDKARGKSDNVPSEEVVKKMKNYWRQLLNAKLITQRKFDNLTKAERGGLSELDKAGFIKRQLVETRQITKHVAQILDSRMNTKYDENDKLIREVKVITLKSKLVSDFRKDFQFYKVREINNYHHAHDAYLNAVVGTALIKKYPKLESEFVYGDYKVYDVRKMIAKSEQEIGKATAKYFFYSNIMNFFKTEITLANGEIRKRPLIETNGETGEIVWDKGRDFATVRKVLSMPQVNIVKKTEVQTGGFSKESILPKRNSDKLIARKKDWDPKKYGGFDSPTVAYSVLVVAKVEKGKSKKLKSVKELLGITIMERSSFEKNPIDFLEAKGYKEVKKDLIIKLPKYSLFELENGRKRMLASAGELQKGNELALPSKYVNFLYLASHYEKLKGSPEDNEQKQLFVEQHKHYLDEIIEQISEFSKRVILADANLDKVLSAYNKHRDKPIREQAENIIHLFTLTNLGAPAAFKYFDTTIDRKRYTSTKEVLDATLIHQSITGLYETRIDLSQLGGDGGGSSEAAAKGGGGGTLNIEDEYRLHETSKEPDVPLGSTWLSDFPQAWAETGGMGLAVRQAPLIIPLKATSTPVSIKQYPMSQEARLGIKPHIQRLLDQGILVPCQSPWNTPLLPVKKPGTNDYRPVQDLREVNKRVEDIHPTVPNPYNLLSGLPPSHQWYTVLDLKDAFFCLRLHPTSQPLFAFEWRDPEMGISGQLTWTRLPQGFKNSPTLFNEALHRDLADFRIQHPDLILLQYVDDLLLAATSEQDCQRGTRALLQTLGNLGYRASAKKAQICQKQVKYLGYLLKEGQRWLTEARKETVMGQPTPKTPRQLREFLGTAGFCRLWIPGFAEMAAPLYPLTKPGTLFNWGPDQQKAYQEIKQALLTAPALGLPDLTKPFELFVDEKQGYAKGVLTQKLGPWRRPVAYLSKKLDPVAAGWPPCLRMVAAIAVLTKDAGKLTMGQPLVILAPHAVEALVKQPPDRWLSNARMTHYQAMLLDTDRVQFGPVVALNPATLLPLPEKEAPHDCLEILAETHGTRPDLTDQPIPDADYTWYTDGSSFLQEGQRRAGAAVTTETEVIWARALPAGTSAQRAELIALTQALKMAEGKKLNVYTDSRYAFATAHVHGEIYRRRGWLTSEGREIKNKNEILALLKALFLPKRLSIIHCPGHQKGNSAEARGNRMADQAAREAAMKAVLETSTLLAGKRTADGSEFEKRTADGSEFESPKKKAKVE

SEQ ID NO: 7317 - protein, 2096 aa, synthetic construct
MPAAKRVKLDGGDKKYSIGLDIGTNSVGWAVITDEYKVPSKKFKVLGNTDRHSIKKNLIGALLFDSGETAEATRLKRTARRRYTRRKNRICYLQEIFSNEMAKVDDSFFHRLEESFLVEEDKKHERHPIFGNIVDEVAYHEKYPTIYHLRKKLVDSTDKADLRLIYLALAHMIKFRGHFLIEGDLNPDNSDVDKLFIQLVQTYNQLFEENPINASGVDAKAILSARLSKSRRLENLIAQLPGEKKNGLFGNLIALSLGLTPNFKSNFDLAEDAKLQLSKDTYDDDLDNLLAQIGDQYADLFLAAKNLSDAILLSDILRVNTEITKAPLSASMIKRYDEHHQDLTLLKALVRQQLPEKYKEIFFDQSKNGYAGYIDGGASQEEFYKFIKPILEKMDGTEELLVKLNREDLLRKQRTFDNGSIPHQIHLGELHAILRRQEDFYPFLKDNREKIEKILTFRIPYYVGPLARGNSRFAWMTRKSEETITPWNFEEVVDKGASAQSFIERMTNFDKNLPNEKVLPKHSLLYEYFTVYNELTKVKYVTEGMRKPAFLSGEQKKAIVDLLFKTNRKVTVKQLKEDYFKKIECFDSVEISGVEDRFNASLGTYHDLLKIIKDKDFLDNEENEDILEDIVLTLTLFEDREMIEERLKTYAHLFDDKVMKQLKRRRYTGWGRLSRKLINGIRDKQSGKTILDFLKSDGFANRNFMQLIHDDSLTFKEDIQKAQVSGQGDSLHEHIANLAGSPAIKKGILQTVKVVDELVKVMGRHKPENIVIEMARENQTTQKGQKNSRERMKRIEEGIKELGSQILKEHPVENTQLQNEKLYLYYLQNGRDMYVDQELDINRLSDYDVDHIVPQSFLKDDSIDNKVLTRSDKARGKSDNVPSEEVVKKMKNYWRQLLNAKLITQRKFDNLTKAERGGLSELDKAGFIKRQLVETRQITKHVAQILDSRMNTKYDENDKLIREVKVITLKSKLVSDFRKDFQFYKVREINNYHHAHDAYLNAVVGTALIKKYPKLESEFVYGDYKVYDVRKMIAKSEQEIGKATAKYFFYSNIMNFFKTEITLANGEIRKRPLIETNGETGEIVWDKGRDFATVRKVLSMPQVNIVKKTEVQTGGFSKESILPKRNSDKLIARKKDWDPKKYGGFDSPTVAYSVLVVAKVEKGKSKKLKSVKELLGITIMERSSFEKNPIDFLEAKGYKEVKKDLIIKLPKYSLFELENGRKRMLASAGELQKGNELALPSKYVNFLYLASHYEKLKGSPEDNEQKQLFVEQHKHYLDEIIEQISEFSKRVILADANLDKVLSAYNKHRDKPIREQAENIIHLFTLTNLGAPAAFKYFDTTIDRKRYTSTKEVLDATLIHQSITGLYETRIDLSQLGGDGGGSSEAAAKGGGGGTLNIEDEYRLHETSKEPDVPLGSTWLSDFPQAWAETGGMGLAVRQAPLIIPLKATSTPVSIKQYPMSQEARLGIKPHIQRLLDQGILVPCQSPWNTPLLPVKKPGTNDYRPVQDLREVNKRVEDIHPTVPNPYNLLSGLPPSHQWYTVLDLKDAFFCLRLHPTSQPLFAFEWRDPEMGISGQLTWTRLPQGFKNSPTLFNEALHRDLADFRIQHPDLILLQYVDDLLLAATSEQDCQRGTRALLQTLGNLGYRASAKKAQICQKQVKYLGYLLKEGQRWLTEARKETVMGQPTPKTPRQLREFLGKAGFCRLFIPGFAEMAAPLYPLTKPGTLFNWGPDQQKAYQEIKQALLTAPALGLPDLTKPFELFVDEKQGYAKGVLTQKLGPWRRPVAYLSKKLDPVAAGWPPCLRMVAAIAVLTKDAGKLTMGQPLVILAPHAVEALVKQPPDRWLSNARMTHYQAMLLDTDRVQFGPVVALNPATLLPLPEKEAPHDCLEILAETHGTRPDLTDQPIPDADYTWYTDGSSFLQEGQRRAGAAVTTETEVIWARALPAGTSAQRAELIALTQALKMAEGKKLNVYTDSRYAFATAHVHGEIYRRRGWLTSEGREIKNKNEILALLKALFLPKRLSIIHCPGHQKGNSAEARGNRMADQAAREAAMKAVLETSTLLAGKRTADGSEFEKRTADGSEFESPKKKAKVE

SEQ ID NO: 7318 - protein, 2098 aa, synthetic construct
MPAAKRVKLDGGDKKYSIGLDIGTNSVGWAVITDEYKVPSKKFKVLGNTDRHSIKKNLIGALLFDSGETAEATRLKRTARRRYTRRKNRICYLQEIFSNEMAKVDDSFFHRLEESFLVEEDKKHERHPIFGNIVDEVAYHEKYPTIYHLRKKLVDSTDKADLRLIYLALAHMIKFRGHFLIEGDLNPDNSDVDKLFIQLVQTYNQLFEENPINASGVDAKAILSARLSKSRRLENLIAQLPGEKKNGLFGNLIALSLGLTPNFKSNFDLAEDAKLQLSKDTYDDDLDNLLAQIGDQYADLFLAAKNLSDAILLSDILRVNTEITKAPLSASMIKRYDEHHQDLTLLKALVRQQLPEKYKEIFFDQSKNGYAGYIDGGASQEEFYKFIKPILEKMDGTEELLVKLNREDLLRKQRTFDNGSIPHQIHLGELHAILRRQEDFYPFLKDNREKIEKILTFRIPYYVGPLARGNSRFAWMTRKSEETITPWNFEEVVDKGASAQSFIERMTNFDKNLPNEKVLPKHSLLYEYFTVYNELTKVKYVTEGMRKPAFLSGEQKKAIVDLLFKTNRKVTVKQLKEDYFKKIECFDSVEISGVEDRFNASLGTYHDLLKIIKDKDFLDNEENEDILEDIVLTLTLFEDREMIEERLKTYAHLFDDKVMKQLKRRRYTGWGRLSRKLINGIRDKQSGKTILDFLKSDGFANRNFMQLIHDDSLTFKEDIQKAQVSGQGDSLHEHIANLAGSPAIKKGILQTVKVVDELVKVMGRHKPENIVIEMARENQTTQKGQKNSRERMKRIEEGIKELGSQILKEHPVENTQLQNEKLYLYYLQNGRDMYVDQELDINRLSDYDVDHIVPQSFLKDDSIDNKVLTRSDKARGKSDNVPSEEVVKKMKNYWRQLLNAKLITQRKFDNLTKAERGGLSELDKAGFIKRQLVETRQITKHVAQILDSRMNTKYDENDKLIREVKVITLKSKLVSDFRKDFQFYKVREINNYHHAHDAYLNAVVGTALIKKYPKLESEFVYGDYKVYDVRKMIAKSEQEIGKATAKYFFYSNIMNFFKTEITLANGEIRKRPLIETNGETGEIVWDKGRDFATVRKVLSMPQVNIVKKTEVQTGGFSKESILPKRNSDKLIARKKDWDPKKYGGFDSPTVAYSVLVVAKVEKGKSKKLKSVKELLGITIMERSSFEKNPIDFLEAKGYKEVKKDLIIKLPKYSLFELENGRKRMLASAGELQKGNELALPSKYVNFLYLASHYEKLKGSPEDNEQKQLFVEQHKHYLDEIIEQISEFSKRVILADANLDKVLSAYNKHRDKPIREQAENIIHLFTLTNLGAPAAFKYFDTTIDRKRYTSTKEVLDATLIHQSITGLYETRIDLSQLGGDGGEAAAKGGGGSSGGTAPLEEEYRLFLEAPIQNVTLLEQWKREIPKVWAEINPPGLASTQAPIHVQLLSTALPVRVRQYPITLEAKRSLRETIRKFRAAGILRPVHSPWNTPLLPVRKSGTSEYRMVQDLREVNKRVETIHPTVPNPYTLLSLLPPDRIWYSVLDLKDAFFCIPLAPESQLIFAFEWADAEEGESGQLTWTRLPQGFKNSPTLFDEALNRDLQGFRLDHPSVSLLQYVDDLLIAADTQAACLSATRDLLMTLAELGYRVSGKKAQLCQEEVTYLGFKIHKGSRSLSNSRTQAILQIPVPKTKRQVREFLGTIGYCRLWIPGFAELAQPLYAATRGGNDPLVWGEKEEEAFQSLKLALTQPPALALPSLDKPFQLFVEETSGAAKGVLTQALGPWKRPVAYLSKRLDPVAAGWPRCLRAIAAAALLTREASKLTFGQDIEITSSHNLESLLRSPPDKWLTNARITQYQVLLLDPPRVRFKQTAALNPATLLPETDDTLPIHHCLDTLDSLTSTRPDLTDQPLAQAEATLFTDGSSYIRDGKRYAGAAVVTLDSVIWAEPLPIGTSAQKAELIALTKALEWSKDKSVNIYTDSRYAFATLHVHGMIYRERGLLTAGGKAIKNAPEILALLTAVWLPKRVAVMHCKGHQKDDAPTSTGNRRADEVAREVAIRPLSTQATISAGKRTADGSEFEKRTADGSEFESPKKKAKVE

SEQ ID NO: 7319 - protein, 2098 aa, synthetic construct
MPAAKRVKLDGGDKKYSIGLDIGTNSVGWAVITDEYKVPSKKFKVLGNTDRHSIKKNLIGALLFDSGETAEATRLKRTARRRYTRRKNRICYLQEIFSNEMAKVDDSFFHRLEESFLVEEDKKHERHPIFGNIVDEVAYHEKYPTIYHLRKKLVDSTDKADLRLIYLALAHMIKFRGHFLIEGDLNPDNSDVDKLFIQLVQTYNQLFEENPINASGVDAKAILSARLSKSRRLENLIAQLPGEKKNGLFGNLIALSLGLTPNFKSNFDLAEDAKLQLSKDTYDDDLDNLLAQIGDQYADLFLAAKNLSDAILLSDILRVNTEITKAPLSASMIKRYDEHHQDLTLLKALVRQQLPEKYKEIFFDQSKNGYAGYIDGGASQEEFYKFIKPILEKMDGTEELLVKLNREDLLRKQRTFDNGSIPHQIHLGELHAILRRQEDFYPFLKDNREKIEKILTFRIPYYVGPLARGNSRFAWMTRKSEETITPWNFEEVVDKGASAQSFIERMTNFDKNLPNEKVLPKHSLLYEYFTVYNELTKVKYVTEGMRKPAFLSGEQKKAIVDLLFKTNRKVTVKQLKEDYFKKIECFDSVEISGVEDRFNASLGTYHDLLKIIKDKDFLDNEENEDILEDIVLTLTLFEDREMIEERLKTYAHLFDDKVMKQLKRRRYTGWGRLSRKLINGIRDKQSGKTILDFLKSDGFANRNFMQLIHDDSLTFKEDIQKAQVSGQGDSLHEHIANLAGSPAIKKGILQTVKVVDELVKVMGRHKPENIVIEMARENQTTQKGQKNSRERMKRIEEGIKELGSQILKEHPVENTQLQNEKLYLYYLQNGRDMYVDQELDINRLSDYDVDHIVPQSFLKDDSIDNKVLTRSDKARGKSDNVPSEEVVKKMKNYWRQLLNAKLITQRKFDNLTKAERGGLSELDKAGFIKRQLVETRQITKHVAQILDSRMNTKYDENDKLIREVKVITLKSKLVSDFRKDFQFYKVREINNYHHAHDAYLNAVVGTALIKKYPKLESEFVYGDYKVYDVRKMIAKSEQEIGKATAKYFFYSNIMNFFKTEITLANGEIRKRPLIETNGETGEIVWDKGRDFATVRKVLSMPQVNIVKKTEVQTGGFSKESILPKRNSDKLIARKKDWDPKKYGGFDSPTVAYSVLVVAKVEKGKSKKLKSVKELLGITIMERSSFEKNPIDFLEAKGYKEVKKDLIIKLPKYSLFELENGRKRMLASAGELQKGNELALPSKYVNFLYLASHYEKLKGSPEDNEQKQLFVEQHKHYLDEIIEQISEFSKRVILADANLDKVLSAYNKHRDKPIREQAENIIHLFTLTNLGAPAAFKYFDTTIDRKRYTSTKEVLDATLIHQSITGLYETRIDLSQLGGDGGEAAAKGGGGSSGGTAPLEEEYRLFLEAPIQNVTLLEQWKREIPKVWAEINPPGLASTQAPIHVQLLSTALPVRVRQYPITLEAKRSLRETIRKFRAAGILRPVHSPWNTPLLPVRKSGTSEYRMVQDLREVNKRVETIHPTVPNPYTLLSLLPPDRIWYSVLDLKDAFFCIPLAPESQLIFAFEWADAEEGESGQLTWTRLPQGFKNSPTLFNEALNRDLQGFRLDHPSVSLLQYVDDLLIAADTQAACLSATRDLLMTLAELGYRVSGKKAQLCQEEVTYLGFKIHKGSRSLSNSRTQAILQIPVPKTKRQVREFLGTIGYCRLWIPGFAELAQPLYAATRPGNDPLVWGEKEEEAFQSLKLALTQPPALALPSLDKPFQLFVEETSGAAKGVLTQALGPWKRPVAYLSKRLDPVAAGWPRCLRAIAAAALLTREASKLTFGQDIEITSSHNLESLLRSPPDKWLTNARITQYQVLLLDPPRVRFKQTAALNPATLLPETDDTLPIHHCLDTLDSLTSTRPDLTDQPLAQAEATLFTDGSSYIRDGKRYAGAAVVTLDSVIWAEPLPIGTSAQKAELIALTKALEWSKDKSVNIYTDSRYAFATLHVHGMIYRERGWLTAGGKAIKNAPEILALLTAVWLPKRVAVMHCKGHQKDDAPTSTGNRRADEVAREVAIRPLSTQATISAGKRTADGSEFEKRTADGSEFESPKKKAKVE

SEQ ID NO: 7320 - protein, 2098 aa, synthetic construct
MPAAKRVKLDGGDKKYSIGLDIGTNSVGWAVITDEYKVPSKKFKVLGNTDRHSIKKNLIGALLFDSGETAEATRLKRTARRRYTRRKNRICYLQEIFSNEMAKVDDSFFHRLEESFLVEEDKKHERHPIFGNIVDEVAYHEKYPTIYHLRKKLVDSTDKADLRLIYLALAHMIKFRGHFLIEGDLNPDNSDVDKLFIQLVQTYNQLFEENPINASGVDAKAILSARLSKSRRLENLIAQLPGEKKNGLFGNLIALSLGLTPNFKSNFDLAEDAKLQLSKDTYDDDLDNLLAQIGDQYADLFLAAKNLSDAILLSDILRVNTEITKAPLSASMIKRYDEHHQDLTLLKALVRQQLPEKYKEIFFDQSKNGYAGYIDGGASQEEFYKFIKPILEKMDGTEELLVKLNREDLLRKQRTFDNGSIPHQIHLGELHAILRRQEDFYPFLKDNREKIEKILTFRIPYYVGPLARGNSRFAWMTRKSEETITPWNFEEVVDKGASAQSFIERMTNFDKNLPNEKVLPKHSLLYEYFTVYNELTKVKYVTEGMRKPAFLSGEQKKAIVDLLFKTNRKVTVKQLKEDYFKKIECFDSVEISGVEDRFNASLGTYHDLLKIIKDKDFLDNEENEDILEDIVLTLTLFEDREMIEERLKTYAHLFDDKVMKQLKRRRYTGWGRLSRKLINGIRDKQSGKTILDFLKSDGFANRNFMQLIHDDSLTFKEDIQKAQVSGQGDSLHEHIANLAGSPAIKKGILQTVKVVDELVKVMGRHKPENIVIEMARENQTTQKGQKNSRERMKRIEEGIKELGSQILKEHPVENTQLQNEKLYLYYLQNGRDMYVDQELDINRLSDYDVDHIVPQSFLKDDSIDNKVLTRSDKARGKSDNVPSEEVVKKMKNYWRQLLNAKLITQRKFDNLTKAERGGLSELDKAGFIKRQLVETRQITKHVAQILDSRMNTKYDENDKLIREVKVITLKSKLVSDFRKDFQFYKVREINNYHHAHDAYLNAVVGTALIKKYPKLESEFVYGDYKVYDVRKMIAKSEQEIGKATAKYFFYSNIMNFFKTEITLANGEIRKRPLIETNGETGEIVWDKGRDFATVRKVLSMPQVNIVKKTEVQTGGFSKESILPKRNSDKLIARKKDWDPKKYGGFDSPTVAYSVLVVAKVEKGKSKKLKSVKELLGITIMERSSFEKNPIDFLEAKGYKEVKKDLIIKLPKYSLFELENGRKRMLASAGELQKGNELALPSKYVNFLYLASHYEKLKGSPEDNEQKQLFVEQHKHYLDEIIEQISEFSKRVILADANLDKVLSAYNKHRDKPIREQAENIIHLFTLTNLGAPAAFKYFDTTIDRKRYTSTKEVLDATLIHQSITGLYETRIDLSQLGGDGGEAAAKGGGGSSGGTAPLEEEYRLFLEAPIQNVTLLEQWKREIPKVWAEINPPGLASTQAPIHVQLLSTALPVRVRQYPITLEAKRSLRETIRKFRAAGILRPVHSPWNTPLLPVRKSGTSEYRMVQDLREVNKRVETIHPTVPNPYTLLSLLPPDRIWYSVLDLKDAFFCIPLAPESQLIFAFEWADAEEGESGQLTWTRLPQGFKNSPTLFNEALNRDLQGFRLDHPSVSLLQYVDDLLIAADTQAACLSATRDLLMTLAELGYRVSGKKAQLCQEEVTYLGFKIHKGSRSLSNSRTQAILQIPVPKTKRQVREFLGKIGYCRLFIPGFAELAQPLYAATRPGNDPLVWGEKEEEAFQSLKLALTQPPALALPSLDKPFQLFVEETSGAAKGVLTQALGPWKRPVAYLSKRLDPVAAGWPRCLRAIAAAALLTREASKLTFGQDIEITSSHNLESLLRSPPDKWLTNARITQYQVLLLDPPRVRFKQTAALNPATLLPETDDTLPIHHCLDTLDSLTSTRPDLTDQPLAQAEATLFTDGSSYIRDGKRYAGAAVVTLDSVIWAEPLPIGTSAQKAELIALTKALEWSKDKSVNIYTDSRYAFATLHVHGMIYRERGWLTAGGKAIKNAPEILALLTAVWLPKRVAVMHCKGHQKDDAPTSTGNRRADEVAREVAIRPLSTQATISAGKRTADGSEFEKRTADGSEFESPKKKAKVE

SEQ ID NO: 7321 - protein, 2102 aa, synthetic construct
MPAAKRVKLDGGDKKYSIGLDIGTNSVGWAVITDEYKVPSKKFKVLGNTDRHSIKKNLIGALLFDSGETAEATRLKRTARRRYTRRKNRICYLQEIFSNEMAKVDDSFFHRLEESFLVEEDKKHERHPIFGNIVDEVAYHEKYPTIYHLRKKLVDSTDKADLRLIYLALAHMIKFRGHFLIEGDLNPDNSDVDKLFIQLVQTYNQLFEENPINASGVDAKAILSARLSKSRRLENLIAQLPGEKKNGLFGNLIALSLGLTPNFKSNFDLAEDAKLQLSKDTYDDDLDNLLAQIGDQYADLFLAAKNLSDAILLSDILRVNTEITKAPLSASMIKRYDEHHQDLTLLKALVRQQLPEKYKEIFFDQSKNGYAGYIDGGASQEEFYKFIKPILEKMDGTEELLVKLNREDLLRKQRTFDNGSIPHQIHLGELHAILRRQEDFYPFLKDNREKIEKILTFRIPYYVGPLARGNSRFAWMTRKSEETITPWNFEEVVDKGASAQSFIERMTNFDKNLPNEKVLPKHSLLYEYFTVYNELTKVKYVTEGMRKPAFLSGEQKKAIVDLLFKTNRKVTVKQLKEDYFKKIECFDSVEISGVEDRFNASLGTYHDLLKIIKDKDFLDNEENEDILEDIVLTLTLFEDREMIEERLKTYAHLFDDKVMKQLKRRRYTGWGRLSRKLINGIRDKQSGKTILDFLKSDGFANRNFMQLIHDDSLTFKEDIQKAQVSGQGDSLHEHIANLAGSPAIKKGILQTVKVVDELVKVMGRHKPENIVIEMARENQTTQKGQKNSRERMKRIEEGIKELGSQILKEHPVENTQLQNEKLYLYYLQNGRDMYVDQELDINRLSDYDVDHIVPQSFLKDDSIDNKVLTRSDKARGKSDNVPSEEVVKKMKNYWRQLLNAKLITQRKFDNLTKAERGGLSELDKAGFIKRQLVETRQITKHVAQILDSRMNTKYDENDKLIREVKVITLKSKLVSDFRKDFQFYKVREINNYHHAHDAYLNAVVGTALIKKYPKLESEFVYGDYKVYDVRKMIAKSEQEIGKATAKYFFYSNIMNFFKTEITLANGEIRKRPLIETNGETGEIVWDKGRDFATVRKVLSMPQVNIVKKTEVQTGGFSKESILPKRNSDKLIARKKDWDPKKYGGFDSPTVAYSVLVVAKVEKGKSKKLKSVKELLGITIMERSSFEKNPIDFLEAKGYKEVKKDLIIKLPKYSLFELENGRKRMLASAGELQKGNELALPSKYVNFLYLASHYEKLKGSPEDNEQKQLFVEQHKHYLDEIIEQISEFSKRVILADANLDKVLSAYNKHRDKPIREQAENIIHLFTLTNLGAPAAFKYFDTTIDRKRYTSTKEVLDATLIHQSITGLYETRIDLSQLGGDGGEAAAKGGGGSSGGTVSLQDEHRLFDIPVTTSLPDVWLQDFPQAWAETGGLGRAKCQAPIIIDLKPTAVPVSIKQYPMSLEAHMGIRQHIIKFLELGVLRPCRSPWNTPLLPVKKPGTQDYRPVQDLREINKRTVDIHPTVPNPYNLLSTLKPDYSWYTVLDLKDAFFCLPLAPQSQELFAFEWKDPERGISGQLTWTRLPQGFKNSPTLFDEALHRDLTDFRTQHPEVTLLQYVDDLLLAAPTKKACTQGTRHLLQELGEKGYRASAKKAQICQTKVTYLGYILSEGKRWLTPGRIETVARIPPPRNPREVREFLGTAGFCRLWIPGFAELAAPLYALTKESTPFTWQTEHQLAFEALKKALLSAPALGLPDTSKPFTLFLDERQGIAKGVLTQKLGPWKRPVAYLSKKLDPVAAGWPPCLRIMAATAMLVKDSAKLTLGQPLTVITPHTLEAIVRQPPDRWITNARLTHYQALLLDTDRVQFGPPVTLNPATLLPVPENQPSPHDCRQVLAETHGTREDLKDQELPDADHTWYTDGSSYLDSGTRRAGAAVVDGHNTIWAQSLPPGTSAQKAELIALTKALELSKGKKANIYTDSRYAFATAHTHGSIYERRGLLTSEGKEIKNKAEIIALLKALFLPQEVAIIHCPGHQKGQDPVAVGNRQADRVARQAAMAEVLTLATEPDNTSHITAGKRTADGSEFEKRTADGSEFESPKKKAKVE

SEQ ID NO: 7322 - protein, 2087 aa, synthetic construct
MPAAKRVKLDGGDKKYSIGLDIGTNSVGWAVITDEYKVPSKKFKVLGNTDRHSIKKNLIGALLFDSGETAEATRLKRTARRRYTRRKNRICYLQEIFSNEMAKVDDSFFHRLEESFLVEEDKKHERHPIFGNIVDEVAYHEKYPTIYHLRKKLVDSTDKADLRLIYLALAHMIKFRGHFLIEGDLNPDNSDVDKLFIQLVQTYNQLFEENPINASGVDAKAILSARLSKSRRLENLIAQLPGEKKNGLFGNLIALSLGLTPNFKSNFDLAEDAKLQLSKDTYDDDLDNLLAQIGDQYADLFLAAKNLSDAILLSDILRVNTEITKAPLSASMIKRYDEHHQDLTLLKALVRQQLPEKYKEIFFDQSKNGYAGYIDGGASQEEFYKFIKPILEKMDGTEELLVKLNREDLLRKQRTFDNGSIPHQIHLGELHAILRRQEDFYPFLKDNREKIEKILTFRIPYYVGPLARGNSRFAWMTRKSEETITPWNFEEVVDKGASAQSFIERMTNFDKNLPNEKVLPKHSLLYEYFTVYNELTKVKYVTEGMRKPAFLSGEQKKAIVDLLFKTNRKVTVKQLKEDYFKKIECFDSVEISGVEDRFNASLGTYHDLLKIIKDKDFLDNEENEDILEDIVLTLTLFEDREMIEERLKTYAHLFDDKVMKQLKRRRYTGWGRLSRKLINGIRDKQSGKTILDFLKSDGFANRNFMQLIHDDSLTFKEDIQKAQVSGQGDSLHEHIANLAGSPAIKKGILQTVKVVDELVKVMGRHKPENIVIEMARENQTTQKGQKNSRERMKRIEEGIKELGSQILKEHPVENTQLQNEKLYLYYLQNGRDMYVDQELDINRLSDYDVDHIVPQSFLKDDSIDNKVLTRSDKARGKSDNVPSEEVVKKMKNYWRQLLNAKLITQRKFDNLTKAERGGLSELDKAGFIKRQLVETRQITKHVAQILDSRMNTKYDENDKLIREVKVITLKSKLVSDFRKDFQFYKVREINNYHHAHDAYLNAVVGTALIKKYPKLESEFVYGDYKVYDVRKMIAKSEQEIGKATAKYFFYSNIMNFFKTEITLANGEIRKRPLIETNGETGEIVWDKGRDFATVRKVLSMPQVNIVKKTEVQTGGFSKESILPKRNSDKLIARKKDWDPKKYGGFDSPTVAYSVLVVAKVEKGKSKKLKSVKELLGITIMERSSFEKNPIDFLEAKGYKEVKKDLIIKLPKYSLFELENGRKRMLASAGELQKGNELALPSKYVNFLYLASHYEKLKGSPEDNEQKQLFVEQHKHYLDEIIEQISEFSKRVILADANLDKVLSAYNKHRDKPIREQAENIIHLFTLTNLGAPAAFKYFDTTIDRKRYTSTKEVLDATLIHQSITGLYETRIDLSQLGGDGGEAAAKGGGGSSGGVPWILKKPLELTIKLDLEEQQGTLLNNSILSKKGKEELKQLFEKYSALWQSWENQVGHRRIRPHKIATGTVKPTPQKQYHINPKAKPDIQIVINDLLKQGVLIQKESTMNTPVYPVPKPNGRWRMVLDYRAVNKVTPLIAVQNQHSYGILGSLFKGRYKTTIDLSNGFWAHPIVPEDYWITAFTWQGKQYCWTVLPQGFLNSPGLFTGDVVDLLQGIPNVEVYVDDVYISHDSEKEHLEYLDILFNRLKEAGYIISLKKSNIANSIVDFLGFQITNEGRGLTDTFKEKLENITAPTTLKQLQSILGLLNFARNFIPDFTELIAPLYALIPKSTKNYVPWQIEHSTTLETLITKLNGAEYLQGRKGDKTLIMKVNASYTTGYIRYYNEGEKKPISYVSIVFSKTELKFTELEKLLTTVHKGLLKALDLSMGQNIHVYSPIVSMQNIQKTPQTAKKALASRWLSWLSYLEDPRIRFFYDPQMPALKDLPAVDTGKDNKKHPSNFQHIFYTDGSAITSPTKEGHLNAGMGIVYFINKDGNLQKQQEWSISLGNHTAQFAEIAAFEFALKKCLPLGGNILVVTDSNYVAKAYNEELDVWASNGFVNNRKKPLKHISKWKSVADLKRLRPDVVVTHEPGHQKLDSSPHAYGNNLADQLATQASFKVHAGKRTADGSEFEKRTADGSEFESPKKKAKVE

SEQ ID NO: 7323 - protein, 2095 aa, synthetic construct
MPAAKRVKLDGGDKKYSIGLDIGTNSVGWAVITDEYKVPSKKFKVLGNTDRHSIKKNLIGALLFDSGETAEATRLKRTARRRYTRRKNRICYLQEIFSNEMAKVDDSFFHRLEESFLVEEDKKHERHPIFGNIVDEVAYHEKYPTIYHLRKKLVDSTDKADLRLIYLALAHMIKFRGHFLIEGDLNPDNSDVDKLFIQLVQTYNQLFEENPINASGVDAKAILSARLSKSRRLENLIAQLPGEKKNGLFGNLIALSLGLTPNFKSNFDLAEDAKLQLSKDTYDDDLDNLLAQIGDQYADLFLAAKNLSDAILLSDILRVNTEITKAPLSASMIKRYDEHHQDLTLLKALVRQQLPEKYKEIFFDQSKNGYAGYIDGGASQEEFYKFIKPILEKMDGTEELLVKLNREDLLRKQRTFDNGSIPHQIHLGELHAILRRQEDFYPFLKDNREKIEKILTFRIPYYVGPLARGNSRFAWMTRKSEETITPWNFEEVVDKGASAQSFIERMTNFDKNLPNEKVLPKHSLLYEYFTVYNELTKVKYVTEGMRKPAFLSGEQKKAIVDLLFKTNRKVTVKQLKEDYFKKIECFDSVEISGVEDRFNASLGTYHDLLKIIKDKDFLDNEENEDILEDIVLTLTLFEDREMIEERLKTYAHLFDDKVMKQLKRRRYTGWGRLSRKLINGIRDKQSGKTILDFLKSDGFANRNFMQLIHDDSLTFKEDIQKAQVSGQGDSLHEHIANLAGSPAIKKGILQTVKVVDELVKVMGRHKPENIVIEMARENQTTQKGQKNSRERMKRIEEGIKELGSQILKEHPVENTQLQNEKLYLYYLQNGRDMYVDQELDINRLSDYDVDHIVPQSFLKDDSIDNKVLTRSDKARGKSDNVPSEEVVKKMKNYWRQLLNAKLITQRKFDNLTKAERGGLSELDKAGFIKRQLVETRQITKHVAQILDSRMNTKYDENDKLIREVKVITLKSKLVSDFRKDFQFYKVREINNYHHAHDAYLNAVVGTALIKKYPKLESEFVYGDYKVYDVRKMIAKSEQEIGKATAKYFFYSNIMNFFKTEITLANGEIRKRPLIETNGETGEIVWDKGRDFATVRKVLSMPQVNIVKKTEVQTGGFSKESILPKRNSDKLIARKKDWDPKKYGGFDSPTVAYSVLVVAKVEKGKSKKLKSVKELLGITIMERSSFEKNPIDFLEAKGYKEVKKDLIIKLPKYSLFELENGRKRMLASAGELQKGNELALPSKYVNFLYLASHYEKLKGSPEDNEQKQLFVEQHKHYLDEIIEQISEFSKRVILADANLDKVLSAYNKHRDKPIREQAENIIHLFTLTNLGAPAAFKYFDTTIDRKRYTSTKEVLDATLIHQSITGLYETRIDLSQLGGDGGEAAAKGGGGSSGGTLQLEEEYRLFEPESTQKQEMDIWLKNFPQAWAETGGMGTAHCQAPVLIQLKATATPISIRQYPMPHEAYQGIKPHIRRMLDQGILKPCQSPWNTPLLPVKKPGTEDYRPVQDLREVNKRVEDIHPTVPNPYNLLSTLPPSHPWYTVLDLKDAFFCLRLHSESQLLFAFEWRDPEIGLSGQLTWTRLPQGFKNSPTLFNEALHSDLADFRVRYPALVLLQYVDDLLLAAATRTECLEGTKALLETLGNKGYRASAKKAQICLQEVTYLGYSLKDGQRWLTKARKEAILSIPVPKNSRQVREFLGTAGYCRLWIPGFAELAAPLYPLTRPGTLFQWGTEQQLAFEDIKKALLSSPALGLPDITKPFELFIDENSGFAKGVLVQKLGPWKRPVAYLSKKLDTVASGWPPCLRMVAAIAILVKDAGKLTLGQPLTILTSHPVEALVRQPPNKWLSNARMTHYQAMLLDAERVHFGPTVSLNPATLLPLPSGGNHHDCLQILAETHGTRPDLTDQPLPDADLTWYTDGSSFIRNGEREAGAAVTTESEVIWAAPLPPGTSAQRAELIALTQALKMAEGKKLTVYTDSRYAFATTHVHGEIYRRRGWLTSEGKEIKNKNEILALLEALFLPKRLSIIHCPGHQKGDSPQAKGNRLADDTAKKAATETHSSLTVLPAGKRTADGSEFEKRTADGSEFESPKKKAKVE

SEQ ID NO: 7324 - protein, 2095 aa, synthetic construct
MPAAKRVKLDGGDKKYSIGLDIGTNSVGWAVITDEYKVPSKKFKVLGNTDRHSIKKNLIGALLFDSGETAEATRLKRTARRRYTRRKNRICYLQEIFSNEMAKVDDSFFHRLEESFLVEEDKKHERHPIFGNIVDEVAYHEKYPTIYHLRKKLVDSTDKADLRLIYLALAHMIKFRGHFLIEGDLNPDNSDVDKLFIQLVQTYNQLFEENPINASGVDAKAILSARLSKSRRLENLIAQLPGEKKNGLFGNLIALSLGLTPNFKSNFDLAEDAKLQLSKDTYDDDLDNLLAQIGDQYADLFLAAKNLSDAILLSDILRVNTEITKAPLSASMIKRYDEHHQDLTLLKALVRQQLPEKYKEIFFDQSKNGYAGYIDGGASQEEFYKFIKPILEKMDGTEELLVKLNREDLLRKQRTFDNGSIPHQIHLGELHAILRRQEDFYPFLKDNREKIEKILTFRIPYYVGPLARGNSRFAWMTRKSEETITPWNFEEVVDKGASAQSFIERMTNFDKNLPNEKVLPKHSLLYEYFTVYNELTKVKYVTEGMRKPAFLSGEQKKAIVDLLFKTNRKVTVKQLKEDYFKKIECFDSVEISGVEDRFNASLGTYHDLLKIIKDKDFLDNEENEDILEDIVLTLTLFEDREMIEERLKTYAHLFDDKVMKQLKRRRYTGWGRLSRKLINGIRDKQSGKTILDFLKSDGFANRNFMQLIHDDSLTFKEDIQKAQVSGQGDSLHEHIANLAGSPAIKKGILQTVKVVDELVKVMGRHKPENIVIEMARENQTTQKGQKNSRERMKRIEEGIKELGSQILKEHPVENTQLQNEKLYLYYLQNGRDMYVDQELDINRLSDYDVDHIVPQSFLKDDSIDNKVLTRSDKARGKSDNVPSEEVVKKMKNYWRQLLNAKLITQRKFDNLTKAERGGLSELDKAGFIKRQLVETRQITKHVAQILDSRMNTKYDENDKLIREVKVITLKSKLVSDFRKDFQFYKVREINNYHHAHDAYLNAVVGTALIKKYPKLESEFVYGDYKVYDVRKMIAKSEQEIGKATAKYFFYSNIMNFFKTEITLANGEIRKRPLIETNGETGEIVWDKGRDFATVRKVLSMPQVNIVKKTEVQTGGFSKESILPKRNSDKLIARKKDWDPKKYGGFDSPTVAYSVLVVAKVEKGKSKKLKSVKELLGITIMERSSFEKNPIDFLEAKGYKEVKKDLIIKLPKYSLFELENGRKRMLASAGELQKGNELALPSKYVNFLYLASHYEKLKGSPEDNEQKQLFVEQHKHYLDEIIEQISEFSKRVILADANLDKVLSAYNKHRDKPIREQAENIIHLFTLTNLGAPAAFKYFDTTIDRKRYTSTKEVLDATLIHQSITGLYETRIDLSQLGGDGGEAAAKGGGGSSGGTLQLEEEYRLFEPESTQKQEMDIWLKNFPQAWAETGGMGTAHCQAPVLIQLKATATPISIRQYPMPHEAYQGIKPHIRRMLDQGILKPCQSPWNTPLLPVKKPGTEDYRPVQDLREVNKRVEDIHPTVPNPYNLLSTLPPSHPWYTVLDLKDAFFCLRLHSESQLLFAFEWRDPEIGLSGQLTWTRLPQGFKNSPTLFNEALHSDLADFRVRYPALVLLQYVDDLLLAAATRTECLEGTKALLETLGNKGYRASAKKAQICLQEVTYLGYSLKDGQRWLTKARKEAILSIPVPKNSRQVREFLGKAGYCRLFIPGFAELAAPLYPLTRPGTLFQWGTEQQLAFEDIKKALLSSPALGLPDITKPFELFIDENSGFAKGVLVQKLGPWKRPVAYLSKKLDTVASGWPPCLRMVAAIAILVKDAGKLTLGQPLTILTSHPVEALVRQPPNKWLSNARMTHYQAMLLDAERVHFGPTVSLNPATLLPLPSGGNHHDCLQILAETHGTRPDLTDQPLPDADLTWYTDGSSFIRNGEREAGAAVTTESEVIWAAPLPPGTSAQRAELIALTQALKMAEGKKLTVYTDSRYAFATTHVHGEIYRRRGWLTSEGKEIKNKNEILALLEALFLPKRLSIIHCPGHQKGDSPQAKGNRLADDTAKKAATETHSSLTVLPAGKRTADGSEFEKRTADGSEFESPKKKAKVE

SEQ ID NO: 7325 - protein, 2176 aa, synthetic construct
MPAAKRVKLDGGDKKYSIGLDIGTNSVGWAVITDEYKVPSKKFKVLGNTDRHSIKKNLIGALLFDSGETAEATRLKRTARRRYTRRKNRICYLQEIFSNEMAKVDDSFFHRLEESFLVEEDKKHERHPIFGNIVDEVAYHEKYPTIYHLRKKLVDSTDKADLRLIYLALAHMIKFRGHFLIEGDLNPDNSDVDKLFIQLVQTYNQLFEENPINASGVDAKAILSARLSKSRRLENLIAQLPGEKKNGLFGNLIALSLGLTPNFKSNFDLAEDAKLQLSKDTYDDDLDNLLAQIGDQYADLFLAAKNLSDAILLSDILRVNTEITKAPLSASMIKRYDEHHQDLTLLKALVRQQLPEKYKEIFFDQSKNGYAGYIDGGASQEEFYKFIKPILEKMDGTEELLVKLNREDLLRKQRTFDNGSIPHQIHLGELHAILRRQEDFYPFLKDNREKIEKILTFRIPYYVGPLARGNSRFAWMTRKSEETITPWNFEEVVDKGASAQSFIERMTNFDKNLPNEKVLPKHSLLYEYFTVYNELTKVKYVTEGMRKPAFLSGEQKKAIVDLLFKTNRKVTVKQLKEDYFKKIECFDSVEISGVEDRFNASLGTYHDLLKIIKDKDFLDNEENEDILEDIVLTLTLFEDREMIEERLKTYAHLFDDKVMKQLKRRRYTGWGRLSRKLINGIRDKQSGKTILDFLKSDGFANRNFMQLIHDDSLTFKEDIQKAQVSGQGDSLHEHIANLAGSPAIKKGILQTVKVVDELVKVMGRHKPENIVIEMARENQTTQKGQKNSRERMKRIEEGIKELGSQILKEHPVENTQLQNEKLYLYYLQNGRDMYVDQELDINRLSDYDVDHIVPQSFLKDDSIDNKVLTRSDKARGKSDNVPSEEVVKKMKNYWRQLLNAKLITQRKFDNLTKAERGGLSELDKAGFIKRQLVETRQITKHVAQILDSRMNTKYDENDKLIREVKVITLKSKLVSDFRKDFQFYKVREINNYHHAHDAYLNAVVGTALIKKYPKLESEFVYGDYKVYDVRKMIAKSEQEIGKATAKYFFYSNIMNFFKTEITLANGEIRKRPLIETNGETGEIVWDKGRDFATVRKVLSMPQVNIVKKTEVQTGGFSKESILPKRNSDKLIARKKDWDPKKYGGFDSPTVAYSVLVVAKVEKGKSKKLKSVKELLGITIMERSSFEKNPIDFLEAKGYKEVKKDLIIKLPKYSLFELENGRKRMLASAGELQKGNELALPSKYVNFLYLASHYEKLKGSPEDNEQKQLFVEQHKHYLDEIIEQISEFSKRVILADANLDKVLSAYNKHRDKPIREQAENIIHLFTLTNLGAPAAFKYFDTTIDRKRYTSTKEVLDATLIHQSITGLYETRIDLSQLGGDGGEAAAKGGGGSSGGMNPLQLLQPLPAEIKGTKLLAHWNSGATITCIPESFLEDEQPIKKTLIKTIHGEKQQNVYYVTFKVKGRKVEAEVIASPYEYILLSPTDVPWLTQQPLQLTILVPLQEYQEKILSKTALPEDQKQQLKTLFVKYDNLWQHWENQVGHRKIRPHNIATGDYPPRPQKQYPINPKAKPSIQIVIDDLLKQGVLTPQNSTMNTPVYPVPKPDGRWRMVLDYREVNKTIPLTAAQNQHSAGILATIVRQKYKTTLDLANGFWAHPITPESYWLTAFTWQGKQYCWTRLPQGFLNSPALFTADVVDLLKEIPNVQVYVDDIYLSHDDPKEHVQQLEKVFQILLQAGYVVSLKKSEIGQKTVEFLGFNITKEGRGLTDTFKTKLLNITPPKDLKQLQSILGLLNFARNFIPNFAELVQPLYNLIASAKGKYIEWSEENTKQLNMVIEALNTASNLEERLPEQRLVIKVNTSPSAGYVRYYNETGKKPIMYLNYVFSKAELKFSMLEKLLTTMHKALIKAMDLAMGQEILVYSPIVSMTKIQKTPLPERKALPIRWITWMTYLEDPRIQFHYDKTLPELKHIPDVYTSSQSPVKHPSQYEGVFYTDGSAIKSPDPTKSNNAGMGIVHATYKPEYQVLNQWSIPLGNHTAQMAEIAAVEFACKKALKIPGPVLVITDSFYVAESANKELPYWKSNGFVNNKKKPLKHISKWKSIAECLSMKPDITIQHEKGISLQIPVFILKGNALADKLATQGSYVVNAGKRTADGSEFEKRTADGSEFESPKKKAKVE

SEQ ID NO: 7326 - protein, 2094 aa, synthetic construct
MPAAKRVKLDGGDKKYSIGLDIGTNSVGWAVITDEYKVPSKKFKVLGNTDRHSIKKNLIGALLFDSGETAEATRLKRTARRRYTRRKNRICYLQEIFSNEMAKVDDSFFHRLEESFLVEEDKKHERHPIFGNIVDEVAYHEKYPTIYHLRKKLVDSTDKADLRLIYLALAHMIKFRGHFLIEGDLNPDNSDVDKLFIQLVQTYNQLFEENPINASGVDAKAILSARLSKSRRLENLIAQLPGEKKNGLFGNLIALSLGLTPNFKSNFDLAEDAKLQLSKDTYDDDLDNLLAQIGDQYADLFLAAKNLSDAILLSDILRVNTEITKAPLSASMIKRYDEHHQDLTLLKALVRQQLPEKYKEIFFDQSKNGYAGYIDGGASQEEFYKFIKPILEKMDGTEELLVKLNREDLLRKQRTFDNGSIPHQIHLGELHAILRRQEDFYPFLKDNREKIEKILTFRIPYYVGPLARGNSRFAWMTRKSEETITPWNFEEVVDKGASAQSFIERMTNFDKNLPNEKVLPKHSLLYEYFTVYNELTKVKYVTEGMRKPAFLSGEQKKAIVDLLFKTNRKVTVKQLKEDYFKKIECFDSVEISGVEDRFNASLGTYHDLLKIIKDKDFLDNEENEDILEDIVLTLTLFEDREMIEERLKTYAHLFDDKVMKQLKRRRYTGWGRLSRKLINGIRDKQSGKTILDFLKSDGFANRNFMQLIHDDSLTFKEDIQKAQVSGQGDSLHEHIANLAGSPAIKKGILQTVKVVDELVKVMGRHKPENIVIEMARENQTTQKGQKNSRERMKRIEEGIKELGSQILKEHPVENTQLQNEKLYLYYLQNGRDMYVDQELDINRLSDYDVDHIVPQSFLKDDSIDNKVLTRSDKARGKSDNVPSEEVVKKMKNYWRQLLNAKLITQRKFDNLTKAERGGLSELDKAGFIKRQLVETRQITKHVAQILDSRMNTKYDENDKLIREVKVITLKSKLVSDFRKDFQFYKVREINNYHHAHDAYLNAVVGTALIKKYPKLESEFVYGDYKVYDVRKMIAKSEQEIGKATAKYFFYSNIMNFFKTEITLANGEIRKRPLIETNGETGEIVWDKGRDFATVRKVLSMPQVNIVKKTEVQTGGFSKESILPKRNSDKLIARKKDWDPKKYGGFDSPTVAYSVLVVAKVEKGKSKKLKSVKELLGITIMERSSFEKNPIDFLEAKGYKEVKKDLIIKLPKYSLFELENGRKRMLASAGELQKGNELALPSKYVNFLYLASHYEKLKGSPEDNEQKQLFVEQHKHYLDEIIEQISEFSKRVILADANLDKVLSAYNKHRDKPIREQAENIIHLFTLTNLGAPAAFKYFDTTIDRKRYTSTKEVLDATLIHQSITGLYETRIDLSQLGGDGGEAAAKGGGGSSGGVLNLEEEYRLHEKPVPSSIDPSWLQLFPTVWAERAGMGLANQVPPVVVELRSGASPVAVRQYPMSKEAREGIRPHIQKFLDLGVLVPCRSPWNTPLLPVKKPGTNDYRPVQDLREINKRVQDIHPTVPNPYNLLSSLPPSYTWYSVLDLKDAFFCLRLHPNSQPLFAFEWKDPEKGNTGQLTWTRLPQGFKNSPTLFNEALHRDLAPFRALNPQVVLLQYVDDLLVAAPTYEDCKKGTQKLLQELSKLGYRVSAKKAQLCQREVTYLGYLLKEGKRWLTPARKATVMKIPVPTTPRQVREFLGTAGFCRLWIPGFASLAAPLYPLTKPSIPFIWTEEHQQAFDHIKKALLSAPALALPDLTKPFTLYIDERAGVARGVLTQTLGPWRRPVAYLSKKLDPVASGWPTCLKAVAAVALLLKDADKLTLGQNVTVIASHSLESIVRQPPDRWMTNARMTHYQSLLLNERVSFAPPAVLNPATLLPVESEATPVHRCSEILAEETGTRRDLEDQPLPGVPTWYTDGSSFITEGKRRAGAPIVDGKRTVWASSLPEGTSAQKAELVALTQALRLAEGKNINIYTDSRYAFATAHIHGAIYKQRGWLTSAGKDIKNKEEILALLEAIHLPRRVAIIHCPGHQRGSNPVATGNRRADEAAKQAALSTRVLAGTTKPAGKRTADGSEFEKRTADGSEFESPKKKAKVE

SEQ ID NO: 7327 - protein, 2218 aa, synthetic construct
MPAAKRVKLDGGDKKYSIGLDIGTNSVGWAVITDEYKVPSKKFKVLGNTDRHSIKKNLIGALLFDSGETAEATRLKRTARRRYTRRKNRICYLQEIFSNEMAKVDDSFFHRLEESFLVEEDKKHERHPIFGNIVDEVAYHEKYPTIYHLRKKLVDSTDKADLRLIYLALAHMIKFRGHFLIEGDLNPDNSDVDKLFIQLVQTYNQLFEENPINASGVDAKAILSARLSKSRRLENLIAQLPGEKKNGLFGNLIALSLGLTPNFKSNFDLAEDAKLQLSKDTYDDDLDNLLAQIGDQYADLFLAAKNLSDAILLSDILRVNTEITKAPLSASMIKRYDEHHQDLTLLKALVRQQLPEKYKEIFFDQSKNGYAGYIDGGASQEEFYKFIKPILEKMDGTEELLVKLNREDLLRKQRTFDNGSIPHQIHLGELHAILRRQEDFYPFLKDNREKIEKILTFRIPYYVGPLARGNSRFAWMTRKSEETITPWNFEEVVDKGASAQSFIERMTNFDKNLPNEKVLPKHSLLYEYFTVYNELTKVKYVTEGMRKPAFLSGEQKKAIVDLLFKTNRKVTVKQLKEDYFKKIECFDSVEISGVEDRFNASLGTYHDLLKIIKDKDFLDNEENEDILEDIVLTLTLFEDREMIEERLKTYAHLFDDKVMKQLKRRRYTGWGRLSRKLINGIRDKQSGKTILDFLKSDGFANRNFMQLIHDDSLTFKEDIQKAQVSGQGDSLHEHIANLAGSPAIKKGILQTVKVVDELVKVMGRHKPENIVIEMARENQTTQKGQKNSRERMKRIEEGIKELGSQILKEHPVENTQLQNEKLYLYYLQNGRDMYVDQELDINRLSDYDVDHIVPQSFLKDDSIDNKVLTRSDKARGKSDNVPSEEVVKKMKNYWRQLLNAKLITQRKFDNLTKAERGGLSELDKAGFIKRQLVETRQITKHVAQILDSRMNTKYDENDKLIREVKVITLKSKLVSDFRKDFQFYKVREINNYHHAHDAYLNAVVGTALIKKYPKLESEFVYGDYKVYDVRKMIAKSEQEIGKATAKYFFYSNIMNFFKTEITLANGEIRKRPLIETNGETGEIVWDKGRDFATVRKVLSMPQVNIVKKTEVQTGGFSKESILPKRNSDKLIARKKDWDPKKYGGFDSPTVAYSVLVVAKVEKGKSKKLKSVKELLGITIMERSSFEKNPIDFLEAKGYKEVKKDLIIKLPKYSLFELENGRKRMLASAGELQKGNELALPSKYVNFLYLASHYEKLKGSPEDNEQKQLFVEQHKHYLDEIIEQISEFSKRVILADANLDKVLSAYNKHRDKPIREQAENIIHLFTLTNLGAPAAFKYFDTTIDRKRYTSTKEVLDATLIHQSITGLYETRIDLSQLGGDGGEAAAKGGGGSSGGTLGDQGSRGSDPLPEPRVTLTVEGIPTEFLVNTGAEHSVLTKPMGKMGSKRTVVAGATGSKVYPWTTKRLLKIGQKQVTHSFLVIPECPAPLLGRDLLTKLKAQIQFSTEGPQVTWEDRPAMCLVLNLEEEYRLHEKPVPPSIDPSWLQLFPMVWAEKAGMGLANQVPPVVVELKSDASPVAVRQYPMSKEAREGIRPHIQRFLDLGILVPCQSPWNTPLLPVKKPGTNDYRPVQDLREVNKRVQDIHPTVPNPYNLLSSLPPSHTWYSVLDLKDAFFCLKLHPNSQPLFAFEWRDPEKGNTGQLTWTRLPQGFKNSPTLFNEALHRDLASFRALNPQVVMLQYVDDLLVAAPTYRDCKEGTRRLLQELSKLGYRVSAKKAQLCREEVTYLGYLLKGGKRWLTPARKATVMKIPTPTTPRQVREFLGTAGFCRLWIPGFASLAAPLYPLTRPKVPFTWTEAHQEAFGRIKEALLSAPALALPDLTKPFALYVDEKEGVARGVLTQTLGPWRRPVAYLSKKLDPVASGWPTCLKAIAAVALLLKDADKLTLGQNVLVIAPHNLESIVRQPPDRWMTNARMTHYQSLLLNERVSFAPPAILNPATLLPVESDDTPIHICSEILAEETGTRPDLRDQPLPGVPAWYTDGSSFIMDGRRQAGAAIVDNKRTVWASNLPEGTSAQKAELIALTQALRLAEGKSINIYTDSRYAFATAHVHGAIYKQRGWLTSAGKDIKNKEEILALLEAIHLPKRVAIIHCPGHQRGTDPVATGNRKADEAAKQAAQSTRILTETTKNAGKRTADGSEFEKRTADGSEFESPKKKAKVE

SEQ ID NO: 7328 - protein, 2096 aa, synthetic construct
MPAAKRVKLDGGDKKYSIGLDIGTNSVGWAVITDEYKVPSKKFKVLGNTDRHSIKKNLIGALLFDSGETAEATRLKRTARRRYTRRKNRICYLQEIFSNEMAKVDDSFFHRLEESFLVEEDKKHERHPIFGNIVDEVAYHEKYPTIYHLRKKLVDSTDKADLRLIYLALAHMIKFRGHFLIEGDLNPDNSDVDKLFIQLVQTYNQLFEENPINASGVDAKAILSARLSKSRRLENLIAQLPGEKKNGLFGNLIALSLGLTPNFKSNFDLAEDAKLQLSKDTYDDDLDNLLAQIGDQYADLFLAAKNLSDAILLSDILRVNTEITKAPLSASMIKRYDEHHQDLTLLKALVRQQLPEKYKEIFFDQSKNGYAGYIDGGASQEEFYKFIKPILEKMDGTEELLVKLNREDLLRKQRTFDNGSIPHQIHLGELHAILRRQEDFYPFLKDNREKIEKILTFRIPYYVGPLARGNSRFAWMTRKSEETITPWNFEEVVDKGASAQSFIERMTNFDKNLPNEKVLPKHSLLYEYFTVYNELTKVKYVTEGMRKPAFLSGEQKKAIVDLLFKTNRKVTVKQLKEDYFKKIECFDSVEISGVEDRFNASLGTYHDLLKIIKDKDFLDNEENEDILEDIVLTLTLFEDREMIEERLKTYAHLFDDKVMKQLKRRRYTGWGRLSRKLINGIRDKQSGKTILDFLKSDGFANRNFMQLIHDDSLTFKEDIQKAQVSGQGDSLHEHIANLAGSPAIKKGILQTVKVVDELVKVMGRHKPENIVIEMARENQTTQKGQKNSRERMKRIEEGIKELGSQILKEHPVENTQLQNEKLYLYYLQNGRDMYVDQELDINRLSDYDVDHIVPQSFLKDDSIDNKVLTRSDKARGKSDNVPSEEVVKKMKNYWRQLLNAKLITQRKFDNLTKAERGGLSELDKAGFIKRQLVETRQITKHVAQILDSRMNTKYDENDKLIREVKVITLKSKLVSDFRKDFQFYKVREINNYHHAHDAYLNAVVGTALIKKYPKLESEFVYGDYKVYDVRKMIAKSEQEIGKATAKYFFYSNIMNFFKTEITLANGEIRKRPLIETNGETGEIVWDKGRDFATVRKVLSMPQVNIVKKTEVQTGGFSKESILPKRNSDKLIARKKDWDPKKYGGFDSPTVAYSVLVVAKVEKGKSKKLKSVKELLGITIMERSSFEKNPIDFLEAKGYKEVKKDLIIKLPKYSLFELENGRKRMLASAGELQKGNELALPSKYVNFLYLASHYEKLKGSPEDNEQKQLFVEQHKHYLDEIIEQISEFSKRVILADANLDKVLSAYNKHRDKPIREQAENIIHLFTLTNLGAPAAFKYFDTTIDRKRYTSTKEVLDATLIHQSITGLYETRIDLSQLGGDGGEAAAKGGGGSSGGTLGIEDEYRLHETSTEPDVSLGSTWLSDFPQAWAETGGMGLAVRQAPLIIPLKATSTPVSIQQYPMSHEARLGIKPHIQRLLDQGILVPCQSPWNTPLLPVKKPGTNDYRPVQDLREVNKRVEDIHPTVPNPYNLLSGLPPSHQWYTVLDLKDAFFCLRLHPTSQPLFAFEWRDPGMGISGQLTWTRLPQGFKNSPTLFNEALHRDLADFRIQHPDLILLQYVDDILLAATSELDCQQGTRALLQTLGDLGYRASAKKAQICQKQVKYLGYLLREGQRWLTEARKETVMGQPVPKTPRQLREFLGTAGFCRLWIPGFAEMAAPLYPLTKPGTLFSWGPDQQKAYQEIKQALLTAPALGLPDLTKPFELFVDEKQGYAKGVLTQKLGPWRRPVAYLSKKLDPVAAGWPPCLRMVAAIAVLTKDAGKLTMGQPLVILAPHAVEALVKQPPDRWLSNARMTHYQAMLLDTDRVQFGPVVALNPATLLPLPEEGAPHDCLEILAETHGTRPDLTDQPIPDADHTWYTDGSSFLQEGQRKAGAAVTTETEVIWAGALPAGTSAQRAELIALTQALKMAEGKRLNVYTDSRYAFATAHIHGEIYRRRGWLTSEGREIKNKSEILALLKALFLPKRLSIIHCLGHQKGDSAEARGNRLADQAAREAAIKTPPDTSTLLAGKRTADGSEFEKRTADGSEFESPKKKAKVE

SEQ ID NO: 7329 - protein, 2096 aa, synthetic construct
MPAAKRVKLDGGDKKYSIGLDIGTNSVGWAVITDEYKVPSKKFKVLGNTDRHSIKKNLIGALLFDSGETAEATRLKRTARRRYTRRKNRICYLQEIFSNEMAKVDDSFFHRLEESFLVEEDKKHERHPIFGNIVDEVAYHEKYPTIYHLRKKLVDSTDKADLRLIYLALAHMIKFRGHFLIEGDLNPDNSDVDKLFIQLVQTYNQLFEENPINASGVDAKAILSARLSKSRRLENLIAQLPGEKKNGLFGNLIALSLGLTPNFKSNFDLAEDAKLQLSKDTYDDDLDNLLAQIGDQYADLFLAAKNLSDAILLSDILRVNTEITKAPLSASMIKRYDEHHQDLTLLKALVRQQLPEKYKEIFFDQSKNGYAGYIDGGASQEEFYKFIKPILEKMDGTEELLVKLNREDLLRKQRTFDNGSIPHQIHLGELHAILRRQEDFYPFLKDNREKIEKILTFRIPYYVGPLARGNSRFAWMTRKSEETITPWNFEEVVDKGASAQSFIERMTNFDKNLPNEKVLPKHSLLYEYFTVYNELTKVKYVTEGMRKPAFLSGEQKKAIVDLLFKTNRKVTVKQLKEDYFKKIECFDSVEISGVEDRFNASLGTYHDLLKIIKDKDFLDNEENEDILEDIVLTLTLFEDREMIEERLKTYAHLFDDKVMKQLKRRRYTGWGRLSRKLINGIRDKQSGKTILDFLKSDGFANRNFMQLIHDDSLTFKEDIQKAQVSGQGDSLHEHIANLAGSPAIKKGILQTVKVVDELVKVMGRHKPENIVIEMARENQTTQKGQKNSRERMKRIEEGIKELGSQILKEHPVENTQLQNEKLYLYYLQNGRDMYVDQELDINRLSDYDVDHIVPQSFLKDDSIDNKVLTRSDKARGKSDNVPSEEVVKKMKNYWRQLLNAKLITQRKFDNLTKAERGGLSELDKAGFIKRQLVETRQITKHVAQILDSRMNTKYDENDKLIREVKVITLKSKLVSDFRKDFQFYKVREINNYHHAHDAYLNAVVGTALIKKYPKLESEFVYGDYKVYDVRKMIAKSEQEIGKATAKYFFYSNIMNFFKTEITLANGEIRKRPLIETNGETGEIVWDKGRDFATVRKVLSMPQVNIVKKTEVQTGGFSKESILPKRNSDKLIARKKDWDPKKYGGFDSPTVAYSVLVVAKVEKGKSKKLKSVKELLGITIMERSSFEKNPIDFLEAKGYKEVKKDLIIKLPKYSLFELENGRKRMLASAGELQKGNELALPSKYVNFLYLASHYEKLKGSPEDNEQKQLFVEQHKHYLDEIIEQISEFSKRVILADANLDKVLSAYNKHRDKPIREQAENIIHLFTLTNLGAPAAFKYFDTTIDRKRYTSTKEVLDATLIHQSITGLYETRIDLSQLGGDGGEAAAKGGGGSSGGTLNIEDEYRLHETSKGPDVPLGSTWLSDFPQAWAETGGMGLAVRQAPLIIPLKATSTPVSIKQYPMSQEARLGIKPHIQRLLDQGILVPCQSPWNTPLLPVKKPGTNDYRPVQDLREVNKRVEDIHPTVPNPYNLLSGLPPSHQWYTVLDLKDAFFCLRLHPTSQSLFAFEWRDPEMGISGQLTWTRLPQGFKNSPTLFNEALHRDLADFRIQHPDLILLQYVDDLLLAATSELDCQQGTRALLQTLGDLGYRASAKKAQICQKQVKYLGYLLKEGQRWLTEARKETVMGQPTPKTPRQLREFLGKAGFCRLFIPGFAEMAAPLYPLTKPGTLFEWGPDQQKAYQEIKQALLTAPALGLPDLTKPFELFVDEKQGYAKGVLTQKLGPWRRPVAYLSKKLDPVAAGWPPCLRMVAAIAVLTKDAGKLTMGQPLVILAPHAVEALVKQPPDRWLSNARMTHYQALLLDTDRVQFGPIVALNPATLLPLPEEGLQHDCLDILAEAHGTRPDLTDQPLPDADHTWYTDGSSFLQEGQRKAGAAVTTETEVVWAKALPAGTSAQRAELIALTQALKMAEGKKLNVYTDSRYAFATAHIHGEIYRRRGWLTSEGKEIKNKDEILALLKALFLPKRLSIIHCPGHQKGNRAEARGNRMADQAAREVATRETPETSTLLAGKRTADGSEFEKRTADGSEFESPKKKAKVE

SEQ ID NO: 7330 - protein, 2096 aa, synthetic construct
MPAAKRVKLDGGDKKYSIGLDIGTNSVGWAVITDEYKVPSKKFKVLGNTDRHSIKKNLIGALLFDSGETAEATRLKRTARRRYTRRKNRICYLQEIFSNEMAKVDDSFFHRLEESFLVEEDKKHERHPIFGNIVDEVAYHEKYPTIYHLRKKLVDSTDKADLRLIYLALAHMIKFRGHFLIEGDLNPDNSDVDKLFIQLVQTYNQLFEENPINASGVDAKAILSARLSKSRRLENLIAQLPGEKKNGLFGNLIALSLGLTPNFKSNFDLAEDAKLQLSKDTYDDDLDNLLAQIGDQYADLFLAAKNLSDAILLSDILRVNTEITKAPLSASMIKRYDEHHQDLTLLKALVRQQLPEKYKEIFFDQSKNGYAGYIDGGASQEEFYKFIKPILEKMDGTEELLVKLNREDLLRKQRTFDNGSIPHQIHLGELHAILRRQEDFYPFLKDNREKIEKILTFRIPYYVGPLARGNSRFAWMTRKSEETITPWNFEEVVDKGASAQSFIERMTNFDKNLPNEKVLPKHSLLYEYFTVYNELTKVKYVTEGMRKPAFLSGEQKKAIVDLLFKTNRKVTVKQLKEDYFKKIECFDSVEISGVEDRFNASLGTYHDLLKIIKDKDFLDNEENEDILEDIVLTLTLFEDREMIEERLKTYAHLFDDKVMKQLKRRRYTGWGRLSRKLINGIRDKQSGKTILDFLKSDGFANRNFMQLIHDDSLTFKEDIQKAQVSGQGDSLHEHIANLAGSPAIKKGILQTVKVVDELVKVMGRHKPENIVIEMARENQTTQKGQKNSRERMKRIEEGIKELGSQILKEHPVENTQLQNEKLYLYYLQNGRDMYVDQELDINRLSDYDVDHIVPQSFLKDDSIDNKVLTRSDKARGKSDNVPSEEVVKKMKNYWRQLLNAKLITQRKFDNLTKAERGGLSELDKAGFIKRQLVETRQITKHVAQILDSRMNTKYDENDKLIREVKVITLKSKLVSDFRKDFQFYKVREINNYHHAHDAYLNAVVGTALIKKYPKLESEFVYGDYKVYDVRKMIAKSEQEIGKATAKYFFYSNIMNFFKTEITLANGEIRKRPLIETNGETGEIVWDKGRDFATVRKVLSMPQVNIVKKTEVQTGGFSKESILPKRNSDKLIARKKDWDPKKYGGFDSPTVAYSVLVVAKVEKGKSKKLKSVKELLGITIMERSSFEKNPIDFLEAKGYKEVKKDLIIKLPKYSLFELENGRKRMLASAGELQKGNELALPSKYVNFLYLASHYEKLKGSPEDNEQKQLFVEQHKHYLDEIIEQISEFSKRVILADANLDKVLSAYNKHRDKPIREQAENIIHLFTLTNLGAPAAFKYFDTTIDRKRYTSTKEVLDATLIHQSITGLYETRIDLSQLGGDGGEAAAKGGGGSSGGTLNIEDEHRLHETSKEPDVSLGSTWLSDFPQAWAETGGMGLAVRQAPLIIPLKATSTPVSIKQYPMSQEARLGIKPHIQRLLDQGILVPCQSPWNTPLLPVKKPGTNDYRPVQDLREVNKRVEDIHPTVPNPYNLLSGLPPSHQWYTVLDLKDAFFCLRLHPTSQPLFAFEWRDPEMGISGQLTWTRLPQGFKNSPTLFDEALHRDLADFRIQHPDLILLQYVDDLLLAATSELDCQQGTRALLQTLGNLGYRASAKKAQICQKQVKYLGYLLKEGQRWLTEARKETVMGQPTPKTPRQLREFLGTAGFCRLWIPGFAEMAAPLYPLTKTGTLFNWGPDQQKAYQEIKQALLTAPALGLPDLTKPFELFVDEKQGYAKGVLTQKLGPWRRPVAYLSKKLDPVAAGWPPCLRMVAAIAVLTKDAGKLTMGQPLVILAPHAVEALVKQPPDRWLSNARMTHYQALLLDTDRVQFGPVVALNPATLLPLPEEGLQHNCLDILAEAHGTRPDLTDQPLPDADHTWYTDGSSLLQEGQRKAGAAVTTETEVIWAKALPAGTSAQRAELIALTQALKMAEGKKLNVYTDSRYAFATAHIHGEIYRRRGLLTSEGKEIKNKDEILALLKALFLPKRLSIIHCPGHQKGHSAEARGNRMADQAARKAAITETPDTSTLLAGKRTADGSEFEKRTADGSEFESPKKKAKVE

SEQ ID NO: 7331 - protein, 2096 aa, synthetic construct
MPAAKRVKLDGGDKKYSIGLDIGTNSVGWAVITDEYKVPSKKFKVLGNTDRHSIKKNLIGALLFDSGETAEATRLKRTARRRYTRRKNRICYLQEIFSNEMAKVDDSFFHRLEESFLVEEDKKHERHPIFGNIVDEVAYHEKYPTIYHLRKKLVDSTDKADLRLIYLALAHMIKFRGHFLIEGDLNPDNSDVDKLFIQLVQTYNQLFEENPINASGVDAKAILSARLSKSRRLENLIAQLPGEKKNGLFGNLIALSLGLTPNFKSNFDLAEDAKLQLSKDTYDDDLDNLLAQIGDQYADLFLAAKNLSDAILLSDILRVNTEITKAPLSASMIKRYDEHHQDLTLLKALVRQQLPEKYKEIFFDQSKNGYAGYIDGGASQEEFYKFIKPILEKMDGTEELLVKLNREDLLRKQRTFDNGSIPHQIHLGELHAILRRQEDFYPFLKDNREKIEKILTFRIPYYVGPLARGNSRFAWMTRKSEETITPWNFEEVVDKGASAQSFIERMTNFDKNLPNEKVLPKHSLLYEYFTVYNELTKVKYVTEGMRKPAFLSGEQKKAIVDLLFKTNRKVTVKQLKEDYFKKIECFDSVEISGVEDRFNASLGTYHDLLKIIKDKDFLDNEENEDILEDIVLTLTLFEDREMIEERLKTYAHLFDDKVMKQLKRRRYTGWGRLSRKLINGIRDKQSGKTILDFLKSDGFANRNFMQLIHDDSLTFKEDIQKAQVSGQGDSLHEHIANLAGSPAIKKGILQTVKVVDELVKVMGRHKPENIVIEMARENQTTQKGQKNSRERMKRIEEGIKELGSQILKEHPVENTQLQNEKLYLYYLQNGRDMYVDQELDINRLSDYDVDHIVPQSFLKDDSIDNKVLTRSDKARGKSDNVPSEEVVKKMKNYWRQLLNAKLITQRKFDNLTKAERGGLSELDKAGFIKRQLVETRQITKHVAQILDSRMNTKYDENDKLIREVKVITLKSKLVSDFRKDFQFYKVREINNYHHAHDAYLNAVVGTALIKKYPKLESEFVYGDYKVYDVRKMIAKSEQEIGKATAKYFFYSNIMNFFKTEITLANGEIRKRPLIETNGETGEIVWDKGRDFATVRKVLSMPQVNIVKKTEVQTGGFSKESILPKRNSDKLIARKKDWDPKKYGGFDSPTVAYSVLVVAKVEKGKSKKLKSVKELLGITIMERSSFEKNPIDFLEAKGYKEVKKDLIIKLPKYSLFELENGRKRMLASAGELQKGNELALPSKYVNFLYLASHYEKLKGSPEDNEQKQLFVEQHKHYLDEIIEQISEFSKRVILADANLDKVLSAYNKHRDKPIREQAENIIHLFTLTNLGAPAAFKYFDTTIDRKRYTSTKEVLDATLIHQSITGLYETRIDLSQLGGDGGEAAAKGGGGSSGGTLNIEDEYRLHEISTEPDVSPGSTWLSDFPQAWAETGGMGLAVRQAPLIIPLKATSTPVSIKQYPMSQEAKLGIKPHIQRLLDQGILVPCQSPWNTPLLPVKKPGTNDYRPVQGLREVNKRVEDIHPTVPNPYNLLSGLPTSHRWYTVLDLKDAFFCLRLHPTSQPLFASEWRDPGMGISGQLTWTRLPQGFKNSPTLFNEALHRGLADFRIQHPDLILLQYVDDLLLAATSELDCQQGTRALLKTLGNLGYRASAKKAQICQKQVKYLGYLLREGQRWLTEARKETVMGQPTPKTPRQLREFLGTAGFCRLWIPRFAEMAAPLYPLTKPGTLFNWGPDQQKAYHEIKQALLTAPALGLPDLTKPFELFVDEKQGYAKGVLTQKLGPWRRPVAYLSKKLDPVAAGWPPCLRMVAAIAVLTKDAGKLTMGQPLVILAPHAVEALVKQPPDRWLSNARMTHYQAMLLDTDRVQFGPVVALNPATLLPLPEEGAPHDCLEILAETHGTEPDLTDQPIPDADHTWYTDGSSFLQEGQRKAGAAVTTETEVIWARALPAGTSAQRAELIALTQALKMAEGKRLNVYTDSRYAFATAHIHGEIYKRRGWLTSEGREIKNKSEILALLKALFLPKRLSIIHCLGHQKGDSAEARGNRLADQAAREAAIKTPPDTSTLLAGKRTADGSEFEKRTADGSEFESPKKKAKVE

SEQ ID NO: 7332 - protein, 2087 aa, synthetic construct
MPAAKRVKLDGGDKKYSIGLDIGTNSVGWAVITDEYKVPSKKFKVLGNTDRHSIKKNLIGALLFDSGETAEATRLKRTARRRYTRRKNRICYLQEIFSNEMAKVDDSFFHRLEESFLVEEDKKHERHPIFGNIVDEVAYHEKYPTIYHLRKKLVDSTDKADLRLIYLALAHMIKFRGHFLIEGDLNPDNSDVDKLFIQLVQTYNQLFEENPINASGVDAKAILSARLSKSRRLENLIAQLPGEKKNGLFGNLIALSLGLTPNFKSNFDLAEDAKLQLSKDTYDDDLDNLLAQIGDQYADLFLAAKNLSDAILLSDILRVNTEITKAPLSASMIKRYDEHHQDLTLLKALVRQQLPEKYKEIFFDQSKNGYAGYIDGGASQEEFYKFIKPILEKMDGTEELLVKLNREDLLRKQRTFDNGSIPHQIHLGELHAILRRQEDFYPFLKDNREKIEKILTFRIPYYVGPLARGNSRFAWMTRKSEETITPWNFEEVVDKGASAQSFIERMTNFDKNLPNEKVLPKHSLLYEYFTVYNELTKVKYVTEGMRKPAFLSGEQKKAIVDLLFKTNRKVTVKQLKEDYFKKIECFDSVEISGVEDRFNASLGTYHDLLKIIKDKDFLDNEENEDILEDIVLTLTLFEDREMIEERLKTYAHLFDDKVMKQLKRRRYTGWGRLSRKLINGIRDKQSGKTILDFLKSDGFANRNFMQLIHDDSLTFKEDIQKAQVSGQGDSLHEHIANLAGSPAIKKGILQTVKVVDELVKVMGRHKPENIVIEMARENQTTQKGQKNSRERMKRIEEGIKELGSQILKEHPVENTQLQNEKLYLYYLQNGRDMYVDQELDINRLSDYDVDHIVPQSFLKDDSIDNKVLTRSDKARGKSDNVPSEEVVKKMKNYWRQLLNAKLITQRKFDNLTKAERGGLSELDKAGFIKRQLVETRQITKHVAQILDSRMNTKYDENDKLIREVKVITLKSKLVSDFRKDFQFYKVREINNYHHAHDAYLNAVVGTALIKKYPKLESEFVYGDYKVYDVRKMIAKSEQEIGKATAKYFFYSNIMNFFKTEITLANGEIRKRPLIETNGETGEIVWDKGRDFATVRKVLSMPQVNIVKKTEVQTGGFSKESILPKRNSDKLIARKKDWDPKKYGGFDSPTVAYSVLVVAKVEKGKSKKLKSVKELLGITIMERSSFEKNPIDFLEAKGYKEVKKDLIIKLPKYSLFELENGRKRMLASAGELQKGNELALPSKYVNFLYLASHYEKLKGSPEDNEQKQLFVEQHKHYLDEIIEQISEFSKRVILADANLDKVLSAYNKHRDKPIREQAENIIHLFTLTNLGAPAAFKYFDTTIDRKRYTSTKEVLDATLIHQSITGLYETRIDLSQLGGDGGEAAAKGGGGSSGGIPWLMKKPLQLTTLVPLQEYEERLLKQTMLTGSYKEKLQSLFLKYDALWQHWENQVGHRRIKPHHIATGTVNPRPQKQYPINPKAKASIQTVINDLLKQGVLIQQNSIMNTPVYPVPKPDGKWRMVLDYREVNKTIPLIAAQNQHSAGILSSIFRGKYKTTLDLSNGFWAHSITPESYWLTAFTWLGQQYCWTRLPQGFLNSPALFNADVVDLLKEVPNVQVYVDDIYISHDDPREHLEQLEKVFSLLLNAGYVVSLKKSEIAQHEVEFLGFNITKEGRGLTETFKQKLLNITPPRDLKQLQSILGLLNFARNFIPNFSELVKPLYNIIATAPGKYITWTTDNSQQLQNIISMLNSAENLEERNPEVRLIMKVNTSPSAGYIRFYNEFAKRPIMYLNYVYTKAEVKFTNTEKLLTTIHKGLIKALDLGMGQEILVYSPIVSMTKIQKTPLPERKALPIRWITWMSYLEDPRIQFHYDKTLPELQQVPTVTDDIIAKIKHPSEFSMVFYTDGSAIKHPNVNKSHNAGMGIAQVQFKPEFTVINTWSIPLGDHTAQLAEVAAVEFACKKALKIDGPVLIVTDSFYVAESVNKELPYWQSNGFFNNKKKPLKHVSKWKSIADCIQLKPDIIIIHEKGHQPTASTFHTEGNNLADKLATQGSYVVNAGKRTADGSEFEKRTADGSEFESPKKKAKVE

SEQ ID NO: 7333 - protein, 2176 aa, synthetic construct
MPAAKRVKLDGGDKKYSIGLDIGTNSVGWAVITDEYKVPSKKFKVLGNTDRHSIKKNLIGALLFDSGETAEATRLKRTARRRYTRRKNRICYLQEIFSNEMAKVDDSFFHRLEESFLVEEDKKHERHPIFGNIVDEVAYHEKYPTIYHLRKKLVDSTDKADLRLIYLALAHMIKFRGHFLIEGDLNPDNSDVDKLFIQLVQTYNQLFEENPINASGVDAKAILSARLSKSRRLENLIAQLPGEKKNGLFGNLIALSLGLTPNFKSNFDLAEDAKLQLSKDTYDDDLDNLLAQIGDQYADLFLAAKNLSDAILLSDILRVNTEITKAPLSASMIKRYDEHHQDLTLLKALVRQQLPEKYKEIFFDQSKNGYAGYIDGGASQEEFYKFIKPILEKMDGTEELLVKLNREDLLRKQRTFDNGSIPHQIHLGELHAILRRQEDFYPFLKDNREKIEKILTFRIPYYVGPLARGNSRFAWMTRKSEETITPWNFEEVVDKGASAQSFIERMTNFDKNLPNEKVLPKHSLLYEYFTVYNELTKVKYVTEGMRKPAFLSGEQKKAIVDLLFKTNRKVTVKQLKEDYFKKIECFDSVEISGVEDRFNASLGTYHDLLKIIKDKDFLDNEENEDILEDIVLTLTLFEDREMIEERLKTYAHLFDDKVMKQLKRRRYTGWGRLSRKLINGIRDKQSGKTILDFLKSDGFANRNFMQLIHDDSLTFKEDIQKAQVSGQGDSLHEHIANLAGSPAIKKGILQTVKVVDELVKVMGRHKPENIVIEMARENQTTQKGQKNSRERMKRIEEGIKELGSQILKEHPVENTQLQNEKLYLYYLQNGRDMYVDQELDINRLSDYDVDHIVPQSFLKDDSIDNKVLTRSDKARGKSDNVPSEEVVKKMKNYWRQLLNAKLITQRKFDNLTKAERGGLSELDKAGFIKRQLVETRQITKHVAQILDSRMNTKYDENDKLIREVKVITLKSKLVSDFRKDFQFYKVREINNYHHAHDAYLNAVVGTALIKKYPKLESEFVYGDYKVYDVRKMIAKSEQEIGKATAKYFFYSNIMNFFKTEITLANGEIRKRPLIETNGETGEIVWDKGRDFATVRKVLSMPQVNIVKKTEVQTGGFSKESILPKRNSDKLIARKKDWDPKKYGGFDSPTVAYSVLVVAKVEKGKSKKLKSVKELLGITIMERSSFEKNPIDFLEAKGYKEVKKDLIIKLPKYSLFELENGRKRMLASAGELQKGNELALPSKYVNFLYLASHYEKLKGSPEDNEQKQLFVEQHKHYLDEIIEQISEFSKRVILADANLDKVLSAYNKHRDKPIREQAENIIHLFTLTNLGAPAAFKYFDTTIDRKRYTSTKEVLDATLIHQSITGLYETRIDLSQLGGDGGEAAAKGGGGSSGGMDPLQLLQPLEAEIKGTKLKAHWNSGATITCVPQAFLEEEVPIKNIWIKTIHGEKEQPVYYLTFKIQGRKVEAEVISSPYDYILVSPSDIPWLMKKPLQLTTLVPLQEYEERLLKQTMLTGSYKEKLQSLFLKYDALWQHWENQVGHRRIKPHHIATGTVNPRPQKQYPINPKAKASIQTVINDLLKQGVLIQQNSIMNTPVYPVPKPDGKWRMVLDYREVNKTIPLIAAQNQHSAGILSSIFRGKYKTTLDLSNGFWAHSITPESYWLTAFTWLGQQYCWTRLPQGFLNSPALFNADVVDLLKEVPNVQVYVDDIYISHDDPREHLEQLEKVFSLLLNAGYVVSLKKSEIAQHEVEFLGFNITKEGRGLTETFKQKLLNITPPRDLKQLQSILGKLNFARNFIPNFSELVKPLYNIIATAPGKYITWTTDNSQQLQNIISMLNSAENLEERNPEVRLIMKVNTSPSAGYIRFYNEFAKRPIMYLNYVYTKAEVKFTNTEKLLTTIHKGLIKALDLGMGQEILVYSPIVSMTKIQKTPLPERKALPIRWITWMSYLEDPRIQFHYDKTLPELQQVPTVTDDIIAKIKHPSEFSMVFYTDGSAIKHPNVNKSHNAGMGIAQVQFKPEFTVINTWSIPLGDHTAQLAEVAAVEFACKKALKIDGPVLIVTDSFYVAESVNKELPYWQSNGFFNNKKKPLKHVSKWKSIADCIQLKPDIIIIHEKGHQPTASTFHTEGNNLADKLATQGSYVVNAGKRTADGSEFEKRTADGSEFESPKKKAKVE

SEQ ID NO: 7334 - protein, 2087 aa, synthetic construct
MPAAKRVKLDGGDKKYSIGLDIGTNSVGWAVITDEYKVPSKKFKVLGNTDRHSIKKNLIGALLFDSGETAEATRLKRTARRRYTRRKNRICYLQEIFSNEMAKVDDSFFHRLEESFLVEEDKKHERHPIFGNIVDEVAYHEKYPTIYHLRKKLVDSTDKADLRLIYLALAHMIKFRGHFLIEGDLNPDNSDVDKLFIQLVQTYNQLFEENPINASGVDAKAILSARLSKSRRLENLIAQLPGEKKNGLFGNLIALSLGLTPNFKSNFDLAEDAKLQLSKDTYDDDLDNLLAQIGDQYADLFLAAKNLSDAILLSDILRVNTEITKAPLSASMIKRYDEHHQDLTLLKALVRQQLPEKYKEIFFDQSKNGYAGYIDGGASQEEFYKFIKPILEKMDGTEELLVKLNREDLLRKQRTFDNGSIPHQIHLGELHAILRRQEDFYPFLKDNREKIEKILTFRIPYYVGPLARGNSRFAWMTRKSEETITPWNFEEVVDKGASAQSFIERMTNFDKNLPNEKVLPKHSLLYEYFTVYNELTKVKYVTEGMRKPAFLSGEQKKAIVDLLFKTNRKVTVKQLKEDYFKKIECFDSVEISGVEDRFNASLGTYHDLLKIIKDKDFLDNEENEDILEDIVLTLTLFEDREMIEERLKTYAHLFDDKVMKQLKRRRYTGWGRLSRKLINGIRDKQSGKTILDFLKSDGFANRNFMQLIHDDSLTFKEDIQKAQVSGQGDSLHEHIANLAGSPAIKKGILQTVKVVDELVKVMGRHKPENIVIEMARENQTTQKGQKNSRERMKRIEEGIKELGSQILKEHPVENTQLQNEKLYLYYLQNGRDMYVDQELDINRLSDYDVDHIVPQSFLKDDSIDNKVLTRSDKARGKSDNVPSEEVVKKMKNYWRQLLNAKLITQRKFDNLTKAERGGLSELDKAGFIKRQLVETRQITKHVAQILDSRMNTKYDENDKLIREVKVITLKSKLVSDFRKDFQFYKVREINNYHHAHDAYLNAVVGTALIKKYPKLESEFVYGDYKVYDVRKMIAKSEQEIGKATAKYFFYSNIMNFFKTEITLANGEIRKRPLIETNGETGEIVWDKGRDFATVRKVLSMPQVNIVKKTEVQTGGFSKESILPKRNSDKLIARKKDWDPKKYGGFDSPTVAYSVLVVAKVEKGKSKKLKSVKELLGITIMERSSFEKNPIDFLEAKGYKEVKKDLIIKLPKYSLFELENGRKRMLASAGELQKGNELALPSKYVNFLYLASHYEKLKGSPEDNEQKQLFVEQHKHYLDEIIEQISEFSKRVILADANLDKVLSAYNKHRDKPIREQAENIIHLFTLTNLGAPAAFKYFDTTIDRKRYTSTKEVLDATLIHQSITGLYETRIDLSQLGGDGGEAAAKGGGGSSGGVPWLTQQPLQLTILVPLQEYQDRILNKTALPEEQKQQLKALFTKYDNLWQHWENQVGHRKIRPHNIATGDYPPRPQKQYPINPKAKPSIQIVIDDLLKQGVLTPQNSTMNTPVYPVPKPDGRWRMVLDYREVNKTIPLTAAQNQHSAGILATIVRQKYKTTLDLANGFWAHPITPDSYWLTAFTWQGKQYCWTRLPQGFLNSPALFNADAVDLLKEVPNVQVYVDDIYLSHDNPHEHIQQLEKVFQILLQAGYVVSLKKSEIGQRTVEFLGFNITKEGRGLTDTFKTKLLNVTPPKDLKQLQSILGKLNFARNFIPNFAELVQTLYNLIASSPGKYIEWTEDNTKQLNKVIEALNTASNLEERLPDQRLVIKVNTSPSAGYVRYYNESGKKPIMYLNYVFSKAELKFSMLEKLLTTMHKALIKAMDLAMGQEILVYSPIVSMTKIQKTPLPERKALPIRWITWMTYLEDPRIQFHYDKTLPELKHIPDVYTSSIPPLKHPSQYEGVFCTDGSAIKSPDPTKSNNAGMGIVHAIYNPEYKILNQWSIPLGHHTAQMAEIAAVEFACKKALKVPGPVLVITDSFYVAESANKELPYWKSNGFVNNKKEPLKHISKWKSIAECLSIKPDITIQHEKGHQPINTSIHTEGNALADKLATQGSYVVNAGKRTADGSEFEKRTADGSEFESPKKKAKVE

SEQ ID NO: 7335 - protein, 2094 aa, synthetic construct; identical to SEQ ID NO: 4531

SEQ ID NO: 7336 - protein, 2098 aa, synthetic construct
MPAAKRVKLDGGDKKYSIGLDIGTNSVGWAVITDEYKVPSKKFKVLGNTDRHSIKKNLIGALLFDSGETAEATRLKRTARRRYTRRKNRICYLQEIFSNEMAKVDDSFFHRLEESFLVEEDKKHERHPIFGNIVDEVAYHEKYPTIYHLRKKLVDSTDKADLRLIYLALAHMIKFRGHFLIEGDLNPDNSDVDKLFIQLVQTYNQLFEENPINASGVDAKAILSARLSKSRRLENLIAQLPGEKKNGLFGNLIALSLGLTPNFKSNFDLAEDAKLQLSKDTYDDDLDNLLAQIGDQYADLFLAAKNLSDAILLSDILRVNTEITKAPLSASMIKRYDEHHQDLTLLKALVRQQLPEKYKEIFFDQSKNGYAGYIDGGASQEEFYKFIKPILEKMDGTEELLVKLNREDLLRKQRTFDNGSIPHQIHLGELHAILRRQEDFYPFLKDNREKIEKILTFRIPYYVGPLARGNSRFAWMTRKSEETITPWNFEEVVDKGASAQSFIERMTNFDKNLPNEKVLPKHSLLYEYFTVYNELTKVKYVTEGMRKPAFLSGEQKKAIVDLLFKTNRKVTVKQLKEDYFKKIECFDSVEISGVEDRFNASLGTYHDLLKIIKDKDFLDNEENEDILEDIVLTLTLFEDREMIEERLKTYAHLFDDKVMKQLKRRRYTGWGRLSRKLINGIRDKQSGKTILDFLKSDGFANRNFMQLIHDDSLTFKEDIQKAQVSGQGDSLHEHIANLAGSPAIKKGILQTVKVVDELVKVMGRHKPENIVIEMARENQTTQKGQKNSRERMKRIEEGIKELGSQILKEHPVENTQLQNEKLYLYYLQNGRDMYVDQELDINRLSDYDVDHIVPQSFLKDDSIDNKVLTRSDKARGKSDNVPSEEVVKKMKNYWRQLLNAKLITQRKFDNLTKAERGGLSELDKAGFIKRQLVETRQITKHVAQILDSRMNTKYDENDKLIREVKVITLKSKLVSDFRKDFQFYKVREINNYHHAHDAYLNAVVGTALIKKYPKLESEFVYGDYKVYDVRKMIAKSEQEIGKATAKYFFYSNIMNFFKTEITLANGEIRKRPLIETNGETGEIVWDKGRDFATVRKVLSMPQVNIVKKTEVQTGGFSKESILPKRNSDKLIARKKDWDPKKYGGFDSPTVAYSVLVVAKVEKGKSKKLKSVKELLGITIMERSSFEKNPIDFLEAKGYKEVKKDLIIKLPKYSLFELENGRKRMLASAGELQKGNELALPSKYVNFLYLASHYEKLKGSPEDNEQKQLFVEQHKHYLDEIIEQISEFSKRVILADANLDKVLSAYNKHRDKPIREQAENIIHLFTLTNLGAPAAFKYFDTTIDRKRYTSTKEVLDATLIHQSITGLYETRIDLSQLGGDGGEAAAKGSSGGGGGTAPLEEEYRLFLEAPIQNVTLLEQWKREIPKVWAEINPPGLASTQAPIHVQLLSTALPVRVRQYPITLEAKRSLRETIRKFRAAGILRPVHSPWNTPLLPVRKSGTSEYRMVQDLREVNKRVETIHPTVPNPYTLLSLLPPDRIWYSVLDLKDAFFCIPLAPESQLIFAFEWADAEEGESGQLTWTRLPQGFKNSPTLFNEALNRDLQGFRLDHPSVSLLQYVDDLLIAADTQAACLSATRDLLMTLAELGYRVSGKKAQLCQEEVTYLGFKIHKGSRSLSNSRTQAILQIPVPKTKRQVREFLGTIGYCRLWIPGFAELAQPLYAATRPGNDPLVWGEKEEEAFQSLKLALTQPPALALPSLDKPFQLFVEETSGAAKGVLTQALGPWKRPVAYLSKRLDPVAAGWPRCLRAIAAAALLTREASKLTFGQDIEITSSHNLESLLRSPPDKWLTNARITQYQVLLLDPPRVRFKQTAALNPATLLPETDDTLPIHHCLDTLDSLTSTRPDLTDQPLAQAEATLFTDGSSYIRDGKRYAGAAVVTLDSVIWAEPLPIGTSAQKAELIALTKALEWSKDKSVNIYTDSRYAFATLHVHGMIYRERGWLTAGGKAIKNAPEILALLTAVWLPKRVAVMHCKGHQKDDAPTSTGNRRADEVAREVAIRPLSTQATISAGKRTADGSEFEKRTADGSEFESPKKKAKVE

SEQ ID NO: 7337 - protein, 2173 aa, synthetic construct
MPAAKRVKLDGGDKKYSIGLDIGTNSVGWAVITDEYKVPSKKFKVLGNTDRHSIKKNLIGALLFDSGETAEATRLKRTARRRYTRRKNRICYLQEIFSNEMAKVDDSFFHRLEESFLVEEDKKHERHPIFGNIVDEVAYHEKYPTIYHLRKKLVDSTDKADLRLIYLALAHMIKFRGHFLIEGDLNPDNSDVDKLFIQLVQTYNQLFEENPINASGVDAKAILSARLSKSRRLENLIAQLPGEKKNGLFGNLIALSLGLTPNFKSNFDLAEDAKLQLSKDTYDDDLDNLLAQIGDQYADLFLAAKNLSDAILLSDILRVNTEITKAPLSASMIKRYDEHHQDLTLLKALVRQQLPEKYKEIFFDQSKNGYAGYIDGGASQEEFYKFIKPILEKMDGTEELLVKLNREDLLRKQRTFDNGSIPHQIHLGELHAILRRQEDFYPFLKDNREKIEKILTFRIPYYVGPLARGNSRFAWMTRKSEETITPWNFEEVVDKGASAQSFIERMTNFDKNLPNEKVLPKHSLLYEYFTVYNELTKVKYVTEGMRKPAFLSGEQKKAIVDLLFKTNRKVTVKQLKEDYFKKIECFDSVEISGVEDRFNASLGTYHDLLKIIKDKDFLDNEENEDILEDIVLTLTLFEDREMIEERLKTYAHLFDDKVMKQLKRRRYTGWGRLSRKLINGIRDKQSGKTILDFLKSDGFANRNFMQLIHDDSLTFKEDIQKAQVSGQGDSLHEHIANLAGSPAIKKGILQTVKVVDELVKVMGRHKPENIVIEMARENQTTQKGQKNSRERMKRIEEGIKELGSQILKEHPVENTQLQNEKLYLYYLQNGRDMYVDQELDINRLSDYDVDHIVPQSFLKDDSIDNKVLTRSDKARGKSDNVPSEEVVKKMKNYWRQLLNAKLITQRKFDNLTKAERGGLSELDKAGFIKRQLVETRQITKHVAQILDSRMNTKYDENDKLIREVKVITLKSKLVSDFRKDFQFYKVREINNYHHAHDAYLNAVVGTALIKKYPKLESEFVYGDYKVYDVRKMIAKSEQEIGKATAKYFFYSNIMNFFKTEITLANGEIRKRPLIETNGETGEIVWDKGRDFATVRKVLSMPQVNIVKKTEVQTGGFSKESILPKRNSDKLIARKKDWDPKKYGGFDSPTVAYSVLVVAKVEKGKSKKLKSVKELLGITIMERSSFEKNPIDFLEAKGYKEVKKDLIIKLPKYSLFELENGRKRMLASAGELQKGNELALPSKYVNFLYLASHYEKLKGSPEDNEQKQLFVEQHKHYLDEIIEQISEFSKRVILADANLDKVLSAYNKHRDKPIREQAENIIHLFTLTNLGAPAAFKYFDTTIDRKRYTSTKEVLDATLIHQSITGLYETRIDLSQLGGDGGEAAAKGSSGGGGGMDLLKPLTVERKGVKIKGYWNSQADITCVPKDLLQGEEPVRQQNVTTIHGTQEGDVYYVNLKIDGRRINTEVIGTTLDYAIITPGDVPWILKKPLELTIKLDLEEQQGTLLNNSILSKKGKEELKQLFEKYSALWQSWENQVGHRRIRPHKIATGTVKPTPQKQYHINPKAKPDIQIVINDLLKQGVLIQKESTMNTPVYPVPKPNGRWRMVLDYRAVNKVTPLIAVQNQHSYGILGSLFKGRYKTTIDLSNGFWAHPIVPEDYWITAFTWQGKQYCWTVLPQGFLNSPGLFTGDVVDLLQGIPNVEVYVDDVYISHDSEKEHLEYLDILFNRLKEAGYIISLKKSNIANSIVDFLGFQITNEGRGLTDTFKEKLENITAPTTLKQLQSILGLLNFARNFIPDFTELIAPLYALIPKSTKNYVPWQIEHSTTLETLITKLNGAEYLQGRKGDKTLIMKVNASYTTGYIRYYNEGEKKPISYVSIVFSKTELKFTELEKLLTTVHKGLLKALDLSMGQNIHVYSPIVSMQNIQKTPQTAKKALASRWLSWLSYLEDPRIRFFYDPQMPALKDLPAVDTGKDNKKHPSNFQHIFYTDGSAITSPTKEGHLNAGMGIVYFINKDGNLQKQQEWSISLGNHTAQFAEIAAFEFALKKCLPLGGNILVVTDSNYVAKAYNEELDVWASNGFVNNRKKPLKHISKWKSVADLKRLRPDVVVTHEPGHQKLDSSPHAYGNNLADQLATQASFKVHAGKRTADGSEFEKRTADGSEFESPKKKAKVE

SEQ ID NO: 7338 - protein, 2127 aa, synthetic construct
MPAAKRVKLDGGDKKYSIGLDIGTNSVGWAVITDEYKVPSKKFKVLGNTDRHSIKKNLIGALLFDSGETAEATRLKRTARRRYTRRKNRICYLQEIFSNEMAKVDDSFFHRLEESFLVEEDKKHERHPIFGNIVDEVAYHEKYPTIYHLRKKLVDSTDKADLRLIYLALAHMIKFRGHFLIEGDLNPDNSDVDKLFIQLVQTYNQLFEENPINASGVDAKAILSARLSKSRRLENLIAQLPGEKKNGLFGNLIALSLGLTPNFKSNFDLAEDAKLQLSKDTYDDDLDNLLAQIGDQYADLFLAAKNLSDAILLSDILRVNTEITKAPLSASMIKRYDEHHQDLTLLKALVRQQLPEKYKEIFFDQSKNGYAGYIDGGASQEEFYKFIKPILEKMDGTEELLVKLNREDLLRKQRTFDNGSIPHQIHLGELHAILRRQEDFYPFLKDNREKIEKILTFRIPYYVGPLARGNSRFAWMTRKSEETITPWNFEEVVDKGASAQSFIERMTNFDKNLPNEKVLPKHSLLYEYFTVYNELTKVKYVTEGMRKPAFLSGEQKKAIVDLLFKTNRKVTVKQLKEDYFKKIECFDSVEISGVEDRFNASLGTYHDLLKIIKDKDFLDNEENEDILEDIVLTLTLFEDREMIEERLKTYAHLFDDKVMKQLKRRRYTGWGRLSRKLINGIRDKQSGKTILDFLKSDGFANRNFMQLIHDDSLTFKEDIQKAQVSGQGDSLHEHIANLAGSPAIKKGILQTVKVVDELVKVMGRHKPENIVIEMARENQTTQKGQKNSRERMKRIEEGIKELGSQILKEHPVENTQLQNEKLYLYYLQNGRDMYVDQELDINRLSDYDVDHIVPQSFLKDDSIDNKVLTRSDKARGKSDNVPSEEVVKKMKNYWRQLLNAKLITQRKFDNLTKAERGGLSELDKAGFIKRQLVETRQITKHVAQILDSRMNTKYDENDKLIREVKVITLKSKLVSDFRKDFQFYKVREINNYHHAHDAYLNAVVGTALIKKYPKLESEFVYGDYKVYDVRKMIAKSEQEIGKATAKYFFYSNIMNFFKTEITLANGEIRKRPLIETNGETGEIVWDKGRDFATVRKVLSMPQVNIVKKTEVQTGGFSKESILPKRNSDKLIARKKDWDPKKYGGFDSPTVAYSVLVVAKVEKGKSKKLKSVKELLGITIMERSSFEKNPIDFLEAKGYKEVKKDLIIKLPKYSLFELENGRKRMLASAGELQKGNELALPSKYVNFLYLASHYEKLKGSPEDNEQKQLFVEQHKHYLDEIIEQISEFSKRVILADANLDKVLSAYNKHRDKPIREQAENIIHLFTLTNLGAPAAFKYFDTTIDRKRYTSTKEVLDATLIHQSITGLYETRIDLSQLGGDGGEAAAKGSSGGGGGLLGRDLLTKLKAQIQFSTEGPQVTWEDRPAMCLVLNLEEEYRLHEKPVPPSIDPSWLQLFPMVWAEKAGMGLANQVPPVVVELKSDASPVAVRQYPMSKEAREGIRPHIQRFLDLGILVPCQSPWNTPLLPVKKPGTNDYRPVQDLREVNKRVQDIHPTVPNPYNLLSSLPPSHTWYSVLDLKDAFFCLKLHPNSQPLFAFEWRDPEKGNTGQLTWTRLPQGFKNSPTLFNEALHRDLASFRALNPQVVMLQYVDDLLVAAPTYRDCKEGTRRLLQELSKLGYRVSAKKAQLCREEVTYLGYLLKGGKRWLTPARKATVMKIPTPTTPRQVREFLGTAGFCRLWIPGFASLAAPLYPLTRPKVPFTWTEAHQEAFGRIKEALLSAPALALPDLTKPFALYVDEKEGVARGVLTQTLGPWRRPVAYLSKKLDPVASGWPTCLKAIAAVALLLKDADKLTLGQNVLVIAPHNLESIVRQPPDRWMTNARMTHYQSLLLNERVSFAPPAILNPATLLPVESDDTPIHICSEILAEETGTRPDLRDQPLPGVPAWYTDGSSFIMDGRRQAGAAIVDNKRTVWASNLPEGTSAQKAELIALTQALRLAEGKSINIYTDSRYAFATAHVHGAIYKQRGWLTSAGKDIKNKEEILALLEAIHLPKRVAIIHCPGHQRGTDPVATGNRKADEAAKQAAQSTRILTETTKNAGKRTADGSEFEKRTADGSEFESPKKKAKVE

SEQ ID NO: 7339 - protein, 2218 aa, synthetic construct
MPAAKRVKLDGGDKKYSIGLDIGTNSVGWAVITDEYKVPSKKFKVLGNTDRHSIKKNLIGALLFDSGETAEATRLKRTARRRYTRRKNRICYLQEIFSNEMAKVDDSFFHRLEESFLVEEDKKHERHPIFGNIVDEVAYHEKYPTIYHLRKKLVDSTDKADLRLIYLALAHMIKFRGHFLIEGDLNPDNSDVDKLFIQLVQTYNQLFEENPINASGVDAKAILSARLSKSRRLENLIAQLPGEKKNGLFGNLIALSLGLTPNFKSNFDLAEDAKLQLSKDTYDDDLDNLLAQIGDQYADLFLAAKNLSDAILLSDILRVNTEITKAPLSASMIKRYDEHHQDLTLLKALVRQQLPEKYKEIFFDQSKNGYAGYIDGGASQEEFYKFIKPILEKMDGTEELLVKLNREDLLRKQRTFDNGSIPHQIHLGELHAILRRQEDFYPFLKDNREKIEKILTFRIPYYVGPLARGNSRFAWMTRKSEETITPWNFEEVVDKGASAQSFIERMTNFDKNLPNEKVLPKHSLLYEYFTVYNELTKVKYVTEGMRKPAFLSGEQKKAIVDLLFKTNRKVTVKQLKEDYFKKIECFDSVEISGVEDRFNASLGTYHDLLKIIKDKDFLDNEENEDILEDIVLTLTLFEDREMIEERLKTYAHLFDDKVMKQLKRRRYTGWGRLSRKLINGIRDKQSGKTILDFLKSDGFANRNFMQLIHDDSLTFKEDIQKAQVSGQGDSLHEHIANLAGSPAIKKGILQTVKVVDELVKVMGRHKPENIVIEMARENQTTQKGQKNSRERMKRIEEGIKELGSQILKEHPVENTQLQNEKLYLYYLQNGRDMYVDQELDINRLSDYDVDHIVPQSFLKDDSIDNKVLTRSDKARGKSDNVPSEEVVKKMKNYWRQLLNAKLITQRKFDNLTKAERGGLSELDKAGFIKRQLVETRQITKHVAQILDSRMNTKYDENDKLIREVKVITLKSKLVSDFRKDFQFYKVREINNYHHAHDAYLNAVVGTALIKKYPKLESEFVYGDYKVYDVRKMIAKSEQEIGKATAKYFFYSNIMNFFKTEITLANGEIRKRPLIETNGETGEIVWDKGRDFATVRKVLSMPQVNIVKKTEVQTGGFSKESILPKRNSDKLIARKKDWDPKKYGGFDSPTVAYSVLVVAKVEKGKSKKLKSVKELLGITIMERSSFEKNPIDFLEAKGYKEVKKDLIIKLPKYSLFELENGRKRMLASAGELQKGNELALPSKYVNFLYLASHYEKLKGSPEDNEQKQLFVEQHKHYLDEIIEQISEFSKRVILADANLDKVLSAYNKHRDKPIREQAENIIHLFTLTNLGAPAAFKYFDTTIDRKRYTSTKEVLDATLIHQSITGLYETRIDLSQLGGDGGEAAAKGSSGGGGGTLGDQGSRGSDPLPEPRVTLTVEGIPTEFLVNTGAEHSVLTKPMGKMGSKRTVVAGATGSKVYPWTTKRLLKIGQKQVTHSFLVIPECPAPLLGRDLLTKLKAQIQFSTEGPQVTWEDRPAMCLVLNLEEEYRLHEKPVPPSIDPSWLQLFPMVWAEKAGMGLANQVPPVVVELKSDASPVAVRQYPMSKEAREGIRPHIQRFLDLGILVPCQSPWNTPLLPVKKPGTNDYRPVQDLREVNKRVQDIHPTVPNPYNLLSSLPPSHTWYSVLDLKDAFFCLKLHPNSQPLFAFEWRDPEKGNTGQLTWTRLPQGFKNSPTLFNEALHRDLASFRALNPQVVMLQYVDDLLVAAPTYRDCKEGTRRLLQELSKLGYRVSAKKAQLCREEVTYLGYLLKGGKRWLTPARKATVMKIPTPTTPRQVREFLGKAGFCRLFIPGFASLAAPLYPLTRPKVPFTWTEAHQEAFGRIKEALLSAPALALPDLTKPFALYVDEKEGVARGVLTQTLGPWRRPVAYLSKKLDPVASGWPTCLKAIAAVALLLKDADKLTLGQNVLVIAPHNLESIVRQPPDRWMTNARMTHYQSLLLNERVSFAPPAILNPATLLPVESDDTPIHICSEILAEETGTRPDLRDQPLPGVPAWYTDGSSFIMDGRRQAGAAIVDNKRTVWASNLPEGTSAQKAELIALTQALRLAEGKSINIYTDSRYAFATAHVHGAIYKQRGWLTSAGKDIKNKEEILALLEAIHLPKRVAIIHCPGHQRGTDPVATGNRKADEAAKQAAQSTRILTETTKNAGKRTADGSEFEKRTADGSEFESPKKKAKVE

SEQ ID NO: 7340 - protein, 2096 aa, synthetic construct
MPAAKRVKLDGGDKKYSIGLDIGTNSVGWAVITDEYKVPSKKFKVLGNTDRHSIKKNLIGALLFDSGETAEATRLKRTARRRYTRRKNRICYLQEIFSNEMAKVDDSFFHRLEESFLVEEDKKHERHPIFGNIVDEVAYHEKYPTIYHLRKKLVDSTDKADLRLIYLALAHMIKFRGHFLIEGDLNPDNSDVDKLFIQLVQTYNQLFEENPINASGVDAKAILSARLSKSRRLENLIAQLPGEKKNGLFGNLIALSLGLTPNFKSNFDLAEDAKLQLSKDTYDDDLDNLLAQIGDQYADLFLAAKNLSDAILLSDILRVNTEITKAPLSASMIKRYDEHHQDLTLLKALVRQQLPEKYKEIFFDQSKNGYAGYIDGGASQEEFYKFIKPILEKMDGTEELLVKLNREDLLRKQRTFDNGSIPHQIHLGELHAILRRQEDFYPFLKDNREKIEKILTFRIPYYVGPLARGNSRFAWMTRKSEETITPWNFEEVVDKGASAQSFIERMTNFDKNLPNEKVLPKHSLLYEYFTVYNELTKVKYVTEGMRKPAFLSGEQKKAIVDLLFKTNRKVTVKQLKEDYFKKIECFDSVEISGVEDRFNASLGTYHDLLKIIKDKDFLDNEENEDILEDIVLTLTLFEDREMIEERLKTYAHLFDDKVMKQLKRRRYTGWGRLSRKLINGIRDKQSGKTILDFLKSDGFANRNFMQLIHDDSLTFKEDIQKAQVSGQGDSLHEHIANLAGSPAIKKGILQTVKVVDELVKVMGRHKPENIVIEMARENQTTQKGQKNSRERMKRIEEGIKELGSQILKEHPVENTQLQNEKLYLYYLQNGRDMYVDQELDINRLSDYDVDHIVPQSFLKDDSIDNKVLTRSDKARGKSDNVPSEEVVKKMKNYWRQLLNAKLITQRKFDNLTKAERGGLSELDKAGFIKRQLVETRQITKHVAQILDSRMNTKYDENDKLIREVKVITLKSKLVSDFRKDFQFYKVREINNYHHAHDAYLNAVVGTALIKKYPKLESEFVYGDYKVYDVRKMIAKSEQEIGKATAKYFFYSNIMNFFKTEITLANGEIRKRPLIETNGETGEIVWDKGRDFATVRKVLSMPQVNIVKKTEVQTGGFSKESILPKRNSDKLIARKKDWDPKKYGGFDSPTVAYSVLVVAKVEKGKSKKLKSVKELLGITIMERSSFEKNPIDFLEAKGYKEVKKDLIIKLPKYSLFELENGRKRMLASAGELQKGNELALPSKYVNFLYLASHYEKLKGSPEDNEQKQLFVEQHKHYLDEIIEQISEFSKRVILADANLDKVLSAYNKHRDKPIREQAENIIHLFTLTNLGAPAAFKYFDTTIDRKRYTSTKEVLDATLIHQSITGLYETRIDLSQLGGDGGEAAAKGSSGGGGGTLGIEDEYRLHETSTEPDVSLGSTWLSDFPQAWAETGGMGLAVRQAPLIIPLKATSTPVSIQQYPMSHEARLGIKPHIQRLLDQGILVPCQSPWNTPLLPVKKPGTNDYRPVQDLREVNKRVEDIHPTVPNPYNLLSGLPPSHQWYTVLDLKDAFFCLRLHPTSQPLFAFEWRDPGMGISGQLTWTRLPQGFKNSPTLFNEALHRDLADFRIQHPDLILLQYVDDILLAATSELDCQQGTRALLQTLGDLGYRASAKKAQICQKQVKYLGYLLREGQRWLTEARKETVMGQPVPKTPRQLREFLGTAGFCRLWIPGFAEMAAPLYPLTKPGTLFSWGPDQQKAYQEIKQALLTAPALGLPDLTKPFELFVDEKQGYAKGVLTQKLGPWRRPVAYLSKKLDPVAAGWPPCLRMVAAIAVLTKDAGKLTMGQPLVILAPHAVEALVKQPPDRWLSNARMTHYQAMLLDTDRVQFGPVVALNPATLLPLPEEGAPHDCLEILAETHGTRPDLTDQPIPDADHTWYTDGSSFLQEGQRKAGAAVTTETEVIWAGALPAGTSAQRAELIALTQALKMAEGKRLNVYTDSRYAFATAHIHGEIYRRRGWLTSEGREIKNKSEILALLKALFLPKRLSIIHCLGHQKGDSAEARGNRLADQAAREAAIKTPPDTSTLLAGKRTADGSEFEKRTADGSEFESPKKKAKVE

SEQ ID NO: 7341 - protein, 2096 aa, synthetic construct
MPAAKRVKLDGGDKKYSIGLDIGTNSVGWAVITDEYKVPSKKFKVLGNTDRHSIKKNLIGALLFDSGETAEATRLKRTARRRYTRRKNRICYLQEIFSNEMAKVDDSFFHRLEESFLVEEDKKHERHPIFGNIVDEVAYHEKYPTIYHLRKKLVDSTDKADLRLIYLALAHMIKFRGHFLIEGDLNPDNSDVDKLFIQLVQTYNQLFEENPINASGVDAKAILSARLSKSRRLENLIAQLPGEKKNGLFGNLIALSLGLTPNFKSNFDLAEDAKLQLSKDTYDDDLDNLLAQIGDQYADLFLAAKNLSDAILLSDILRVNTEITKAPLSASMIKRYDEHHQDLTLLKALVRQQLPEKYKEIFFDQSKNGYAGYIDGGASQEEFYKFIKPILEKMDGTEELLVKLNREDLLRKQRTFDNGSIPHQIHLGELHAILRRQEDFYPFLKDNREKIEKILTFRIPYYVGPLARGNSRFAWMTRKSEETITPWNFEEVVDKGASAQSFIERMTNFDKNLPNEKVLPKHSLLYEYFTVYNELTKVKYVTEGMRKPAFLSGEQKKAIVDLLFKTNRKVTVKQLKEDYFKKIECFDSVEISGVEDRFNASLGTYHDLLKIIKDKDFLDNEENEDILEDIVLTLTLFEDREMIEERLKTYAHLFDDKVMKQLKRRRYTGWGRLSRKLINGIRDKQSGKTILDFLKSDGFANRNFMQLIHDDSLTFKEDIQKAQVSGQGDSLHEHIANLAGSPAIKKGILQTVKVVDELVKVMGRHKPENIVIEMARENQTTQKGQKNSRERMKRIEEGIKELGSQILKEHPVENTQLQNEKLYLYYLQNGRDMYVDQELDINRLSDYDVDHIVPQSFLKDDSIDNKVLTRSDKARGKSDNVPSEEVVKKMKNYWRQLLNAKLITQRKFDNLTKAERGGLSELDKAGFIKRQLVETRQITKHVAQILDSRMNTKYDENDKLIREVKVITLKSKLVSDFRKDFQFYKVREINNYHHAHDAYLNAVVGTALIKKYPKLESEFVYGDYKVYDVRKMIAKSEQEIGKATAKYFFYSNIMNFFKTEITLANGEIRKRPLIETNGETGEIVWDKGRDFATVRKVLSMPQVNIVKKTEVQTGGFSKESILPKRNSDKLIARKKDWDPKKYGGFDSPTVAYSVLVVAKVEKGKSKKLKSVKELLGITIMERSSFEKNPIDFLEAKGYKEVKKDLIIKLPKYSLFELENGRKRMLASAGELQKGNELALPSKYVNFLYLASHYEKLKGSPEDNEQKQLFVEQHKHYLDEIIEQISEFSKRVILADANLDKVLSAYNKHRDKPIREQAENIIHLFTLTNLGAPAAFKYFDTTIDRKRYTSTKEVLDATLIHQSITGLYETRIDLSQLGGDGGEAAAKGSSGGGGGTLGIEDEYRLHETSTEPDVSLGSTWLSDFPQAWAETGGMGLAVRQAPLIIPLKATSTPVSIQQYPMSHEARLGIKPHIQRLLDQGILVPCQSPWNTPLLPVKKPGTNDYRPVQDLREVNKRVEDIHPTVPNPYNLLSGLPPSHQWYTVLDLKDAFFCLRLHPTSQPLFAFEWRDPGMGISGQLTWTRLPQGFKNSPTLFDEALHRDLADFRIQHPDLILLQYVDDILLAATSELDCQQGTRALLQTLGDLGYRASAKKAQICQKQVKYLGYLLREGQRWLTEARKETVMGQPVPKTPRQLREFLGTAGFCRLWIPGFAEMAAPLYPLTKTGTLFSWGPDQQKAYQEIKQALLTAPALGLPDLTKPFELFVDEKQGYAKGVLTQKLGPWRRPVAYLSKKLDPVAAGWPPCLRMVAAIAVLTKDAGKLTMGQPLVILAPHAVEALVKQPPDRWLSNARMTHYQAMLLDTDRVQFGPVVALNPATLLPLPEEGAPHDCLEILAETHGTRPDLTDQPIPDADHTWYTDGSSFLQEGQRKAGAAVTTETEVIWAGALPAGTSAQRAELIALTQALKMAEGKRLNVYTDSRYAFATAHIHGEIYRRRGLLTSEGREIKNKSEILALLKALFLPKRLSIIHCLGHQKGDSAEARGNRLADQAAREAAIKTPPDTSTLLAGKRTADGSEFEKRTADGSEFESPKKKAKVE

SEQ ID NO: 7342 - protein, 2096 aa, synthetic construct
MPAAKRVKLDGGDKKYSIGLDIGTNSVGWAVITDEYKVPSKKFKVLGNTDRHSIKKNLIGALLFDSGETAEATRLKRTARRRYTRRKNRICYLQEIFSNEMAKVDDSFFHRLEESFLVEEDKKHERHPIFGNIVDEVAYHEKYPTIYHLRKKLVDSTDKADLRLIYLALAHMIKFRGHFLIEGDLNPDNSDVDKLFIQLVQTYNQLFEENPINASGVDAKAILSARLSKSRRLENLIAQLPGEKKNGLFGNLIALSLGLTPNFKSNFDLAEDAKLQLSKDTYDDDLDNLLAQIGDQYADLFLAAKNLSDAILLSDILRVNTEITKAPLSASMIKRYDEHHQDLTLLKALVRQQLPEKYKEIFFDQSKNGYAGYIDGGASQEEFYKFIKPILEKMDGTEELLVKLNREDLLRKQRTFDNGSIPHQIHLGELHAILRRQEDFYPFLKDNREKIEKILTFRIPYYVGPLARGNSRFAWMTRKSEETITPWNFEEVVDKGASAQSFIERMTNFDKNLPNEKVLPKHSLLYEYFTVYNELTKVKYVTEGMRKPAFLSGEQKKAIVDLLFKTNRKVTVKQLKEDYFKKIECFDSVEISGVEDRFNASLGTYHDLLKIIKDKDFLDNEENEDILEDIVLTLTLFEDREMIEERLKTYAHLFDDKVMKQLKRRRYTGWGRLSRKLINGIRDKQSGKTILDFLKSDGFANRNFMQLIHDDSLTFKEDIQKAQVSGQGDSLHEHIANLAGSPAIKKGILQTVKVVDELVKVMGRHKPENIVIEMARENQTTQKGQKNSRERMKRIEEGIKELGSQILKEHPVENTQLQNEKLYLYYLQNGRDMYVDQELDINRLSDYDVDHIVPQSFLKDDSIDNKVLTRSDKARGKSDNVPSEEVVKKMKNYWRQLLNAKLITQRKFDNLTKAERGGLSELDKAGFIKRQLVETRQITKHVAQILDSRMNTKYDENDKLIREVKVITLKSKLVSDFRKDFQFYKVREINNYHHAHDAYLNAVVGTALIKKYPKLESEFVYGDYKVYDVRKMIAKSEQEIGKATAKYFFYSNIMNFFKTEITLANGEIRKRPLIETNGETGEIVWDKGRDFATVRKVLSMPQVNIVKKTEVQTGGFSKESILPKRNSDKLIARKKDWDPKKYGGFDSPTVAYSVLVVAKVEKGKSKKLKSVKELLGITIMERSSFEKNPIDFLEAKGYKEVKKDLIIKLPKYSLFELENGRKRMLASAGELQKGNELALPSKYVNFLYLASHYEKLKGSPEDNEQKQLFVEQHKHYLDEIIEQISEFSKRVILADANLDKVLSAYNKHRDKPIREQAENIIHLFTLTNLGAPAAFKYFDTTIDRKRYTSTKEVLDATLIHQSITGLYETRIDLSQLGGDGGEAAAKGSSGGGGGTLNIEDEYRLHETSKEPDVSLGSTWLSDFPQAWAETGGMGLAVRQAPLIIPLKATSTPVSIKQYPMSQEARLGIKPHIQRLLDQGILVPCQSPWNTPLLPVKKPGTNDYRPVQDLREVNKRVEDIHPTVPNPYNLLSGLPPSHQWYTVLDLKDAFFCLRLHPTSQPLFAFEWRDPEMGISGQLTWTRLPQGFKNSPTLFNEALHRDLAGFRIQHPDLILLQYVDDLLLAATSELDCQQGTRALLQTLGDLGYRASAKKAQICQKQVKYLGYLLKEGQRWLTEARKETVMGQPIPKTPRQLREFLGTAGFCRLWIPGFAEMAAPLYPLTKPGTLFNWGPDQQKAFQEIKQALLTAPALGLPDLTKPFELFVDEKQGYAKGVLTQKLGPWRRPVAYLSKKLDPVAAGWPPCLRMVAAIAVLTKDAGKLTMGQPLVILAPHAVEALVKQPPDRWLSNARMTHYQALLLDTDRVQFGPVVALNPATLLPLPEEGLQHDCLDILAEAHGTRSDLMDQPLPDADHTWYTDGSSFLQEGQRKAGAAVTTETEVIWARALPAGTSAQRAELIALTQALKMAEGKKLNVYTDSRYAFATAHIHGEIYRRRGWLTSEGKEIKNKDEILALLKALFLPKRLSIIHCPGHQKGNSAEARGNRMADQAAREVATRETPETSTLLAGKRTADGSEFEKRTADGSEFESPKKKAKVE

SEQ ID NO: 7343 - protein, 2096 aa, synthetic construct
MPAAKRVKLDGGDKKYSIGLDIGTNSVGWAVITDEYKVPSKKFKVLGNTDRHSIKKNLIGALLFDSGETAEATRLKRTARRRYTRRKNRICYLQEIFSNEMAKVDDSFFHRLEESFLVEEDKKHERHPIFGNIVDEVAYHEKYPTIYHLRKKLVDSTDKADLRLIYLALAHMIKFRGHFLIEGDLNPDNSDVDKLFIQLVQTYNQLFEENPINASGVDAKAILSARLSKSRRLENLIAQLPGEKKNGLFGNLIALSLGLTPNFKSNFDLAEDAKLQLSKDTYDDDLDNLLAQIGDQYADLFLAAKNLSDAILLSDILRVNTEITKAPLSASMIKRYDEHHQDLTLLKALVRQQLPEKYKEIFFDQSKNGYAGYIDGGASQEEFYKFIKPILEKMDGTEELLVKLNREDLLRKQRTFDNGSIPHQIHLGELHAILRRQEDFYPFLKDNREKIEKILTFRIPYYVGPLARGNSRFAWMTRKSEETITPWNFEEVVDKGASAQSFIERMTNFDKNLPNEKVLPKHSLLYEYFTVYNELTKVKYVTEGMRKPAFLSGEQKKAIVDLLFKTNRKVTVKQLKEDYFKKIECFDSVEISGVEDRFNASLGTYHDLLKIIKDKDFLDNEENEDILEDIVLTLTLFEDREMIEERLKTYAHLFDDKVMKQLKRRRYTGWGRLSRKLINGIRDKQSGKTILDFLKSDGFANRNFMQLIHDDSLTFKEDIQKAQVSGQGDSLHEHIANLAGSPAIKKGILQTVKVVDELVKVMGRHKPENIVIEMARENQTTQKGQKNSRERMKRIEEGIKELGSQILKEHPVENTQLQNEKLYLYYLQNGRDMYVDQELDINRLSDYDVDHIVPQSFLKDDSIDNKVLTRSDKARGKSDNVPSEEVVKKMKNYWRQLLNAKLITQRKFDNLTKAERGGLSELDKAGFIKRQLVETRQITKHVAQILDSRMNTKYDENDKLIREVKVITLKSKLVSDFRKDFQFYKVREINNYHHAHDAYLNAVVGTALIKKYPKLESEFVYGDYKVYDVRKMIAKSEQEIGKATAKYFFYSNIMNFFKTEITLANGEIRKRPLIETNGETGEIVWDKGRDFATVRKVLSMPQVNIVKKTEVQTGGFSKESILPKRNSDKLIARKKDWDPKKYGGFDSPTVAYSVLVVAKVEKGKSKKLKSVKELLGITIMERSSFEKNPIDFLEAKGYKEVKKDLIIKLPKYSLFELENGRKRMLASAGELQKGNELALPSKYVNFLYLASHYEKLKGSPEDNEQKQLFVEQHKHYLDEIIEQISEFSKRVILADANLDKVLSAYNKHRDKPIREQAENIIHLFTLTNLGAPAAFKYFDTTIDRKRYTSTKEVLDATLIHQSITGLYETRIDLSQLGGDGGEAAAKGSSGGGGGTLNIEDEHRLHETSKEPDVSLGSTWLSDFPQAWAETGGMGLAVRQAPLIIPLKATSTPVSIKQYPMSQEARLGIKPHIQRLLDQGILVPCQSPWNTPLLPVKKPGTNDYRPVQDLREVNKRVEDIHPTVPNPYNLLSGLPPSHQWYTVLDLKDAFFCLRLHPTSQPLFAFEWRDPEMGISGQLTWTRLPQGFKNSPTLFNEALHRDLADFRIQHPDLILLQYVDDLLLAATSELDCQQGTRALLQTLGNLGYRASAKKAQICQKQVKYLGYLLKEGQRWLTEARKETVMGQPTPKTPRQLREFLGTAGFCRLWIPGFAEMAAPLYPLTKPGTLFNWGPDQQKAYQEIKQALLTAPALGLPDLTKPFELFVDEKQGYAKGVLTQKLGPWRRPVAYLSKKLDPVAAGWPPCLRMVAAIAVLTKDAGKLTMGQPLVILAPHAVEALVKQPPDRWLSNARMTHYQALLLDTDRVQFGPVVALNPATLLPLPEEGLQHNCLDILAEAHGTRPDLTDQPLPDADHTWYTDGSSLLQEGQRKAGAAVTTETEVIWAKALPAGTSAQRAELIALTQALKMAEGKKLNVYTDSRYAFATAHIHGEIYRRRGWLTSEGKEIKNKDEILALLKALFLPKRLSIIHCPGHQKGHSAEARGNRMADQAARKAAITETPDTSTLLAGKRTADGSEFEKRTADGSEFESPKKKAKVE

SEQ ID NO: 7344 - protein, 2116 aa, synthetic construct
MPAAKRVKLDGGDKKYSIGLDIGTNSVGWAVITDEYKVPSKKFKVLGNTDRHSIKKNLIGALLFDSGETAEATRLKRTARRRYTRRKNRICYLQEIFSNEMAKVDDSFFHRLEESFLVEEDKKHERHPIFGNIVDEVAYHEKYPTIYHLRKKLVDSTDKADLRLIYLALAHMIKFRGHFLIEGDLNPDNSDVDKLFIQLVQTYNQLFEENPINASGVDAKAILSARLSKSRRLENLIAQLPGEKKNGLFGNLIALSLGLTPNFKSNFDLAEDAKLQLSKDTYDDDLDNLLAQIGDQYADLFLAAKNLSDAILLSDILRVNTEITKAPLSASMIKRYDEHHQDLTLLKALVRQQLPEKYKEIFFDQSKNGYAGYIDGGASQEEFYKFIKPILEKMDGTEELLVKLNREDLLRKQRTFDNGSIPHQIHLGELHAILRRQEDFYPFLKDNREKIEKILTFRIPYYVGPLARGNSRFAWMTRKSEETITPWNFEEVVDKGASAQSFIERMTNFDKNLPNEKVLPKHSLLYEYFTVYNELTKVKYVTEGMRKPAFLSGEQKKAIVDLLFKTNRKVTVKQLKEDYFKKIECFDSVEISGVEDRFNASLGTYHDLLKIIKDKDFLDNEENEDILEDIVLTLTLFEDREMIEERLKTYAHLFDDKVMKQLKRRRYTGWGRLSRKLINGIRDKQSGKTILDFLKSDGFANRNFMQLIHDDSLTFKEDIQKAQVSGQGDSLHEHIANLAGSPAIKKGILQTVKVVDELVKVMGRHKPENIVIEMARENQTTQKGQKNSRERMKRIEEGIKELGSQILKEHPVENTQLQNEKLYLYYLQNGRDMYVDQELDINRLSDYDVDHIVPQSFLKDDSIDNKVLTRSDKARGKSDNVPSEEVVKKMKNYWRQLLNAKLITQRKFDNLTKAERGGLSELDKAGFIKRQLVETRQITKHVAQILDSRMNTKYDENDKLIREVKVITLKSKLVSDFRKDFQFYKVREINNYHHAHDAYLNAVVGTALIKKYPKLESEFVYGDYKVYDVRKMIAKSEQEIGKATAKYFFYSNIMNFFKTEITLANGEIRKRPLIETNGETGEIVWDKGRDFATVRKVLSMPQVNIVKKTEVQTGGFSKESILPKRNSDKLIARKKDWDPKKYGGFDSPTVAYSVLVVAKVEKGKSKKLKSVKELLGITIMERSSFEKNPIDFLEAKGYKEVKKDLIIKLPKYSLFELENGRKRMLASAGELQKGNELALPSKYVNFLYLASHYEKLKGSPEDNEQKQLFVEQHKHYLDEIIEQISEFSKRVILADANLDKVLSAYNKHRDKPIREQAENIIHLFTLTNLGAPAAFKYFDTTIDRKRYTSTKEVLDATLIHQSITGLYETRIDLSQLGGDGGEAAAKGSSGGGGGVQEISDSRPMLHIYLNGRRFLGLLDTGADKTCIAGRDWPANWPIHQTESSLQGLGMACGVARSSQPLRWQHEDKSGIIHPFVIPTLPFTLWGRDIMKDIKVRLMTDSPDDSQDLMIGAIESNLFADQISWKSDQPVWLNQWPLKQEKLQALQQLVTEQLQLGHLEESNSPWNTPVFVIKKKSGKWRLLQDLRAVNATMHDMGALQPGLPSPVAVPKGWEIIIIDLQDCFFNIKLHPEDCKRFAFSVPSPNFKRPYQRFQWKVLPQGMKNSPTLCQKFVDKAILTVRDKYQDSYIVHYMDDILLAHPSRSIVDEILTSMIQALNKHGLVVSTEKIQKYDNLKYLGTHIQGDSVSYQKLQIRTDKLRTLNDFQKLLGNINWIRPFLKLTTGELKPLFEILNGDSNPISTRKLTPEACKALQLMNERLSTARVKRLDLSQPWSLCILKTEYTPTACLWQDGVVEWIHLPHISPKVITPYDIFCTQLIIKGRHRSKELFSKDPDYIVVPYTKVQFDLLLQEKEDWPISLLGFLGEVHFHLPKDPLLTFTLQTAIIFPHMTSTTPLEKGIVIFTDGSANGRSVTYIQGREPIIKENTQNTAQQAEIVAVITAFEEVSQPFNLYTDSKYVTGLFPEIETATLSPRTKIYTELKHLQRLIHKRQEKFYIGHIRGHTGLPGPLAQGNAYADSLTRILTAAGKRTADGSEFEKRTADGSEFESPKKKAKVE

SEQ ID NO: 7345 - protein, 2088 aa, synthetic construct
MPAAKRVKLDGGDKKYSIGLDIGTNSVGWAVITDEYKVPSKKFKVLGNTDRHSIKKNLIGALLFDSGETAEATRLKRTARRRYTRRKNRICYLQEIFSNEMAKVDDSFFHRLEESFLVEEDKKHERHPIFGNIVDEVAYHEKYPTIYHLRKKLVDSTDKADLRLIYLALAHMIKFRGHFLIEGDLNPDNSDVDKLFIQLVQTYNQLFEENPINASGVDAKAILSARLSKSRRLENLIAQLPGEKKNGLFGNLIALSLGLTPNFKSNFDLAEDAKLQLSKDTYDDDLDNLLAQIGDQYADLFLAAKNLSDAILLSDILRVNTEITKAPLSASMIKRYDEHHQDLTLLKALVRQQLPEKYKEIFFDQSKNGYAGYIDGGASQEEFYKFIKPILEKMDGTEELLVKLNREDLLRKQRTFDNGSIPHQIHLGELHAILRRQEDFYPFLKDNREKIEKILTFRIPYYVGPLARGNSRFAWMTRKSEETITPWNFEEVVDKGASAQSFIERMTNFDKNLPNEKVLPKHSLLYEYFTVYNELTKVKYVTEGMRKPAFLSGEQKKAIVDLLFKTNRKVTVKQLKEDYFKKIECFDSVEISGVEDRFNASLGTYHDLLKIIKDKDFLDNEENEDILEDIVLTLTLFEDREMIEERLKTYAHLFDDKVMKQLKRRRYTGWGRLSRKLINGIRDKQSGKTILDFLKSDGFANRNFMQLIHDDSLTFKEDIQKAQVSGQGDSLHEHIANLAGSPAIKKGILQTVKVVDELVKVMGRHKPENIVIEMARENQTTQKGQKNSRERMKRIEEGIKELGSQILKEHPVENTQLQNEKLYLYYLQNGRDMYVDQELDINRLSDYDVDHIVPQSFLKDDSIDNKVLTRSDKARGKSDNVPSEEVVKKMKNYWRQLLNAKLITQRKFDNLTKAERGGLSELDKAGFIKRQLVETRQITKHVAQILDSRMNTKYDENDKLIREVKVITLKSKLVSDFRKDFQFYKVREINNYHHAHDAYLNAVVGTALIKKYPKLESEFVYGDYKVYDVRKMIAKSEQEIGKATAKYFFYSNIMNFFKTEITLANGEIRKRPLIETNGETGEIVWDKGRDFATVRKVLSMPQVNIVKKTEVQTGGFSKESILPKRNSDKLIARKKDWDPKKYGGFDSPTVAYSVLVVAKVEKGKSKKLKSVKELLGITIMERSSFEKNPIDFLEAKGYKEVKKDLIIKLPKYSLFELENGRKRMLASAGELQKGNELALPSKYVNFLYLASHYEKLKGSPEDNEQKQLFVEQHKHYLDEIIEQISEFSKRVILADANLDKVLSAYNKHRDKPIREQAENIIHLFTLTNLGAPAAFKYFDTTIDRKRYTSTKEVLDATLIHQSITGLYETRIDLSQLGGDGGEAAAKGSSGGGGGLDDEYRLYSPLVKPDQNIQFWLEQFPQAWAETAGMGLAKQVPPQVIQLKASATPVSVRQYPLSKEAQEGIRPHVQRLIQQGILVPVQSPWNTPLLPVRKPGTNDYRPVQDLREVNKRVQDIHPTVPNPYNLLCALPPQRSWYTVLDLKDAFFCLRLHPTSQPLFAFEWRDPGTGRTGQLTWTRLPQGFKNSPTIFNEALHRDLANFRIQHPQVTLLQYVDDLLLAGATKQDCLEGTKALLLELSDLGYRASAKKAQICRREVTYLGYSLRDGQRWLTEARKKTVVQIPAPTTAKQVREFLGKAGFCRLFIPGFATLAAPLYPLTKPKGEFSWAPEHQKAFDAIKKALLSAPALALPDVTKPFTLYVDERKGVARGVLTQTLGPWRRPVAYLSKKLDPVASGWPVCLKAIAAVAILVKDADKLTLGQNITVIAPHALENIVRQPPDRWMTNARMTHYQSLLLTERVTFAPPAALNPATLLPEETDEPVTHDCHQLLIEETGVRKDLTDIPLTGEVLTWFTDGSSYVVEGKRMAGAAVVDGTRTIWASSLPEGTSAQKAELMALTQALRLAEGKSINIYTDSRYAFATAHVHGAIYKQRGWLTSAGREIKNKEEILSLLEALHLPKRLAIIHCPGHQKAKDPISRGNQMADRVAKQAAQGVNLLPAGKRTADGSEFEKRTADGSEFESPKKKAKVE

SEQ ID NO: 7346 - protein, 2088 aa, synthetic construct; identical to SEQ ID NO: 7345

SEQ ID NO: 7347 - protein, 2087 aa, synthetic construct
MPAAKRVKLDGGDKKYSIGLDIGTNSVGWAVITDEYKVPSKKFKVLGNTDRHSIKKNLIGALLFDSGETAEATRLKRTARRRYTRRKNRICYLQEIFSNEMAKVDDSFFHRLEESFLVEEDKKHERHPIFGNIVDEVAYHEKYPTIYHLRKKLVDSTDKADLRLIYLALAHMIKFRGHFLIEGDLNPDNSDVDKLFIQLVQTYNQLFEENPINASGVDAKAILSARLSKSRRLENLIAQLPGEKKNGLFGNLIALSLGLTPNFKSNFDLAEDAKLQLSKDTYDDDLDNLLAQIGDQYADLFLAAKNLSDAILLSDILRVNTEITKAPLSASMIKRYDEHHQDLTLLKALVRQQLPEKYKEIFFDQSKNGYAGYIDGGASQEEFYKFIKPILEKMDGTEELLVKLNREDLLRKQRTFDNGSIPHQIHLGELHAILRRQEDFYPFLKDNREKIEKILTFRIPYYVGPLARGNSRFAWMTRKSEETITPWNFEEVVDKGASAQSFIERMTNFDKNLPNEKVLPKHSLLYEYFTVYNELTKVKYVTEGMRKPAFLSGEQKKAIVDLLFKTNRKVTVKQLKEDYFKKIECFDSVEISGVEDRFNASLGTYHDLLKIIKDKDFLDNEENEDILEDIVLTLTLFEDREMIEERLKTYAHLFDDKVMKQLKRRRYTGWGRLSRKLINGIRDKQSGKTILDFLKSDGFANRNFMQLIHDDSLTFKEDIQKAQVSGQGDSLHEHIANLAGSPAIKKGILQTVKVVDELVKVMGRHKPENIVIEMARENQTTQKGQKNSRERMKRIEEGIKELGSQILKEHPVENTQLQNEKLYLYYLQNGRDMYVDQELDINRLSDYDVDHIVPQSFLKDDSIDNKVLTRSDKARGKSDNVPSEEVVKKMKNYWRQLLNAKLITQRKFDNLTKAERGGLSELDKAGFIKRQLVETRQITKHVAQILDSRMNTKYDENDKLIREVKVITLKSKLVSDFRKDFQFYKVREINNYHHAHDAYLNAVVGTALIKKYPKLESEFVYGDYKVYDVRKMIAKSEQEIGKATAKYFFYSNIMNFFKTEITLANGEIRKRPLIETNGETGEIVWDKGRDFATVRKVLSMPQVNIVKKTEVQTGGFSKESILPKRNSDKLIARKKDWDPKKYGGFDSPTVAYSVLVVAKVEKGKSKKLKSVKELLGITIMERSSFEKNPIDFLEAKGYKEVKKDLIIKLPKYSLFELENGRKRMLASAGELQKGNELALPSKYVNFLYLASHYEKLKGSPEDNEQKQLFVEQHKHYLDEIIEQISEFSKRVILADANLDKVLSAYNKHRDKPIREQAENIIHLFTLTNLGAPAAFKYFDTTIDRKRYTSTKEVLDATLIHQSITGLYETRIDLSQLGGDGGEAAAKGSSGGGGGIPWLMKKPLQLTTLVPLQEYEERLLKQTMLTGSYKEKLQSLFLKYDALWQHWENQVGHRRIKPHHIATGTVNPRPQKQYPINPKAKASIQTVINDLLKQGVLIQQNSIMNTPVYPVPKPDGKWRMVLDYREVNKTIPLIAAQNQHSAGILSSIFRGKYKTTLDLSNGFWAHSITPESYWLTAFTWLGQQYCWTRLPQGFLNSPALFNADVVDLLKEVPNVQVYVDDIYISHDDPREHLEQLEKVFSLLLNAGYVVSLKKSEIAQHEVEFLGFNITKEGRGLTETFKQKLLNITPPRDLKQLQSILGKLNFARNFIPNFSELVKPLYNIIATAPGKYITWTTDNSQQLQNIISMLNSAENLEERNPEVRLIMKVNTSPSAGYIRFYNEFAKRPIMYLNYVYTKAEVKFTNTEKLLTTIHKGLIKALDLGMGQEILVYSPIVSMTKIQKTPLPERKALPIRWITWMSYLEDPRIQFHYDKTLPELQQVPTVTDDIIAKIKHPSEFSMVFYTDGSAIKHPNVNKSHNAGMGIAQVQFKPEFTVINTWSIPLGDHTAQLAEVAAVEFACKKALKIDGPVLIVTDSFYVAESVNKELPYWQSNGFFNNKKKPLKHVSKWKSIADCIQLKPDIIIIHEKGHQPTASTFHTEGNNLADKLATQGSYVVNAGKRTADGSEFEKRTADGSEFESPKKKAKVE

SEQ ID NO: 7348 - protein, 2094 aa, synthetic construct
MPAAKRVKLDGGDKKYSIGLDIGTNSVGWAVITDEYKVPSKKFKVLGNTDRHSIKKNLIGALLFDSGETAEATRLKRTARRRYTRRKNRICYLQEIFSNEMAKVDDSFFHRLEESFLVEEDKKHERHPIFGNIVDEVAYHEKYPTIYHLRKKLVDSTDKADLRLIYLALAHMIKFRGHFLIEGDLNPDNSDVDKLFIQLVQTYNQLFEENPINASGVDAKAILSARLSKSRRLENLIAQLPGEKKNGLFGNLIALSLGLTPNFKSNFDLAEDAKLQLSKDTYDDDLDNLLAQIGDQYADLFLAAKNLSDAILLSDILRVNTEITKAPLSASMIKRYDEHHQDLTLLKALVRQQLPEKYKEIFFDQSKNGYAGYIDGGASQEEFYKFIKPILEKMDGTEELLVKLNREDLLRKQRTFDNGSIPHQIHLGELHAILRRQEDFYPFLKDNREKIEKILTFRIPYYVGPLARGNSRFAWMTRKSEETITPWNFEEVVDKGASAQSFIERMTNFDKNLPNEKVLPKHSLLYEYFTVYNELTKVKYVTEGMRKPAFLSGEQKKAIVDLLFKTNRKVTVKQLKEDYFKKIECFDSVEISGVEDRFNASLGTYHDLLKIIKDKDFLDNEENEDILEDIVLTLTLFEDREMIEERLKTYAHLFDDKVMKQLKRRRYTGWGRLSRKLINGIRDKQSGKTILDFLKSDGFANRNFMQLIHDDSLTFKEDIQKAQVSGQGDSLHEHIANLAGSPAIKKGILQTVKVVDELVKVMGRHKPENIVIEMARENQTTQKGQKNSRERMKRIEEGIKELGSQILKEHPVENTQLQNEKLYLYYLQNGRDMYVDQELDINRLSDYDVDHIVPQSFLKDDSIDNKVLTRSDKARGKSDNVPSEEVVKKMKNYWRQLLNAKLITQRKFDNLTKAERGGLSELDKAGFIKRQLVETRQITKHVAQILDSRMNTKYDENDKLIREVKVITLKSKLVSDFRKDFQFYKVREINNYHHAHDAYLNAVVGTALIKKYPKLESEFVYGDYKVYDVRKMIAKSEQEIGKATAKYFFYSNIMNFFKTEITLANGEIRKRPLIETNGETGEIVWDKGRDFATVRKVLSMPQVNIVKKTEVQTGGFSKESILPKRNSDKLIARKKDWDPKKYGGFDSPTVAYSVLVVAKVEKGKSKKLKSVKELLGITIMERSSFEKNPIDFLEAKGYKEVKKDLIIKLPKYSLFELENGRKRMLASAGELQKGNELALPSKYVNFLYLASHYEKLKGSPEDNEQKQLFVEQHKHYLDEIIEQISEFSKRVILADANLDKVLSAYNKHRDKPIREQAENIIHLFTLTNLGAPAAFKYFDTTIDRKRYTSTKEVLDATLIHQSITGLYETRIDLSQLGGDGGEAAAKGSSGGGGGVLNLEEEYRLHEKPVPSSIDPSWLQLFPTVWAERAGMGLANQVPPVVVELRSGASPVAVRQYPMSKEAREGIRPHIQRFLDLGVLVPCQSPWNTPLLPVKKPGTNDYRPVQDLREINKRVQDIHPTVPNPYNLLSSLPPSHTWYSVLDLKDAFFCLKLHPNSQPLFAFEWRDPEKGNTGQLTWTRLPQGFKNSPTLFDEALHRDLAPFRALNPQVVLLQYVDDLLVAAPTYRDCKEGTQKLLQELSKLGYRVSAKKAQLCQKEVTYLGYLLKEGKRWLTPARKATVMKIPPPTTPRQVREFLGTAGFCRLWIPGFASLAAPLYPLTKESIPFIWTEEHQKAFDRIKEALLSAPALALPDLTKPFTLYVDERAGVARGVLTQTLGPWRRPVAYLSKKLDPVASGWPTCLKAVAAVALLLKDADKLTLGQNVTVIASHSLESIVRQPPDRWMTNARMTHYQSLLLNERVSFAPPAVLNPATLLPVESEATPVHRCSEILAEETGTRRDLKDQPLPGVPAWYTDGSSFIAEGKRRAGAAIVDGKRTVWASSLPEGTSAQKAELVALTQALRLAEGKDINIYTDSRYAFATAHIHGAIYKQRGLLTSAGKDIKNKEEILALLEAIHLPKRVAIIHCPGHQKGNDPVATGNRRADEAAKQAALSTRVLAETTKPAGKRTADGSEFEKRTADGSEFESPKKKAKVE

SEQ ID NO: 7349 - protein, 2094 aa, synthetic construct
MPAAKRVKLDGGDKKYSIGLDIGTNSVGWAVITDEYKVPSKKFKVLGNTDRHSIKKNLIGALLFDSGETAEATRLKRTARRRYTRRKNRICYLQEIFSNEMAKVDDSFFHRLEESFLVEEDKKHERHPIFGNIVDEVAYHEKYPTIYHLRKKLVDSTDKADLRLIYLALAHMIKFRGHFLIEGDLNPDNSDVDKLFIQLVQTYNQLFEENPINASGVDAKAILSARLSKSRRLENLIAQLPGEKKNGLFGNLIALSLGLTPNFKSNFDLAEDAKLQLSKDTYDDDLDNLLAQIGDQYADLFLAAKNLSDAILLSDILRVNTEITKAPLSASMIKRYDEHHQDLTLLKALVRQQLPEKYKEIFFDQSKNGYAGYIDGGASQEEFYKFIKPILEKMDGTEELLVKLNREDLLRKQRTFDNGSIPHQIHLGELHAILRRQEDFYPFLKDNREKIEKILTFRIPYYVGPLARGNSRFAWMTRKSEETITPWNFEEVVDKGASAQSFIERMTNFDKNLPNEKVLPKHSLLYEYFTVYNELTKVKYVTEGMRKPAFLSGEQKKAIVDLLFKTNRKVTVKQLKEDYFKKIECFDSVEISGVEDRFNASLGTYHDLLKIIKDKDFLDNEENEDILEDIVLTLTLFEDREMIEERLKTYAHLFDDKVMKQLKRRRYTGWGRLSRKLINGIRDKQSGKTILDFLKSDGFANRNFMQLIHDDSLTFKEDIQKAQVSGQGDSLHEHIANLAGSPAIKKGILQTVKVVDELVKVMGRHKPENIVIEMARENQTTQKGQKNSRERMKRIEEGIKELGSQILKEHPVENTQLQNEKLYLYYLQNGRDMYVDQELDINRLSDYDVDHIVPQSFLKDDSIDNKVLTRSDKARGKSDNVPSEEVVKKMKNYWRQLLNAKLITQRKFDNLTKAERGGLSELDKAGFIKRQLVETRQITKHVAQILDSRMNTKYDENDKLIREVKVITLKSKLVSDFRKDFQFYKVREINNYHHAHDAYLNAVVGTALIKKYPKLESEFVYGDYKVYDVRKMIAKSEQEIGKATAKYFFYSNIMNFFKTEITLANGEIRKRPLIETNGETGEIVWDKGRDFATVRKVLSMPQVNIVKKTEVQTGGFSKESILPKRNSDKLIARKKDWDPKKYGGFDSPTVAYSVLVVAKVEKGKSKKLKSVKELLGITIMERSSFEKNPIDFLEAKGYKEVKKDLIIKLPKYSLFELENGRKRMLASAGELQKGNELALPSKYVNFLYLASHYEKLKGSPEDNEQKQLFVEQHKHYLDEIIEQISEFSKRVILADANLDKVLSAYNKHRDKPIREQAENIIHLFTLTNLGAPAAFKYFDTTIDRKRYTSTKEVLDATLIHQSITGLYETRIDLSQLGGDGGEAAAKGSSGGGGGVLNLEEEYRLHEKPVPSSIDPSWLQLFPTVWAERAGMGLANQVPPVVVELRSGASPVAVRQYPMSKEAREGIRPHIQRFLDLGVLVPCQSPWNTPLLPVKKPGTNDYRPVQDLREINKRVQDIHPTVPNPYNLLSSLPPSHTWYSVLDLKDAFFCLKLHPNSQPLFAFEWRDPEKGNTGQLTWTRLPQGFKNSPTLFNEALHRDLAPFRALNPQVVLLQYVDDLLVAAPTYRDCKEGTQKLLQELSKLGYRVSAKKAQLCQKEVTYLGYLLKEGKRWLTPARKATVMKIPPPTTPRQVREFLGTAGFCRLWIPGFASLAAPLYPLTKPSIPFIWTEEHQKAFDRIKEALLSAPALALPDLTKPFTLYVDERAGVARGVLTQTLGPWRRPVAYLSKKLDPVASGWPTCLKAVAAVALLLKDADKLTLGQNVTVIASHSLESIVRQPPDRWMTNARMTHYQSLLLNERVSFAPPAVLNPATLLPVESEATPVHRCSEILAEETGTRRDLKDQPLPGVPAWYTDGSSFIAEGKRRAGAAIVDGKRTVWASSLPEGTSAQKAELVALTQALRLAEGKDINIYTDSRYAFATAHIHGAIYKQRGWLTSAGKDIKNKEEILALLEAIHLPKRVAIIHCPGHQKGNDPVATGNRRADEAAKQAALSTRVLAETTKPAGKRTADGSEFEKRTADGSEFESPKKKAKVE

SEQ ID NO: 7350 - protein, 2096 aa, synthetic construct
MPAAKRVKLDGGDKKYSIGLDIGTNSVGWAVITDEYKVPSKKFKVLGNTDRHSIKKNLIGALLFDSGETAEATRLKRTARRRYTRRKNRICYLQEIFSNEMAKVDDSFFHRLEESFLVEEDKKHERHPIFGNIVDEVAYHEKYPTIYHLRKKLVDSTDKADLRLIYLALAHMIKFRGHFLIEGDLNPDNSDVDKLFIQLVQTYNQLFEENPINASGVDAKAILSARLSKSRRLENLIAQLPGEKKNGLFGNLIALSLGLTPNFKSNFDLAEDAKLQLSKDTYDDDLDNLLAQIGDQYADLFLAAKNLSDAILLSDILRVNTEITKAPLSASMIKRYDEHHQDLTLLKALVRQQLPEKYKEIFFDQSKNGYAGYIDGGASQEEFYKFIKPILEKMDGTEELLVKLNREDLLRKQRTFDNGSIPHQIHLGELHAILRRQEDFYPFLKDNREKIEKILTFRIPYYVGPLARGNSRFAWMTRKSEETITPWNFEEVVDKGASAQSFIERMTNFDKNLPNEKVLPKHSLLYEYFTVYNELTKVKYVTEGMRKPAFLSGEQKKAIVDLLFKTNRKVTVKQLKEDYFKKIECFDSVEISGVEDRFNASLGTYHDLLKIIKDKDFLDNEENEDILEDIVLTLTLFEDREMIEERLKTYAHLFDDKVMKQLKRRRYTGWGRLSRKLINGIRDKQSGKTILDFLKSDGFANRNFMQLIHDDSLTFKEDIQKAQVSGQGDSLHEHIANLAGSPAIKKGILQTVKVVDELVKVMGRHKPENIVIEMARENQTTQKGQKNSRERMKRIEEGIKELGSQILKEHPVENTQLQNEKLYLYYLQNGRDMYVDQELDINRLSDYDVDHIVPQSFLKDDSIDNKVLTRSDKARGKSDNVPSEEVVKKMKNYWRQLLNAKLITQRKFDNLTKAERGGLSELDKAGFIKRQLVETRQITKHVAQILDSRMNTKYDENDKLIREVKVITLKSKLVSDFRKDFQFYKVREINNYHHAHDAYLNAVVGTALIKKYPKLESEFVYGDYKVYDVRKMIAKSEQEIGKATAKYFFYSNIMNFFKTEITLANGEIRKRPLIETNGETGEIVWDKGRDFATVRKVLSMPQVNIVKKTEVQTGGFSKESILPKRNSDKLIARKKDWDPKKYGGFDSPTVAYSVLVVAKVEKGKSKKLKSVKELLGITIMERSSFEKNPIDFLEAKGYKEVKKDLIIKLPKYSLFELENGRKRMLASAGELQKGNELALPSKYVNFLYLASHYEKLKGSPEDNEQKQLFVEQHKHYLDEIIEQISEFSKRVILADANLDKVLSAYNKHRDKPIREQAENIIHLFTLTNLGAPAAFKYFDTTIDRKRYTSTKEVLDATLIHQSITGLYETRIDLSQLGGDGGEAAAKGSSGGGGGTLNIEDEYRLHETSKEPDVPLGSTWLSDFPQAWAETGGMGLAVRQAPLIIPLKATSTPVSIKQYPMSQEARLGIKPHIQRLLDQGILVPCQSPWNTPLLPVKKPGTNDYRPVQDLREVNKRVEDIHPTVPNPYNLLSGLPPSHQWYTVLDLKDAFFCLRLHPTSQPLFAFEWRDPEMGISGQLTWTRLPQGFKNSPTLFNEALHRDLADFRIQHPDLILLQYVDDLLLAATSEQDCQRGTRALLQTLGNLGYRASAKKAQICQKQVKYLGYLLKEGQRWLTEARKETVMGQPTPKTPRQLREFLGTAGFCRLWIPGFAEMAAPLYPLTKPGTLFNWGPDQQKAYQEIKQALLTAPALGLPDLTKPFELFVDEKQGYAKGVLTQKLGPWRRPVAYLSKKLDPVAAGWPPCLRMVAAIAVLTKDAGKLTMGQPLVILAPHAVEALVKQPPDRWLSNARMTHYQAMLLDTDRVQFGPVVALNPATLLPLPEKEAPHDCLEILAETHGTRPDLTDQPIPDADYTWYTDGSSFLQEGQRRAGAAVTTETEVIWARALPAGTSAQRAELIALTQALKMAEGKKLNVYTDSRYAFATAHVHGEIYRRRGWLTSEGREIKNKNEILALLKALFLPKRLSIIHCPGHQKGNSAEARGNRMADQAAREAAMKAVLETSTLLAGKRTADGSEFEKRTADGSEFESPKKKAKVE

SEQ ID NO: 7351 - protein, 2096 aa, synthetic construct
MPAAKRVKLDGGDKKYSIGLDIGTNSVGWAVITDEYKVPSKKFKVLGNTDRHSIKKNLIGALLFDSGETAEATRLKRTARRRYTRRKNRICYLQEIFSNEMAKVDDSFFHRLEESFLVEEDKKHERHPIFGNIVDEVAYHEKYPTIYHLRKKLVDSTDKADLRLIYLALAHMIKFRGHFLIEGDLNPDNSDVDKLFIQLVQTYNQLFEENPINASGVDAKAILSARLSKSRRLENLIAQLPGEKKNGLFGNLIALSLGLTPNFKSNFDLAEDAKLQLSKDTYDDDLDNLLAQIGDQYADLFLAAKNLSDAILLSDILRVNTEITKAPLSASMIKRYDEHHQDLTLLKALVRQQLPEKYKEIFFDQSKNGYAGYIDGGASQEEFYKFIKPILEKMDGTEELLVKLNREDLLRKQRTFDNGSIPHQIHLGELHAILRRQEDFYPFLKDNREKIEKILTFRIPYYVGPLARGNSRFAWMTRKSEETITPWNFEEVVDKGASAQSFIERMTNFDKNLPNEKVLPKHSLLYEYFTVYNELTKVKYVTEGMRKPAFLSGEQKKAIVDLLFKTNRKVTVKQLKEDYFKKIECFDSVEISGVEDRFNASLGTYHDLLKIIKDKDFLDNEENEDILEDIVLTLTLFEDREMIEERLKTYAHLFDDKVMKQLKRRRYTGWGRLSRKLINGIRDKQSGKTILDFLKSDGFANRNFMQLIHDDSLTFKEDIQKAQVSGQGDSLHEHIANLAGSPAIKKGILQTVKVVDELVKVMGRHKPENIVIEMARENQTTQKGQKNSRERMKRIEEGIKELGSQILKEHPVENTQLQNEKLYLYYLQNGRDMYVDQELDINRLSDYDVDHIVPQSFLKDDSIDNKVLTRSDKARGKSDNVPSEEVVKKMKNYWRQLLNAKLITQRKFDNLTKAERGGLSELDKAGFIKRQLVETRQITKHVAQILDSRMNTKYDENDKLIREVKVITLKSKLVSDFRKDFQFYKVREINNYHHAHDAYLNAVVGTALIKKYPKLESEFVYGDYKVYDVRKMIAKSEQEIGKATAKYFFYSNIMNFFKTEITLANGEIRKRPLIETNGETGEIVWDKGRDFATVRKVLSMPQVNIVKKTEVQTGGFSKESILPKRNSDKLIARKKDWDPKKYGGFDSPTVAYSVLVVAKVEKGKSKKLKSVKELLGITIMERSSFEKNPIDFLEAKGYKEVKKDLIIKLPKYSLFELENGRKRMLASAGELQKGNELALPSKYVNFLYLASHYEKLKGSPEDNEQKQLFVEQHKHYLDEIIEQISEFSKRVILADANLDKVLSAYNKHRDKPIREQAENIIHLFTLTNLGAPAAFKYFDTTIDRKRYTSTKEVLDATLIHQSITGLYETRIDLSQLGGDGGGGGGSSPAPGGTAPLEEEYRLFLEAPIQNVTLLEQWKREIPKVWAEINPPGLASTQAPIHVQLLSTALPVRVRQYPITLEAKRSLRETIRKFRAAGILRPVHSPWNTPLLPVRKSGTSEYRMVQDLREVNKRVETIHPTVPNPYTLLSLLPPDRIWYSVLDLKDAFFCIPLAPESQLIFAFEWADAEEGESGQLTWTRLPQGFKNSPTLFNEALNRDLQGFRLDHPSVSLLQYVDDLLIAADTQAACLSATRDLLMTLAELGYRVSGKKAQLCQEEVTYLGFKIHKGSRSLSNSRTQAILQIPVPKTKRQVREFLGKIGYCRLFIPGFAELAQPLYAATRPGNDPLVWGEKEEEAFQSLKLALTQPPALALPSLDKPFQLFVEETSGAAKGVLTQALGPWKRPVAYLSKRLDPVAAGWPRCLRAIAAAALLTREASKLTFGQDIEITSSHNLESLLRSPPDKWLTNARITQYQVLLLDPPRVRFKQTAALNPATLLPETDDTLPIHHCLDTLDSLTSTRPDLTDQPLAQAEATLFTDGSSYIRDGKRYAGAAVVTLDSVIWAEPLPIGTSAQKAELIALTKALEWSKDKSVNIYTDSRYAFATLHVHGMIYRERGWLTAGGKAIKNAPEILALLTAVWLPKRVAVMHCKGHQKDDAPTSTGNRRADEVAREVAIRPLSTQATISAGKRTADGSEFEKRTADGSEFESPKKKAKVE

SEQ ID NO: 7352 - protein, 2093 aa, synthetic construct
MPAAKRVKLDGGDKKYSIGLDIGTNSVGWAVITDEYKVPSKKFKVLGNTDRHSIKKNLIGALLFDSGETAEATRLKRTARRRYTRRKNRICYLQEIFSNEMAKVDDSFFHRLEESFLVEEDKKHERHPIFGNIVDEVAYHEKYPTIYHLRKKLVDSTDKADLRLIYLALAHMIKFRGHFLIEGDLNPDNSDVDKLFIQLVQTYNQLFEENPINASGVDAKAILSARLSKSRRLENLIAQLPGEKKNGLFGNLIALSLGLTPNFKSNFDLAEDAKLQLSKDTYDDDLDNLLAQIGDQYADLFLAAKNLSDAILLSDILRVNTEITKAPLSASMIKRYDEHHQDLTLLKALVRQQLPEKYKEIFFDQSKNGYAGYIDGGASQEEFYKFIKPILEKMDGTEELLVKLNREDLLRKQRTFDNGSIPHQIHLGELHAILRRQEDFYPFLKDNREKIEKILTFRIPYYVGPLARGNSRFAWMTRKSEETITPWNFEEVVDKGASAQSFIERMTNFDKNLPNEKVLPKHSLLYEYFTVYNELTKVKYVTEGMRKPAFLSGEQKKAIVDLLFKTNRKVTVKQLKEDYFKKIECFDSVEISGVEDRFNASLGTYHDLLKIIKDKDFLDNEENEDILEDIVLTLTLFEDREMIEERLKTYAHLFDDKVMKQLKRRRYTGWGRLSRKLINGIRDKQSGKTILDFLKSDGFANRNFMQLIHDDSLTFKEDIQKAQVSGQGDSLHEHIANLAGSPAIKKGILQTVKVVDELVKVMGRHKPENIVIEMARENQTTQKGQKNSRERMKRIEEGIKELGSQILKEHPVENTQLQNEKLYLYYLQNGRDMYVDQELDINRLSDYDVDHIVPQSFLKDDSIDNKVLTRSDKARGKSDNVPSEEVVKKMKNYWRQLLNAKLITQRKFDNLTKAERGGLSELDKAGFIKRQLVETRQITKHVAQILDSRMNTKYDENDKLIREVKVITLKSKLVSDFRKDFQFYKVREINNYHHAHDAYLNAVVGTALIKKYPKLESEFVYGDYKVYDVRKMIAKSEQEIGKATAKYFFYSNIMNFFKTEITLANGEIRKRPLIETNGETGEIVWDKGRDFATVRKVLSMPQVNIVKKTEVQTGGFSKESILPKRNSDKLIARKKDWDPKKYGGFDSPTVAYSVLVVAKVEKGKSKKLKSVKELLGITIMERSSFEKNPIDFLEAKGYKEVKKDLIIKLPKYSLFELENGRKRMLASAGELQKGNELALPSKYVNFLYLASHYEKLKGSPEDNEQKQLFVEQHKHYLDEIIEQISEFSKRVILADANLDKVLSAYNKHRDKPIREQAENIIHLFTLTNLGAPAAFKYFDTTIDRKRYTSTKEVLDATLIHQSITGLYETRIDLSQLGGDGGGGGGSSPAPGGTLQLEEEYRLFEPESTQKQEMDIWLKNFPQAWAETGGMGTAHCQAPVLIQLKATATPISIRQYPMPHEAYQGIKPHIRRMLDQGILKPCQSPWNTPLLPVKKPGTEDYRPVQDLREVNKRVEDIHPTVPNPYNLLSTLPPSHPWYTVLDLKDAFFCLRLHSESQLLFAFEWRDPEIGLSGQLTWTRLPQGFKNSPTLFNEALHSDLADFRVRYPALVLLQYVDDLLLAAATRTECLEGTKALLETLGNKGYRASAKKAQICLQEVTYLGYSLKDGQRWLTKARKEAILSIPVPKNSRQVREFLGKAGYCRLFIPGFAELAAPLYPLTRPGTLFQWGTEQQLAFEDIKKALLSSPALGLPDITKPFELFIDENSGFAKGVLVQKLGPWKRPVAYLSKKLDTVASGWPPCLRMVAAIAILVKDAGKLTLGQPLTILTSHPVEALVRQPPNKWLSNARMTHYQAMLLDAERVHFGPTVSLNPATLLPLPSGGNHHDCLQILAETHGTRPDLTDQPLPDADLTWYTDGSSFIRNGEREAGAAVTTESEVIWAAPLPPGTSAQRAELIALTQALKMAEGKKLTVYTDSRYAFATTHVHGEIYRRRGWLTSEGKEIKNKNEILALLEALFLPKRLSIIHCPGHQKGDSPQAKGNRLADDTAKKAATETHSSLTVLPAGKRTADGSEFEKRTADGSEFESPKKKAKVE

SEQ ID NO: 7353 - protein, 2216 aa, synthetic construct
MPAAKRVKLDGGDKKYSIGLDIGTNSVGWAVITDEYKVPSKKFKVLGNTDRHSIKKNLIGALLFDSGETAEATRLKRTARRRYTRRKNRICYLQEIFSNEMAKVDDSFFHRLEESFLVEEDKKHERHPIFGNIVDEVAYHEKYPTIYHLRKKLVDSTDKADLRLIYLALAHMIKFRGHFLIEGDLNPDNSDVDKLFIQLVQTYNQLFEENPINASGVDAKAILSARLSKSRRLENLIAQLPGEKKNGLFGNLIALSLGLTPNFKSNFDLAEDAKLQLSKDTYDDDLDNLLAQIGDQYADLFLAAKNLSDAILLSDILRVNTEITKAPLSASMIKRYDEHHQDLTLLKALVRQQLPEKYKEIFFDQSKNGYAGYIDGGASQEEFYKFIKPILEKMDGTEELLVKLNREDLLRKQRTFDNGSIPHQIHLGELHAILRRQEDFYPFLKDNREKIEKILTFRIPYYVGPLARGNSRFAWMTRKSEETITPWNFEEVVDKGASAQSFIERMTNFDKNLPNEKVLPKHSLLYEYFTVYNELTKVKYVTEGMRKPAFLSGEQKKAIVDLLFKTNRKVTVKQLKEDYFKKIECFDSVEISGVEDRFNASLGTYHDLLKIIKDKDFLDNEENEDILEDIVLTLTLFEDREMIEERLKTYAHLFDDKVMKQLKRRRYTGWGRLSRKLINGIRDKQSGKTILDFLKSDGFANRNFMQLIHDDSLTFKEDIQKAQVSGQGDSLHEHIANLAGSPAIKKGILQTVKVVDELVKVMGRHKPENIVIEMARENQTTQKGQKNSRERMKRIEEGIKELGSQILKEHPVENTQLQNEKLYLYYLQNGRDMYVDQELDINRLSDYDVDHIVPQSFLKDDSIDNKVLTRSDKARGKSDNVPSEEVVKKMKNYWRQLLNAKLITQRKFDNLTKAERGGLSELDKAGFIKRQLVETRQITKHVAQILDSRMNTKYDENDKLIREVKVITLKSKLVSDFRKDFQFYKVREINNYHHAHDAYLNAVVGTALIKKYPKLESEFVYGDYKVYDVRKMIAKSEQEIGKATAKYFFYSNIMNFFKTEITLANGEIRKRPLIETNGETGEIVWDKGRDFATVRKVLSMPQVNIVKKTEVQTGGFSKESILPKRNSDKLIARKKDWDPKKYGGFDSPTVAYSVLVVAKVEKGKSKKLKSVKELLGITIMERSSFEKNPIDFLEAKGYKEVKKDLIIKLPKYSLFELENGRKRMLASAGELQKGNELALPSKYVNFLYLASHYEKLKGSPEDNEQKQLFVEQHKHYLDEIIEQISEFSKRVILADANLDKVLSAYNKHRDKPIREQAENIIHLFTLTNLGAPAAFKYFDTTIDRKRYTSTKEVLDATLIHQSITGLYETRIDLSQLGGDGGGGGGSSPAPGGTLGDQGSRGSDPLPEPRVTLTVEGIPTEFLVNTGAEHSVLTKPMGKMGSKRTVVAGATGSKVYPWTTKRLLKIGQKQVTHSFLVIPECPAPLLGRDLLTKLKAQIQFSTEGPQVTWEDRPAMCLVLNLEEEYRLHEKPVPPSIDPSWLQLFPMVWAEKAGMGLANQVPPVVVELKSDASPVAVRQYPMSKEAREGIRPHIQRFLDLGILVPCQSPWNTPLLPVKKPGTNDYRPVQDLREVNKRVQDIHPTVPNPYNLLSSLPPSHTWYSVLDLKDAFFCLKLHPNSQPLFAFEWRDPEKGNTGQLTWTRLPQGFKNSPTLFDEALHRDLASFRALNPQVVMLQYVDDLLVAAPTYRDCKEGTRRLLQELSKLGYRVSAKKAQLCREEVTYLGYLLKGGKRWLTPARKATVMKIPTPTTPRQVREFLGTAGFCRLWIPGFASLAAPLYPLTREKVPFTWTEAHQEAFGRIKEALLSAPALALPDLTKPFALYVDEKEGVARGVLTQTLGPWRRPVAYLSKKLDPVASGWPTCLKAIAAVALLLKDADKLTLGQNVLVIAPHNLESIVRQPPDRWMTNARMTHYQSLLLNERVSFAPPAILNPATLLPVESDDTPIHICSEILAEETGTRPDLRDQPLPGVPAWYTDGSSFIMDGRRQAGAAIVDNKRTVWASNLPEGTSAQKAELIALTQALRLAEGKSINIYTDSRYAFATAHVHGAIYKQRGLLTSAGKDIKNKEEILALLEAIHLPKRVAIIHCPGHQRGTDPVATGNRKADEAAKQAAQSTRILTETTKNAGKRTADGSEFEKRTADGSEFESPKKKAKVE

SEQ ID NO: 7354 - protein, 2125 aa, synthetic construct
MPAAKRVKLDGGDKKYSIGLDIGTNSVGWAVITDEYKVPSKKFKVLGNTDRHSIKKNLIGALLFDSGETAEATRLKRTARRRYTRRKNRICYLQEIFSNEMAKVDDSFFHRLEESFLVEEDKKHERHPIFGNIVDEVAYHEKYPTIYHLRKKLVDSTDKADLRLIYLALAHMIKFRGHFLIEGDLNPDNSDVDKLFIQLVQTYNQLFEENPINASGVDAKAILSARLSKSRRLENLIAQLPGEKKNGLFGNLIALSLGLTPNFKSNFDLAEDAKLQLSKDTYDDDLDNLLAQIGDQYADLFLAAKNLSDAILLSDILRVNTEITKAPLSASMIKRYDEHHQDLTLLKALVRQQLPEKYKEIFFDQSKNGYAGYIDGGASQEEFYKFIKPILEKMDGTEELLVKLNREDLLRKQRTFDNGSIPHQIHLGELHAILRRQEDFYPFLKDNREKIEKILTFRIPYYVGPLARGNSRFAWMTRKSEETITPWNFEEVVDKGASAQSFIERMTNFDKNLPNEKVLPKHSLLYEYFTVYNELTKVKYVTEGMRKPAFLSGEQKKAIVDLLFKTNRKVTVKQLKEDYFKKIECFDSVEISGVEDRFNASLGTYHDLLKIIKDKDFLDNEENEDILEDIVLTLTLFEDREMIEERLKTYAHLFDDKVMKQLKRRRYTGWGRLSRKLINGIRDKQSGKTILDFLKSDGFANRNFMQLIHDDSLTFKEDIQKAQVSGQGDSLHEHIANLAGSPAIKKGILQTVKVVDELVKVMGRHKPENIVIEMARENQTTQKGQKNSRERMKRIEEGIKELGSQILKEHPVENTQLQNEKLYLYYLQNGRDMYVDQELDINRLSDYDVDHIVPQSFLKDDSIDNKVLTRSDKARGKSDNVPSEEVVKKMKNYWRQLLNAKLITQRKFDNLTKAERGGLSELDKAGFIKRQLVETRQITKHVAQILDSRMNTKYDENDKLIREVKVITLKSKLVSDFRKDFQFYKVREINNYHHAHDAYLNAVVGTALIKKYPKLESEFVYGDYKVYDVRKMIAKSEQEIGKATAKYFFYSNIMNFFKTEITLANGEIRKRPLIETNGETGEIVWDKGRDFATVRKVLSMPQVNIVKKTEVQTGGFSKESILPKRNSDKLIARKKDWDPKKYGGFDSPTVAYSVLVVAKVEKGKSKKLKSVKELLGITIMERSSFEKNPIDFLEAKGYKEVKKDLIIKLPKYSLFELENGRKRMLASAGELQKGNELALPSKYVNFLYLASHYEKLKGSPEDNEQKQLFVEQHKHYLDEIIEQISEFSKRVILADANLDKVLSAYNKHRDKPIREQAENIIHLFTLTNLGAPAAFKYFDTTIDRKRYTSTKEVLDATLIHQSITGLYETRIDLSQLGGDGGGGGGSSPAPGGLLGRDLLTKLKAQIQFSTEGPQVTWEDRPAMCLVLNLEEEYRLHEKPVPPSIDPSWLQLFPMVWAEKAGMGLANQVPPVVVELKSDASPVAVRQYPMSKEAREGIRPHIQRFLDLGILVPCQSPWNTPLLPVKKPGTNDYRPVQDLREVNKRVQDIHPTVPNPYNLLSSLPPSHTWYSVLDLKDAFFCLKLHPNSQPLFAFEWRDPEKGNTGQLTWTRLPQGFKNSPTLFNEALHRDLASFRALNPQVVMLQYVDDLLVAAPTYRDCKEGTRRLLQELSKLGYRVSAKKAQLCREEVTYLGYLLKGGKRWLTPARKATVMKIPTPTTPRQVREFLGTAGFCRLWIPGFASLAAPLYPLTRPKVPFTWTEAHQEAFGRIKEALLSAPALALPDLTKPFALYVDEKEGVARGVLTQTLGPWRRPVAYLSKKLDPVASGWPTCLKAIAAVALLLKDADKLTLGQNVLVIAPHNLESIVRQPPDRWMTNARMTHYQSLLLNERVSFAPPAILNPATLLPVESDDTPIHICSEILAEETGTRPDLRDQPLPGVPAWYTDGSSFIMDGRRQAGAAIVDNKRTVWASNLPEGTSAQKAELIALTQALRLAEGKSINIYTDSRYAFATAHVHGAIYKQRGWLTSAGKDIKNKEEILALLEAIHLPKRVAIIHCPGHQRGTDPVATGNRKADEAAKQAAQSTRILTETTKNAGKRTADGSEFEKRTADGSEFESPKKKAKVE

SEQ ID NO: 7355 - protein, 2216 aa, synthetic construct
MPAAKRVKLDGGDKKYSIGLDIGTNSVGWAVITDEYKVPSKKFKVLGNTDRHSIKKNLIGALLFDSGETAEATRLKRTARRRYTRRKNRICYLQEIFSNEMAKVDDSFFHRLEESFLVEEDKKHERHPIFGNIVDEVAYHEKYPTIYHLRKKLVDSTDKADLRLIYLALAHMIKFRGHFLIEGDLNPDNSDVDKLFIQLVQTYNQLFEENPINASGVDAKAILSARLSKSRRLENLIAQLPGEKKNGLFGNLIALSLGLTPNFKSNFDLAEDAKLQLSKDTYDDDLDNLLAQIGDQYADLFLAAKNLSDAILLSDILRVNTEITKAPLSASMIKRYDEHHQDLTLLKALVRQQLPEKYKEIFFDQSKNGYAGYIDGGASQEEFYKFIKPILEKMDGTEELLVKLNREDLLRKQRTFDNGSIPHQIHLGELHAILRRQEDFYPFLKDNREKIEKILTFRIPYYVGPLARGNSRFAWMTRKSEETITPWNFEEVVDKGASAQSFIERMTNFDKNLPNEKVLPKHSLLYEYFTVYNELTKVKYVTEGMRKPAFLSGEQKKAIVDLLFKTNRKVTVKQLKEDYFKKIECFDSVEISGVEDRFNASLGTYHDLLKIIKDKDFLDNEENEDILEDIVLTLTLFEDREMIEERLKTYAHLFDDKVMKQLKRRRYTGWGRLSRKLINGIRDKQSGKTILDFLKSDGFANRNFMQLIHDDSLTFKEDIQKAQVSGQGDSLHEHIANLAGSPAIKKGILQTVKVVDELVKVMGRHKPENIVIEMARENQTTQKGQKNSRERMKRIEEGIKELGSQILKEHPVENTQLQNEKLYLYYLQNGRDMYVDQELDINRLSDYDVDHIVPQSFLKDDSIDNKVLTRSDKARGKSDNVPSEEVVKKMKNYWRQLLNAKLITQRKFDNLTKAERGGLSELDKAGFIKRQLVETRQITKHVAQILDSRMNTKYDENDKLIREVKVITLKSKLVSDFRKDFQFYKVREINNYHHAHDAYLNAVVGTALIKKYPKLESEFVYGDYKVYDVRKMIAKSEQEIGKATAKYFFYSNIMNFFKTEITLANGEIRKRPLIETNGETGEIVWDKGRDFATVRKVLSMPQVNIVKKTEVQTGGFSKESILPKRNSDKLIARKKDWDPKKYGGFDSPTVAYSVLVVAKVEKGKSKKLKSVKELLGITIMERSSFEKNPIDFLEAKGYKEVKKDLIIKLPKYSLFELENGRKRMLASAGELQKGNELALPSKYVNFLYLASHYEKLKGSPEDNEQKQLFVEQHKHYLDEIIEQISEFSKRVILADANLDKVLSAYNKHRDKPIREQAENIIHLFTLTNLGAPAAFKYFDTTIDRKRYTSTKEVLDATLIHQSITGLYETRIDLSQLGGDGGGGGGSSPAPGGTLGDQGSRGSDPLPEPRVTLTVEGIPTEFLVNTGAEHSVLTKPMGKMGSKRTVVAGATGSKVYPWTTKRLLKIGQKQVTHSFLVIPECPAPLLGRDLLTKLKAQIQFSTEGPQVTWEDRPAMCLVLNLEEEYRLHEKPVPPSIDPSWLQLFPMVWAEKAGMGLANQVPPVVVELKSDASPVAVRQYPMSKEAREGIRPHIQRFLDLGILVPCQSPWNTPLLPVKKPGTNDYRPVQDLREVNKRVQDIHPTVPNPYNLLSSLPPSHTWYSVLDLKDAFFCLKLHPNSQPLFAFEWRDPEKGNTGQLTWTRLPQGFKNSPTLFNEALHRDLASFRALNPQVVMLQYVDDLLVAAPTYRDCKEGTRRLLQELSKLGYRVSAKKAQLCREEVTYLGYLLKGGKRWLTPARKATVMKIPTPTTPRQVREFLGTAGFCRLWIPGFASLAAPLYPLTRPKVPFTWTEAHQEAFGRIKEALLSAPALALPDLTKPFALYVDEKEGVARGVLTQTLGPWRRPVAYLSKKLDPVASGWPTCLKAIAAVALLLKDADKLTLGQNVLVIAPHNLESIVRQPPDRWMTNARMTHYQSLLLNERVSFAPPAILNPATLLPVESDDTPIHICSEILAEETGTRPDLRDQPLPGVPAWYTDGSSFIMDGRRQAGAAIVDNKRTVWASNLPEGTSAQKAELIALTQALRLAEGKSINIYTDSRYAFATAHVHGAIYKQRGWLTSAGKDIKNKEEILALLEAIHLPKRVAIIHCPGHQRGTDPVATGNRKADEAAKQAAQSTRILTETTKNAGKRTADGSEFEKRTADGSEFESPKKKAKVE

SEQ ID NO: 7356 - protein, 2094 aa, synthetic construct
MPAAKRVKLDGGDKKYSIGLDIGTNSVGWAVITDEYKVPSKKFKVLGNTDRHSIKKNLIGALLFDSGETAEATRLKRTARRRYTRRKNRICYLQEIFSNEMAKVDDSFFHRLEESFLVEEDKKHERHPIFGNIVDEVAYHEKYPTIYHLRKKLVDSTDKADLRLIYLALAHMIKFRGHFLIEGDLNPDNSDVDKLFIQLVQTYNQLFEENPINASGVDAKAILSARLSKSRRLENLIAQLPGEKKNGLFGNLIALSLGLTPNFKSNFDLAEDAKLQLSKDTYDDDLDNLLAQIGDQYADLFLAAKNLSDAILLSDILRVNTEITKAPLSASMIKRYDEHHQDLTLLKALVRQQLPEKYKEIFFDQSKNGYAGYIDGGASQEEFYKFIKPILEKMDGTEELLVKLNREDLLRKQRTFDNGSIPHQIHLGELHAILRRQEDFYPFLKDNREKIEKILTFRIPYYVGPLARGNSRFAWMTRKSEETITPWNFEEVVDKGASAQSFIERMTNFDKNLPNEKVLPKHSLLYEYFTVYNELTKVKYVTEGMRKPAFLSGEQKKAIVDLLFKTNRKVTVKQLKEDYFKKIECFDSVEISGVEDRFNASLGTYHDLLKIIKDKDFLDNEENEDILEDIVLTLTLFEDREMIEERLKTYAHLFDDKVMKQLKRRRYTGWGRLSRKLINGIRDKQSGKTILDFLKSDGFANRNFMQLIHDDSLTFKEDIQKAQVSGQGDSLHEHIANLAGSPAIKKGILQTVKVVDELVKVMGRHKPENIVIEMARENQTTQKGQKNSRERMKRIEEGIKELGSQILKEHPVENTQLQNEKLYLYYLQNGRDMYVDQELDINRLSDYDVDHIVPQSFLKDDSIDNKVLTRSDKARGKSDNVPSEEVVKKMKNYWRQLLNAKLITQRKFDNLTKAERGGLSELDKAGFIKRQLVETRQITKHVAQILDSRMNTKYDENDKLIREVKVITLKSKLVSDFRKDFQFYKVREINNYHHAHDAYLNAVVGTALIKKYPKLESEFVYGDYKVYDVRKMIAKSEQEIGKATAKYFFYSNIMNFFKTEITLANGEIRKRPLIETNGETGEIVWDKGRDFATVRKVLSMPQVNIVKKTEVQTGGFSKESILPKRNSDKLIARKKDWDPKKYGGFDSPTVAYSVLVVAKVEKGKSKKLKSVKELLGITIMERSSFEKNPIDFLEAKGYKEVKKDLIIKLPKYSLFELENGRKRMLASAGELQKGNELALPSKYVNFLYLASHYEKLKGSPEDNEQKQLFVEQHKHYLDEIIEQISEFSKRVILADANLDKVLSAYNKHRDKPIREQAENIIHLFTLTNLGAPAAFKYFDTTIDRKRYTSTKEVLDATLIHQSITGLYETRIDLSQLGGDGGGGGGSSPAPGGTLNLEDEYRLYETSAEPEVSPGSTWLSDFPQAWAETGGMGLAVRQAPLIIPLKATSTPVSIKQYPMSQEAKLGIKPHIQRLLDQGILVPCQSPWNTPLLPVKKPGTNDYRPVQDLREVNKRVEDIHPTVPNPYNLLSGLPPSHRWYTVLDLKDAFFCLRLHPTSQPLFAFEWRDPGMGISGQLTWTRLPQGFKNSPTLFNEALHRDLADFRIQHPDLILLQYVDDILLAATSELDCQQGTRALLLTLGNLGYRASAKKAQLCQKQVKYLGYLLKEGQRWLTEARKETVMGQPTPKTPRQLREFLGTAGFCRLWIPGFAEMAAPLYPLTKPGTLFNWGPDQQKAYQEIKQALLTAPALGLPDLTKPFELFVDEKQGYAKGVLTQKLGPWRRPVAYLSKKLDPVAAGWPPCLRMVAAIAVLRKDAGKLTMGQPLVILAPHAVEALVKQPPDRWLSNARMTHYQAMLLDTDRVQFGPVVALNPATLLPLPEEGAPHDCLEILAETHGTRPDLTDQPIPDADHTWYTDGSSFLQEGQRKAGAAVTTETEVIWARALPAGTSAQRAELIALTQALKMAEGKRLNVYTDSRYAFATAHIHGEIYRRRGWLTSEGREIKNKSEILALLKALFLPKRLSIIHCLGHQKGDSAEARGNRLADQAAREAAIKTPPDTSTLLAGKRTADGSEFEKRTADGSEFESPKKKAKVE

SEQ ID NO: 7357 - protein, 2094 aa, synthetic construct
MPAAKRVKLDGGDKKYSIGLDIGTNSVGWAVITDEYKVPSKKFKVLGNTDRHSIKKNLIGALLFDSGETAEATRLKRTARRRYTRRKNRICYLQEIFSNEMAKVDDSFFHRLEESFLVEEDKKHERHPIFGNIVDEVAYHEKYPTIYHLRKKLVDSTDKADLRLIYLALAHMIKFRGHFLIEGDLNPDNSDVDKLFIQLVQTYNQLFEENPINASGVDAKAILSARLSKSRRLENLIAQLPGEKKNGLFGNLIALSLGLTPNFKSNFDLAEDAKLQLSKDTYDDDLDNLLAQIGDQYADLFLAAKNLSDAILLSDILRVNTEITKAPLSASMIKRYDEHHQDLTLLKALVRQQLPEKYKEIFFDQSKNGYAGYIDGGASQEEFYKFIKPILEKMDGTEELLVKLNREDLLRKQRTFDNGSIPHQIHLGELHAILRRQEDFYPFLKDNREKIEKILTFRIPYYVGPLARGNSRFAWMTRKSEETITPWNFEEVVDKGASAQSFIERMTNFDKNLPNEKVLPKHSLLYEYFTVYNELTKVKYVTEGMRKPAFLSGEQKKAIVDLLFKTNRKVTVKQLKEDYFKKIECFDSVEISGVEDRFNASLGTYHDLLKIIKDKDFLDNEENEDILEDIVLTLTLFEDREMIEERLKTYAHLFDDKVMKQLKRRRYTGWGRLSRKLINGIRDKQSGKTILDFLKSDGFANRNFMQLIHDDSLTFKEDIQKAQVSGQGDSLHEHIANLAGSPAIKKGILQTVKVVDELVKVMGRHKPENIVIEMARENQTTQKGQKNSRERMKRIEEGIKELGSQILKEHPVENTQLQNEKLYLYYLQNGRDMYVDQELDINRLSDYDVDHIVPQSFLKDDSIDNKVLTRSDKARGKSDNVPSEEVVKKMKNYWRQLLNAKLITQRKFDNLTKAERGGLSELDKAGFIKRQLVETRQITKHVAQILDSRMNTKYDENDKLIREVKVITLKSKLVSDFRKDFQFYKVREINNYHHAHDAYLNAVVGTALIKKYPKLESEFVYGDYKVYDVRKMIAKSEQEIGKATAKYFFYSNIMNFFKTEITLANGEIRKRPLIETNGETGEIVWDKGRDFATVRKVLSMPQVNIVKKTEVQTGGFSKESILPKRNSDKLIARKKDWDPKKYGGFDSPTVAYSVLVVAKVEKGKSKKLKSVKELLGITIMERSSFEKNPIDFLEAKGYKEVKKDLIIKLPKYSLFELENGRKRMLASAGELQKGNELALPSKYVNFLYLASHYEKLKGSPEDNEQKQLFVEQHKHYLDEIIEQISEFSKRVILADANLDKVLSAYNKHRDKPIREQAENIIHLFTLTNLGAPAAFKYFDTTIDRKRYTSTKEVLDATLIHQSITGLYETRIDLSQLGGDGGGGGGSSPAPGGLGIEDEYRLHETSTEPDVSLGSTWLSDFPQAWAETGGMGLAVRQAPLIIPLKATSTPVSIQQYPMSHEARLGIKPHIQRLLDQGILVPCQSPWNTPLLPVKKPGTNDYRPVQDLREVNKRVEDIHPTVPNPYNLLSGLPPSHQWYTVLDLKDAFFCLRLHPTSQPLFAFEWRDPGMGISGQLTWTRLPQGFKNSPTLFNEALHRDLADFRIQHPDLILLQYVDDILLAATSELDCQQGTRALLQTLGDLGYRASAKKAQICQKQVKYLGYLLREGQRWLTEARKETVMGQPVPKTPRQLREFLGKAGFCRLFIPGFAEMAAPLYPLTKPGTLFSWGPDQQKAYQEIKQALLTAPALGLPDLTKPFELFVDEKQGYAKGVLTQKLGPWRRPVAYLSKKLDPVAAGWPPCLRMVAAIAVLTKDAGKLTMGQPLVILAPHAVEALVKQPPDRWLSNARMTHYQAMLLDTDRVQFGPVVALNPATLLPLPEEGAPHDCLEILAETHGTRPDLTDQPIPDADHTWYTDGSSFLQEGQRKAGAAVTTETEVIWAGALPAGTSAQRAELIALTQALKMAEGKRLNVYTDSRYAFATAHIHGEIYRRRGWLTSEGREIKNKSEILALLKALFLPKRLSIIHCLGHQKGDSAEARGNRLADQAAREAAIKTPPDTSTLLIAGKRTADGSEFEKRTADGSEFESPKKKAKVE

SEQ ID NO: 7358 - protein, 2094 aa, synthetic construct; identical to SEQ ID NO: 7357

SEQ ID NO: 7359 - protein, 2094 aa, synthetic construct
MPAAKRVKLDGGDKKYSIGLDIGTNSVGWAVITDEYKVPSKKFKVLGNTDRHSIKKNLIGALLFDSGETAEATRLKRTARRRYTRRKNRICYLQEIFSNEMAKVDDSFFHRLEESFLVEEDKKHERHPIFGNIVDEVAYHEKYPTIYHLRKKLVDSTDKADLRLIYLALAHMIKFRGHFLIEGDLNPDNSDVDKLFIQLVQTYNQLFEENPINASGVDAKAILSARLSKSRRLENLIAQLPGEKKNGLFGNLIALSLGLTPNFKSNFDLAEDAKLQLSKDTYDDDLDNLLAQIGDQYADLFLAAKNLSDAILLSDILRVNTEITKAPLSASMIKRYDEHHQDLTLLKALVRQQLPEKYKEIFFDQSKNGYAGYIDGGASQEEFYKFIKPILEKMDGTEELLVKLNREDLLRKQRTFDNGSIPHQIHLGELHAILRRQEDFYPFLKDNREKIEKILTFRIPYYVGPLARGNSRFAWMTRKSEETITPWNFEEVVDKGASAQSFIERMTNFDKNLPNEKVLPKHSLLYEYFTVYNELTKVKYVTEGMRKPAFLSGEQKKAIVDLLFKTNRKVTVKQLKEDYFKKIECFDSVEISGVEDRFNASLGTYHDLLKIIKDKDFLDNEENEDILEDIVLTLTLFEDREMIEERLKTYAHLFDDKVMKQLKRRRYTGWGRLSRKLINGIRDKQSGKTILDFLKSDGFANRNFMQLIHDDSLTFKEDIQKAQVSGQGDSLHEHIANLAGSPAIKKGILQTVKVVDELVKVMGRHKPENIVIEMARENQTTQKGQKNSRERMKRIEEGIKELGSQILKEHPVENTQLQNEKLYLYYLQNGRDMYVDQELDINRLSDYDVDHIVPQSFLKDDSIDNKVLTRSDKARGKSDNVPSEEVVKKMKNYWRQLLNAKLITQRKFDNLTKAERGGLSELDKAGFIKRQLVETRQITKHVAQILDSRMNTKYDENDKLIREVKVITLKSKLVSDFRKDFQFYKVREINNYHHAHDAYLNAVVGTALIKKYPKLESEFVYGDYKVYDVRKMIAKSEQEIGKATAKYFFYSNIMNFFKTEITLANGEIRKRPLIETNGETGEIVWDKGRDFATVRKVLSMPQVNIVKKTEVQTGGFSKESILPKRNSDKLIARKKDWDPKKYGGFDSPTVAYSVLVVAKVEKGKSKKLKSVKELLGITIMERSSFEKNPIDFLEAKGYKEVKKDLIIKLPKYSLFELENGRKRMLASAGELQKGNELALPSKYVNFLYLASHYEKLKGSPEDNEQKQLFVEQHKHYLDEIIEQISEFSKRVILADANLDKVLSAYNKHRDKPIREQAENIIHLFTLTNLGAPAAFKYFDTTIDRKRYTSTKEVLDATLIHQSITGLYETRIDLSQLGGDGGGGGGSSPAPGGTLNIEDEYRLHETSKEPDVSLGSTWLSDFPQAWAETGGMGLAVRQAPLIIPLKATSTPVSIKQYPMSQEARLGIKPHIQRLLDQGILVPCQSPWNTPLLPVKKPGTNDYRPVQDLREVNKRVEDIHPTVPNPYNLLSGLPPSHQWYTVLDLKDAFFCLRLHPTSQPLFAFEWRDPEMGISGQLTWTRLPQGFKNSPTLFNEALHRDLAGFRIQHPDLILLQYVDDLLLAATSELDCQQGTRALLQTLGDLGYRASAKKAQICQKQVKYLGYLLKEGQRWLTEARKETVMGQPIPKTPRQLREFLGTAGFCRLWIPGFAEMAAPLYPLTKPGTLFNWGPDQQKAFQEIKQALLTAPALGLPDLTKPFELFVDEKQGYAKGVLTQKLGPWRRPVAYLSKKLDPVAAGWPPCLRMVAAIAVLTKDAGKLTMGQPLVILAPHAVEALVKQPPDRWLSNARMTHYQALLLDTDRVQFGPVVALNPATLLPLPEEGLQHDCLDILAEAHGTRSDLMDQPLPDADHTWYTDGSSFLQEGQRKAGAAVTTETEVIWARALPAGTSAQRAELIALTQALKMAEGKKLNVYTDSRYAFATAHIHGEIYRRRGWLTSEGKEIKNKDEILALLKALFLPKRLSIIHCPGHQKGNSAEARGNRMADQAAREVATRETPETSTLLAGKRTADGSEFEKRTADGSEFESPKKKAKVE

SEQ ID NO: 7360 - protein, 2094 aa, synthetic construct
MPAAKRVKLDGGDKKYSIGLDIGTNSVGWAVITDEYKVPSKKFKVLGNTDRHSIKKNLIGALLFDSGETAEATRLKRTARRRYTRRKNRICYLQEIFSNEMAKVDDSFFHRLEESFLVEEDKKHERHPIFGNIVDEVAYHEKYPTIYHLRKKLVDSTDKADLRLIYLALAHMIKFRGHFLIEGDLNPDNSDVDKLFIQLVQTYNQLFEENPINASGVDAKAILSARLSKSRRLENLIAQLPGEKKNGLFGNLIALSLGLTPNFKSNFDLAEDAKLQLSKDTYDDDLDNLLAQIGDQYADLFLAAKNLSDAILLSDILRVNTEITKAPLSASMIKRYDEHHQDLTLLKALVRQQLPEKYKEIFFDQSKNGYAGYIDGGASQEEFYKFIKPILEKMDGTEELLVKLNREDLLRKQRTFDNGSIPHQIHLGELHAILRRQEDFYPFLKDNREKIEKILTFRIPYYVGPLARGNSRFAWMTRKSEETITPWNFEEVVDKGASAQSFIERMTNFDKNLPNEKVLPKHSLLYEYFTVYNELTKVKYVTEGMRKPAFLSGEQKKAIVDLLFKTNRKVTVKQLKEDYFKKIECFDSVEISGVEDRFNASLGTYHDLLKIIKDKDFLDNEENEDILEDIVLTLTLFEDREMIEERLKTYAHLFDDKVMKQLKRRRYTGWGRLSRKLINGIRDKQSGKTILDFLKSDGFANRNFMQLIHDDSLTFKEDIQKAQVSGQGDSLHEHIANLAGSPAIKKGILQTVKVVDELVKVMGRHKPENIVIEMARENQTTQKGQKNSRERMKRIEEGIKELGSQILKEHPVENTQLQNEKLYLYYLQNGRDMYVDQELDINRLSDYDVDHIVPQSFLKDDSIDNKVLTRSDKARGKSDNVPSEEVVKKMKNYWRQLLNAKLITQRKFDNLTKAERGGLSELDKAGFIKRQLVETRQITKHVAQILDSRMNTKYDENDKLIREVKVITLKSKLVSDFRKDFQFYKVREINNYHHAHDAYLNAVVGTALIKKYPKLESEFVYGDYKVYDVRKMIAKSEQEIGKATAKYFFYSNIMNFFKTEITLANGEIRKRPLIETNGETGEIVWDKGRDFATVRKVLSMPQVNIVKKTEVQTGGFSKESILPKRNSDKLIARKKDWDPKKYGGFDSPTVAYSVLVVAKVEKGKSKKLKSVKELLGITIMERSSFEKNPIDFLEAKGYKEVKKDLIIKLPKYSLFELENGRKRMLASAGELQKGNELALPSKYVNFLYLASHYEKLKGSPEDNEQKQLFVEQHKHYLDEIIEQISEFSKRVILADANLDKVLSAYNKHRDKPIREQAENIIHLFTLTNLGAPAAFKYFDTTIDRKRYTSTKEVLDATLIHQSITGLYETRIDLSQLGGDGGGGGGSSPAPGGTLNIEDEYRLHETSKGPDVPLGSTWLSDFPQAWAETGGMGLAVRQAPLIIPLKATSTPVSIKQYPMSQEARLGIKPHIQRLLDQGILVPCQSPWNTPLLPVKKPGTNDYRPVQDLREVNKRVEDIHPTVPNPYNLLSGLPPSHQWYTVLDLKDAFFCLRLHPTSQSLFAFEWRDPEMGISGQLTWTRLPQGFKNSPTLFNEALHRDLADFRIQHPDLILLQYVDDLLLAATSELDCQQGTRALLQTLGDLGYRASAKKAQICQKQVKYLGYLLKEGQRWLTEARKETVMGQPTPKTPRQLREFLGTAGFCRLWIPGFAEMAAPLYPLTKPGTLFEWGPDQQKAYQEIKQALLTAPALGLPDLTKPFELFVDEKQGYAKGVLTQKLGPWRRPVAYLSKKLDPVAAGWPPCLRMVAAIAVLTKDAGKLTMGQPLVILAPHAVEALVKQPPDRWLSNARMTHYQALLLDTDRVQFGPIVALNPATLLPLPEEGLQHDCLDILAEAHGTRPDLTDQPLPDADHTWYTDGSSFLQEGQRKAGAAVTTETEVVWAKALPAGTSAQRAELIALTQALKMAEGKKLNVYTDSRYAFATAHIHGEIYRRRGWLTSEGKEIKNKDEILALLKALFLPKRLSIIHCPGHQKGNRAEARGNRMADQAAREVATRETPETSTLLAGKRTADGSEFEKRTADGSEFESPKKKAKVE

SEQ ID NO: 7361 - protein, 2088 aa, synthetic construct
MPAAKRVKLDGGDKKYSIGLDIGTNSVGWAVITDEYKVPSKKFKVLGNTDRHSIKKNLIGALLFDSGETAEATRLKRTARRRYTRRKNRICYLQEIFSNEMAKVDDSFFHRLEESFLVEEDKKHERHPIFGNIVDEVAYHEKYPTIYHLRKKLVDSTDKADLRLIYLALAHMIKFRGHFLIEGDLNPDNSDVDKLFIQLVQTYNQLFEENPINASGVDAKAILSARLSKSRRLENLIAQLPGEKKNGLFGNLIALSLGLTPNFKSNFDLAEDAKLQLSKDTYDDDLDNLLAQIGDQYADLFLAAKNLSDAILLSDILRVNTEITKAPLSASMIKRYDEHHQDLTLLKALVRQQLPEKYKEIFFDQSKNGYAGYIDGGASQEEFYKFIKPILEKMDGTEELLVKLNREDLLRKQRTFDNGSIPHQIHLGELHAILRRQEDFYPFLKDNREKIEKILTFRIPYYVGPLARGNSRFAWMTRKSEETITPWNFEEVVDKGASAQSFIERMTNFDKNLPNEKVLPKHSLLYEYFTVYNELTKVKYVTEGMRKPAFLSGEQKKAIVDLLFKTNRKVTVKQLKEDYFKKIECFDSVEISGVEDRFNASLGTYHDLLKIIKDKDFLDNEENEDILEDIVLTLTLFEDREMIEERLKTYAHLFDDKVMKQLKRRRYTGWGRLSRKLINGIRDKQSGKTILDFLKSDGFANRNFMQLIHDDSLTFKEDIQKAQVSGQGDSLHEHIANLAGSPAIKKGILQTVKVVDELVKVMGRHKPENIVIEMARENQTTQKGQKNSRERMKRIEEGIKELGSQILKEHPVENTQLQNEKLYLYYLQNGRDMYVDQELDINRLSDYDVDHIVPQSFLKDDSIDNKVLTRSDKARGKSDNVPSEEVVKKMKNYWRQLLNAKLITQRKFDNLTKAERGGLSELDKAGFIKRQLVETRQITKHVAQILDSRMNTKYDENDKLIREVKVITLKSKLVSDFRKDFQFYKVREINNYHHAHDAYLNAVVGTALIKKYPKLESEFVYGDYKVYDVRKMIAKSEQEIGKATAKYFFYSNIMNFFKTEITLANGEIRKRPLIETNGETGEIVWDKGRDFATVRKVLSMPQVNIVKKTEVQTGGFSKESILPKRNSDKLIARKKDWDPKKYGGFDSPTVAYSVLVVAKVEKGKSKKLKSVKELLGITIMERSSFEKNPIDFLEAKGYKEVKKDLIIKLPKYSLFELENGRKRMLASAGELQKGNELALPSKYVNFLYLASHYEKLKGSPEDNEQKQLFVEQHKHYLDEIIEQISEFSKRVILADANLDKVLSAYNKHRDKPIREQAENIIHLFTLTNLGAPAAFKYFDTTIDRKRYTSTKEVLDATLIHQSITGLYETRIDLSQLGGDGGGGGGSSPAPGGTLQLDDEYRLYSPLVKPDQNIQFWLEQFPQAWAETAGMGLAKQVPPQVIQLKASATPVSVRQYPLSKEAQEGIRPHVQRLIQQGILVPVQSPWNTPLLPVRKPGTNDYRPVQDLREVNKRVQDIHPTVPNPYNLLCALPPQRSWYTVLDLKDAFFCLRLHPTSQPLFAFEWRDPGTGRTGQLTWTRLPQGFKNSPTIFDEALHRDLANFRIQHPQVTLLQYVDDLLLAGATKQDCLEGTKALLLELSDLGYRASAKKAQICRREVTYLGYSLRDGQRWLTEARKKTVVQIPAPTTAKQVREFLGTAGFCRLWIPGFATLAAPLYPLTKEKGEFSWAPEHQKAFDAIKKALLSAPALALPDVTKPFTLYVDERKGVARGVLTQTLGPWRRPVAYLSKKLDPVASGWPVCLKAIAAVAILVKDADKLTLGQNITVIAPHALENIVRQPPDRWMTNARMTHYQSLLLTERVTFAPPAALNPATLLPEETDEPVTHDCHQLLIEETGVRKDLTDIPLTGEVLTWFTDGSSYVVEGKRMAGAAVVDGTRTIWASSLPEGTSAQKAELMALTQALRLAEGKSINIYTDSRYAFATAHVHGAIYKQRGLLTSAGREIKNKEEILSLLEALHLPKRLAIIHCPGHQKAKDPISRGNQMADRVAKQAAQGVNLLAGKRTADGSEFEKRTADGSEFESPKKKAKVE

SEQ ID NO: 7362 - protein, 2085 aa, synthetic construct
MPAAKRVKLDGGDKKYSIGLDIGTNSVGWAVITDEYKVPSKKFKVLGNTDRHSIKKNLIGALLFDSGETAEATRLKRTARRRYTRRKNRICYLQEIFSNEMAKVDDSFFHRLEESFLVEEDKKHERHPIFGNIVDEVAYHEKYPTIYHLRKKLVDSTDKADLRLIYLALAHMIKFRGHFLIEGDLNPDNSDVDKLFIQLVQTYNQLFEENPINASGVDAKAILSARLSKSRRLENLIAQLPGEKKNGLFGNLIALSLGLTPNFKSNFDLAEDAKLQLSKDTYDDDLDNLLAQIGDQYADLFLAAKNLSDAILLSDILRVNTEITKAPLSASMIKRYDEHHQDLTLLKALVRQQLPEKYKEIFFDQSKNGYAGYIDGGASQEEFYKFIKPILEKMDGTEELLVKLNREDLLRKQRTFDNGSIPHQIHLGELHAILRRQEDFYPFLKDNREKIEKILTFRIPYYVGPLARGNSRFAWMTRKSEETITPWNFEEVVDKGASAQSFIERMTNFDKNLPNEKVLPKHSLLYEYFTVYNELTKVKYVTEGMRKPAFLSGEQKKAIVDLLFKTNRKVTVKQLKEDYFKKIECFDSVEISGVEDRFNASLGTYHDLLKIIKDKDFLDNEENEDILEDIVLTLTLFEDREMIEERLKTYAHLFDDKVMKQLKRRRYTGWGRLSRKLINGIRDKQSGKTILDFLKSDGFANRNFMQLIHDDSLTFKEDIQKAQVSGQGDSLHEHIANLAGSPAIKKGILQTVKVVDELVKVMGRHKPENIVIEMARENQTTQKGQKNSRERMKRIEEGIKELGSQILKEHPVENTQLQNEKLYLYYLQNGRDMYVDQELDINRLSDYDVDHIVPQSFLKDDSIDNKVLTRSDKARGKSDNVPSEEVVKKMKNYWRQLLNAKLITQRKFDNLTKAERGGLSELDKAGFIKRQLVETRQITKHVAQILDSRMNTKYDENDKLIREVKVITLKSKLVSDFRKDFQFYKVREINNYHHAHDAYLNAVVGTALIKKYPKLESEFVYGDYKVYDVRKMIAKSEQEIGKATAKYFFYSNIMNFFKTEITLANGEIRKRPLIETNGETGEIVWDKGRDFATVRKVLSMPQVNIVKKTEVQTGGFSKESILPKRNSDKLIARKKDWDPKKYGGFDSPTVAYSVLVVAKVEKGKSKKLKSVKELLGITIMERSSFEKNPIDFLEAKGYKEVKKDLIIKLPKYSLFELENGRKRMLASAGELQKGNELALPSKYVNFLYLASHYEKLKGSPEDNEQKQLFVEQHKHYLDEIIEQISEFSKRVILADANLDKVLSAYNKHRDKPIREQAENIIHLFTLTNLGAPAAFKYFDTTIDRKRYTSTKEVLDATLIHQSITGLYETRIDLSQLGGDGGGGGGSSPAPGGIPWLMKKPLQLTTLVPLQEYEERLLKQTMLTGSYKEKLQSLFLKYDALWQHWENQVGHRRIKPHHIATGTVNPRPQKQYPINPKAKASIQTVINDLLKQGVLIQQNSIMNTPVYPVPKPDGKWRMVLDYREVNKTIPLIAAQNQHSAGILSSIFRGKYKTTLDLSNGFWAHSITPESYWLTAFTWLGQQYCWTRLPQGFLNSPALFNADVVDLLKEVPNVQVYVDDIYISHDDPREHLEQLEKVFSLLLNAGYVVSLKKSEIAQHEVEFLGFNITKEGRGLTETFKQKLLNITPPRDLKQLQSILGKLNFARNFIPNFSELVKPLYNIIATAPGKYITWTTDNSQQLQNIISMLNSAENLEERNPEVRLIMKVNTSPSAGYIRFYNEFAKRPIMYLNYVYTKAEVKFTNTEKLLTTIHKGLIKALDLGMGQEILVYSPIVSMTKIQKTPLPERKALPIRWITWMSYLEDPRIQFHYDKTLPELQQVPTVTDDIIAKIKHPSEFSMVFYTDGSAIKHPNVNKSHNAGMGIAQVQFKPEFTVINTWSIPLGDHTAQLAEVAAVEFACKKALKIDGPVLIVTDSFYVAESVNKELPYWQSNGFFNNKKKPLKHVSKWKSIADCIQLKPDIIIIHEKGHQPTASTFHTEGNNLADKLATQGSYVVNAGKRTADGSEFEKRTADGSEFESPKKKAKVE

SEQ ID NO: 7363 - protein, 2174 aa, synthetic construct
MPAAKRVKLDGGDKKYSIGLDIGTNSVGWAVITDEYKVPSKKFKVLGNTDRHSIKKNLIGALLFDSGETAEATRLKRTARRRYTRRKNRICYLQEIFSNEMAKVDDSFFHRLEESFLVEEDKKHERHPIFGNIVDEVAYHEKYPTIYHLRKKLVDSTDKADLRLIYLALAHMIKFRGHFLIEGDLNPDNSDVDKLFIQLVQTYNQLFEENPINASGVDAKAILSARLSKSRRLENLIAQLPGEKKNGLFGNLIALSLGLTPNFKSNFDLAEDAKLQLSKDTYDDDLDNLLAQIGDQYADLFLAAKNLSDAILLSDILRVNTEITKAPLSASMIKRYDEHHQDLTLLKALVRQQLPEKYKEIFFDQSKNGYAGYIDGGASQEEFYKFIKPILEKMDGTEELLVKLNREDLLRKQRTFDNGSIPHQIHLGELHAILRRQEDFYPFLKDNREKIEKILTFRIPYYVGPLARGNSRFAWMTRKSEETITPWNFEEVVDKGASAQSFIERMTNFDKNLPNEKVLPKHSLLYEYFTVYNELTKVKYVTEGMRKPAFLSGEQKKAIVDLLFKTNRKVTVKQLKEDYFKKIECFDSVEISGVEDRFNASLGTYHDLLKIIKDKDFLDNEENEDILEDIVLTLTLFEDREMIEERLKTYAHLFDDKVMKQLKRRRYTGWGRLSRKLINGIRDKQSGKTILDFLKSDGFANRNFMQLIHDDSLTFKEDIQKAQVSGQGDSLHEHIANLAGSPAIKKGILQTVKVVDELVKVMGRHKPENIVIEMARENQTTQKGQKNSRERMKRIEEGIKELGSQILKEHPVENTQLQNEKLYLYYLQNGRDMYVDQELDINRLSDYDVDHIVPQSFLKDDSIDNKVLTRSDKARGKSDNVPSEEVVKKMKNYWRQLLNAKLITQRKFDNLTKAERGGLSELDKAGFIKRQLVETRQITKHVAQILDSRMNTKYDENDKLIREVKVITLKSKLVSDFRKDFQFYKVREINNYHHAHDAYLNAVVGTALIKKYPKLESEFVYGDYKVYDVRKMIAKSEQEIGKATAKYFFYSNIMNFFKTEITLANGEIRKRPLIETNGETGEIVWDKGRDFATVRKVLSMPQVNIVKKTEVQTGGFSKESILPKRNSDKLIARKKDWDPKKYGGFDSPTVAYSVLVVAKVEKGKSKKLKSVKELLGITIMERSSFEKNPIDFLEAKGYKEVKKDLIIKLPKYSLFELENGRKRMLASAGELQKGNELALPSKYVNFLYLASHYEKLKGSPEDNEQKQLFVEQHKHYLDEIIEQISEFSKRVILADANLDKVLSAYNKHRDKPIREQAENIIHLFTLTNLGAPAAFKYFDTTIDRKRYTSTKEVLDATLIHQSITGLYETRIDLSQLGGDGGGGGGSSPAPGGMNPLQLLQPLPAEVKGTKLLAHWNSGATITCIPESFLEDEQPIKQTLIKTIHGEKQQNVYYLTFKVKGRKVEAEVIASPYEYILLSPTDVPWLTQQPLQLTILVPLQEYQDRILNKTALPEEQKQQLKALFTKYDNLWQHWENQVGHRKIRPHNIATGDYPPRPQKQYPINPKAKPSIQIVIDDLLKQGVLTPQNSTMNTPVYPVPKPDGRWRMVLDYREVNKTIPLTAAQNQHSAGILATIVRQKYKTTLDLANGFWAHPITPDSYWLTAFTWQGKQYCWTRLPQGFLNSPALFTADAVDLLKEVPNVQVYVDDIYLSHDNPHEHIQQLEKVFQILLQAGYVVSLKKSEIGQRTVEFLGFNITKEGRGLTDTFKTKLLNVTPPKDLKQLQSILGLLNFARNFIPNFAELVQTLYNLIASSKGKYIEWTEDNTKQLNKVIEALNTASNLEERLPDQRLVIKVNTSPSAGYVRYYNESGKKPIMYLNYVFSKAELKFSMLEKLLTTMHKALIKAMDLAMGQEILVYSPIVSMTKIQKTPLPERKALPIRWITWMTYLEDPRIQFHYDKTLPELKHIPDVYTSSIPPLKHPSQYEGVFCTDGSAIKSPDPTKSNNAGMGIVHAIYNPEYKILNQWSIPLGHHTAQMAEIAAVEFACKKALKVPGPVLVITDSFYVAESANKELPYWKSNGFVNNKKEPLKHISKWKSIAECLSIKPDITIQHEKGHQPINTSIHTEGNALADKLATQGSYVVNAGKRTADGSEFEKRTADGSEFESPKKKAKVE

SEQ ID NO: 7364 - protein, 2093 aa, synthetic construct
MPAAKRVKLDGGDKKYSIGLDIGTNSVGWAVITDEYKVPSKKFKVLGNTDRHSIKKNLIGALLFDSGETAEATRLKRTARRRYTRRKNRICYLQEIFSNEMAKVDDSFFHRLEESFLVEEDKKHERHPIFGNIVDEVAYHEKYPTIYHLRKKLVDSTDKADLRLIYLALAHMIKFRGHFLIEGDLNPDNSDVDKLFIQLVQTYNQLFEENPINASGVDAKAILSARLSKSRRLENLIAQLPGEKKNGLFGNLIALSLGLTPNFKSNFDLAEDAKLQLSKDTYDDDLDNLLAQIGDQYADLFLAAKNLSDAILLSDILRVNTEITKAPLSASMIKRYDEHHQDLTLLKALVRQQLPEKYKEIFFDQSKNGYAGYIDGGASQEEFYKFIKPILEKMDGTEELLVKLNREDLLRKQRTFDNGSIPHQIHLGELHAILRRQEDFYPFLKDNREKIEKILTFRIPYYVGPLARGNSRFAWMTRKSEETITPWNFEEVVDKGASAQSFIERMTNFDKNLPNEKVLPKHSLLYEYFTVYNELTKVKYVTEGMRKPAFLSGEQKKAIVDLLFKTNRKVTVKQLKEDYFKKIECFDSVEISGVEDRFNASLGTYHDLLKIIKDKDFLDNEENEDILEDIVLTLTLFEDREMIEERLKTYAHLFDDKVMKQLKRRRYTGWGRLSRKLINGIRDKQSGKTILDFLKSDGFANRNFMQLIHDDSLTFKEDIQKAQVSGQGDSLHEHIANLAGSPAIKKGILQTVKVVDELVKVMGRHKPENIVIEMARENQTTQKGQKNSRERMKRIEEGIKELGSQILKEHPVENTQLQNEKLYLYYLQNGRDMYVDQELDINRLSDYDVDHIVPQSFLKDDSIDNKVLTRSDKARGKSDNVPSEEVVKKMKNYWRQLLNAKLITQRKFDNLTKAERGGLSELDKAGFIKRQLVETRQITKHVAQILDSRMNTKYDENDKLIREVKVITLKSKLVSDFRKDFQFYKVREINNYHHAHDAYLNAVVGTALIKKYPKLESEFVYGDYKVYDVRKMIAKSEQEIGKATAKYFFYSNIMNFFKTEITLANGEIRKRPLIETNGETGEIVWDKGRDFATVRKVLSMPQVNIVKKTEVQTGGFSKESILPKRNSDKLIARKKDWDPKKYGGFDSPTVAYSVLVVAKVEKGKSKKLKSVKELLGITIMERSSFEKNPIDFLEAKGYKEVKKDLIIKLPKYSLFELENGRKRMLASAGELQKGNELALPSKYVNFLYLASHYEKLKGSPEDNEQKQLFVEQHKHYLDEIIEQISEFSKRVILADANLDKVLSAYNKHRDKPIREQAENIIHLFTLTNLGAPAAFKYFDTTIDRKRYTSTKEVLDATLIHQSITGLYETRIDLSQLGGDGGGGGPAPGSSGGTLQLEEEYRLFEPESTQKQEMDIWLKNFPQAWAETGGMGTAHCQAPVLIQLKATATPISIRQYPMPHEAYQGIKPHIRRMLDQGILKPCQSPWNTPLLPVKKPGTEDYRPVQDLREVNKRVEDIHPTVPNPYNLLSTLPPSHPWYTVLDLKDAFFCLRLHSESQLLFAFEWRDPEIGLSGQLTWTRLPQGFKNSPTLFNEALHSDLADFRVRYPALVLLQYVDDLLLAAATRTECLEGTKALLETLGNKGYRASAKKAQICLQEVTYLGYSLKDGQRWLTKARKEAILSIPVPKNSRQVREFLGTAGYCRLWIPGFAELAAPLYPLTRPGTLFQWGTEQQLAFEDIKKALLSSPALGLPDITKPFELFIDENSGFAKGVLVQKLGPWKRPVAYLSKKLDTVASGWPPCLRMVAAIAILVKDAGKLTLGQPLTILTSHPVEALVRQPPNKWLSNARMTHYQAMLLDAERVHFGPTVSLNPATLLPLPSGGNHHDCLQILAETHGTRPDLTDQPLPDADLTWYTDGSSFIRNGEREAGAAVTTESEVIWAAPLPPGTSAQRAELIALTQALKMAEGKKLTVYTDSRYAFATTHVHGEIYRRRGWLTSEGKEIKNKNEILALLEALFLPKRLSIIHCPGHQKGDSPQAKGNRLADDTAKKAATETHSSLTVLPAGKRTADGSEFEKRTADGSEFESPKKKAKVE

SEQ ID NO: 7365 - protein, 2093 aa, synthetic construct
MPAAKRVKLDGGDKKYSIGLDIGTNSVGWAVITDEYKVPSKKFKVLGNTDRHSIKKNLIGALLFDSGETAEATRLKRTARRRYTRRKNRICYLQEIFSNEMAKVDDSFFHRLEESFLVEEDKKHERHPIFGNIVDEVAYHEKYPTIYHLRKKLVDSTDKADLRLIYLALAHMIKFRGHFLIEGDLNPDNSDVDKLFIQLVQTYNQLFEENPINASGVDAKAILSARLSKSRRLENLIAQLPGEKKNGLFGNLIALSLGLTPNFKSNFDLAEDAKLQLSKDTYDDDLDNLLAQIGDQYADLFLAAKNLSDAILLSDILRVNTEITKAPLSASMIKRYDEHHQDLTLLKALVRQQLPEKYKEIFFDQSKNGYAGYIDGGASQEEFYKFIKPILEKMDGTEELLVKLNREDLLRKQRTFDNGSIPHQIHLGELHAILRRQEDFYPFLKDNREKIEKILTFRIPYYVGPLARGNSRFAWMTRKSEETITPWNFEEVVDKGASAQSFIERMTNFDKNLPNEKVLPKHSLLYEYFTVYNELTKVKYVTEGMRKPAFLSGEQKKAIVDLLFKTNRKVTVKQLKEDYFKKIECFDSVEISGVEDRFNASLGTYHDLLKIIKDKDFLDNEENEDILEDIVLTLTLFEDREMIEERLKTYAHLFDDKVMKQLKRRRYTGWGRLSRKLINGIRDKQSGKTILDFLKSDGFANRNFMQLIHDDSLTFKEDIQKAQVSGQGDSLHEHIANLAGSPAIKKGILQTVKVVDELVKVMGRHKPENIVIEMARENQTTQKGQKNSRERMKRIEEGIKELGSQILKEHPVENTQLQNEKLYLYYLQNGRDMYVDQELDINRLSDYDVDHIVPQSFLKDDSIDNKVLTRSDKARGKSDNVPSEEVVKKMKNYWRQLLNAKLITQRKFDNLTKAERGGLSELDKAGFIKRQLVETRQITKHVAQILDSRMNTKYDENDKLIREVKVITLKSKLVSDFRKDFQFYKVREINNYHHAHDAYLNAVVGTALIKKYPKLESEFVYGDYKVYDVRKMIAKSEQEIGKATAKYFFYSNIMNFFKTEITLANGEIRKRPLIETNGETGEIVWDKGRDFATVRKVLSMPQVNIVKKTEVQTGGFSKESILPKRNSDKLIARKKDWDPKKYGGFDSPTVAYSVLVVAKVEKGKSKKLKSVKELLGITIMERSSFEKNPIDFLEAKGYKEVKKDLIIKLPKYSLFELENGRKRMLASAGELQKGNELALPSKYVNFLYLASHYEKLKGSPEDNEQKQLFVEQHKHYLDEIIEQISEFSKRVILADANLDKVLSAYNKHRDKPIREQAENIIHLFTLTNLGAPAAFKYFDTTIDRKRYTSTKEVLDATLIHQSITGLYETRIDLSQLGGDGGGGGPAPGSSGGTLQLEEEYRLFEPESTQKQEMDIWLKNFPQAWAETGGMGTAHCQAPVLIQLKATATPISIRQYPMPHEAYQGIKPHIRRMLDQGILKPCQSPWNTPLLPVKKPGTEDYRPVQDLREVNKRVEDIHPTVPNPYNLLSTLPPSHPWYTVLDLKDAFFCLRLHSESQLLFAFEWRDPEIGLSGQLTWTRLPQGFKNSPTLFNEALHSDLADFRVRYPALVLLQYVDDLLLAAATRTECLEGTKALLETLGNKGYRASAKKAQICLQEVTYLGYSLKDGQRWLTKARKEAILSIPVPKNSRQVREFLGKAGYCRLFIPGFAELAAPLYPLTRPGTLFQWGTEQQLAFEDIKKALLSSPALGLPDITKPFELFIDENSGFAKGVLVQKLGPWKRPVAYLSKKLDTVASGWPPCLRMVAAIAILVKDAGKLTLGQPLTILTSHPVEALVRQPPNKWLSNARMTHYQAMLLDAERVHFGPTVSLNPATLLPLPSGGNHHDCLQILAETHGTRPDLTDQPLPDADLTWYTDGSSFIRNGEREAGAAVTTESEVIWAAPLPPGTSAQRAELIALTQALKMAEGKKLTVYTDSRYAFATTHVHGEIYRRRGWLTSEGKEIKNKNEILALLEALFLPKRLSIIHCPGHQKGDSPQAKGNRLADDTAKKAATETHSSLTVLPAGKRTADGSEFEKRTADGSEFESPKKKAKVE

SEQ ID NO: 7366 - protein, 2174 aa, synthetic construct
MPAAKRVKLDGGDKKYSIGLDIGTNSVGWAVITDEYKVPSKKFKVLGNTDRHSIKKNLIGALLFDSGETAEATRLKRTARRRYTRRKNRICYLQEIFSNEMAKVDDSFFHRLEESFLVEEDKKHERHPIFGNIVDEVAYHEKYPTIYHLRKKLVDSTDKADLRLIYLALAHMIKFRGHFLIEGDLNPDNSDVDKLFIQLVQTYNQLFEENPINASGVDAKAILSARLSKSRRLENLIAQLPGEKKNGLFGNLIALSLGLTPNFKSNFDLAEDAKLQLSKDTYDDDLDNLLAQIGDQYADLFLAAKNLSDAILLSDILRVNTEITKAPLSASMIKRYDEHHQDLTLLKALVRQQLPEKYKEIFFDQSKNGYAGYIDGGASQEEFYKFIKPILEKMDGTEELLVKLNREDLLRKQRTFDNGSIPHQIHLGELHAILRRQEDFYPFLKDNREKIEKILTFRIPYYVGPLARGNSRFAWMTRKSEETITPWNFEEVVDKGASAQSFIERMTNFDKNLPNEKVLPKHSLLYEYFTVYNELTKVKYVTEGMRKPAFLSGEQKKAIVDLLFKTNRKVTVKQLKEDYFKKIECFDSVEISGVEDRFNASLGTYHDLLKIIKDKDFLDNEENEDILEDIVLTLTLFEDREMIEERLKTYAHLFDDKVMKQLKRRRYTGWGRLSRKLINGIRDKQSGKTILDFLKSDGFANRNFMQLIHDDSLTFKEDIQKAQVSGQGDSLHEHIANLAGSPAIKKGILQTVKVVDELVKVMGRHKPENIVIEMARENQTTQKGQKNSRERMKRIEEGIKELGSQILKEHPVENTQLQNEKLYLYYLQNGRDMYVDQELDINRLSDYDVDHIVPQSFLKDDSIDNKVLTRSDKARGKSDNVPSEEVVKKMKNYWRQLLNAKLITQRKFDNLTKAERGGLSELDKAGFIKRQLVETRQITKHVAQILDSRMNTKYDENDKLIREVKVITLKSKLVSDFRKDFQFYKVREINNYHHAHDAYLNAVVGTALIKKYPKLESEFVYGDYKVYDVRKMIAKSEQEIGKATAKYFFYSNIMNFFKTEITLANGEIRKRPLIETNGETGEIVWDKGRDFATVRKVLSMPQVNIVKKTEVQTGGFSKESILPKRNSDKLIARKKDWDPKKYGGFDSPTVAYSVLVVAKVEKGKSKKLKSVKELLGITIMERSSFEKNPIDFLEAKGYKEVKKDLIIKLPKYSLFELENGRKRMLASAGELQKGNELALPSKYVNFLYLASHYEKLKGSPEDNEQKQLFVEQHKHYLDEIIEQISEFSKRVILADANLDKVLSAYNKHRDKPIREQAENIIHLFTLTNLGAPAAFKYFDTTIDRKRYTSTKEVLDATLIHQSITGLYETRIDLSQLGGDGGGGGPAPGSSGGMNPLQLLQPLPAEIKGTKLLAHWNSGATITCIPESFLEDEQPIKKTLIKTIHGEKQQNVYYVTFKVKGRKVEAEVIASPYEYILLSPTDVPWLTQQPLQLTILVPLQEYQEKILSKTALPEDQKQQLKTLFVKYDNLWQHWENQVGHRKIRPHNIATGDYPPRPQKQYPINPKAKPSIQIVIDDLLKQGVLTPQNSTMNTPVYPVPKPDGRWRMVLDYREVNKTIPLTAAQNQHSAGILATIVRQKYKTTLDLANGFWAHPITPESYWLTAFTWQGKQYCWTRLPQGFLNSPALFNADVVDLLKEIPNVQVYVDDIYLSHDDPKEHVQQLEKVFQILLQAGYVVSLKKSEIGQKTVEFLGFNITKEGRGLTDTFKTKLLNITPPKDLKQLQSILGLLNFARNFIPNFAELVQPLYNLIAPAKGKYIEWSEENTKQLNMVIEALNTASNLEERLPEQRLVIKVNTSPSAGYVRYYNETGKKPIMYLNYVFSKAELKFSMLEKLLTTMHKALIKAMDLAMGQEILVYSPIVSMTKIQKTPLPERKALPIRWITWMTYLEDPRIQFHYDKTLPELKHIPDVYTSSQSPVKHPSQYEGVFYTDGSAIKSPDPTKSNNAGMGIVHATYKPEYQVLNQWSIPLGNHTAQMAEIAAVEFACKKALKIPGPVLVITDSFYVAESANKELPYWKSNGFVNNKKKPLKHISKWKSIAECLSMKPDITIQHEKGISLQIPVFILKGNALADKLATQGSYVVNAGKRTADGSEFEKRTADGSEFESPKKKAKVE

SEQ ID NO: 7367 - protein, 2007 aa, synthetic construct
MPAAKRVKLDGGDKKYSIGLDIGTNSVGWAVITDEYKVPSKKFKVLGNTDRHSIKKNLIGALLFDSGETAEATRLKRTARRRYTRRKNRICYLQEIFSNEMAKVDDSFFHRLEESFLVEEDKKHERHPIFGNIVDEVAYHEKYPTIYHLRKKLVDSTDKADLRLIYLALAHMIKFRGHFLIEGDLNPDNSDVDKLFIQLVQTYNQLFEENPINASGVDAKAILSARLSKSRRLENLIAQLPGEKKNGLFGNLIALSLGLTPNFKSNFDLAEDAKLQLSKDTYDDDLDNLLAQIGDQYADLFLAAKNLSDAILLSDILRVNTEITKAPLSASMIKRYDEHHQDLTLLKALVRQQLPEKYKEIFFDQSKNGYAGYIDGGASQEEFYKFIKPILEKMDGTEELLVKLNREDLLRKQRTFDNGSIPHQIHLGELHAILRRQEDFYPFLKDNREKIEKILTFRIPYYVGPLARGNSRFAWMTRKSEETITPWNFEEVVDKGASAQSFIERMTNFDKNLPNEKVLPKHSLLYEYFTVYNELTKVKYVTEGMRKPAFLSGEQKKAIVDLLFKTNRKVTVKQLKEDYFKKIECFDSVEISGVEDRFNASLGTYHDLLKIIKDKDFLDNEENEDILEDIVLTLTLFEDREMIEERLKTYAHLFDDKVMKQLKRRRYTGWGRLSRKLINGIRDKQSGKTILDFLKSDGFANRNFMQLIHDDSLTFKEDIQKAQVSGQGDSLHEHIANLAGSPAIKKGILQTVKVVDELVKVMGRHKPENIVIEMARENQTTQKGQKNSRERMKRIEEGIKELGSQILKEHPVENTQLQNEKLYLYYLQNGRDMYVDQELDINRLSDYDVDHIVPQSFLKDDSIDNKVLTRSDKARGKSDNVPSEEVVKKMKNYWRQLLNAKLITQRKFDNLTKAERGGLSELDKAGFIKRQLVETRQITKHVAQILDSRMNTKYDENDKLIREVKVITLKSKLVSDFRKDFQFYKVREINNYHHAHDAYLNAVVGTALIKKYPKLESEFVYGDYKVYDVRKMIAKSEQEIGKATAKYFFYSNIMNFFKTEITLANGEIRKRPLIETNGETGEIVWDKGRDFATVRKVLSMPQVNIVKKTEVQTGGFSKESILPKRNSDKLIARKKDWDPKKYGGFDSPTVAYSVLVVAKVEKGKSKKLKSVKELLGITIMERSSFEKNPIDFLEAKGYKEVKKDLIIKLPKYSLFELENGRKRMLASAGELQKGNELALPSKYVNFLYLASHYEKLKGSPEDNEQKQLFVEQHKHYLDEIIEQISEFSKRVILADANLDKVLSAYNKHRDKPIREQAENIIHLFTLTNLGAPAAFKYFDTTIDRKRYTSTKEVLDATLIHQSITGLYETRIDLSQLGGDGGGGGPAPGSSGGGLEHLPPPPEVSQFPLNPERLQALTDLVSRALEAKHIEPYQGPGNNPIFPVKKPNGKWRFIHDLRATNSLTRDLASPSPGPPDLTSLPQDLPHLRTIDLTDAFFQIPLPAVFQPYFAFTLPQPNNHGPGTRYSWRVLPQGFKNSPTLFQQQLSHILAPVRKAFPNSLIIQYMDDILLASPALRELTALTDKVTNALTKEGLPMSLEKTQATPGSIHFLGQVISPDCITYETLPSIHVKSIWSLAELQSMLGELQWVSKGTPVLRSSLHQLYLALRGHRDPRDTIELTSTQVQALKTIQKALALNCRSRLVSQLPILALIILRPTGTTAVLFQTKQKWPLVWLHTPHPATSLRPWGQLLANAIITLDKYSLQHYGQICKSFHHNISNQALTYYLHTSDQSSVAILLQHSHRFHNLGAQPSGPWRSLLQVPQIFQNIDVLRPPFIISPVVIDHAPCLFSDGATSKAAFILWDKQVIHQQVLPLPSTCSAQAGELFGLLAGLQKSKPWPALNIFLDSKFLIGHLRRMAWGAFLGPSTQCDLHARLFPLLQGKTVYVHHVRSHTLLQDPISRLNEATDALMLAPLLPLAGKRTADGSEFEKRTADGSEFESPKKKAKVE

SEQ ID NO: 7368 - protein, 2125 aa, synthetic construct
MPAAKRVKLDGGDKKYSIGLDIGTNSVGWAVITDEYKVPSKKFKVLGNTDRHSIKKNLIGALLFDSGETAEATRLKRTARRRYTRRKNRICYLQEIFSNEMAKVDDSFFHRLEESFLVEEDKKHERHPIFGNIVDEVAYHEKYPTIYHLRKKLVDSTDKADLRLIYLALAHMIKFRGHFLIEGDLNPDNSDVDKLFIQLVQTYNQLFEENPINASGVDAKAILSARLSKSRRLENLIAQLPGEKKNGLFGNLIALSLGLTPNFKSNFDLAEDAKLQLSKDTYDDDLDNLLAQIGDQYADLFLAAKNLSDAILLSDILRVNTEITKAPLSASMIKRYDEHHQDLTLLKALVRQQLPEKYKEIFFDQSKNGYAGYIDGGASQEEFYKFIKPILEKMDGTEELLVKLNREDLLRKQRTFDNGSIPHQIHLGELHAILRRQEDFYPFLKDNREKIEKILTFRIPYYVGPLARGNSRFAWMTRKSEETITPWNFEEVVDKGASAQSFIERMTNFDKNLPNEKVLPKHSLLYEYFTVYNELTKVKYVTEGMRKPAFLSGEQKKAIVDLLFKTNRKVTVKQLKEDYFKKIECFDSVEISGVEDRFNASLGTYHDLLKIIKDKDFLDNEENEDILEDIVLTLTLFEDREMIEERLKTYAHLFDDKVMKQLKRRRYTGWGRLSRKLINGIRDKQSGKTILDFLKSDGFANRNFMQLIHDDSLTFKEDIQKAQVSGQGDSLHEHIANLAGSPAIKKGILQTVKVVDELVKVMGRHKPENIVIEMARENQTTQKGQKNSRERMKRIEEGIKELGSQILKEHPVENTQLQNEKLYLYYLQNGRDMYVDQELDINRLSDYDVDHIVPQSFLKDDSIDNKVLTRSDKARGKSDNVPSEEVVKKMKNYWRQLLNAKLITQRKFDNLTKAERGGLSELDKAGFIKRQLVETRQITKHVAQILDSRMNTKYDENDKLIREVKVITLKSKLVSDFRKDFQFYKVREINNYHHAHDAYLNAVVGTALIKKYPKLESEFVYGDYKVYDVRKMIAKSEQEIGKATAKYFFYSNIMNFFKTEITLANGEIRKRPLIETNGETGEIVWDKGRDFATVRKVLSMPQVNIVKKTEVQTGGFSKESILPKRNSDKLIARKKDWDPKKYGGFDSPTVAYSVLVVAKVEKGKSKKLKSVKELLGITIMERSSFEKNPIDFLEAKGYKEVKKDLIIKLPKYSLFELENGRKRMLASAGELQKGNELALPSKYVNFLYLASHYEKLKGSPEDNEQKQLFVEQHKHYLDEIIEQISEFSKRVILADANLDKVLSAYNKHRDKPIREQAENIIHLFTLTNLGAPAAFKYFDTTIDRKRYTSTKEVLDATLIHQSITGLYETRIDLSQLGGDGGGGGPAPGSSGGLLGRDLLTKLKAQIQFSTEGPQVTWEDRPAMCLVLNLEEEYRLHEKPVPPSIDPSWLQLFPMVWAEKAGMGLANQVPPVVVELKSDASPVAVRQYPMSKEAREGIRPHIQRFLDLGILVPCQSPWNTPLLPVKKPGTNDYRPVQDLREVNKRVQDIHPTVPNPYNLLSSLPPSHTWYSVLDLKDAFFCLKLHPNSQPLFAFEWRDPEKGNTGQLTWTRLPQGFKNSPTLFNEALHRDLASFRALNPQVVMLQYVDDLLVAAPTYRDCKEGTRRLLQELSKLGYRVSAKKAQLCREEVTYLGYLLKGGKRWLTPARKATVMKIPTPTTPRQVREFLGTAGFCRLWIPGFASLAAPLYPLTRPKVPFTWTEAHQEAFGRIKEALLSAPALALPDLTKPFALYVDEKEGVARGVLTQTLGPWRRPVAYLSKKLDPVASGWPTCLKAIAAVALLLKDADKLTLGQNVLVIAPHNLESIVRQPPDRWMTNARMTHYQSLLLNERVSFAPPAILNPATLLPVESDDTPIHICSEILAEETGTRPDLRDQPLPGVPAWYTDGSSFIMDGRRQAGAAIVDNKRTVWASNLPEGTSAQKAELIALTQALRLAEGKSINIYTDSRYAFATAHVHGAIYKQRGWLTSAGKDIKNKEEILALLEAIHLPKRVAIIHCPGHQRGTDPVATGNRKADEAAKQAAQSTRILTETTKNAGKRTADGSEFEKRTADGSEFESPKKKAKVE

SEQ ID NO: 7369 - protein, 2125 aa, synthetic construct
MPAAKRVKLDGGDKKYSIGLDIGTNSVGWAVITDEYKVPSKKFKVLGNTDRHSIKKNLIGALLFDSGETAEATRLKRTARRRYTRRKNRICYLQEIFSNEMAKVDDSFFHRLEESFLVEEDKKHERHPIFGNIVDEVAYHEKYPTIYHLRKKLVDSTDKADLRLIYLALAHMIKFRGHFLIEGDLNPDNSDVDKLFIQLVQTYNQLFEENPINASGVDAKAILSARLSKSRRLENLIAQLPGEKKNGLFGNLIALSLGLTPNFKSNFDLAEDAKLQLSKDTYDDDLDNLLAQIGDQYADLFLAAKNLSDAILLSDILRVNTEITKAPLSASMIKRYDEHHQDLTLLKALVRQQLPEKYKEIFFDQSKNGYAGYIDGGASQEEFYKFIKPILEKMDGTEELLVKLNREDLLRKQRTFDNGSIPHQIHLGELHAILRRQEDFYPFLKDNREKIEKILTFRIPYYVGPLARGNSRFAWMTRKSEETITPWNFEEVVDKGASAQSFIERMTNFDKNLPNEKVLPKHSLLYEYFTVYNELTKVKYVTEGMRKPAFLSGEQKKAIVDLLFKTNRKVTVKQLKEDYFKKIECFDSVEISGVEDRFNASLGTYHDLLKIIKDKDFLDNEENEDILEDIVLTLTLFEDREMIEERLKTYAHLFDDKVMKQLKRRRYTGWGRLSRKLINGIRDKQSGKTILDFLKSDGFANRNFMQLIHDDSLTFKEDIQKAQVSGQGDSLHEHIANLAGSPAIKKGILQTVKVVDELVKVMGRHKPENIVIEMARENQTTQKGQKNSRERMKRIEEGIKELGSQILKEHPVENTQLQNEKLYLYYLQNGRDMYVDQELDINRLSDYDVDHIVPQSFLKDDSIDNKVLTRSDKARGKSDNVPSEEVVKKMKNYWRQLLNAKLITQRKFDNLTKAERGGLSELDKAGFIKRQLVETRQITKHVAQILDSRMNTKYDENDKLIREVKVITLKSKLVSDFRKDFQFYKVREINNYHHAHDAYLNAVVGTALIKKYPKLESEFVYGDYKVYDVRKMIAKSEQEIGKATAKYFFYSNIMNFFKTEITLANGEIRKRPLIETNGETGEIVWDKGRDFATVRKVLSMPQVNIVKKTEVQTGGFSKESILPKRNSDKLIARKKDWDPKKYGGFDSPTVAYSVLVVAKVEKGKSKKLKSVKELLGITIMERSSFEKNPIDFLEAKGYKEVKKDLIIKLPKYSLFELENGRKRMLASAGELQKGNELALPSKYVNFLYLASHYEKLKGSPEDNEQKQLFVEQHKHYLDEIIEQISEFSKRVILADANLDKVLSAYNKHRDKPIREQAENIIHLFTLTNLGAPAAFKYFDTTIDRKRYTSTKEVLDATLIHQSITGLYETRIDLSQLGGDGGGGGPAPGSSGGLLGRDLLTKLKAQIQFSTEGPQVTWEDRPAMCLVLNLEEEYRLHEKPVPPSIDPSWLQLFPMVWAEKAGMGLANQVPPVVVELKSDASPVAVRQYPMSKEAREGIRPHIQRFLDLGILVPCQSPWNTPLLPVKKPGTNDYRPVQDLREVNKRVQDIHPTVPNPYNLLSSLPPSHTWYSVLDLKDAFFCLKLHPNSQPLFAFEWRDPEKGNTGQLTWTRLPQGFKNSPTLFNEALHRDLASFRALNPQVVMLQYVDDLLVAAPTYRDCKEGTRRLLQELSKLGYRVSAKKAQLCREEVTYLGYLLKGGKRWLTPARKATVMKIPTPTTPRQVREFLGKAGFCRLFIPGFASLAAPLYPLTRPKVPFTWTEAHQEAFGRIKEALLSAPALALPDLTKPFALYVDEKEGVARGVLTQTLGPWRRPVAYLSKKLDPVASGWPTCLKAIAAVALLLKDADKLTLGQNVLVIAPHNLESIVRQPPDRWMTNARMTHYQSLLLNERVSFAPPAILNPATLLPVESDDTPIHICSEILAEETGTRPDLRDQPLPGVPAWYTDGSSFIMDGRRQAGAAIVDNKRTVWASNLPEGTSAQKAELIALTQALRLAEGKSINIYTDSRYAFATAHVHGAIYKQRGWLTSAGKDIKNKEEILALLEAIHLPKRVAIIHCPGHQRGTDPVATGNRKADEAAKQAAQSTRILTETTKNAGKRTADGSEFEKRTADGSEFESPKKKAKVE

SEQ ID NO: 7370 - protein, 2216 aa, synthetic construct
MPAAKRVKLDGGDKKYSIGLDIGTNSVGWAVITDEYKVPSKKFKVLGNTDRHSIKKNLIGALLFDSGETAEATRLKRTARRRYTRRKNRICYLQEIFSNEMAKVDDSFFHRLEESFLVEEDKKHERHPIFGNIVDEVAYHEKYPTIYHLRKKLVDSTDKADLRLIYLALAHMIKFRGHFLIEGDLNPDNSDVDKLFIQLVQTYNQLFEENPINASGVDAKAILSARLSKSRRLENLIAQLPGEKKNGLFGNLIALSLGLTPNFKSNFDLAEDAKLQLSKDTYDDDLDNLLAQIGDQYADLFLAAKNLSDAILLSDILRVNTEITKAPLSASMIKRYDEHHQDLTLLKALVRQQLPEKYKEIFFDQSKNGYAGYIDGGASQEEFYKFIKPILEKMDGTEELLVKLNREDLLRKQRTFDNGSIPHQIHLGELHAILRRQEDFYPFLKDNREKIEKILTFRIPYYVGPLARGNSRFAWMTRKSEETITPWNFEEVVDKGASAQSFIERMTNFDKNLPNEKVLPKHSLLYEYFTVYNELTKVKYVTEGMRKPAFLSGEQKKAIVDLLFKTNRKVTVKQLKEDYFKKIECFDSVEISGVEDRFNASLGTYHDLLKIIKDKDFLDNEENEDILEDIVLTLTLFEDREMIEERLKTYAHLFDDKVMKQLKRRRYTGWGRLSRKLINGIRDKQSGKTILDFLKSDGFANRNFMQLIHDDSLTFKEDIQKAQVSGQGDSLHEHIANLAGSPAIKKGILQTVKVVDELVKVMGRHKPENIVIEMARENQTTQKGQKNSRERMKRIEEGIKELGSQILKEHPVENTQLQNEKLYLYYLQNGRDMYVDQELDINRLSDYDVDHIVPQSFLKDDSIDNKVLTRSDKARGKSDNVPSEEVVKKMKNYWRQLLNAKLITQRKFDNLTKAERGGLSELDKAGFIKRQLVETRQITKHVAQILDSRMNTKYDENDKLIREVKVITLKSKLVSDFRKDFQFYKVREINNYHHAHDAYLNAVVGTALIKKYPKLESEFVYGDYKVYDVRKMIAKSEQEIGKATAKYFFYSNIMNFFKTEITLANGEIRKRPLIETNGETGEIVWDKGRDFATVRKVLSMPQVNIVKKTEVQTGGFSKESILPKRNSDKLIARKKDWDPKKYGGFDSPTVAYSVLVVAKVEKGKSKKLKSVKELLGITIMERSSFEKNPIDFLEAKGYKEVKKDLIIKLPKYSLFELENGRKRMLASAGELQKGNELALPSKYVNFLYLASHYEKLKGSPEDNEQKQLFVEQHKHYLDEIIEQISEFSKRVILADANLDKVLSAYNKHRDKPIREQAENIIHLFTLTNLGAPAAFKYFDTTIDRKRYTSTKEVLDATLIHQSITGLYETRIDLSQLGGDGGGGGPAPGSSGGTLGDQGSRGSDPLPEPRVTLTVEGIPTEFLVNTGAEHSVLTKPMGKMGSKRTVVAGATGSKVYPWTTKRLLKIGQKQVTHSFLVIPECPAPLLGRDLLTKLKAQIQFSTEGPQVTWEDRPAMCLVLNLEEEYRLHEKPVPPSIDPSWLQLFPMVWAEKAGMGLANQVPPVVVELKSDASPVAVRQYPMSKEAREGIRPHIQRFLDLGILVPCQSPWNTPLLPVKKPGTNDYRPVQDLREVNKRVQDIHPTVPNPYNLLSSLPPSHTWYSVLDLKDAFFCLKLHPNSQPLFAFEWRDPEKGNTGQLTWTRLPQGFKNSPTLFNEALHRDLASFRALNPQVVMLQYVDDLLVAAPTYRDCKEGTRRLLQELSKLGYRVSAKKAQLCREEVTYLGYLLKGGKRWLTPARKATVMKIPTPTTPRQVREFLGTAGFCRLWIPGFASLAAPLYPLTRPKVPFTWTEAHQEAFGRIKEALLSAPALALPDLTKPFALYVDEKEGVARGVLTQTLGPWRRPVAYLSKKLDPVASGWPTCLKAIAAVALLLKDADKLTLGQNVLVIAPHNLESIVRQPPDRWMTNARMTHYQSLLLNERVSFAPPAILNPATLLPVESDDTPIHICSEILAEETGTRPDLRDQPLPGVPAWYTDGSSFIMDGRRQAGAAIVDNKRTVWASNLPEGTSAQKAELIALTQALRLAEGKSINIYTDSRYAFATAHVHGAIYKQRGWLTSAGKDIKNKEEILALLEAIHLPKRVAIIHCPGHQRGTDPVATGNRKADEAAKQAAQSTRILTETTKNAGKRTADGSEFEKRTADGSEFESPKKKAKVE

SEQ ID NO: 7371 - protein, 2216 aa, synthetic construct
MPAAKRVKLDGGDKKYSIGLDIGTNSVGWAVITDEYKVPSKKFKVLGNTDRHSIKKNLIGALLFDSGETAEATRLKRTARRRYTRRKNRICYLQEIFSNEMAKVDDSFFHRLEESFLVEEDKKHERHPIFGNIVDEVAYHEKYPTIYHLRKKLVDSTDKADLRLIYLALAHMIKFRGHFLIEGDLNPDNSDVDKLFIQLVQTYNQLFEENPINASGVDAKAILSARLSKSRRLENLIAQLPGEKKNGLFGNLIALSLGLTPNFKSNFDLAEDAKLQLSKDTYDDDLDNLLAQIGDQYADLFLAAKNLSDAILLSDILRVNTEITKAPLSASMIKRYDEHHQDLTLLKALVRQQLPEKYKEIFFDQSKNGYAGYIDGGASQEEFYKFIKPILEKMDGTEELLVKLNREDLLRKQRTFDNGSIPHQIHLGELHAILRRQEDFYPFLKDNREKIEKILTFRIPYYVGPLARGNSRFAWMTRKSEETITPWNFEEVVDKGASAQSFIERMTNFDKNLPNEKVLPKHSLLYEYFTVYNELTKVKYVTEGMRKPAFLSGEQKKAIVDLLFKTNRKVTVKQLKEDYFKKIECFDSVEISGVEDRFNASLGTYHDLLKIIKDKDFLDNEENEDILEDIVLTLTLFEDREMIEERLKTYAHLFDDKVMKQLKRRRYTGWGRLSRKLINGIRDKQSGKTILDFLKSDGFANRNFMQLIHDDSLTFKEDIQKAQVSGQGDSLHEHIANLAGSPAIKKGILQTVKVVDELVKVMGRHKPENIVIEMARENQTTQKGQKNSRERMKRIEEGIKELGSQILKEHPVENTQLQNEKLYLYYLQNGRDMYVDQELDINRLSDYDVDHIVPQSFLKDDSIDNKVLTRSDKARGKSDNVPSEEVVKKMKNYWRQLLNAKLITQRKFDNLTKAERGGLSELDKAGFIKRQLVETRQITKHVAQILDSRMNTKYDENDKLIREVKVITLKSKLVSDFRKDFQFYKVREINNYHHAHDAYLNAVVGTALIKKYPKLESEFVYGDYKVYDVRKMIAKSEQEIGKATAKYFFYSNIMNFFKTEITLANGEIRKRPLIETNGETGEIVWDKGRDFATVRKVLSMPQVNIVKKTEVQTGGFSKESILPKRNSDKLIARKKDWDPKKYGGFDSPTVAYSVLVVAKVEKGKSKKLKSVKELLGITIMERSSFEKNPIDFLEAKGYKEVKKDLIIKLPKYSLFELENGRKRMLASAGELQKGNELALPSKYVNFLYLASHYEKLKGSPEDNEQKQLFVEQHKHYLDEIIEQISEFSKRVILADANLDKVLSAYNKHRDKPIREQAENIIHLFTLTNLGAPAAFKYFDTTIDRKRYTSTKEVLDATLIHQSITGLYETRIDLSQLGGDGGGGGPAPGSSGGTLGDQGSRGSDPLPEPRVTLTVEGIPTEFLVNTGAEHSVLTKPMGKMGSKRTVVAGATGSKVYPWTTKRLLKIGQKQVTHSFLVIPECPAPLLGRDLLTKLKAQIQFSTEGPQVTWEDRPAMCLVLNLEEEYRLHEKPVPPSIDPSWLQLFPMVWAEKAGMGLANQVPPVVVELKSDASPVAVRQYPMSKEAREGIRPHIQRFLDLGILVPCQSPWNTPLLPVKKPGTNDYRPVQDLREVNKRVQDIHPTVPNPYNLLSSLPPSHTWYSVLDLKDAFFCLKLHPNSQPLFAFEWRDPEKGNTGQLTWTRLPQGFKNSPTLFNEALHRDLASFRALNPQVVMLQYVDDLLVAAPTYRDCKEGTRRLLQELSKLGYRVSAKKAQLCREEVTYLGYLLKGGKRWLTPARKATVMKIPTPTTPRQVREFLGKAGFCRLFIPGFASLAAPLYPLTRPKVPFTWTEAHQEAFGRIKEALLSAPALALPDLTKPFALYVDEKEGVARGVLTQTLGPWRRPVAYLSKKLDPVASGWPTCLKAIAAVALLLKDADKLTLGQNVLVIAPHNLESIVRQPPDRWMTNARMTHYQSLLLNERVSFAPPAILNPATLLPVESDDTPIHICSEILAEETGTRPDLRDQPLPGVPAWYTDGSSFIMDGRRQAGAAIVDNKRTVWASNLPEGTSAQKAELIALTQALRLAEGKSINIYTDSRYAFATAHVHGAIYKQRGWLTSAGKDIKNKEEILALLEAIHLPKRVAIIHCPGHQRGTDPVATGNRKADEAAKQAAQSTRILTETTKNAGKRTADGSEFEKRTADGSEFESPKKKAKVE

SEQ ID NO: 7372 - protein, 2094 aa, synthetic construct
MPAAKRVKLDGGDKKYSIGLDIGTNSVGWAVITDEYKVPSKKFKVLGNTDRHSIKKNLIGALLFDSGETAEATRLKRTARRRYTRRKNRICYLQEIFSNEMAKVDDSFFHRLEESFLVEEDKKHERHPIFGNIVDEVAYHEKYPTIYHLRKKLVDSTDKADLRLIYLALAHMIKFRGHFLIEGDLNPDNSDVDKLFIQLVQTYNQLFEENPINASGVDAKAILSARLSKSRRLENLIAQLPGEKKNGLFGNLIALSLGLTPNFKSNFDLAEDAKLQLSKDTYDDDLDNLLAQIGDQYADLFLAAKNLSDAILLSDILRVNTEITKAPLSASMIKRYDEHHQDLTLLKALVRQQLPEKYKEIFFDQSKNGYAGYIDGGASQEEFYKFIKPILEKMDGTEELLVKLNREDLLRKQRTFDNGSIPHQIHLGELHAILRRQEDFYPFLKDNREKIEKILTFRIPYYVGPLARGNSRFAWMTRKSEETITPWNFEEVVDKGASAQSFIERMTNFDKNLPNEKVLPKHSLLYEYFTVYNELTKVKYVTEGMRKPAFLSGEQKKAIVDLLFKTNRKVTVKQLKEDYFKKIECFDSVEISGVEDRFNASLGTYHDLLKIIKDKDFLDNEENEDILEDIVLTLTLFEDREMIEERLKTYAHLFDDKVMKQLKRRRYTGWGRLSRKLINGIRDKQSGKTILDFLKSDGFANRNFMQLIHDDSLTFKEDIQKAQVSGQGDSLHEHIANLAGSPAIKKGILQTVKVVDELVKVMGRHKPENIVIEMARENQTTQKGQKNSRERMKRIEEGIKELGSQILKEHPVENTQLQNEKLYLYYLQNGRDMYVDQELDINRLSDYDVDHIVPQSFLKDDSIDNKVLTRSDKARGKSDNVPSEEVVKKMKNYWRQLLNAKLITQRKFDNLTKAERGGLSELDKAGFIKRQLVETRQITKHVAQILDSRMNTKYDENDKLIREVKVITLKSKLVSDFRKDFQFYKVREINNYHHAHDAYLNAVVGTALIKKYPKLESEFVYGDYKVYDVRKMIAKSEQEIGKATAKYFFYSNIMNFFKTEITLANGEIRKRPLIETNGETGEIVWDKGRDFATVRKVLSMPQVNIVKKTEVQTGGFSKESILPKRNSDKLIARKKDWDPKKYGGFDSPTVAYSVLVVAKVEKGKSKKLKSVKELLGITIMERSSFEKNPIDFLEAKGYKEVKKDLIIKLPKYSLFELENGRKRMLASAGELQKGNELALPSKYVNFLYLASHYEKLKGSPEDNEQKQLFVEQHKHYLDEIIEQISEFSKRVILADANLDKVLSAYNKHRDKPIREQAENIIHLFTLTNLGAPAAFKYFDTTIDRKRYTSTKEVLDATLIHQSITGLYETRIDLSQLGGDGGGGGPAPGSSGGTLNIEDEYRLHETSKEPDVSLGSTWLSDFPQAWAETGGMGLAVRQAPLIIPLKATSTPVSIKQYPMSQEARLGIKPHIQRLLDQGILVPCQSPWNTPLLPVKKPGTNDYRPVQDLREVNKRVEDIHPTVPNPYNLLSGLPPSHQWYTVLDLKDAFFCLRLHPTSQPLFAFEWRDPEMGISGQLTWTRLPQGFKNSPTLFNEALHRDLAGFRIQHPDLILLQYVDDLLLAATSELDCQQGTRALLQTLGDLGYRASAKKAQICQKQVKYLGYLLKEGQRWLTEARKETVMGQPIPKTPRQLREFLGKAGFCRLFIPGFAEMAAPLYPLTKPGTLFNWGPDQQKAFQEIKQALLTAPALGLPDLTKPFELFVDEKQGYAKGVLTQKLGPWRRPVAYLSKKLDPVAAGWPPCLRMVAAIAVLTKDAGKLTMGQPLVILAPHAVEALVKQPPDRWLSNARMTHYQALLLDTDRVQFGPVVALNPATLLPLPEEGLQHDCLDILAEAHGTRSDLMDQPLPDADHTWYTDGSSFLQEGQRKAGAAVTTETEVIWARALPAGTSAQRAELIALTQALKMAEGKKLNVYTDSRYAFATAHIHGEIYRRRGWLTSEGKEIKNKDEILALLKALFLPKRLSIIHCPGHQKGNSAEARGNRMADQAAREVATRETPETSTLLAGKRTADGSEFEKRTADGSEFESPKKKAKVE

SEQ ID NO: 7373 - protein, 2094 aa, synthetic construct
MPAAKRVKLDGGDKKYSIGLDIGTNSVGWAVITDEYKVPSKKFKVLGNTDRHSIKKNLIGALLFDSGETAEATRLKRTARRRYTRRKNRICYLQEIFSNEMAKVDDSFFHRLEESFLVEEDKKHERHPIFGNIVDEVAYHEKYPTIYHLRKKLVDSTDKADLRLIYLALAHMIKFRGHFLIEGDLNPDNSDVDKLFIQLVQTYNQLFEENPINASGVDAKAILSARLSKSRRLENLIAQLPGEKKNGLFGNLIALSLGLTPNFKSNFDLAEDAKLQLSKDTYDDDLDNLLAQIGDQYADLFLAAKNLSDAILLSDILRVNTEITKAPLSASMIKRYDEHHQDLTLLKALVRQQLPEKYKEIFFDQSKNGYAGYIDGGASQEEFYKFIKPILEKMDGTEELLVKLNREDLLRKQRTFDNGSIPHQIHLGELHAILRRQEDFYPFLKDNREKIEKILTFRIPYYVGPLARGNSRFAWMTRKSEETITPWNFEEVVDKGASAQSFIERMTNFDKNLPNEKVLPKHSLLYEYFTVYNELTKVKYVTEGMRKPAFLSGEQKKAIVDLLFKTNRKVTVKQLKEDYFKKIECFDSVEISGVEDRFNASLGTYHDLLKIIKDKDFLDNEENEDILEDIVLTLTLFEDREMIEERLKTYAHLFDDKVMKQLKRRRYTGWGRLSRKLINGIRDKQSGKTILDFLKSDGFANRNFMQLIHDDSLTFKEDIQKAQVSGQGDSLHEHIANLAGSPAIKKGILQTVKVVDELVKVMGRHKPENIVIEMARENQTTQKGQKNSRERMKRIEEGIKELGSQILKEHPVENTQLQNEKLYLYYLQNGRDMYVDQELDINRLSDYDVDHIVPQSFLKDDSIDNKVLTRSDKARGKSDNVPSEEVVKKMKNYWRQLLNAKLITQRKFDNLTKAERGGLSELDKAGFIKRQLVETRQITKHVAQILDSRMNTKYDENDKLIREVKVITLKSKLVSDFRKDFQFYKVREINNYHHAHDAYLNAVVGTALIKKYPKLESEFVYGDYKVYDVRKMIAKSEQEIGKATAKYFFYSNIMNFFKTEITLANGEIRKRPLIETNGETGEIVWDKGRDFATVRKVLSMPQVNIVKKTEVQTGGFSKESILPKRNSDKLIARKKDWDPKKYGGFDSPTVAYSVLVVAKVEKGKSKKLKSVKELLGITIMERSSFEKNPIDFLEAKGYKEVKKDLIIKLPKYSLFELENGRKRMLASAGELQKGNELALPSKYVNFLYLASHYEKLKGSPEDNEQKQLFVEQHKHYLDEIIEQISEFSKRVILADANLDKVLSAYNKHRDKPIREQAENIIHLFTLTNLGAPAAFKYFDTTIDRKRYTSTKEVLDATLIHQSITGLYETRIDLSQLGGDGGGGGPAPGSSGGTLNIEDEYRLHETSKGPDVPLGSTWLSDFPQAWAETGGMGLAFRQAPLIISLKATSTPVSIKQYPMSQEARLGIKPHIQRLLDQGILVPCQSPWNTPLLPVKKPGTNDYRPVQDLREVNKRVEDIHPTVPNPYNLLSGLPPSHQWYTVLDLKDAFFCLRLHPTSQSLFAFEWKDPEMGISGQLTWTRLPQGFKNSPTLFNEALHRDLADFRIQHPDLILLQYVDDLLLAATSELDCQQGTRALLQTLGDLGYRASAKKAQICQKQVKYLGYLLKEGQRWLTEARKETVMGQPTPKTPRQLREFLGKAGLCRLFIPGFAEMAAPLYPLTKPGTLFKWGPDQQKAYQEIKQALLTAPALGLPDLTKPFELFVDEKQGYAKGVLTQKLGPWRRPVAYLSKKLDPVAAGWPPCLRMVAAIAVLTKDVGKLTMGQPLVILAPHAVEALVKQPPDRWLSNARMTHYQALLLDTDRVQFGPIVALNPATLLPLPEEGLQHDCLDILAEAHGTRPDLTDQPLPDADHTWYTDGSSFLQEGQRRAGAAVTTETEVIWAKALPAGTSAQRAELIALTQALKMAAGKKLNVYTDSRYAFATAHIHGEIYRRRGWLTSEGKEIKNKDEILALLKALFLPKRLSIIHCPGHQKGNHAEARGNRMADQAAREVATRETPETSTLLAGKRTADGSEFEKRTADGSEFESPKKKAKVE

SEQ ID NO: 7374 - protein, 2094 aa, synthetic construct
MPAAKRVKLDGGDKKYSIGLDIGTNSVGWAVITDEYKVPSKKFKVLGNTDRHSIKKNLIGALLFDSGETAEATRLKRTARRRYTRRKNRICYLQEIFSNEMAKVDDSFFHRLEESFLVEEDKKHERHPIFGNIVDEVAYHEKYPTIYHLRKKLVDSTDKADLRLIYLALAHMIKFRGHFLIEGDLNPDNSDVDKLFIQLVQTYNQLFEENPINASGVDAKAILSARLSKSRRLENLIAQLPGEKKNGLFGNLIALSLGLTPNFKSNFDLAEDAKLQLSKDTYDDDLDNLLAQIGDQYADLFLAAKNLSDAILLSDILRVNTEITKAPLSASMIKRYDEHHQDLTLLKALVRQQLPEKYKEIFFDQSKNGYAGYIDGGASQEEFYKFIKPILEKMDGTEELLVKLNREDLLRKQRTFDNGSIPHQIHLGELHAILRRQEDFYPFLKDNREKIEKILTFRIPYYVGPLARGNSRFAWMTRKSEETITPWNFEEVVDKGASAQSFIERMTNFDKNLPNEKVLPKHSLLYEYFTVYNELTKVKYVTEGMRKPAFLSGEQKKAIVDLLFKTNRKVTVKQLKEDYFKKIECFDSVEISGVEDRFNASLGTYHDLLKIIKDKDFLDNEENEDILEDIVLTLTLFEDREMIEERLKTYAHLFDDKVMKQLKRRRYTGWGRLSRKLINGIRDKQSGKTILDFLKSDGFANRNFMQLIHDDSLTFKEDIQKAQVSGQGDSLHEHIANLAGSPAIKKGILQTVKVVDELVKVMGRHKPENIVIEMARENQTTQKGQKNSRERMKRIEEGIKELGSQILKEHPVENTQLQNEKLYLYYLQNGRDMYVDQELDINRLSDYDVDHIVPQSFLKDDSIDNKVLTRSDKARGKSDNVPSEEVVKKMKNYWRQLLNAKLITQRKFDNLTKAERGGLSELDKAGFIKRQLVETRQITKHVAQILDSRMNTKYDENDKLIREVKVITLKSKLVSDFRKDFQFYKVREINNYHHAHDAYLNAVVGTALIKKYPKLESEFVYGDYKVYDVRKMIAKSEQEIGKATAKYFFYSNIMNFFKTEITLANGEIRKRPLIETNGETGEIVWDKGRDFATVRKVLSMPQVNIVKKTEVQTGGFSKESILPKRNSDKLIARKKDWDPKKYGGFDSPTVAYSVLVVAKVEKGKSKKLKSVKELLGITIMERSSFEKNPIDFLEAKGYKEVKKDLIIKLPKYSLFELENGRKRMLASAGELQKGNELALPSKYVNFLYLASHYEKLKGSPEDNEQKQLFVEQHKHYLDEIIEQISEFSKRVILADANLDKVLSAYNKHRDKPIREQAENIIHLFTLTNLGAPAAFKYFDTTIDRKRYTSTKEVLDATLIHQSITGLYETRIDLSQLGGDGGGGGPAPGSSGGTLNIEDEYRLHETSKGPDVPLGSTWLSDFPQAWAETGGMGLAVRQAPLIIPLKATSTPVSIKQYPMSQEARLGIKPHIQRLLDQGILVPCQSPWNTPLLPVKKPGTNDYRPVQDLREVNKRVEDIHPTVPNPYNLLSGLPPSHQWYTVLDLKDAFFCLRLHPTSQSLFAFEWRDPEMGISGQLTWTRLPQGFKNSPTLFNEALHRDLADFRIQHPDLILLQYVDDLLLAATSELDCQQGTRALLQTLGDLGYRASAKKAQICQKQVKYLGYLLKEGQRWLTEARKETVMGQPTPKTPRQLREFLGTAGFCRLWIPGFAEMAAPLYPLTKPGTLFEWGPDQQKAYQEIKQALLTAPALGLPDLTKPFELFVDEKQGYAKGVLTQKLGPWRRPVAYLSKKLDPVAAGWPPCLRMVAAIAVLTKDAGKLTMGQPLVILAPHAVEALVKQPPDRWLSNARMTHYQALLLDTDRVQFGPIVALNPATLLPLPEEGLQHDCLDILAEAHGTRPDLTDQPLPDADHTWYTDGSSFLQEGQRKAGAAVTTETEVVWAKALPAGTSAQRAELIALTQALKMAEGKKLNVYTDSRYAFATAHIHGEIYRRRGWLTSEGKEIKNKDEILALLKALFLPKRLSIIHCPGHQKGNRAEARGNRMADQAAREVATRETPETSTLLAGKRTADGSEFEKRTADGSEFESPKKKAKVE

SEQ ID NO: 7375 - protein, 2094 aa, synthetic construct
MPAAKRVKLDGGDKKYSIGLDIGTNSVGWAVITDEYKVPSKKFKVLGNTDRHSIKKNLIGALLFDSGETAEATRLKRTARRRYTRRKNRICYLQEIFSNEMAKVDDSFFHRLEESFLVEEDKKHERHPIFGNIVDEVAYHEKYPTIYHLRKKLVDSTDKADLRLIYLALAHMIKFRGHFLIEGDLNPDNSDVDKLFIQLVQTYNQLFEENPINASGVDAKAILSARLSKSRRLENLIAQLPGEKKNGLFGNLIALSLGLTPNFKSNFDLAEDAKLQLSKDTYDDDLDNLLAQIGDQYADLFLAAKNLSDAILLSDILRVNTEITKAPLSASMIKRYDEHHQDLTLLKALVRQQLPEKYKEIFFDQSKNGYAGYIDGGASQEEFYKFIKPILEKMDGTEELLVKLNREDLLRKQRTFDNGSIPHQIHLGELHAILRRQEDFYPFLKDNREKIEKILTFRIPYYVGPLARGNSRFAWMTRKSEETITPWNFEEVVDKGASAQSFIERMTNFDKNLPNEKVLPKHSLLYEYFTVYNELTKVKYVTEGMRKPAFLSGEQKKAIVDLLFKTNRKVTVKQLKEDYFKKIECFDSVEISGVEDRFNASLGTYHDLLKIIKDKDFLDNEENEDILEDIVLTLTLFEDREMIEERLKTYAHLFDDKVMKQLKRRRYTGWGRLSRKLINGIRDKQSGKTILDFLKSDGFANRNFMQLIHDDSLTFKEDIQKAQVSGQGDSLHEHIANLAGSPAIKKGILQTVKVVDELVKVMGRHKPENIVIEMARENQTTQKGQKNSRERMKRIEEGIKELGSQILKEHPVENTQLQNEKLYLYYLQNGRDMYVDQELDINRLSDYDVDHIVPQSFLKDDSIDNKVLTRSDKARGKSDNVPSEEVVKKMKNYWRQLLNAKLITQRKFDNLTKAERGGLSELDKAGFIKRQLVETRQITKHVAQILDSRMNTKYDENDKLIREVKVITLKSKLVSDFRKDFQFYKVREINNYHHAHDAYLNAVVGTALIKKYPKLESEFVYGDYKVYDVRKMIAKSEQEIGKATAKYFFYSNIMNFFKTEITLANGEIRKRPLIETNGETGEIVWDKGRDFATVRKVLSMPQVNIVKKTEVQTGGFSKESILPKRNSDKLIARKKDWDPKKYGGFDSPTVAYSVLVVAKVEKGKSKKLKSVKELLGITIMERSSFEKNPIDFLEAKGYKEVKKDLIIKLPKYSLFELENGRKRMLASAGELQKGNELALPSKYVNFLYLASHYEKLKGSPEDNEQKQLFVEQHKHYLDEIIEQISEFSKRVILADANLDKVLSAYNKHRDKPIREQAENIIHLFTLTNLGAPAAFKYFDTTIDRKRYTSTKEVLDATLIHQSITGLYETRIDLSQLGGDGGGGGPAPGSSGGTLNIEDEYRLHEISTEPDVSPGSTWLSDFPQAWAETGGMGLAVRQAPLIIPLKATSTPVSIKQYPMSQEAKLGIKPHIQRLLDQGILVPCQSPWNTPLLPVKKPGTNDYRPVQGLREVNKRVEDIHPTVPNPYNLLSGLPTSHRWYTVLDLKDAFFCLRLHPTSQPLFASEWRDPGMGISGQLTWTRLPQGFKNSPTLFDEALHRGLADFRIQHPDLILLQYVDDLLLAATSELDCQQGTRALLKTLGNLGYRASAKKAQICQKQVKYLGYLLREGQRWLTEARKETVMGQPTPKTPRQLREFLGTAGFCRLWIPRFAEMAAPLYPLTKTGTLFNWGPDQQKAYHEIKQALLTAPALGLPDLTKPFELFVDEKQGYAKGVLTQKLGPWRRPVAYLSKKLDPVAAGWPPCLRMVAAIAVLTKDAGKLTMGQPLVILAPHAVEALVKQPPDRWLSNARMTHYQAMLLDTDRVQFGPVVALNPATLLPLPEEGAPHDCLEILAETHGTEPDLTDQPIPDADHTWYTDGSSFLQEGQRKAGAAVTTETEVIWARALPAGTSAQRAELIALTQALKMAEGKRLNVYTDSRYAFATAHIHGEIYKRRGLLTSEGREIKNKSEILALLKALFLPKRLSIIHCLGHQKGDSAEARGNRLADQAAREAAIKTPPDTSTLLAGKRTADGSEFEKRTADGSEFESPKKKAKVE

SEQ ID NO: 7376 - protein, 2114 aa, synthetic construct
MPAAKRVKLDGGDKKYSIGLDIGTNSVGWAVITDEYKVPSKKFKVLGNTDRHSIKKNLIGALLFDSGETAEATRLKRTARRRYTRRKNRICYLQEIFSNEMAKVDDSFFHRLEESFLVEEDKKHERHPIFGNIVDEVAYHEKYPTIYHLRKKLVDSTDKADLRLIYLALAHMIKFRGHFLIEGDLNPDNSDVDKLFIQLVQTYNQLFEENPINASGVDAKAILSARLSKSRRLENLIAQLPGEKKNGLFGNLIALSLGLTPNFKSNFDLAEDAKLQLSKDTYDDDLDNLLAQIGDQYADLFLAAKNLSDAILLSDILRVNTEITKAPLSASMIKRYDEHHQDLTLLKALVRQQLPEKYKEIFFDQSKNGYAGYIDGGASQEEFYKFIKPILEKMDGTEELLVKLNREDLLRKQRTFDNGSIPHQIHLGELHAILRRQEDFYPFLKDNREKIEKILTFRIPYYVGPLARGNSRFAWMTRKSEETITPWNFEEVVDKGASAQSFIERMTNFDKNLPNEKVLPKHSLLYEYFTVYNELTKVKYVTEGMRKPAFLSGEQKKAIVDLLFKTNRKVTVKQLKEDYFKKIECFDSVEISGVEDRFNASLGTYHDLLKIIKDKDFLDNEENEDILEDIVLTLTLFEDREMIEERLKTYAHLFDDKVMKQLKRRRYTGWGRLSRKLINGIRDKQSGKTILDFLKSDGFANRNFMQLIHDDSLTFKEDIQKAQVSGQGDSLHEHIANLAGSPAIKKGILQTVKVVDELVKVMGRHKPENIVIEMARENQTTQKGQKNSRERMKRIEEGIKELGSQILKEHPVENTQLQNEKLYLYYLQNGRDMYVDQELDINRLSDYDVDHIVPQSFLKDDSIDNKVLTRSDKARGKSDNVPSEEVVKKMKNYWRQLLNAKLITQRKFDNLTKAERGGLSELDKAGFIKRQLVETRQITKHVAQILDSRMNTKYDENDKLIREVKVITLKSKLVSDFRKDFQFYKVREINNYHHAHDAYLNAVVGTALIKKYPKLESEFVYGDYKVYDVRKMIAKSEQEIGKATAKYFFYSNIMNFFKTEITLANGEIRKRPLIETNGETGEIVWDKGRDFATVRKVLSMPQVNIVKKTEVQTGGFSKESILPKRNSDKLIARKKDWDPKKYGGFDSPTVAYSVLVVAKVEKGKSKKLKSVKELLGITIMERSSFEKNPIDFLEAKGYKEVKKDLIIKLPKYSLFELENGRKRMLASAGELQKGNELALPSKYVNFLYLASHYEKLKGSPEDNEQKQLFVEQHKHYLDEIIEQISEFSKRVILADANLDKVLSAYNKHRDKPIREQAENIIHLFTLTNLGAPAAFKYFDTTIDRKRYTSTKEVLDATLIHQSITGLYETRIDLSQLGGDGGGGGPAPGSSGGWVQEISDSRPMLHIYLNGRRFLGLLNTGADKTCIAGRDWPANWPIHQTESSLQGLGMACGVARSSQPLRWQHEDKSGIIHPFVIPTLPFTLWGRDIMKDIKVRLMTDSPDDSQDLMIGAIESNLFADQISWKSDQPVWLNQWPLKQEKLQALQQLVTEQLQLGHLEESNSPWNTPVFVIKKKSGKWRLLQDLRAVNATMHDMGALQPGLPSPVAPPKGWEIIIIDLQDCFFNIKLHPEDCKRFAFSVPSPNFKRPYQRFQWKVLPQGMKNSPTLCQKFVDKAILTVRDKYQDSYIVHYMDDILLAHPSRSIVDEILTSMIQALNKHGLVVSTEKIQKYDNLKYLGTHIQGDSVSYQKLQIRTDKLRTLNDFQKLLGNINWIRPFLKLTTGELKPLFEILNPDSNPISTRKLTPEACKALQLMNERLSTARVKRLDLSQPWSLCILKTEYTPTACLWQDGVVEWIHLPHISPKVITPYDIFCTQLIIKGRHRSKELFSKDPDYIVVPYTKVQFDLLLQEKEDWPISLLGFLGEVHFHLPKDPLLTFTLQTAIIFPHMTSTTPLEKGIVIFTDGSANGRSVTYIQGREPIIKENTQNTAQQAEIVAVITAFEEVSQPFNLYTDSKYVTGLFPEIETATLSPRTKIYTELKHLQRLIHKRQEKFYIGHIRGHTGLPGPLAQGNAYADSLTRILTAGKRTADGSEFEKRTADGSEFESPKKKAKVE

SEQ ID NO: 7377 - protein, 2085 aa, synthetic construct
MPAAKRVKLDGGDKKYSIGLDIGTNSVGWAVITDEYKVPSKKFKVLGNTDRHSIKKNLIGALLFDSGETAEATRLKRTARRRYTRRKNRICYLQEIFSNEMAKVDDSFFHRLEESFLVEEDKKHERHPIFGNIVDEVAYHEKYPTIYHLRKKLVDSTDKADLRLIYLALAHMIKFRGHFLIEGDLNPDNSDVDKLFIQLVQTYNQLFEENPINASGVDAKAILSARLSKSRRLENLIAQLPGEKKNGLFGNLIALSLGLTPNFKSNFDLAEDAKLQLSKDTYDDDLDNLLAQIGDQYADLFLAAKNLSDAILLSDILRVNTEITKAPLSASMIKRYDEHHQDLTLLKALVRQQLPEKYKEIFFDQSKNGYAGYIDGGASQEEFYKFIKPILEKMDGTEELLVKLNREDLLRKQRTFDNGSIPHQIHLGELHAILRRQEDFYPFLKDNREKIEKILTFRIPYYVGPLARGNSRFAWMTRKSEETITPWNFEEVVDKGASAQSFIERMTNFDKNLPNEKVLPKHSLLYEYFTVYNELTKVKYVTEGMRKPAFLSGEQKKAIVDLLFKTNRKVTVKQLKEDYFKKIECFDSVEISGVEDRFNASLGTYHDLLKIIKDKDFLDNEENEDILEDIVLTLTLFEDREMIEERLKTYAHLFDDKVMKQLKRRRYTGWGRLSRKLINGIRDKQSGKTILDFLKSDGFANRNFMQLIHDDSLTFKEDIQKAQVSGQGDSLHEHIANLAGSPAIKKGILQTVKVVDELVKVMGRHKPENIVIEMARENQTTQKGQKNSRERMKRIEEGIKELGSQILKEHPVENTQLQNEKLYLYYLQNGRDMYVDQELDINRLSDYDVDHIVPQSFLKDDSIDNKVLTRSDKARGKSDNVPSEEVVKKMKNYWRQLLNAKLITQRKFDNLTKAERGGLSELDKAGFIKRQLVETRQITKHVAQILDSRMNTKYDENDKLIREVKVITLKSKLVSDFRKDFQFYKVREINNYHHAHDAYLNAVVGTALIKKYPKLESEFVYGDYKVYDVRKMIAKSEQEIGKATAKYFFYSNIMNFFKTEITLANGEIRKRPLIETNGETGEIVWDKGRDFATVRKVLSMPQVNIVKKTEVQTGGFSKESILPKRNSDKLIARKKDWDPKKYGGFDSPTVAYSVLVVAKVEKGKSKKLKSVKELLGITIMERSSFEKNPIDFLEAKGYKEVKKDLIIKLPKYSLFELENGRKRMLASAGELQKGNELALPSKYVNFLYLASHYEKLKGSPEDNEQKQLFVEQHKHYLDEIIEQISEFSKRVILADANLDKVLSAYNKHRDKPIREQAENIIHLFTLTNLGAPAAFKYFDTTIDRKRYTSTKEVLDATLIHQSITGLYETRIDLSQLGGDGGGGGPAPGSSGGIPWLMKKPLQLTTLVPLQEYEERLLKQTMLTGSYKEKLQSLFLKYDALWQHWENQVGHRRIKPHHIATGTVNPRPQKQYPINPKAKASIQTVINDLLKQGVLIQQNSIMNTPVYPVPKPDGKWRMVLDYREVNKTIPLIAAQNQHSAGILSSIFRGKYKTTLDLSNGFWAHSITPESYWLTAFTWLGQQYCWTRLPQGFLNSPALFNADVVDLLKEVPNVQVYVDDIYISHDDPREHLEQLEKVFSLLLNAGYVVSLKKSEIAQHEVEFLGFNITKEGRGLTETFKQKLLNITPPRDLKQLQSILGLLNFARNFIPNFSELVKPLYNIIATAPGKYITWTTDNSQQLQNIISMLNSAENLEERNPEVRLIMKVNTSPSAGYIRFYNEFAKRPIMYLNYVYTKAEVKFTNTEKLLTTIHKGLIKALDLGMGQEILVYSPIVSMTKIQKTPLPERKALPIRWITWMSYLEDPRIQFHYDKTLPELQQVPTVTDDIIAKIKHPSEFSMVFYTDGSAIKHPNVNKSHNAGMGIAQVQFKPEFTVINTWSIPLGDHTAQLAEVAAVEFACKKALKIDGPVLIVTDSFYVAESVNKELPYWQSNGFFNNKKKPLKHVSKWKSIADCIQLKPDIIIIHEKGHQPTASTFHTEGNNLADKLATQGSYVVNAGKRTADGSEFEKRTADGSEFESPKKKAKVE

SEQ ID NO: 7378 - protein, 2092 aa, synthetic construct
MPAAKRVKLDGGDKKYSIGLDIGTNSVGWAVITDEYKVPSKKFKVLGNTDRHSIKKNLIGALLFDSGETAEATRLKRTARRRYTRRKNRICYLQEIFSNEMAKVDDSFFHRLEESFLVEEDKKHERHPIFGNIVDEVAYHEKYPTIYHLRKKLVDSTDKADLRLIYLALAHMIKFRGHFLIEGDLNPDNSDVDKLFIQLVQTYNQLFEENPINASGVDAKAILSARLSKSRRLENLIAQLPGEKKNGLFGNLIALSLGLTPNFKSNFDLAEDAKLQLSKDTYDDDLDNLLAQIGDQYADLFLAAKNLSDAILLSDILRVNTEITKAPLSASMIKRYDEHHQDLTLLKALVRQQLPEKYKEIFFDQSKNGYAGYIDGGASQEEFYKFIKPILEKMDGTEELLVKLNREDLLRKQRTFDNGSIPHQIHLGELHAILRRQEDFYPFLKDNREKIEKILTFRIPYYVGPLARGNSRFAWMTRKSEETITPWNFEEVVDKGASAQSFIERMTNFDKNLPNEKVLPKHSLLYEYFTVYNELTKVKYVTEGMRKPAFLSGEQKKAIVDLLFKTNRKVTVKQLKEDYFKKIECFDSVEISGVEDRFNASLGTYHDLLKIIKDKDFLDNEENEDILEDIVLTLTLFEDREMIEERLKTYAHLFDDKVMKQLKRRRYTGWGRLSRKLINGIRDKQSGKTILDFLKSDGFANRNFMQLIHDDSLTFKEDIQKAQVSGQGDSLHEHIANLAGSPAIKKGILQTVKVVDELVKVMGRHKPENIVIEMARENQTTQKGQKNSRERMKRIEEGIKELGSQILKEHPVENTQLQNEKLYLYYLQNGRDMYVDQELDINRLSDYDVDHIVPQSFLKDDSIDNKVLTRSDKARGKSDNVPSEEVVKKMKNYWRQLLNAKLITQRKFDNLTKAERGGLSELDKAGFIKRQLVETRQITKHVAQILDSRMNTKYDENDKLIREVKVITLKSKLVSDFRKDFQFYKVREINNYHHAHDAYLNAVVGTALIKKYPKLESEFVYGDYKVYDVRKMIAKSEQEIGKATAKYFFYSNIMNFFKTEITLANGEIRKRPLIETNGETGEIVWDKGRDFATVRKVLSMPQVNIVKKTEVQTGGFSKESILPKRNSDKLIARKKDWDPKKYGGFDSPTVAYSVLVVAKVEKGKSKKLKSVKELLGITIMERSSFEKNPIDFLEAKGYKEVKKDLIIKLPKYSLFELENGRKRMLASAGELQKGNELALPSKYVNFLYLASHYEKLKGSPEDNEQKQLFVEQHKHYLDEIIEQISEFSKRVILADANLDKVLSAYNKHRDKPIREQAENIIHLFTLTNLGAPAAFKYFDTTIDRKRYTSTKEVLDATLIHQSITGLYETRIDLSQLGGDGGGGGPAPGSSGGVLNLEEEYRLHEKPVPSSIDPSWLQLFPTVWAERAGMGLANQVPPVVVELRSGASPVAVRQYPMSKEAREGIRPHIQRFLDLGVLVPCQSPWNTPLLPVKKPGTNDYRPVQDLREINKRVQDIHPTVPNPYNLLSSLPPSHTWYSVLDLKDAFFCLKLHPNSQPLFAFEWRDPEKGNTGQLTWTRLPQGFKNSPTLFNEALHRDLAPFRALNPQVVLLQYVDDLLVAAPTYRDCKEGTQKLLQELSKLGYRVSAKKAQLCQKEVTYLGYLLKEGKRWLTPARKATVMKIPPPTTPRQVREFLGTAGFCRLWIPGFASLAAPLYPLTKPSIPFIWTEEHQKAFDRIKEALLSAPALALPDLTKPFTLYVDERAGVARGVLTQTLGPWRRPVAYLSKKLDPVASGWPTCLKAVAAVALLLKDADKLTLGQNVTVIASHSLESIVRQPPDRWMTNARMTHYQSLLLNERVSFAPPAVLNPATLLPVESEATPVHRCSEILAEETGTRRDLKDQPLPGVPAWYTDGSSFIAEGKRRAGAAIVDGKRTVWASSLPEGTSAQKAELVALTQALRLAEGKDINIYTDSRYAFATAHIHGAIYKQRGWLTSAGKDIKNKEEILALLEAIHLPKRVAIIHCPGHQKGNDPVATGNRRADEAAKQAALSTRVLAETTKPAGKRTADGSEFEKRTADGSEFESPKKKAKVE

SEQ ID NO: 7379 - protein, 2096 aa, synthetic construct
MPAAKRVKLDGGDKKYSIGLDIGTNSVGWAVITDEYKVPSKKFKVLGNTDRHSIKKNLIGALLFDSGETAEATRLKRTARRRYTRRKNRICYLQEIFSNEMAKVDDSFFHRLEESFLVEEDKKHERHPIFGNIVDEVAYHEKYPTIYHLRKKLVDSTDKADLRLIYLALAHMIKFRGHFLIEGDLNPDNSDVDKLFIQLVQTYNQLFEENPINASGVDAKAILSARLSKSRRLENLIAQLPGEKKNGLFGNLIALSLGLTPNFKSNFDLAEDAKLQLSKDTYDDDLDNLLAQIGDQYADLFLAAKNLSDAILLSDILRVNTEITKAPLSASMIKRYDEHHQDLTLLKALVRQQLPEKYKEIFFDQSKNGYAGYIDGGASQEEFYKFIKPILEKMDGTEELLVKLNREDLLRKQRTFDNGSIPHQIHLGELHAILRRQEDFYPFLKDNREKIEKILTFRIPYYVGPLARGNSRFAWMTRKSEETITPWNFEEVVDKGASAQSFIERMTNFDKNLPNEKVLPKHSLLYEYFTVYNELTKVKYVTEGMRKPAFLSGEQKKAIVDLLFKTNRKVTVKQLKEDYFKKIECFDSVEISGVEDRFNASLGTYHDLLKIIKDKDFLDNEENEDILEDIVLTLTLFEDREMIEERLKTYAHLFDDKVMKQLKRRRYTGWGRLSRKLINGIRDKQSGKTILDFLKSDGFANRNFMQLIHDDSLTFKEDIQKAQVSGQGDSLHEHIANLAGSPAIKKGILQTVKVVDELVKVMGRHKPENIVIEMARENQTTQKGQKNSRERMKRIEEGIKELGSQILKEHPVENTQLQNEKLYLYYLQNGRDMYVDQELDINRLSDYDVDHIVPQSFLKDDSIDNKVLTRSDKARGKSDNVPSEEVVKKMKNYWRQLLNAKLITQRKFDNLTKAERGGLSELDKAGFIKRQLVETRQITKHVAQILDSRMNTKYDENDKLIREVKVITLKSKLVSDFRKDFQFYKVREINNYHHAHDAYLNAVVGTALIKKYPKLESEFVYGDYKVYDVRKMIAKSEQEIGKATAKYFFYSNIMNFFKTEITLANGEIRKRPLIETNGETGEIVWDKGRDFATVRKVLSMPQVNIVKKTEVQTGGFSKESILPKRNSDKLIARKKDWDPKKYGGFDSPTVAYSVLVVAKVEKGKSKKLKSVKELLGITIMERSSFEKNPIDFLEAKGYKEVKKDLIIKLPKYSLFELENGRKRMLASAGELQKGNELALPSKYVNFLYLASHYEKLKGSPEDNEQKQLFVEQHKHYLDEIIEQISEFSKRVILADANLDKVLSAYNKHRDKPIREQAENIIHLFTLTNLGAPAAFKYFDTTIDRKRYTSTKEVLDATLIHQSITGLYETRIDLSQLGGDGGGSSGGGPAPGGTAPLEEEYRLFLEAPIQNVTLLEQWKREIPKVWAEINPPGLASTQAPIHVQLLSTALPVRVRQYPITLEAKRSLRETIRKFRAAGILRPVHSPWNTPLLPVRKSGTSEYRMVQDLREVNKRVETIHPTVPNPYTLLSLLPPDRIWYSVLDLKDAFFCIPLAPESQLIFAFEWADAEEGESGQLTWTRLPQGFKNSPTLFDEALNRDLQGFRLDHPSVSLLQYVDDLLIAADTQAACLSATRDLLMTLAELGYRVSGKKAQLCQEEVTYLGFKIHKGSRSLSNSRTQAILQIPVPKTKRQVREFLGTIGYCRLWIPGFAELAQPLYAATRGGNDPLVWGEKEEEAFQSLKLALTQPPALALPSLDKPFQLFVEETSGAAKGVLTQALGPWKRPVAYLSKRLDPVAAGWPRCLRAIAAAALLTREASKLTFGQDIEITSSHNLESLLRSPPDKWLTNARITQYQVLLLDPPRVRFKQTAALNPATLLPETDDTLPIHHCLDTLDSLTSTRPDLTDQPLAQAEATLFTDGSSYIRDGKRYAGAAVVTLDSVIWAEPLPIGTSAQKAELIALTKALEWSKDKSVNIYTDSRYAFATLHVHGMIYRERGLLTAGGKAIKNAPEILALLTAVWLPKRVAVMHCKGHQKDDAPTSTGNRRADEVAREVAIRPLSTQATISAGKRTADGSEFEKRTADGSEFESPKKKAKVE

SEQ ID NO: 7380 - protein, 2096 aa, synthetic construct
MPAAKRVKLDGGDKKYSIGLDIGTNSVGWAVITDEYKVPSKKFKVLGNTDRHSIKKNLIGALLFDSGETAEATRLKRTARRRYTRRKNRICYLQEIFSNEMAKVDDSFFHRLEESFLVEEDKKHERHPIFGNIVDEVAYHEKYPTIYHLRKKLVDSTDKADLRLIYLALAHMIKFRGHFLIEGDLNPDNSDVDKLFIQLVQTYNQLFEENPINASGVDAKAILSARLSKSRRLENLIAQLPGEKKNGLFGNLIALSLGLTPNFKSNFDLAEDAKLQLSKDTYDDDLDNLLAQIGDQYADLFLAAKNLSDAILLSDILRVNTEITKAPLSASMIKRYDEHHQDLTLLKALVRQQLPEKYKEIFFDQSKNGYAGYIDGGASQEEFYKFIKPILEKMDGTEELLVKLNREDLLRKQRTFDNGSIPHQIHLGELHAILRRQEDFYPFLKDNREKIEKILTFRIPYYVGPLARGNSRFAWMTRKSEETITPWNFEEVVDKGASAQSFIERMTNFDKNLPNEKVLPKHSLLYEYFTVYNELTKVKYVTEGMRKPAFLSGEQKKAIVDLLFKTNRKVTVKQLKEDYFKKIECFDSVEISGVEDRFNASLGTYHDLLKIIKDKDFLDNEENEDILEDIVLTLTLFEDREMIEERLKTYAHLFDDKVMKQLKRRRYTGWGRLSRKLINGIRDKQSGKTILDFLKSDGFANRNFMQLIHDDSLTFKEDIQKAQVSGQGDSLHEHIANLAGSPAIKKGILQTVKVVDELVKVMGRHKPENIVIEMARENQTTQKGQKNSRERMKRIEEGIKELGSQILKEHPVENTQLQNEKLYLYYLQNGRDMYVDQELDINRLSDYDVDHIVPQSFLKDDSIDNKVLTRSDKARGKSDNVPSEEVVKKMKNYWRQLLNAKLITQRKFDNLTKAERGGLSELDKAGFIKRQLVETRQITKHVAQILDSRMNTKYDENDKLIREVKVITLKSKLVSDFRKDFQFYKVREINNYHHAHDAYLNAVVGTALIKKYPKLESEFVYGDYKVYDVRKMIAKSEQEIGKATAKYFFYSNIMNFFKTEITLANGEIRKRPLIETNGETGEIVWDKGRDFATVRKVLSMPQVNIVKKTEVQTGGFSKESILPKRNSDKLIARKKDWDPKKYGGFDSPTVAYSVLVVAKVEKGKSKKLKSVKELLGITIMERSSFEKNPIDFLEAKGYKEVKKDLIIKLPKYSLFELENGRKRMLASAGELQKGNELALPSKYVNFLYLASHYEKLKGSPEDNEQKQLFVEQHKHYLDEIIEQISEFSKRVILADANLDKVLSAYNKHRDKPIREQAENIIHLFTLTNLGAPAAFKYFDTTIDRKRYTSTKEVLDATLIHQSITGLYETRIDLSQLGGDGGGSSGGGPAPGGTAPLEEEYRLFLEAPIQNVTLLEQWKREIPKVWAEINPPGLASTQAPIHVQLLSTALPVRVRQYPITLEAKRSLRETIRKFRAAGILRPVHSPWNTPLLPVRKSGTSEYRMVQDLREVNKRVETIHPTVPNPYTLLSLLPPDRIWYSVLDLKDAFFCIPLAPESQLIFAFEWADAEEGESGQLTWTRLPQGFKNSPTLFNEALNRDLQGFRLDHPSVSLLQYVDDLLIAADTQAACLSATRDLLMTLAELGYRVSGKKAQLCQEEVTYLGFKIHKGSRSLSNSRTQAILQIPVPKTKRQVREFLGTIGYCRLWIPGFAELAQPLYAATRPGNDPLVWGEKEEEAFQSLKLALTQPPALALPSLDKPFQLFVEETSGAAKGVLTQALGPWKRPVAYLSKRLDPVAAGWPRCLRAIAAAALLTREASKLTFGQDIEITSSHNLESLLRSPPDKWLTNARITQYQVLLLDPPRVRFKQTAALNPATLLPETDDTLPIHHCLDTLDSLTSTRPDLTDQPLAQAEATLFTDGSSYIRDGKRYAGAAVVTLDSVIWAEPLPIGTSAQKAELIALTKALEWSKDKSVNIYTDSRYAFATLHVHGMIYRERGWLTAGGKAIKNAPEILALLTAVWLPKRVAVMHCKGHQKDDAPTSTGNRRADEVAREVAIRPLSTQATISAGKRTADGSEFEKRTADGSEFESPKKKAKVE

SEQ ID NO: 7381 - protein, 2096 aa, synthetic construct
MPAAKRVKLDGGDKKYSIGLDIGTNSVGWAVITDEYKVPSKKFKVLGNTDRHSIKKNLIGALLFDSGETAEATRLKRTARRRYTRRKNRICYLQEIFSNEMAKVDDSFFHRLEESFLVEEDKKHERHPIFGNIVDEVAYHEKYPTIYHLRKKLVDSTDKADLRLIYLALAHMIKFRGHFLIEGDLNPDNSDVDKLFIQLVQTYNQLFEENPINASGVDAKAILSARLSKSRRLENLIAQLPGEKKNGLFGNLIALSLGLTPNFKSNFDLAEDAKLQLSKDTYDDDLDNLLAQIGDQYADLFLAAKNLSDAILLSDILRVNTEITKAPLSASMIKRYDEHHQDLTLLKALVRQQLPEKYKEIFFDQSKNGYAGYIDGGASQEEFYKFIKPILEKMDGTEELLVKLNREDLLRKQRTFDNGSIPHQIHLGELHAILRRQEDFYPFLKDNREKIEKILTFRIPYYVGPLARGNSRFAWMTRKSEETITPWNFEEVVDKGASAQSFIERMTNFDKNLPNEKVLPKHSLLYEYFTVYNELTKVKYVTEGMRKPAFLSGEQKKAIVDLLFKTNRKVTVKQLKEDYFKKIECFDSVEISGVEDRFNASLGTYHDLLKIIKDKDFLDNEENEDILEDIVLTLTLFEDREMIEERLKTYAHLFDDKVMKQLKRRRYTGWGRLSRKLINGIRDKQSGKTILDFLKSDGFANRNFMQLIHDDSLTFKEDIQKAQVSGQGDSLHEHIANLAGSPAIKKGILQTVKVVDELVKVMGRHKPENIVIEMARENQTTQKGQKNSRERMKRIEEGIKELGSQILKEHPVENTQLQNEKLYLYYLQNGRDMYVDQELDINRLSDYDVDHIVPQSFLKDDSIDNKVLTRSDKARGKSDNVPSEEVVKKMKNYWRQLLNAKLITQRKFDNLTKAERGGLSELDKAGFIKRQLVETRQITKHVAQILDSRMNTKYDENDKLIREVKVITLKSKLVSDFRKDFQFYKVREINNYHHAHDAYLNAVVGTALIKKYPKLESEFVYGDYKVYDVRKMIAKSEQEIGKATAKYFFYSNIMNFFKTEITLANGEIRKRPLIETNGETGEIVWDKGRDFATVRKVLSMPQVNIVKKTEVQTGGFSKESILPKRNSDKLIARKKDWDPKKYGGFDSPTVAYSVLVVAKVEKGKSKKLKSVKELLGITIMERSSFEKNPIDFLEAKGYKEVKKDLIIKLPKYSLFELENGRKRMLASAGELQKGNELALPSKYVNFLYLASHYEKLKGSPEDNEQKQLFVEQHKHYLDEIIEQISEFSKRVILADANLDKVLSAYNKHRDKPIREQAENIIHLFTLTNLGAPAAFKYFDTTIDRKRYTSTKEVLDATLIHQSITGLYETRIDLSQLGGDGGGSSGGGPAPGGTAPLEEEYRLFLEAPIQNVTLLEQWKREIPKVWAEINPPGLASTQAPIHVQLLSTALPVRVRQYPITLEAKRSLRETIRKFRAAGILRPVHSPWNTPLLPVRKSGTSEYRMVQDLREVNKRVETIHPTVPNPYTLLSLLPPDRIWYSVLDLKDAFFCIPLAPESQLIFAFEWADAEEGESGQLTWTRLPQGFKNSPTLFNEALNRDLQGFRLDHPSVSLLQYVDDLLIAADTQAACLSATRDLLMTLAELGYRVSGKKAQLCQEEVTYLGFKIHKGSRSLSNSRTQAILQIPVPKTKRQVREFLGKIGYCRLFIPGFAELAQPLYAATRPGNDPLVWGEKEEEAFQSLKLALTQPPALALPSLDKPFQLFVEETSGAAKGVLTQALGPWKRPVAYLSKRLDPVAAGWPRCLRAIAAAALLTREASKLTFGQDIEITSSHNLESLLRSPPDKWLTNARITQYQVLLLDPPRVRFKQTAALNPATLLPETDDTLPIHHCLDTLDSLTSTRPDLTDQPLAQAEATLFTDGSSYIRDGKRYAGAAVVTLDSVIWAEPLPIGTSAQKAELIALTKALEWSKDKSVNIYTDSRYAFATLHVHGMIYRERGWLTAGGKAIKNAPEILALLTAVWLPKRVAVMHCKGHQKDDAPTSTGNRRADEVAREVAIRPLSTQATISAGKRTADGSEFEKRTADGSEFESPKKKAKVE

SEQ ID NO: 7382 - protein, 2100 aa, synthetic construct
MPAAKRVKLDGGDKKYSIGLDIGTNSVGWAVITDEYKVPSKKFKVLGNTDRHSIKKNLIGALLFDSGETAEATRLKRTARRRYTRRKNRICYLQEIFSNEMAKVDDSFFHRLEESFLVEEDKKHERHPIFGNIVDEVAYHEKYPTIYHLRKKLVDSTDKADLRLIYLALAHMIKFRGHFLIEGDLNPDNSDVDKLFIQLVQTYNQLFEENPINASGVDAKAILSARLSKSRRLENLIAQLPGEKKNGLFGNLIALSLGLTPNFKSNFDLAEDAKLQLSKDTYDDDLDNLLAQIGDQYADLFLAAKNLSDAILLSDILRVNTEITKAPLSASMIKRYDEHHQDLTLLKALVRQQLPEKYKEIFFDQSKNGYAGYIDGGASQEEFYKFIKPILEKMDGTEELLVKLNREDLLRKQRTFDNGSIPHQIHLGELHAILRRQEDFYPFLKDNREKIEKILTFRIPYYVGPLARGNSRFAWMTRKSEETITPWNFEEVVDKGASAQSFIERMTNFDKNLPNEKVLPKHSLLYEYFTVYNELTKVKYVTEGMRKPAFLSGEQKKAIVDLLFKTNRKVTVKQLKEDYFKKIECFDSVEISGVEDRFNASLGTYHDLLKIIKDKDFLDNEENEDILEDIVLTLTLFEDREMIEERLKTYAHLFDDKVMKQLKRRRYTGWGRLSRKLINGIRDKQSGKTILDFLKSDGFANRNFMQLIHDDSLTFKEDIQKAQVSGQGDSLHEHIANLAGSPAIKKGILQTVKVVDELVKVMGRHKPENIVIEMARENQTTQKGQKNSRERMKRIEEGIKELGSQILKEHPVENTQLQNEKLYLYYLQNGRDMYVDQELDINRLSDYDVDHIVPQSFLKDDSIDNKVLTRSDKARGKSDNVPSEEVVKKMKNYWRQLLNAKLITQRKFDNLTKAERGGLSELDKAGFIKRQLVETRQITKHVAQILDSRMNTKYDENDKLIREVKVITLKSKLVSDFRKDFQFYKVREINNYHHAHDAYLNAVVGTALIKKYPKLESEFVYGDYKVYDVRKMIAKSEQEIGKATAKYFFYSNIMNFFKTEITLANGEIRKRPLIETNGETGEIVWDKGRDFATVRKVLSMPQVNIVKKTEVQTGGFSKESILPKRNSDKLIARKKDWDPKKYGGFDSPTVAYSVLVVAKVEKGKSKKLKSVKELLGITIMERSSFEKNPIDFLEAKGYKEVKKDLIIKLPKYSLFELENGRKRMLASAGELQKGNELALPSKYVNFLYLASHYEKLKGSPEDNEQKQLFVEQHKHYLDEIIEQISEFSKRVILADANLDKVLSAYNKHRDKPIREQAENIIHLFTLTNLGAPAAFKYFDTTIDRKRYTSTKEVLDATLIHQSITGLYETRIDLSQLGGDGGGSSGGGPAPGGTVSLQDEHRLFDIPVTTSLPDVWLQDFPQAWAETGGLGRAKCQAPIIIDLKPTAVPVSIKQYPMSLEAHMGIRQHIIKFLELGVLRPCRSPWNTPLLPVKKPGTQDYRPVQDLREINKRTVDIHPTVPNPYNLLSTLKPDYSWYTVLDLKDAFFCLPLAPQSQELFAFEWKDPERGISGQLTWTRLPQGFKNSPTLFNEALHRDLTDFRTQHPEVTLLQYVDDLLLAAPTKKACTQGTRHLLQELGEKGYRASAKKAQICQTKVTYLGYILSEGKRWLTPGRIETVARIPPPRNPREVREFLGTAGFCRLWIPGFAELAAPLYALTKPSTPFTWQTEHQLAFEALKKALLSAPALGLPDTSKPFTLFLDERQGIAKGVLTQKLGPWKRPVAYLSKKLDPVAAGWPPCLRIMAATAMLVKDSAKLTLGQPLTVITPHTLEAIVRQPPDRWITNARLTHYQALLLDTDRVQFGPPVTLNPATLLPVPENQPSPHDCRQVLAETHGTREDLKDQELPDADHTWYTDGSSYLDSGTRRAGAAVVDGHNTIWAQSLPPGTSAQKAELIALTKALELSKGKKANIYTDSRYAFATAHTHGSIYERRGWLTSEGKEIKNKAEIIALLKALFLPQEVAIIHCPGHQKGQDPVAVGNRQADRVARQAAMAEVLTLATEPDNTSHITAGKRTADGSEFEKRTADGSEFESPKKKAKVE

SEQ ID NO: 7383 - protein, 2085 aa, synthetic construct
MPAAKRVKLDGGDKKYSIGLDIGTNSVGWAVITDEYKVPSKKFKVLGNTDRHSIKKNLIGALLFDSGETAEATRLKRTARRRYTRRKNRICYLQEIFSNEMAKVDDSFFHRLEESFLVEEDKKHERHPIFGNIVDEVAYHEKYPTIYHLRKKLVDSTDKADLRLIYLALAHMIKFRGHFLIEGDLNPDNSDVDKLFIQLVQTYNQLFEENPINASGVDAKAILSARLSKSRRLENLIAQLPGEKKNGLFGNLIALSLGLTPNFKSNFDLAEDAKLQLSKDTYDDDLDNLLAQIGDQYADLFLAAKNLSDAILLSDILRVNTEITKAPLSASMIKRYDEHHQDLTLLKALVRQQLPEKYKEIFFDQSKNGYAGYIDGGASQEEFYKFIKPILEKMDGTEELLVKLNREDLLRKQRTFDNGSIPHQIHLGELHAILRRQEDFYPFLKDNREKIEKILTFRIPYYVGPLARGNSRFAWMTRKSEETITPWNFEEVVDKGASAQSFIERMTNFDKNLPNEKVLPKHSLLYEYFTVYNELTKVKYVTEGMRKPAFLSGEQKKAIVDLLFKTNRKVTVKQLKEDYFKKIECFDSVEISGVEDRFNASLGTYHDLLKIIKDKDFLDNEENEDILEDIVLTLTLFEDREMIEERLKTYAHLFDDKVMKQLKRRRYTGWGRLSRKLINGIRDKQSGKTILDFLKSDGFANRNFMQLIHDDSLTFKEDIQKAQVSGQGDSLHEHIANLAGSPAIKKGILQTVKVVDELVKVMGRHKPENIVIEMARENQTTQKGQKNSRERMKRIEEGIKELGSQILKEHPVENTQLQNEKLYLYYLQNGRDMYVDQELDINRLSDYDVDHIVPQSFLKDDSIDNKVLTRSDKARGKSDNVPSEEVVKKMKNYWRQLLNAKLITQRKFDNLTKAERGGLSELDKAGFIKRQLVETRQITKHVAQILDSRMNTKYDENDKLIREVKVITLKSKLVSDFRKDFQFYKVREINNYHHAHDAYLNAVVGTALIKKYPKLESEFVYGDYKVYDVRKMIAKSEQEIGKATAKYFFYSNIMNFFKTEITLANGEIRKRPLIETNGETGEIVWDKGRDFATVRKVLSMPQVNIVKKTEVQTGGFSKESILPKRNSDKLIARKKDWDPKKYGGFDSPTVAYSVLVVAKVEKGKSKKLKSVKELLGITIMERSSFEKNPIDFLEAKGYKEVKKDLIIKLPKYSLFELENGRKRMLASAGELQKGNELALPSKYVNFLYLASHYEKLKGSPEDNEQKQLFVEQHKHYLDEIIEQISEFSKRVILADANLDKVLSAYNKHRDKPIREQAENIIHLFTLTNLGAPAAFKYFDTTIDRKRYTSTKEVLDATLIHQSITGLYETRIDLSQLGGDGGGSSGGGPAPGGVPWILKKPLELTIKLDLEEQQGTLLNNSILSKKGKEELKQLFEKYSALWQSWENQVGHRRIRPHKIATGTVKPTPQKQYHINPKAKPDIQIVINDLLKQGVLIQKESTMNTPVYPVPKPNGRWRMVLDYRAVNKVTPLIAVQNQHSYGILGSLFKGRYKTTIDLSNGFWAHPIVPEDYWITAFTWQGKQYCWTVLPQGFLNSPGLFTGDVVDLLQGIPNVEVYVDDVYISHDSEKEHLEYLDILFNRLKEAGYIISLKKSNIANSIVDFLGFQITNEGRGLTDTFKEKLENITAPTTLKQLQSILGLLNFARNFIPDFTELIAPLYALIPKSTKNYVPWQIEHSTTLETLITKLNGAEYLQGRKGDKTLIMKVNASYTTGYIRYYNEGEKKPISYVSIVFSKTELKFTELEKLLTTVHKGLLKALDLSMGQNIHVYSPIVSMQNIQKTPQTAKKALASRWLSWLSYLEDPRIRFFYDPQMPALKDLPAVDTGKDNKKHPSNFQHIFYTDGSAITSPTKEGHLNAGMGIVYFINKDGNLQKQQEWSISLGNHTAQFAEIAAFEFALKKCLPLGGNILVVTDSNYVAKAYNEELDVWASNGFVNNRKKPLKHISKWKSVADLKRLRPDVVVTHEPGHQKLDSSPHAYGNNLADQLATQASFKVHAGKRTADGSEFEKRTADGSEFESPKKKAKVE

SEQ ID NO: 7384 - protein, 2093 aa, synthetic construct
MPAAKRVKLDGGDKKYSIGLDIGTNSVGWAVITDEYKVPSKKFKVLGNTDRHSIKKNLIGALLFDSGETAEATRLKRTARRRYTRRKNRICYLQEIFSNEMAKVDDSFFHRLEESFLVEEDKKHERHPIFGNIVDEVAYHEKYPTIYHLRKKLVDSTDKADLRLIYLALAHMIKFRGHFLIEGDLNPDNSDVDKLFIQLVQTYNQLFEENPINASGVDAKAILSARLSKSRRLENLIAQLPGEKKNGLFGNLIALSLGLTPNFKSNFDLAEDAKLQLSKDTYDDDLDNLLAQIGDQYADLFLAAKNLSDAILLSDILRVNTEITKAPLSASMIKRYDEHHQDLTLLKALVRQQLPEKYKEIFFDQSKNGYAGYIDGGASQEEFYKFIKPILEKMDGTEELLVKLNREDLLRKQRTFDNGSIPHQIHLGELHAILRRQEDFYPFLKDNREKIEKILTFRIPYYVGPLARGNSRFAWMTRKSEETITPWNFEEVVDKGASAQSFIERMTNFDKNLPNEKVLPKHSLLYEYFTVYNELTKVKYVTEGMRKPAFLSGEQKKAIVDLLFKTNRKVTVKQLKEDYFKKIECFDSVEISGVEDRFNASLGTYHDLLKIIKDKDFLDNEENEDILEDIVLTLTLFEDREMIEERLKTYAHLFDDKVMKQLKRRRYTGWGRLSRKLINGIRDKQSGKTILDFLKSDGFANRNFMQLIHDDSLTFKEDIQKAQVSGQGDSLHEHIANLAGSPAIKKGILQTVKVVDELVKVMGRHKPENIVIEMARENQTTQKGQKNSRERMKRIEEGIKELGSQILKEHPVENTQLQNEKLYLYYLQNGRDMYVDQELDINRLSDYDVDHIVPQSFLKDDSIDNKVLTRSDKARGKSDNVPSEEVVKKMKNYWRQLLNAKLITQRKFDNLTKAERGGLSELDKAGFIKRQLVETRQITKHVAQILDSRMNTKYDENDKLIREVKVITLKSKLVSDFRKDFQFYKVREINNYHHAHDAYLNAVVGTALIKKYPKLESEFVYGDYKVYDVRKMIAKSEQEIGKATAKYFFYSNIMNFFKTEITLANGEIRKRPLIETNGETGEIVWDKGRDFATVRKVLSMPQVNIVKKTEVQTGGFSKESILPKRNSDKLIARKKDWDPKKYGGFDSPTVAYSVLVVAKVEKGKSKKLKSVKELLGITIMERSSFEKNPIDFLEAKGYKEVKKDLIIKLPKYSLFELENGRKRMLASAGELQKGNELALPSKYVNFLYLASHYEKLKGSPEDNEQKQLFVEQHKHYLDEIIEQISEFSKRVILADANLDKVLSAYNKHRDKPIREQAENIIHLFTLTNLGAPAAFKYFDTTIDRKRYTSTKEVLDATLIHQSITGLYETRIDLSQLGGDGGGSSGGGPAPGGTLQLEEEYRLFEPESTQKQEMDIWLKNFPQAWAETGGMGTAHCQAPVLIQLKATATPISIRQYPMPHEAYQGIKPHIRRMLDQGILKPCQSPWNTPLLPVKKPGTEDYRPVQDLREVNKRVEDIHPTVPNPYNLLSTLPPSHPWYTVLDLKDAFFCLRLHSESQLLFAFEWRDPEIGLSGQLTWTRLPQGFKNSPTLFNEALHSDLADFRVRYPALVLLQYVDDLLLAAATRTECLEGTKALLETLGNKGYRASAKKAQICLQEVTYLGYSLKDGQRWLTKARKEAILSIPVPKNSRQVREFLGTAGYCRLWIPGFAELAAPLYPLTRPGTLFQWGTEQQLAFEDIKKALLSSPALGLPDITKPFELFIDENSGFAKGVLVQKLGPWKRPVAYLSKKLDTVASGWPPCLRMVAAIAILVKDAGKLTLGQPLTILTSHPVEALVRQPPNKWLSNARMTHYQAMLLDAERVHFGPTVSLNPATLLPLPSGGNHHDCLQILAETHGTRPDLTDQPLPDADLTWYTDGSSFIRNGEREAGAAVTTESEVIWAAPLPPGTSAQRAELIALTQALKMAEGKKLTVYTDSRYAFATTHVHGEIYRRRGWLTSEGKEIKNKNEILALLEALFLPKRLSIIHCPGHQKGDSPQAKGNRLADDTAKKAATETHSSLTVLPAGKRTADGSEFEKRTADGSEFESPKKKAKVE

SEQ ID NO: 7385 - protein, 2174 aa, synthetic construct
MPAAKRVKLDGGDKKYSIGLDIGTNSVGWAVITDEYKVPSKKFKVLGNTDRHSIKKNLIGALLFDSGETAEATRLKRTARRRYTRRKNRICYLQEIFSNEMAKVDDSFFHRLEESFLVEEDKKHERHPIFGNIVDEVAYHEKYPTIYHLRKKLVDSTDKADLRLIYLALAHMIKFRGHFLIEGDLNPDNSDVDKLFIQLVQTYNQLFEENPINASGVDAKAILSARLSKSRRLENLIAQLPGEKKNGLFGNLIALSLGLTPNFKSNFDLAEDAKLQLSKDTYDDDLDNLLAQIGDQYADLFLAAKNLSDAILLSDILRVNTEITKAPLSASMIKRYDEHHQDLTLLKALVRQQLPEKYKEIFFDQSKNGYAGYIDGGASQEEFYKFIKPILEKMDGTEELLVKLNREDLLRKQRTFDNGSIPHQIHLGELHAILRRQEDFYPFLKDNREKIEKILTFRIPYYVGPLARGNSRFAWMTRKSEETITPWNFEEVVDKGASAQSFIERMTNFDKNLPNEKVLPKHSLLYEYFTVYNELTKVKYVTEGMRKPAFLSGEQKKAIVDLLFKTNRKVTVKQLKEDYFKKIECFDSVEISGVEDRFNASLGTYHDLLKIIKDKDFLDNEENEDILEDIVLTLTLFEDREMIEERLKTYAHLFDDKVMKQLKRRRYTGWGRLSRKLINGIRDKQSGKTILDFLKSDGFANRNFMQLIHDDSLTFKEDIQKAQVSGQGDSLHEHIANLAGSPAIKKGILQTVKVVDELVKVMGRHKPENIVIEMARENQTTQKGQKNSRERMKRIEEGIKELGSQILKEHPVENTQLQNEKLYLYYLQNGRDMYVDQELDINRLSDYDVDHIVPQSFLKDDSIDNKVLTRSDKARGKSDNVPSEEVVKKMKNYWRQLLNAKLITQRKFDNLTKAERGGLSELDKAGFIKRQLVETRQITKHVAQILDSRMNTKYDENDKLIREVKVITLKSKLVSDFRKDFQFYKVREINNYHHAHDAYLNAVVGTALIKKYPKLESEFVYGDYKVYDVRKMIAKSEQEIGKATAKYFFYSNIMNFFKTEITLANGEIRKRPLIETNGETGEIVWDKGRDFATVRKVLSMPQVNIVKKTEVQTGGFSKESILPKRNSDKLIARKKDWDPKKYGGFDSPTVAYSVLVVAKVEKGKSKKLKSVKELLGITIMERSSFEKNPIDFLEAKGYKEVKKDLIIKLPKYSLFELENGRKRMLASAGELQKGNELALPSKYVNFLYLASHYEKLKGSPEDNEQKQLFVEQHKHYLDEIIEQISEFSKRVILADANLDKVLSAYNKHRDKPIREQAENIIHLFTLTNLGAPAAFKYFDTTIDRKRYTSTKEVLDATLIHQSITGLYETRIDLSQLGGDGGGSSGGGPAPGGMNPLQLLQPLPAEIKGTKLLAHWNSGATITCIPESFLEDEQPIKKTLIKTIHGEKQQNVYYVTFKVKGRKVEAEVIASPYEYILLSPTDVPWLTQQPLQLTILVPLQEYQEKILSKTALPEDQKQQLKTLFVKYDNLWQHWENQVGHRKIRPHNIATGDYPPRPQKQYPINPKAKPSIQIVIDDLLKQGVLTPQNSTMNTPVYPVPKPDGRWRMVLDYREVNKTIPLTAAQNQHSAGILATIVRQKYKTTLDLANGFWAHPITPESYWLTAFTWQGKQYCWTRLPQGFLNSPALFNADVVDLLKEIPNVQVYVDDIYLSHDDPKEHVQQLEKVFQILLQAGYVVSLKKSEIGQKTVEFLGFNITKEGRGLTDTFKTKLLNITPPKDLKQLQSILGLLNFARNFIPNFAELVQPLYNLIAPAKGKYIEWSEENTKQLNMVIEALNTASNLEERLPEQRLVIKVNTSPSAGYVRYYNETGKKPIMYLNYVFSKAELKFSMLEKLLTTMHKALIKAMDLAMGQEILVYSPIVSMTKIQKTPLPERKALPIRWITWMTYLEDPRIQFHYDKTLPELKHIPDVYTSSQSPVKHPSQYEGVFYTDGSAIKSPDPTKSNNAGMGIVHATYKPEYQVLNQWSIPLGNHTAQMAEIAAVEFACKKALKIPGPVLVITDSFYVAESANKELPYWKSNGFVNNKKKPLKHISKWKSIAECLSMKPDITIQHEKGISLQIPVFILKGNALADKLATQGSYVVNAGKRTADGSEFEKRTADGSEFESPKKKAKVE

SEQ ID NO: 7386 - protein, 2125 aa, synthetic construct
MPAAKRVKLDGGDKKYSIGLDIGTNSVGWAVITDEYKVPSKKFKVLGNTDRHSIKKNLIGALLFDSGETAEATRLKRTARRRYTRRKNRICYLQEIFSNEMAKVDDSFFHRLEESFLVEEDKKHERHPIFGNIVDEVAYHEKYPTIYHLRKKLVDSTDKADLRLIYLALAHMIKFRGHFLIEGDLNPDNSDVDKLFIQLVQTYNQLFEENPINASGVDAKAILSARLSKSRRLENLIAQLPGEKKNGLFGNLIALSLGLTPNFKSNFDLAEDAKLQLSKDTYDDDLDNLLAQIGDQYADLFLAAKNLSDAILLSDILRVNTEITKAPLSASMIKRYDEHHQDLTLLKALVRQQLPEKYKEIFFDQSKNGYAGYIDGGASQEEFYKFIKPILEKMDGTEELLVKLNREDLLRKQRTFDNGSIPHQIHLGELHAILRRQEDFYPFLKDNREKIEKILTFRIPYYVGPLARGNSRFAWMTRKSEETITPWNFEEVVDKGASAQSFIERMTNFDKNLPNEKVLPKHSLLYEYFTVYNELTKVKYVTEGMRKPAFLSGEQKKAIVDLLFKTNRKVTVKQLKEDYFKKIECFDSVEISGVEDRFNASLGTYHDLLKIIKDKDFLDNEENEDILEDIVLTLTLFEDREMIEERLKTYAHLFDDKVMKQLKRRRYTGWGRLSRKLINGIRDKQSGKTILDFLKSDGFANRNFMQLIHDDSLTFKEDIQKAQVSGQGDSLHEHIANLAGSPAIKKGILQTVKVVDELVKVMGRHKPENIVIEMARENQTTQKGQKNSRERMKRIEEGIKELGSQILKEHPVENTQLQNEKLYLYYLQNGRDMYVDQELDINRLSDYDVDHIVPQSFLKDDSIDNKVLTRSDKARGKSDNVPSEEVVKKMKNYWRQLLNAKLITQRKFDNLTKAERGGLSELDKAGFIKRQLVETRQITKHVAQILDSRMNTKYDENDKLIREVKVITLKSKLVSDFRKDFQFYKVREINNYHHAHDAYLNAVVGTALIKKYPKLESEFVYGDYKVYDVRKMIAKSEQEIGKATAKYFFYSNIMNFFKTEITLANGEIRKRPLIETNGETGEIVWDKGRDFATVRKVLSMPQVNIVKKTEVQTGGFSKESILPKRNSDKLIARKKDWDPKKYGGFDSPTVAYSVLVVAKVEKGKSKKLKSVKELLGITIMERSSFEKNPIDFLEAKGYKEVKKDLIIKLPKYSLFELENGRKRMLASAGELQKGNELALPSKYVNFLYLASHYEKLKGSPEDNEQKQLFVEQHKHYLDEIIEQISEFSKRVILADANLDKVLSAYNKHRDKPIREQAENIIHLFTLTNLGAPAAFKYFDTTIDRKRYTSTKEVLDATLIHQSITGLYETRIDLSQLGGDGGGSSGGGPAPGGLLGRDLLTKLKAQIQFSTEGPQVTWEDRPAMCLVLNLEEEYRLHEKPVPPSIDPSWLQLFPMVWAEKAGMGLANQVPPVVVELKSDASPVAVRQYPMSKEAREGIRPHIQRFLDLGILVPCQSPWNTPLLPVKKPGTNDYRPVQDLREVNKRVQDIHPTVPNPYNLLSSLPPSHTWYSVLDLKDAFFCLKLHPNSQPLFAFEWRDPEKGNTGQLTWTRLPQGFKNSPTLFNEALHRDLASFRALNPQVVMLQYVDDLLVAAPTYRDCKEGTRRLLQELSKLGYRVSAKKAQLCREEVTYLGYLLKGGKRWLTPARKATVMKIPTPTTPRQVREFLGTAGFCRLWIPGFASLAAPLYPLTRPKVPFTWTEAHQEAFGRIKEALLSAPALALPDLTKPFALYVDEKEGVARGVLTQTLGPWRRPVAYLSKKLDPVASGWPTCLKAIAAVALLLKDADKLTLGQNVLVIAPHNLESIVRQPPDRWMTNARMTHYQSLLLNERVSFAPPAILNPATLLPVESDDTPIHICSEILAEETGTRPDLRDQPLPGVPAWYTDGSSFIMDGRRQAGAAIVDNKRTVWASNLPEGTSAQKAELIALTQALRLAEGKSINIYTDSRYAFATAHVHGAIYKQRGWLTSAGKDIKNKEEILALLEAIHLPKRVAIIHCPGHQRGTDPVATGNRKADEAAKQAAQSTRILTETTKNAGKRTADGSEFEKRTADGSEFESPKKKAKVE

SEQ ID NO: 7387 - protein, 2216 aa, synthetic construct
MPAAKRVKLDGGDKKYSIGLDIGTNSVGWAVITDEYKVPSKKFKVLGNTDRHSIKKNLIGALLFDSGETAEATRLKRTARRRYTRRKNRICYLQEIFSNEMAKVDDSFFHRLEESFLVEEDKKHERHPIFGNIVDEVAYHEKYPTIYHLRKKLVDSTDKADLRLIYLALAHMIKFRGHFLIEGDLNPDNSDVDKLFIQLVQTYNQLFEENPINASGVDAKAILSARLSKSRRLENLIAQLPGEKKNGLFGNLIALSLGLTPNFKSNFDLAEDAKLQLSKDTYDDDLDNLLAQIGDQYADLFLAAKNLSDAILLSDILRVNTEITKAPLSASMIKRYDEHHQDLTLLKALVRQQLPEKYKEIFFDQSKNGYAGYIDGGASQEEFYKFIKPILEKMDGTEELLVKLNREDLLRKQRTFDNGSIPHQIHLGELHAILRRQEDFYPFLKDNREKIEKILTFRIPYYVGPLARGNSRFAWMTRKSEETITPWNFEEVVDKGASAQSFIERMTNFDKNLPNEKVLPKHSLLYEYFTVYNELTKVKYVTEGMRKPAFLSGEQKKAIVDLLFKTNRKVTVKQLKEDYFKKIECFDSVEISGVEDRFNASLGTYHDLLKIIKDKDFLDNEENEDILEDIVLTLTLFEDREMIEERLKTYAHLFDDKVMKQLKRRRYTGWGRLSRKLINGIRDKQSGKTILDFLKSDGFANRNFMQLIHDDSLTFKEDIQKAQVSGQGDSLHEHIANLAGSPAIKKGILQTVKVVDELVKVMGRHKPENIVIEMARENQTTQKGQKNSRERMKRIEEGIKELGSQILKEHPVENTQLQNEKLYLYYLQNGRDMYVDQELDINRLSDYDVDHIVPQSFLKDDSIDNKVLTRSDKARGKSDNVPSEEVVKKMKNYWRQLLNAKLITQRKFDNLTKAERGGLSELDKAGFIKRQLVETRQITKHVAQILDSRMNTKYDENDKLIREVKVITLKSKLVSDFRKDFQFYKVREINNYHHAHDAYLNAVVGTALIKKYPKLESEFVYGDYKVYDVRKMIAKSEQEIGKATAKYFFYSNIMNFFKTEITLANGEIRKRPLIETNGETGEIVWDKGRDFATVRKVLSMPQVNIVKKTEVQTGGFSKESILPKRNSDKLIARKKDWDPKKYGGFDSPTVAYSVLVVAKVEKGKSKKLKSVKELLGITIMERSSFEKNPIDFLEAKGYKEVKKDLIIKLPKYSLFELENGRKRMLASAGELQKGNELALPSKYVNFLYLASHYEKLKGSPEDNEQKQLFVEQHKHYLDEIIEQISEFSKRVILADANLDKVLSAYNKHRDKPIREQAENIIHLFTLTNLGAPAAFKYFDTTIDRKRYTSTKEVLDATLIHQSITGLYETRIDLSQLGGDGGGSSGGGPAPGGTLGDQGSRGSDPLPEPRVTLTVEGIPTEFLVNTGAEHSVLTKPMGKMGSKRTVVAGATGSKVYPWTTKRLLKIGQKQVTHSFLVIPECPAPLLGRDLLTKLKAQIQFSTEGPQVTWEDRPAMCLVLNLEEEYRLHEKPVPPSIDPSWLQLFPMVWAEKAGMGLANQVPPVVVELKSDASPVAVRQYPMSKEAREGIRPHIQRFLDLGILVPCQSPWNTPLLPVKKPGTNDYRPVQDLREVNKRVQDIHPTVPNPYNLLSSLPPSHTWYSVLDLKDAFFCLKLHPNSQPLFAFEWRDPEKGNTGQLTWTRLPQGFKNSPTLFNEALHRDLASFRALNPQVVMLQYVDDLLVAAPTYRDCKEGTRRLLQELSKLGYRVSAKKAQLCREEVTYLGYLLKGGKRWLTPARKATVMKIPTPTTPRQVREFLGTAGFCRLWIPGFASLAAPLYPLTRPKVPFTWTEAHQEAFGRIKEALLSAPALALPDLTKPFALYVDEKEGVARGVLTQTLGPWRRPVAYLSKKLDPVASGWPTCLKAIAAVALLLKDADKLTLGQNVLVIAPHNLESIVRQPPDRWMTNARMTHYQSLLLNERVSFAPPAILNPATLLPVESDDTPIHICSEILAEETGTRPDLRDQPLPGVPAWYTDGSSFIMDGRRQAGAAIVDNKRTVWASNLPEGTSAQKAELIALTQALRLAEGKSINIYTDSRYAFATAHVHGAIYKQRGWLTSAGKDIKNKEEILALLEAIHLPKRVAIIHCPGHQRGTDPVATGNRKADEAAKQAAQSTRILTETTKNAGKRTADGSEFEKRTADGSEFESPKKKAKVE

SEQ ID NO: 7388 - protein, 2216 aa, synthetic construct
MPAAKRVKLDGGDKKYSIGLDIGTNSVGWAVITDEYKVPSKKFKVLGNTDRHSIKKNLIGALLFDSGETAEATRLKRTARRRYTRRKNRICYLQEIFSNEMAKVDDSFFHRLEESFLVEEDKKHERHPIFGNIVDEVAYHEKYPTIYHLRKKLVDSTDKADLRLIYLALAHMIKFRGHFLIEGDLNPDNSDVDKLFIQLVQTYNQLFEENPINASGVDAKAILSARLSKSRRLENLIAQLPGEKKNGLFGNLIALSLGLTPNFKSNFDLAEDAKLQLSKDTYDDDLDNLLAQIGDQYADLFLAAKNLSDAILLSDILRVNTEITKAPLSASMIKRYDEHHQDLTLLKALVRQQLPEKYKEIFFDQSKNGYAGYIDGGASQEEFYKFIKPILEKMDGTEELLVKLNREDLLRKQRTFDNGSIPHQIHLGELHAILRRQEDFYPFLKDNREKIEKILTFRIPYYVGPLARGNSRFAWMTRKSEETITPWNFEEVVDKGASAQSFIERMTNFDKNLPNEKVLPKHSLLYEYFTVYNELTKVKYVTEGMRKPAFLSGEQKKAIVDLLFKTNRKVTVKQLKEDYFKKIECFDSVEISGVEDRFNASLGTYHDLLKIIKDKDFLDNEENEDILEDIVLTLTLFEDREMIEERLKTYAHLFDDKVMKQLKRRRYTGWGRLSRKLINGIRDKQSGKTILDFLKSDGFANRNFMQLIHDDSLTFKEDIQKAQVSGQGDSLHEHIANLAGSPAIKKGILQTVKVVDELVKVMGRHKPENIVIEMARENQTTQKGQKNSRERMKRIEEGIKELGSQILKEHPVENTQLQNEKLYLYYLQNGRDMYVDQELDINRLSDYDVDHIVPQSFLKDDSIDNKVLTRSDKARGKSDNVPSEEVVKKMKNYWRQLLNAKLITQRKFDNLTKAERGGLSELDKAGFIKRQLVETRQITKHVAQILDSRMNTKYDENDKLIREVKVITLKSKLVSDFRKDFQFYKVREINNYHHAHDAYLNAVVGTALIKKYPKLESEFVYGDYKVYDVRKMIAKSEQEIGKATAKYFFYSNIMNFFKTEITLANGEIRKRPLIETNGETGEIVWDKGRDFATVRKVLSMPQVNIVKKTEVQTGGFSKESILPKRNSDKLIARKKDWDPKKYGGFDSPTVAYSVLVVAKVEKGKSKKLKSVKELLGITIMERSSFEKNPIDFLEAKGYKEVKKDLIIKLPKYSLFELENGRKRMLASAGELQKGNELALPSKYVNFLYLASHYEKLKGSPEDNEQKQLFVEQHKHYLDEIIEQISEFSKRVILADANLDKVLSAYNKHRDKPIREQAENIIHLFTLTNLGAPAAFKYFDTTIDRKRYTSTKEVLDATLIHQSITGLYETRIDLSQLGGDGGGSSGGGPAPGGTLGDQGSRGSDPLPEPRVTLTVEGIPTEFLVNTGAEHSVLTKPMGKMGSKRTVVAGATGSKVYPWTTKRLLKIGQKQVTHSFLVIPECPAPLLGRDLLTKLKAQIQFSTEGPQVTWEDRPAMCLVLNLEEEYRLHEKPVPPSIDPSWLQLFPMVWAEKAGMGLANQVPPVVVELKSDASPVAVRQYPMSKEAREGIRPHIQRFLDLGILVPCQSPWNTPLLPVKKPGTNDYRPVQDLREVNKRVQDIHPTVPNPYNLLSSLPPSHTWYSVLDLKDAFFCLKLHPNSQPLFAFEWRDPEKGNTGQLTWTRLPQGFKNSPTLFNEALHRDLASFRALNPQVVMLQYVDDLLVAAPTYRDCKEGTRRLLQELSKLGYRVSAKKAQLCREEVTYLGYLLKGGKRWLTPARKATVMKIPTPTTPRQVREFLGKAGFCRLFIPGFASLAAPLYPLTRPKVPFTWTEAHQEAFGRIKEALLSAPALALPDLTKPFALYVDEKEGVARGVLTQTLGPWRRPVAYLSKKLDPVASGWPTCLKAIAAVALLLKDADKLTLGQNVLVIAPHNLESIVRQPPDRWMTNARMTHYQSLLLNERVSFAPPAILNPATLLPVESDDTPIHICSEILAEETGTRPDLRDQPLPGVPAWYTDGSSFIMDGRRQAGAAIVDNKRTVWASNLPEGTSAQKAELIALTQALRLAEGKSINIYTDSRYAFATAHVHGAIYKQRGWLTSAGKDIKNKEEILALLEAIHLPKRVAIIHCPGHQRGTDPVATGNRKADEAAKQAAQSTRILTETTKNAGKRTADGSEFEKRTADGSEFESPKKKAKVE

SEQ ID NO: 7389 - protein, 2094 aa, synthetic construct
MPAAKRVKLDGGDKKYSIGLDIGTNSVGWAVITDEYKVPSKKFKVLGNTDRHSIKKNLIGALLFDSGETAEATRLKRTARRRYTRRKNRICYLQEIFSNEMAKVDDSFFHRLEESFLVEEDKKHERHPIFGNIVDEVAYHEKYPTIYHLRKKLVDSTDKADLRLIYLALAHMIKFRGHFLIEGDLNPDNSDVDKLFIQLVQTYNQLFEENPINASGVDAKAILSARLSKSRRLENLIAQLPGEKKNGLFGNLIALSLGLTPNFKSNFDLAEDAKLQLSKDTYDDDLDNLLAQIGDQYADLFLAAKNLSDAILLSDILRVNTEITKAPLSASMIKRYDEHHQDLTLLKALVRQQLPEKYKEIFFDQSKNGYAGYIDGGASQEEFYKFIKPILEKMDGTEELLVKLNREDLLRKQRTFDNGSIPHQIHLGELHAILRRQEDFYPFLKDNREKIEKILTFRIPYYVGPLARGNSRFAWMTRKSEETITPWNFEEVVDKGASAQSFIERMTNFDKNLPNEKVLPKHSLLYEYFTVYNELTKVKYVTEGMRKPAFLSGEQKKAIVDLLFKTNRKVTVKQLKEDYFKKIECFDSVEISGVEDRFNASLGTYHDLLKIIKDKDFLDNEENEDILEDIVLTLTLFEDREMIEERLKTYAHLFDDKVMKQLKRRRYTGWGRLSRKLINGIRDKQSGKTILDFLKSDGFANRNFMQLIHDDSLTFKEDIQKAQVSGQGDSLHEHIANLAGSPAIKKGILQTVKVVDELVKVMGRHKPENIVIEMARENQTTQKGQKNSRERMKRIEEGIKELGSQILKEHPVENTQLQNEKLYLYYLQNGRDMYVDQELDINRLSDYDVDHIVPQSFLKDDSIDNKVLTRSDKARGKSDNVPSEEVVKKMKNYWRQLLNAKLITQRKFDNLTKAERGGLSELDKAGFIKRQLVETRQITKHVAQILDSRMNTKYDENDKLIREVKVITLKSKLVSDFRKDFQFYKVREINNYHHAHDAYLNAVVGTALIKKYPKLESEFVYGDYKVYDVRKMIAKSEQEIGKATAKYFFYSNIMNFFKTEITLANGEIRKRPLIETNGETGEIVWDKGRDFATVRKVLSMPQVNIVKKTEVQTGGFSKESILPKRNSDKLIARKKDWDPKKYGGFDSPTVAYSVLVVAKVEKGKSKKLKSVKELLGITIMERSSFEKNPIDFLEAKGYKEVKKDLIIKLPKYSLFELENGRKRMLASAGELQKGNELALPSKYVNFLYLASHYEKLKGSPEDNEQKQLFVEQHKHYLDEIIEQISEFSKRVILADANLDKVLSAYNKHRDKPIREQAENIIHLFTLTNLGAPAAFKYFDTTIDRKRYTSTKEVLDATLIHQSITGLYETRIDLSQLGGDGGGSSGGGPAPGGTLNLEDEYRLYETSAEPEVSPGSTWLSDFPQAWAETGGMGLAVRQAPLIIPLKATSTPVSIKQYPMSQEAKLGIKPHIQRLLDQGILVPCQSPWNTPLLPVKKPGTNDYRPVQDLREVNKRVEDIHPTVPNPYNLLSGLPPSHRWYTVLDLKDAFFCLRLHPTSQPLFAFEWRDPGMGISGQLTWTRLPQGFKNSPTLFNEALHRDLADFRIQHPDLILLQYVDDILLAATSELDCQQGTRALLLTLGNLGYRASAKKAQLCQKQVKYLGYLLKEGQRWLTEARKETVMGQPTPKTPRQLREFLGKAGFCRLFIPGFAEMAAPLYPLTKPGTLFNWGPDQQKAYQEIKQALLTAPALGLPDLTKPFELFVDEKQGYAKGVLTQKLGPWRRPVAYLSKKLDPVAAGWPPCLRMVAAIAVLRKDAGKLTMGQPLVILAPHAVEALVKQPPDRWLSNARMTHYQAMLLDTDRVQFGPVVALNPATLLPLPEEGAPHDCLEILAETHGTRPDLTDQPIPDADHTWYTDGSSFLQEGQRKAGAAVTTETEVIWARALPAGTSAQRAELIALTQALKMAEGKRLNVYTDSRYAFATAHIHGEIYRRRGWLTSEGREIKNKSEILALLKALFLPKRLSIIHCLGHQKGDSAEARGNRLADQAAREAAIKTPPDTSTLLAGKRTADGSEFEKRTADGSEFESPKKKAKVE

SEQ ID NO: 7390 - protein, 2094 aa, synthetic construct
MPAAKRVKLDGGDKKYSIGLDIGTNSVGWAVITDEYKVPSKKFKVLGNTDRHSIKKNLIGALLFDSGETAEATRLKRTARRRYTRRKNRICYLQEIFSNEMAKVDDSFFHRLEESFLVEEDKKHERHPIFGNIVDEVAYHEKYPTIYHLRKKLVDSTDKADLRLIYLALAHMIKFRGHFLIEGDLNPDNSDVDKLFIQLVQTYNQLFEENPINASGVDAKAILSARLSKSRRLENLIAQLPGEKKNGLFGNLIALSLGLTPNFKSNFDLAEDAKLQLSKDTYDDDLDNLLAQIGDQYADLFLAAKNLSDAILLSDILRVNTEITKAPLSASMIKRYDEHHQDLTLLKALVRQQLPEKYKEIFFDQSKNGYAGYIDGGASQEEFYKFIKPILEKMDGTEELLVKLNREDLLRKQRTFDNGSIPHQIHLGELHAILRRQEDFYPFLKDNREKIEKILTFRIPYYVGPLARGNSRFAWMTRKSEETITPWNFEEVVDKGASAQSFIERMTNFDKNLPNEKVLPKHSLLYEYFTVYNELTKVKYVTEGMRKPAFLSGEQKKAIVDLLFKTNRKVTVKQLKEDYFKKIECFDSVEISGVEDRFNASLGTYHDLLKIIKDKDFLDNEENEDILEDIVLTLTLFEDREMIEERLKTYAHLFDDKVMKQLKRRRYTGWGRLSRKLINGIRDKQSGKTILDFLKSDGFANRNFMQLIHDDSLTFKEDIQKAQVSGQGDSLHEHIANLAGSPAIKKGILQTVKVVDELVKVMGRHKPENIVIEMARENQTTQKGQKNSRERMKRIEEGIKELGSQILKEHPVENTQLQNEKLYLYYLQNGRDMYVDQELDINRLSDYDVDHIVPQSFLKDDSIDNKVLTRSDKARGKSDNVPSEEVVKKMKNYWRQLLNAKLITQRKFDNLTKAERGGLSELDKAGFIKRQLVETRQITKHVAQILDSRMNTKYDENDKLIREVKVITLKSKLVSDFRKDFQFYKVREINNYHHAHDAYLNAVVGTALIKKYPKLESEFVYGDYKVYDVRKMIAKSEQEIGKATAKYFFYSNIMNFFKTEITLANGEIRKRPLIETNGETGEIVWDKGRDFATVRKVLSMPQVNIVKKTEVQTGGFSKESILPKRNSDKLIARKKDWDPKKYGGFDSPTVAYSVLVVAKVEKGKSKKLKSVKELLGITIMERSSFEKNPIDFLEAKGYKEVKKDLIIKLPKYSLFELENGRKRMLASAGELQKGNELALPSKYVNFLYLASHYEKLKGSPEDNEQKQLFVEQHKHYLDEIIEQISEFSKRVILADANLDKVLSAYNKHRDKPIREQAENIIHLFTLTNLGAPAAFKYFDTTIDRKRYTSTKEVLDATLIHQSITGLYETRIDLSQLGGDGGGSSGGGPAPGGLGIEDEYRLHETSTEPDVSLGSTWLSDFPQAWAETGGMGLAVRQAPLIIPLKATSTPVSIQQYPMSHEARLGIKPHIQRLLDQGILVPCQSPWNTPLLPVKKPGTNDYRPVQDLREVNKRVEDIHPTVPNPYNLLSGLPPSHQWYTVLDLKDAFFCLRLHPTSQPLFAFEWRDPGMGISGQLTWTRLPQGFKNSPTLFNEALHRDLADFRIQHPDLILLQYVDDILLAATSELDCQQGTRALLQTLGDLGYRASAKKAQICQKQVKYLGYLLREGQRWLTEARKETVMGQPVPKTPRQLREFLGKAGFCRLFIPGFAEMAAPLYPLTKPGTLFSWGPDQQKAYQEIKQALLTAPALGLPDLTKPFELFVDEKQGYAKGVLTQKLGPWRRPVAYLSKKLDPVAAGWPPCLRMVAAIAVLTKDAGKLTMGQPLVILAPHAVEALVKQPPDRWLSNARMTHYQAMLLDTDRVQFGPVVALNPATLLPLPEEGAPHDCLEILAETHGTRPDLTDQPIPDADHTWYTDGSSFLQEGQRKAGAAVTTETEVIWAGALPAGTSAQRAELIALTQALKMAEGKRLNVYTDSRYAFATAHIHGEIYRRRGWLTSEGREIKNKSEILALLKALFLPKRLSIIHCLGHQKGDSAEARGNRLADQAAREAAIKTPPDTSTLLIAGKRTADGSEFEKRTADGSEFESPKKKAKVE

SEQ ID NO: 7391 - protein, 2094 aa, synthetic construct; identical to SEQ ID NO: 7390

SEQ ID NO: 7392 - protein, 2094 aa, synthetic construct
MPAAKRVKLDGGDKKYSIGLDIGTNSVGWAVITDEYKVPSKKFKVLGNTDRHSIKKNLIGALLFDSGETAEATRLKRTARRRYTRRKNRICYLQEIFSNEMAKVDDSFFHRLEESFLVEEDKKHERHPIFGNIVDEVAYHEKYPTIYHLRKKLVDSTDKADLRLIYLALAHMIKFRGHFLIEGDLNPDNSDVDKLFIQLVQTYNQLFEENPINASGVDAKAILSARLSKSRRLENLIAQLPGEKKNGLFGNLIALSLGLTPNFKSNFDLAEDAKLQLSKDTYDDDLDNLLAQIGDQYADLFLAAKNLSDAILLSDILRVNTEITKAPLSASMIKRYDEHHQDLTLLKALVRQQLPEKYKEIFFDQSKNGYAGYIDGGASQEEFYKFIKPILEKMDGTEELLVKLNREDLLRKQRTFDNGSIPHQIHLGELHAILRRQEDFYPFLKDNREKIEKILTFRIPYYVGPLARGNSRFAWMTRKSEETITPWNFEEVVDKGASAQSFIERMTNFDKNLPNEKVLPKHSLLYEYFTVYNELTKVKYVTEGMRKPAFLSGEQKKAIVDLLFKTNRKVTVKQLKEDYFKKIECFDSVEISGVEDRFNASLGTYHDLLKIIKDKDFLDNEENEDILEDIVLTLTLFEDREMIEERLKTYAHLFDDKVMKQLKRRRYTGWGRLSRKLINGIRDKQSGKTILDFLKSDGFANRNFMQLIHDDSLTFKEDIQKAQVSGQGDSLHEHIANLAGSPAIKKGILQTVKVVDELVKVMGRHKPENIVIEMARENQTTQKGQKNSRERMKRIEEGIKELGSQILKEHPVENTQLQNEKLYLYYLQNGRDMYVDQELDINRLSDYDVDHIVPQSFLKDDSIDNKVLTRSDKARGKSDNVPSEEVVKKMKNYWRQLLNAKLITQRKFDNLTKAERGGLSELDKAGFIKRQLVETRQITKHVAQILDSRMNTKYDENDKLIREVKVITLKSKLVSDFRKDFQFYKVREINNYHHAHDAYLNAVVGTALIKKYPKLESEFVYGDYKVYDVRKMIAKSEQEIGKATAKYFFYSNIMNFFKTEITLANGEIRKRPLIETNGETGEIVWDKGRDFATVRKVLSMPQVNIVKKTEVQTGGFSKESILPKRNSDKLIARKKDWDPKKYGGFDSPTVAYSVLVVAKVEKGKSKKLKSVKELLGITIMERSSFEKNPIDFLEAKGYKEVKKDLIIKLPKYSLFELENGRKRMLASAGELQKGNELALPSKYVNFLYLASHYEKLKGSPEDNEQKQLFVEQHKHYLDEIIEQISEFSKRVILADANLDKVLSAYNKHRDKPIREQAENIIHLFTLTNLGAPAAFKYFDTTIDRKRYTSTKEVLDATLIHQSITGLYETRIDLSQLGGDGGGSSGGGPAPGGTLNIEDEYRLHETSKGPDVPLGSTWLSDFPQAWAETGGMGLAFRQAPLIISLKATSTPVSIKQYPMSQEARLGIKPHIQRLLDQGILVPCQSPWNTPLLPVKKPGTNDYRPVQDLREVNKRVEDIHPTVPNPYNLLSGLPPSHQWYTVLDLKDAFFCLRLHPTSQSLFAFEWKDPEMGISGQLTWTRLPQGFKNSPTLFNEALHRDLADFRIQHPDLILLQYVDDLLLAATSELDCQQGTRALLQTLGDLGYRASAKKAQICQKQVKYLGYLLKEGQRWLTEARKETVMGQPTPKTPRQLREFLGKAGLCRLFIPGFAEMAAPLYPLTKPGTLFKWGPDQQKAYQEIKQALLTAPALGLPDLTKPFELFVDEKQGYAKGVLTQKLGPWRRPVAYLSKKLDPVAAGWPPCLRMVAAIAVLTKDVGKLTMGQPLVILAPHAVEALVKQPPDRWLSNARMTHYQALLLDTDRVQFGPIVALNPATLLPLPEEGLQHDCLDILAEAHGTRPDLTDQPLPDADHTWYTDGSSFLQEGQRRAGAAVTTETEVIWAKALPAGTSAQRAELIALTQALKMAAGKKLNVYTDSRYAFATAHIHGEIYRRRGWLTSEGKEIKNKDEILALLKALFLPKRLSIIHCPGHQKGNHAEARGNRMADQAAREVATRETPETSTLLAGKRTADGSEFEKRTADGSEFESPKKKAKVE

SEQ ID NO: 7393 - protein, 2094 aa, synthetic construct
MPAAKRVKLDGGDKKYSIGLDIGTNSVGWAVITDEYKVPSKKFKVLGNTDRHSIKKNLIGALLFDSGETAEATRLKRTARRRYTRRKNRICYLQEIFSNEMAKVDDSFFHRLEESFLVEEDKKHERHPIFGNIVDEVAYHEKYPTIYHLRKKLVDSTDKADLRLIYLALAHMIKFRGHFLIEGDLNPDNSDVDKLFIQLVQTYNQLFEENPINASGVDAKAILSARLSKSRRLENLIAQLPGEKKNGLFGNLIALSLGLTPNFKSNFDLAEDAKLQLSKDTYDDDLDNLLAQIGDQYADLFLAAKNLSDAILLSDILRVNTEITKAPLSASMIKRYDEHHQDLTLLKALVRQQLPEKYKEIFFDQSKNGYAGYIDGGASQEEFYKFIKPILEKMDGTEELLVKLNREDLLRKQRTFDNGSIPHQIHLGELHAILRRQEDFYPFLKDNREKIEKILTFRIPYYVGPLARGNSRFAWMTRKSEETITPWNFEEVVDKGASAQSFIERMTNFDKNLPNEKVLPKHSLLYEYFTVYNELTKVKYVTEGMRKPAFLSGEQKKAIVDLLFKTNRKVTVKQLKEDYFKKIECFDSVEISGVEDRFNASLGTYHDLLKIIKDKDFLDNEENEDILEDIVLTLTLFEDREMIEERLKTYAHLFDDKVMKQLKRRRYTGWGRLSRKLINGIRDKQSGKTILDFLKSDGFANRNFMQLIHDDSLTFKEDIQKAQVSGQGDSLHEHIANLAGSPAIKKGILQTVKVVDELVKVMGRHKPENIVIEMARENQTTQKGQKNSRERMKRIEEGIKELGSQILKEHPVENTQLQNEKLYLYYLQNGRDMYVDQELDINRLSDYDVDHIVPQSFLKDDSIDNKVLTRSDKARGKSDNVPSEEVVKKMKNYWRQLLNAKLITQRKFDNLTKAERGGLSELDKAGFIKRQLVETRQITKHVAQILDSRMNTKYDENDKLIREVKVITLKSKLVSDFRKDFQFYKVREINNYHHAHDAYLNAVVGTALIKKYPKLESEFVYGDYKVYDVRKMIAKSEQEIGKATAKYFFYSNIMNFFKTEITLANGEIRKRPLIETNGETGEIVWDKGRDFATVRKVLSMPQVNIVKKTEVQTGGFSKESILPKRNSDKLIARKKDWDPKKYGGFDSPTVAYSVLVVAKVEKGKSKKLKSVKELLGITIMERSSFEKNPIDFLEAKGYKEVKKDLIIKLPKYSLFELENGRKRMLASAGELQKGNELALPSKYVNFLYLASHYEKLKGSPEDNEQKQLFVEQHKHYLDEIIEQISEFSKRVILADANLDKVLSAYNKHRDKPIREQAENIIHLFTLTNLGAPAAFKYFDTTIDRKRYTSTKEVLDATLIHQSITGLYETRIDLSQLGGDGGGSSGGGPAPGGTLNIEDEHRLHETSKEPDVSLGSTWLSDFPQAWAETGGMGLAVRQAPLIIPLKATSTPVSIKQYPMSQEARLGIKPHIQRLLDQGILVPCQSPWNTPLLPVKKPGTNDYRPVQDLREVNKRVEDIHPTVPNPYNLLSGLPPSHQWYTVLDLKDAFFCLRLHPTSQPLFAFEWRDPEMGISGQLTWTRLPQGFKNSPTLFNEALHRDLADFRIQHPDLILLQYVDDLLLAATSELDCQQGTRALLQTLGNLGYRASAKKAQICQKQVKYLGYLLKEGQRWLTEARKETVMGQPTPKTPRQLREFLGTAGFCRLWIPGFAEMAAPLYPLTKPGTLFNWGPDQQKAYQEIKQALLTAPALGLPDLTKPFELFVDEKQGYAKGVLTQKLGPWRRPVAYLSKKLDPVAAGWPPCLRMVAAIAVLTKDAGKLTMGQPLVILAPHAVEALVKQPPDRWLSNARMTHYQALLLDTDRVQFGPVVALNPATLLPLPEEGLQHNCLDILAEAHGTRPDLTDQPLPDADHTWYTDGSSLLQEGQRKAGAAVTTETEVIWAKALPAGTSAQRAELIALTQALKMAEGKKLNVYTDSRYAFATAHIHGEIYRRRGWLTSEGKEIKNKDEILALLKALFLPKRLSIIHCPGHQKGHSAEARGNRMADQAARKAAITETPDTSTLLAGKRTADGSEFEKRTADGSEFESPKKKAKVE

SEQ ID NO: 7394 - protein, 2094 aa, synthetic construct; identical to SEQ ID NO: 7393

SEQ ID NO: 7395 - protein, 2088 aa, synthetic construct; identical to SEQ ID NO: 4532

SEQ ID NO: 7396 - protein, 2088 aa, synthetic construct
MPAAKRVKLDGGDKKYSIGLDIGTNSVGWAVITDEYKVPSKKFKVLGNTDRHSIKKNLIGALLFDSGETAEATRLKRTARRRYTRRKNRICYLQEIFSNEMAKVDDSFFHRLEESFLVEEDKKHERHPIFGNIVDEVAYHEKYPTIYHLRKKLVDSTDKADLRLIYLALAHMIKFRGHFLIEGDLNPDNSDVDKLFIQLVQTYNQLFEENPINASGVDAKAILSARLSKSRRLENLIAQLPGEKKNGLFGNLIALSLGLTPNFKSNFDLAEDAKLQLSKDTYDDDLDNLLAQIGDQYADLFLAAKNLSDAILLSDILRVNTEITKAPLSASMIKRYDEHHQDLTLLKALVRQQLPEKYKEIFFDQSKNGYAGYIDGGASQEEFYKFIKPILEKMDGTEELLVKLNREDLLRKQRTFDNGSIPHQIHLGELHAILRRQEDFYPFLKDNREKIEKILTFRIPYYVGPLARGNSRFAWMTRKSEETITPWNFEEVVDKGASAQSFIERMTNFDKNLPNEKVLPKHSLLYEYFTVYNELTKVKYVTEGMRKPAFLSGEQKKAIVDLLFKTNRKVTVKQLKEDYFKKIECFDSVEISGVEDRFNASLGTYHDLLKIIKDKDFLDNEENEDILEDIVLTLTLFEDREMIEERLKTYAHLFDDKVMKQLKRRRYTGWGRLSRKLINGIRDKQSGKTILDFLKSDGFANRNFMQLIHDDSLTFKEDIQKAQVSGQGDSLHEHIANLAGSPAIKKGILQTVKVVDELVKVMGRHKPENIVIEMARENQTTQKGQKNSRERMKRIEEGIKELGSQILKEHPVENTQLQNEKLYLYYLQNGRDMYVDQELDINRLSDYDVDHIVPQSFLKDDSIDNKVLTRSDKARGKSDNVPSEEVVKKMKNYWRQLLNAKLITQRKFDNLTKAERGGLSELDKAGFIKRQLVETRQITKHVAQILDSRMNTKYDENDKLIREVKVITLKSKLVSDFRKDFQFYKVREINNYHHAHDAYLNAVVGTALIKKYPKLESEFVYGDYKVYDVRKMIAKSEQEIGKATAKYFFYSNIMNFFKTEITLANGEIRKRPLIETNGETGEIVWDKGRDFATVRKVLSMPQVNIVKKTEVQTGGFSKESILPKRNSDKLIARKKDWDPKKYGGFDSPTVAYSVLVVAKVEKGKSKKLKSVKELLGITIMERSSFEKNPIDFLEAKGYKEVKKDLIIKLPKYSLFELENGRKRMLASAGELQKGNELALPSKYVNFLYLASHYEKLKGSPEDNEQKQLFVEQHKHYLDEIIEQISEFSKRVILADANLDKVLSAYNKHRDKPIREQAENIIHLFTLTNLGAPAAFKYFDTTIDRKRYTSTKEVLDATLIHQSITGLYETRIDLSQLGGDGGGSSGGGPAPGGTLQLDDEYRLYSPLVKPDQNIQFWLEQFPQAWAETAGMGLAKQVPPQVIQLKASATPVSVRQYPLSKEAQEGIRPHVQRLIQQGILVPVQSPWNTPLLPVRKPGTNDYRPVQDLREVNKRVQDIHPTVPNPYNLLCALPPQRSWYTVLDLKDAFFCLRLHPTSQPLFAFEWRDPGTGRTGQLTWTRLPQGFKNSPTIFDEALHRDLANFRIQHPQVTLLQYVDDLLLAGATKQDCLEGTKALLLELSDLGYRASAKKAQICRREVTYLGYSLRDGQRWLTEARKKTVVQIPAPTTAKQVREFLGTAGFCRLWIPGFATLAAPLYPLTKEKGEFSWAPEHQKAFDAIKKALLSAPALALPDVTKPFTLYVDERKGVARGVLTQTLGPWRRPVAYLSKKLDPVASGWPVCLKAIAAVAILVKDADKLTLGQNITVIAPHALENIVRQPPDRWMTNARMTHYQSLLLTERVTFAPPAALNPATLLPEETDEPVTHDCHQLLIEETGVRKDLTDIPLTGEVLTWFTDGSSYVVEGKRMAGAAVVDGTRTIWASSLPEGTSAQKAELMALTQALRLAEGKSINIYTDSRYAFATAHVHGAIYKQRGLLTSAGREIKNKEEILSLLEALHLPKRLAIIHCPGHQKAKDPISRGNQMADRVAKQAAQGVNLLAGKRTADGSEFEKRTADGSEFESPKKKAKVE

SEQ ID NO: 7397 - protein, 2088 aa, synthetic construct; identical to SEQ ID NO: 4532

SEQ ID NO: 7398 - protein, 2085 aa, synthetic construct
MPAAKRVKLDGGDKKYSIGLDIGTNSVGWAVITDEYKVPSKKFKVLGNTDRHSIKKNLIGALLFDSGETAEATRLKRTARRRYTRRKNRICYLQEIFSNEMAKVDDSFFHRLEESFLVEEDKKHERHPIFGNIVDEVAYHEKYPTIYHLRKKLVDSTDKADLRLIYLALAHMIKFRGHFLIEGDLNPDNSDVDKLFIQLVQTYNQLFEENPINASGVDAKAILSARLSKSRRLENLIAQLPGEKKNGLFGNLIALSLGLTPNFKSNFDLAEDAKLQLSKDTYDDDLDNLLAQIGDQYADLFLAAKNLSDAILLSDILRVNTEITKAPLSASMIKRYDEHHQDLTLLKALVRQQLPEKYKEIFFDQSKNGYAGYIDGGASQEEFYKFIKPILEKMDGTEELLVKLNREDLLRKQRTFDNGSIPHQIHLGELHAILRRQEDFYPFLKDNREKIEKILTFRIPYYVGPLARGNSRFAWMTRKSEETITPWNFEEVVDKGASAQSFIERMTNFDKNLPNEKVLPKHSLLYEYFTVYNELTKVKYVTEGMRKPAFLSGEQKKAIVDLLFKTNRKVTVKQLKEDYFKKIECFDSVEISGVEDRFNASLGTYHDLLKIIKDKDFLDNEENEDILEDIVLTLTLFEDREMIEERLKTYAHLFDDKVMKQLKRRRYTGWGRLSRKLINGIRDKQSGKTILDFLKSDGFANRNFMQLIHDDSLTFKEDIQKAQVSGQGDSLHEHIANLAGSPAIKKGILQTVKVVDELVKVMGRHKPENIVIEMARENQTTQKGQKNSRERMKRIEEGIKELGSQILKEHPVENTQLQNEKLYLYYLQNGRDMYVDQELDINRLSDYDVDHIVPQSFLKDDSIDNKVLTRSDKARGKSDNVPSEEVVKKMKNYWRQLLNAKLITQRKFDNLTKAERGGLSELDKAGFIKRQLVETRQITKHVAQILDSRMNTKYDENDKLIREVKVITLKSKLVSDFRKDFQFYKVREINNYHHAHDAYLNAVVGTALIKKYPKLESEFVYGDYKVYDVRKMIAKSEQEIGKATAKYFFYSNIMNFFKTEITLANGEIRKRPLIETNGETGEIVWDKGRDFATVRKVLSMPQVNIVKKTEVQTGGFSKESILPKRNSDKLIARKKDWDPKKYGGFDSPTVAYSVLVVAKVEKGKSKKLKSVKELLGITIMERSSFEKNPIDFLEAKGYKEVKKDLIIKLPKYSLFELENGRKRMLASAGELQKGNELALPSKYVNFLYLASHYEKLKGSPEDNEQKQLFVEQHKHYLDEIIEQISEFSKRVILADANLDKVLSAYNKHRDKPIREQAENIIHLFTLTNLGAPAAFKYFDTTIDRKRYTSTKEVLDATLIHQSITGLYETRIDLSQLGGDGGGSSGGGPAPGGIPWLMKKPLQLTTLVPLQEYEERLLKQTMLTGSYKEKLQSLFLKYDALWQHWENQVGHRRIKPHHIATGTVNPRPQKQYPINPKAKASIQTVINDLLKQGVLIQQNSIMNTPVYPVPKPDGKWRMVLDYREVNKTIPLIAAQNQHSAGILSSIFRGKYKTTLDLSNGFWAHSITPESYWLTAFTWLGQQYCWTRLPQGFLNSPALFNADVVDLLKEVPNVQVYVDDIYISHDDPREHLEQLEKVFSLLLNAGYVVSLKKSEIAQHEVEFLGFNITKEGRGLTETFKQKLLNITPPRDLKQLQSILGKLNFARNFIPNFSELVKPLYNIIATAPGKYITWTTDNSQQLQNIISMLNSAENLEERNPEVRLIMKVNTSPSAGYIRFYNEFAKRPIMYLNYVYTKAEVKFTNTEKLLTTIHKGLIKALDLGMGQEILVYSPIVSMTKIQKTPLPERKALPIRWITWMSYLEDPRIQFHYDKTLPELQQVPTVTDDIIAKIKHPSEFSMVFYTDGSAIKHPNVNKSHNAGMGIAQVQFKPEFTVINTWSIPLGDHTAQLAEVAAVEFACKKALKIDGPVLIVTDSFYVAESVNKELPYWQSNGFFNNKKKPLKHVSKWKSIADCIQLKPDIIIIHEKGHQPTASTFHTEGNNLADKLATQGSYVVNAGKRTADGSEFEKRTADGSEFESPKKKAKVE

SEQ ID NO: 7399 - protein, 2174 aa, synthetic construct
MPAAKRVKLDGGDKKYSIGLDIGTNSVGWAVITDEYKVPSKKFKVLGNTDRHSIKKNLIGALLFDSGETAEATRLKRTARRRYTRRKNRICYLQEIFSNEMAKVDDSFFHRLEESFLVEEDKKHERHPIFGNIVDEVAYHEKYPTIYHLRKKLVDSTDKADLRLIYLALAHMIKFRGHFLIEGDLNPDNSDVDKLFIQLVQTYNQLFEENPINASGVDAKAILSARLSKSRRLENLIAQLPGEKKNGLFGNLIALSLGLTPNFKSNFDLAEDAKLQLSKDTYDDDLDNLLAQIGDQYADLFLAAKNLSDAILLSDILRVNTEITKAPLSASMIKRYDEHHQDLTLLKALVRQQLPEKYKEIFFDQSKNGYAGYIDGGASQEEFYKFIKPILEKMDGTEELLVKLNREDLLRKQRTFDNGSIPHQIHLGELHAILRRQEDFYPFLKDNREKIEKILTFRIPYYVGPLARGNSRFAWMTRKSEETITPWNFEEVVDKGASAQSFIERMTNFDKNLPNEKVLPKHSLLYEYFTVYNELTKVKYVTEGMRKPAFLSGEQKKAIVDLLFKTNRKVTVKQLKEDYFKKIECFDSVEISGVEDRFNASLGTYHDLLKIIKDKDFLDNEENEDILEDIVLTLTLFEDREMIEERLKTYAHLFDDKVMKQLKRRRYTGWGRLSRKLINGIRDKQSGKTILDFLKSDGFANRNFMQLIHDDSLTFKEDIQKAQVSGQGDSLHEHIANLAGSPAIKKGILQTVKVVDELVKVMGRHKPENIVIEMARENQTTQKGQKNSRERMKRIEEGIKELGSQILKEHPVENTQLQNEKLYLYYLQNGRDMYVDQELDINRLSDYDVDHIVPQSFLKDDSIDNKVLTRSDKARGKSDNVPSEEVVKKMKNYWRQLLNAKLITQRKFDNLTKAERGGLSELDKAGFIKRQLVETRQITKHVAQILDSRMNTKYDENDKLIREVKVITLKSKLVSDFRKDFQFYKVREINNYHHAHDAYLNAVVGTALIKKYPKLESEFVYGDYKVYDVRKMIAKSEQEIGKATAKYFFYSNIMNFFKTEITLANGEIRKRPLIETNGETGEIVWDKGRDFATVRKVLSMPQVNIVKKTEVQTGGFSKESILPKRNSDKLIARKKDWDPKKYGGFDSPTVAYSVLVVAKVEKGKSKKLKSVKELLGITIMERSSFEKNPIDFLEAKGYKEVKKDLIIKLPKYSLFELENGRKRMLASAGELQKGNELALPSKYVNFLYLASHYEKLKGSPEDNEQKQLFVEQHKHYLDEIIEQISEFSKRVILADANLDKVLSAYNKHRDKPIREQAENIIHLFTLTNLGAPAAFKYFDTTIDRKRYTSTKEVLDATLIHQSITGLYETRIDLSQLGGDGGGSSGGGPAPGGMDPLQLLQPLEAEIKGTKLKAHWNSGATITCVPQAFLEEEVPIKNIWIKTIHGEKEQPVYYLTFKIQGRKVEAEVISSPYDYILVSPSDIPWLMKKPLQLTTLVPLQEYEERLLKQTMLTGSYKEKLQSLFLKYDALWQHWENQVGHRRIKPHHIATGTVNPRPQKQYPINPKAKASIQTVINDLLKQGVLIQQNSIMNTPVYPVPKPDGKWRMVLDYREVNKTIPLIAAQNQHSAGILSSIFRGKYKTTLDLSNGFWAHSITPESYWLTAFTWLGQQYCWTRLPQGFLNSPALFNADVVDLLKEVPNVQVYVDDIYISHDDPREHLEQLEKVFSLLLNAGYVVSLKKSEIAQHEVEFLGFNITKEGRGLTETFKQKLLNITPPRDLKQLQSILGLLNFARNFIPNFSELVKPLYNIIATAPGKYITWTTDNSQQLQNIISMLNSAENLEERNPEVRLIMKVNTSPSAGYIRFYNEFAKRPIMYLNYVYTKAEVKFTNTEKLLTTIHKGLIKALDLGMGQEILVYSPIVSMTKIQKTPLPERKALPIRWITWMSYLEDPRIQFHYDKTLPELQQVPTVTDDIIAKIKHPSEFSMVFYTDGSAIKHPNVNKSHNAGMGIAQVQFKPEFTVINTWSIPLGDHTAQLAEVAAVEFACKKALKIDGPVLIVTDSFYVAESVNKELPYWQSNGFFNNKKKPLKHVSKWKSIADCIQLKPDIIIIHEKGHQPTASTFHTEGNNLADKLATQGSYVVNAGKRTADGSEFEKRTADGSEFESPKKKAKVE

SEQ ID NO: 7400 - protein, 2092 aa, synthetic construct
MPAAKRVKLDGGDKKYSIGLDIGTNSVGWAVITDEYKVPSKKFKVLGNTDRHSIKKNLIGALLFDSGETAEATRLKRTARRRYTRRKNRICYLQEIFSNEMAKVDDSFFHRLEESFLVEEDKKHERHPIFGNIVDEVAYHEKYPTIYHLRKKLVDSTDKADLRLIYLALAHMIKFRGHFLIEGDLNPDNSDVDKLFIQLVQTYNQLFEENPINASGVDAKAILSARLSKSRRLENLIAQLPGEKKNGLFGNLIALSLGLTPNFKSNFDLAEDAKLQLSKDTYDDDLDNLLAQIGDQYADLFLAAKNLSDAILLSDILRVNTEITKAPLSASMIKRYDEHHQDLTLLKALVRQQLPEKYKEIFFDQSKNGYAGYIDGGASQEEFYKFIKPILEKMDGTEELLVKLNREDLLRKQRTFDNGSIPHQIHLGELHAILRRQEDFYPFLKDNREKIEKILTFRIPYYVGPLARGNSRFAWMTRKSEETITPWNFEEVVDKGASAQSFIERMTNFDKNLPNEKVLPKHSLLYEYFTVYNELTKVKYVTEGMRKPAFLSGEQKKAIVDLLFKTNRKVTVKQLKEDYFKKIECFDSVEISGVEDRFNASLGTYHDLLKIIKDKDFLDNEENEDILEDIVLTLTLFEDREMIEERLKTYAHLFDDKVMKQLKRRRYTGWGRLSRKLINGIRDKQSGKTILDFLKSDGFANRNFMQLIHDDSLTFKEDIQKAQVSGQGDSLHEHIANLAGSPAIKKGILQTVKVVDELVKVMGRHKPENIVIEMARENQTTQKGQKNSRERMKRIEEGIKELGSQILKEHPVENTQLQNEKLYLYYLQNGRDMYVDQELDINRLSDYDVDHIVPQSFLKDDSIDNKVLTRSDKARGKSDNVPSEEVVKKMKNYWRQLLNAKLITQRKFDNLTKAERGGLSELDKAGFIKRQLVETRQITKHVAQILDSRMNTKYDENDKLIREVKVITLKSKLVSDFRKDFQFYKVREINNYHHAHDAYLNAVVGTALIKKYPKLESEFVYGDYKVYDVRKMIAKSEQEIGKATAKYFFYSNIMNFFKTEITLANGEIRKRPLIETNGETGEIVWDKGRDFATVRKVLSMPQVNIVKKTEVQTGGFSKESILPKRNSDKLIARKKDWDPKKYGGFDSPTVAYSVLVVAKVEKGKSKKLKSVKELLGITIMERSSFEKNPIDFLEAKGYKEVKKDLIIKLPKYSLFELENGRKRMLASAGELQKGNELALPSKYVNFLYLASHYEKLKGSPEDNEQKQLFVEQHKHYLDEIIEQISEFSKRVILADANLDKVLSAYNKHRDKPIREQAENIIHLFTLTNLGAPAAFKYFDTTIDRKRYTSTKEVLDATLIHQSITGLYETRIDLSQLGGDGGGSSGGGPAPGGVLNLEEEYRLHEKPVPSSIDPSWLQLFPTVWAERAGMGLANQVPPVVVELRSGASPVAVRQYPMSKEAREGIRPHIQRFLDLGVLVPCQSPWNTPLLPVKKPGTNDYRPVQDLREINKRVQDIHPTVPNPYNLLSSLPPSHTWYSVLDLKDAFFCLKLHPNSQPLFAFEWRDPEKGNTGQLTWTRLPQGFKNSPTLFNEALHRDLAPFRALNPQVVLLQYVDDLLVAAPTYRDCKEGTQKLLQELSKLGYRVSAKKAQLCQKEVTYLGYLLKEGKRWLTPARKATVMKIPPPTTPRQVREFLGKAGFCRLFIPGFASLAAPLYPLTKPSIPFIWTEEHQKAFDRIKEALLSAPALALPDLTKPFTLYVDERAGVARGVLTQTLGPWRRPVAYLSKKLDPVASGWPTCLKAVAAVALLLKDADKLTLGQNVTVIASHSLESIVRQPPDRWMTNARMTHYQSLLLNERVSFAPPAVLNPATLLPVESEATPVHRCSEILAEETGTRRDLKDQPLPGVPAWYTDGSSFIAEGKRRAGAAIVDGKRTVWASSLPEGTSAQKAELVALTQALRLAEGKDINIYTDSRYAFATAHIHGAIYKQRGWLTSAGKDIKNKEEILALLEAIHLPKRVAIIHCPGHQKGNDPVATGNRRADEAAKQAALSTRVLAETTKPAGKRTADGSEFEKRTADGSEFESPKKKAKVE

SEQ ID NO: 7401 - protein, 2094 aa, synthetic construct
MPAAKRVKLDGGDKKYSIGLDIGTNSVGWAVITDEYKVPSKKFKVLGNTDRHSIKKNLIGALLFDSGETAEATRLKRTARRRYTRRKNRICYLQEIFSNEMAKVDDSFFHRLEESFLVEEDKKHERHPIFGNIVDEVAYHEKYPTIYHLRKKLVDSTDKADLRLIYLALAHMIKFRGHFLIEGDLNPDNSDVDKLFIQLVQTYNQLFEENPINASGVDAKAILSARLSKSRRLENLIAQLPGEKKNGLFGNLIALSLGLTPNFKSNFDLAEDAKLQLSKDTYDDDLDNLLAQIGDQYADLFLAAKNLSDAILLSDILRVNTEITKAPLSASMIKRYDEHHQDLTLLKALVRQQLPEKYKEIFFDQSKNGYAGYIDGGASQEEFYKFIKPILEKMDGTEELLVKLNREDLLRKQRTFDNGSIPHQIHLGELHAILRRQEDFYPFLKDNREKIEKILTFRIPYYVGPLARGNSRFAWMTRKSEETITPWNFEEVVDKGASAQSFIERMTNFDKNLPNEKVLPKHSLLYEYFTVYNELTKVKYVTEGMRKPAFLSGEQKKAIVDLLFKTNRKVTVKQLKEDYFKKIECFDSVEISGVEDRFNASLGTYHDLLKIIKDKDFLDNEENEDILEDIVLTLTLFEDREMIEERLKTYAHLFDDKVMKQLKRRRYTGWGRLSRKLINGIRDKQSGKTILDFLKSDGFANRNFMQLIHDDSLTFKEDIQKAQVSGQGDSLHEHIANLAGSPAIKKGILQTVKVVDELVKVMGRHKPENIVIEMARENQTTQKGQKNSRERMKRIEEGIKELGSQILKEHPVENTQLQNEKLYLYYLQNGRDMYVDQELDINRLSDYDVDHIVPQSFLKDDSIDNKVLTRSDKARGKSDNVPSEEVVKKMKNYWRQLLNAKLITQRKFDNLTKAERGGLSELDKAGFIKRQLVETRQITKHVAQILDSRMNTKYDENDKLIREVKVITLKSKLVSDFRKDFQFYKVREINNYHHAHDAYLNAVVGTALIKKYPKLESEFVYGDYKVYDVRKMIAKSEQEIGKATAKYFFYSNIMNFFKTEITLANGEIRKRPLIETNGETGEIVWDKGRDFATVRKVLSMPQVNIVKKTEVQTGGFSKESILPKRNSDKLIARKKDWDPKKYGGFDSPTVAYSVLVVAKVEKGKSKKLKSVKELLGITIMERSSFEKNPIDFLEAKGYKEVKKDLIIKLPKYSLFELENGRKRMLASAGELQKGNELALPSKYVNFLYLASHYEKLKGSPEDNEQKQLFVEQHKHYLDEIIEQISEFSKRVILADANLDKVLSAYNKHRDKPIREQAENIIHLFTLTNLGAPAAFKYFDTTIDRKRYTSTKEVLDATLIHQSITGLYETRIDLSQLGGDGGGSSGGGPAPGGTLNIEDEYRLHETSKEPDVPLGSTWLSDFPQAWAETGGMGLAVRQAPLIIPLKATSTPVSIKQYPMSQEARLGIKPHIQRLLDQGILVPCQSPWNTPLLPVKKPGTNDYRPVQDLREVNKRVEDIHPTVPNPYNLLSGLPPSHQWYTVLDLKDAFFCLRLHPTSQPLFAFEWRDPEMGISGQLTWTRLPQGFKNSPTLFNEALHRDLADFRIQHPDLILLQYVDDLLLAATSEQDCQRGTRALLQTLGNLGYRASAKKAQICQKQVKYLGYLLKEGQRWLTEARKETVMGQPTPKTPRQLREFLGTAGFCRLWIPGFAEMAAPLYPLTKPGTLFNWGPDQQKAYQEIKQALLTAPALGLPDLTKPFELFVDEKQGYAKGVLTQKLGPWRRPVAYLSKKLDPVAAGWPPCLRMVAAIAVLTKDAGKLTMGQPLVILAPHAVEALVKQPPDRWLSNARMTHYQAMLLDTDRVQFGPVVALNPATLLPLPEKEAPHDCLEILAETHGTRPDLTDQPIPDADYTWYTDGSSFLQEGQRRAGAAVTTETEVIWARALPAGTSAQRAELIALTQALKMAEGKKLNVYTDSRYAFATAHVHGEIYRRRGWLTSEGREIKNKNEILALLKALFLPKRLSIIHCPGHQKGNSAEARGNRMADQAAREAAMKAVLETSTLLAGKRTADGSEFEKRTADGSEFESPKKKAKVE

SEQ ID NO: 7402 - protein, 2096 aa, synthetic construct
MPAAKRVKLDGGDKKYSIGLDIGTNSVGWAVITDEYKVPSKKFKVLGNTDRHSIKKNLIGALLFDSGETAEATRLKRTARRRYTRRKNRICYLQEIFSNEMAKVDDSFFHRLEESFLVEEDKKHERHPIFGNIVDEVAYHEKYPTIYHLRKKLVDSTDKADLRLIYLALAHMIKFRGHFLIEGDLNPDNSDVDKLFIQLVQTYNQLFEENPINASGVDAKAILSARLSKSRRLENLIAQLPGEKKNGLFGNLIALSLGLTPNFKSNFDLAEDAKLQLSKDTYDDDLDNLLAQIGDQYADLFLAAKNLSDAILLSDILRVNTEITKAPLSASMIKRYDEHHQDLTLLKALVRQQLPEKYKEIFFDQSKNGYAGYIDGGASQEEFYKFIKPILEKMDGTEELLVKLNREDLLRKQRTFDNGSIPHQIHLGELHAILRRQEDFYPFLKDNREKIEKILTFRIPYYVGPLARGNSRFAWMTRKSEETITPWNFEEVVDKGASAQSFIERMTNFDKNLPNEKVLPKHSLLYEYFTVYNELTKVKYVTEGMRKPAFLSGEQKKAIVDLLFKTNRKVTVKQLKEDYFKKIECFDSVEISGVEDRFNASLGTYHDLLKIIKDKDFLDNEENEDILEDIVLTLTLFEDREMIEERLKTYAHLFDDKVMKQLKRRRYTGWGRLSRKLINGIRDKQSGKTILDFLKSDGFANRNFMQLIHDDSLTFKEDIQKAQVSGQGDSLHEHIANLAGSPAIKKGILQTVKVVDELVKVMGRHKPENIVIEMARENQTTQKGQKNSRERMKRIEEGIKELGSQILKEHPVENTQLQNEKLYLYYLQNGRDMYVDQELDINRLSDYDVDHIVPQSFLKDDSIDNKVLTRSDKARGKSDNVPSEEVVKKMKNYWRQLLNAKLITQRKFDNLTKAERGGLSELDKAGFIKRQLVETRQITKHVAQILDSRMNTKYDENDKLIREVKVITLKSKLVSDFRKDFQFYKVREINNYHHAHDAYLNAVVGTALIKKYPKLESEFVYGDYKVYDVRKMIAKSEQEIGKATAKYFFYSNIMNFFKTEITLANGEIRKRPLIETNGETGEIVWDKGRDFATVRKVLSMPQVNIVKKTEVQTGGFSKESILPKRNSDKLIARKKDWDPKKYGGFDSPTVAYSVLVVAKVEKGKSKKLKSVKELLGITIMERSSFEKNPIDFLEAKGYKEVKKDLIIKLPKYSLFELENGRKRMLASAGELQKGNELALPSKYVNFLYLASHYEKLKGSPEDNEQKQLFVEQHKHYLDEIIEQISEFSKRVILADANLDKVLSAYNKHRDKPIREQAENIIHLFTLTNLGAPAAFKYFDTTIDRKRYTSTKEVLDATLIHQSITGLYETRIDLSQLGGDGGGSSPAPGGGGGTAPLEEEYRLFLEAPIQNVTLLEQWKREIPKVWAEINPPGLASTQAPIHVQLLSTALPVRVRQYPITLEAKRSLRETIRKFRAAGILRPVHSPWNTPLLPVRKSGTSEYRMVQDLREVNKRVETIHPTVPNPYTLLSLLPPDRIWYSVLDLKDAFFCIPLAPESQLIFAFEWADAEEGESGQLTWTRLPQGFKNSPTLFNEALNRDLQGFRLDHPSVSLLQYVDDLLIAADTQAACLSATRDLLMTLAELGYRVSGKKAQLCQEEVTYLGFKIHKGSRSLSNSRTQAILQIPVPKTKRQVREFLGTIGYCRLWIPGFAELAQPLYAATRPGNDPLVWGEKEEEAFQSLKLALTQPPALALPSLDKPFQLFVEETSGAAKGVLTQALGPWKRPVAYLSKRLDPVAAGWPRCLRAIAAAALLTREASKLTFGQDIEITSSHNLESLLRSPPDKWLTNARITQYQVLLLDPPRVRFKQTAALNPATLLPETDDTLPIHHCLDTLDSLTSTRPDLTDQPLAQAEATLFTDGSSYIRDGKRYAGAAVVTLDSVIWAEPLPIGTSAQKAELIALTKALEWSKDKSVNIYTDSRYAFATLHVHGMIYRERGWLTAGGKAIKNAPEILALLTAVWLPKRVAVMHCKGHQKDDAPTSTGNRRADEVAREVAIRPLSTQATISAGKRTADGSEFEKRTADGSEFESPKKKAKVE

SEQ ID NO: 7403 - protein, 2096 aa, synthetic construct
MPAAKRVKLDGGDKKYSIGLDIGTNSVGWAVITDEYKVPSKKFKVLGNTDRHSIKKNLIGALLFDSGETAEATRLKRTARRRYTRRKNRICYLQEIFSNEMAKVDDSFFHRLEESFLVEEDKKHERHPIFGNIVDEVAYHEKYPTIYHLRKKLVDSTDKADLRLIYLALAHMIKFRGHFLIEGDLNPDNSDVDKLFIQLVQTYNQLFEENPINASGVDAKAILSARLSKSRRLENLIAQLPGEKKNGLFGNLIALSLGLTPNFKSNFDLAEDAKLQLSKDTYDDDLDNLLAQIGDQYADLFLAAKNLSDAILLSDILRVNTEITKAPLSASMIKRYDEHHQDLTLLKALVRQQLPEKYKEIFFDQSKNGYAGYIDGGASQEEFYKFIKPILEKMDGTEELLVKLNREDLLRKQRTFDNGSIPHQIHLGELHAILRRQEDFYPFLKDNREKIEKILTFRIPYYVGPLARGNSRFAWMTRKSEETITPWNFEEVVDKGASAQSFIERMTNFDKNLPNEKVLPKHSLLYEYFTVYNELTKVKYVTEGMRKPAFLSGEQKKAIVDLLFKTNRKVTVKQLKEDYFKKIECFDSVEISGVEDRFNASLGTYHDLLKIIKDKDFLDNEENEDILEDIVLTLTLFEDREMIEERLKTYAHLFDDKVMKQLKRRRYTGWGRLSRKLINGIRDKQSGKTILDFLKSDGFANRNFMQLIHDDSLTFKEDIQKAQVSGQGDSLHEHIANLAGSPAIKKGILQTVKVVDELVKVMGRHKPENIVIEMARENQTTQKGQKNSRERMKRIEEGIKELGSQILKEHPVENTQLQNEKLYLYYLQNGRDMYVDQELDINRLSDYDVDHIVPQSFLKDDSIDNKVLTRSDKARGKSDNVPSEEVVKKMKNYWRQLLNAKLITQRKFDNLTKAERGGLSELDKAGFIKRQLVETRQITKHVAQILDSRMNTKYDENDKLIREVKVITLKSKLVSDFRKDFQFYKVREINNYHHAHDAYLNAVVGTALIKKYPKLESEFVYGDYKVYDVRKMIAKSEQEIGKATAKYFFYSNIMNFFKTEITLANGEIRKRPLIETNGETGEIVWDKGRDFATVRKVLSMPQVNIVKKTEVQTGGFSKESILPKRNSDKLIARKKDWDPKKYGGFDSPTVAYSVLVVAKVEKGKSKKLKSVKELLGITIMERSSFEKNPIDFLEAKGYKEVKKDLIIKLPKYSLFELENGRKRMLASAGELQKGNELALPSKYVNFLYLASHYEKLKGSPEDNEQKQLFVEQHKHYLDEIIEQISEFSKRVILADANLDKVLSAYNKHRDKPIREQAENIIHLFTLTNLGAPAAFKYFDTTIDRKRYTSTKEVLDATLIHQSITGLYETRIDLSQLGGDGGGSSPAPGGGGGTAPLEEEYRLFLEAPIQNVTLLEQWKREIPKVWAEINPPGLASTQAPIHVQLLSTALPVRVRQYPITLEAKRSLRETIRKFRAAGILRPVHSPWNTPLLPVRKSGTSEYRMVQDLREVNKRVETIHPTVPNPYTLLSLLPPDRIWYSVLDLKDAFFCIPLAPESQLIFAFEWADAEEGESGQLTWTRLPQGFKNSPTLFNEALNRDLQGFRLDHPSVSLLQYVDDLLIAADTQAACLSATRDLLMTLAELGYRVSGKKAQLCQEEVTYLGFKIHKGSRSLSNSRTQAILQIPVPKTKRQVREFLGKIGYCRLFIPGFAELAQPLYAATRPGNDPLVWGEKEEEAFQSLKLALTQPPALALPSLDKPFQLFVEETSGAAKGVLTQALGPWKRPVAYLSKRLDPVAAGWPRCLRAIAAAALLTREASKLTFGQDIEITSSHNLESLLRSPPDKWLTNARITQYQVLLLDPPRVRFKQTAALNPATLLPETDDTLPIHHCLDTLDSLTSTRPDLTDQPLAQAEATLFTDGSSYIRDGKRYAGAAVVTLDSVIWAEPLPIGTSAQKAELIALTKALEWSKDKSVNIYTDSRYAFATLHVHGMIYRERGWLTAGGKAIKNAPEILALLTAVWLPKRVAVMHCKGHQKDDAPTSTGNRRADEVAREVAIRPLSTQATISAGKRTADGSEFEKRTADGSEFESPKKKAKVE

SEQ ID NO: 7404 - protein, 2092 aa, synthetic construct
MPAAKRVKLDGGDKKYSIGLDIGTNSVGWAVITDEYKVPSKKFKVLGNTDRHSIKKNLIGALLFDSGETAEATRLKRTARRRYTRRKNRICYLQEIFSNEMAKVDDSFFHRLEESFLVEEDKKHERHPIFGNIVDEVAYHEKYPTIYHLRKKLVDSTDKADLRLIYLALAHMIKFRGHFLIEGDLNPDNSDVDKLFIQLVQTYNQLFEENPINASGVDAKAILSARLSKSRRLENLIAQLPGEKKNGLFGNLIALSLGLTPNFKSNFDLAEDAKLQLSKDTYDDDLDNLLAQIGDQYADLFLAAKNLSDAILLSDILRVNTEITKAPLSASMIKRYDEHHQDLTLLKALVRQQLPEKYKEIFFDQSKNGYAGYIDGGASQEEFYKFIKPILEKMDGTEELLVKLNREDLLRKQRTFDNGSIPHQIHLGELHAILRRQEDFYPFLKDNREKIEKILTFRIPYYVGPLARGNSRFAWMTRKSEETITPWNFEEVVDKGASAQSFIERMTNFDKNLPNEKVLPKHSLLYEYFTVYNELTKVKYVTEGMRKPAFLSGEQKKAIVDLLFKTNRKVTVKQLKEDYFKKIECFDSVEISGVEDRFNASLGTYHDLLKIIKDKDFLDNEENEDILEDIVLTLTLFEDREMIEERLKTYAHLFDDKVMKQLKRRRYTGWGRLSRKLINGIRDKQSGKTILDFLKSDGFANRNFMQLIHDDSLTFKEDIQKAQVSGQGDSLHEHIANLAGSPAIKKGILQTVKVVDELVKVMGRHKPENIVIEMARENQTTQKGQKNSRERMKRIEEGIKELGSQILKEHPVENTQLQNEKLYLYYLQNGRDMYVDQELDINRLSDYDVDHIVPQSFLKDDSIDNKVLTRSDKARGKSDNVPSEEVVKKMKNYWRQLLNAKLITQRKFDNLTKAERGGLSELDKAGFIKRQLVETRQITKHVAQILDSRMNTKYDENDKLIREVKVITLKSKLVSDFRKDFQFYKVREINNYHHAHDAYLNAVVGTALIKKYPKLESEFVYGDYKVYDVRKMIAKSEQEIGKATAKYFFYSNIMNFFKTEITLANGEIRKRPLIETNGETGEIVWDKGRDFATVRKVLSMPQVNIVKKTEVQTGGFSKESILPKRNSDKLIARKKDWDPKKYGGFDSPTVAYSVLVVAKVEKGKSKKLKSVKELLGITIMERSSFEKNPIDFLEAKGYKEVKKDLIIKLPKYSLFELENGRKRMLASAGELQKGNELALPSKYVNFLYLASHYEKLKGSPEDNEQKQLFVEQHKHYLDEIIEQISEFSKRVILADANLDKVLSAYNKHRDKPIREQAENIIHLFTLTNLGAPAAFKYFDTTIDRKRYTSTKEVLDATLIHQSITGLYETRIDLSQLGGDGGGSSPAPGGGGGVLNLEEEYRLHEKPVPSSIDPSWLQLFPTVWAERAGMGLANQVPPVVVELRSGASPVAVRQYPMSKEAREGIRPHIQKFLDLGVLVPCRSPWNTPLLPVKKPGTNDYRPVQDLREINKRVQDIHPTVPNPYNLLSSLPPSYTWYSVLDLKDAFFCLRLHPNSQPLFAFEWKDPEKGNTGQLTWTRLPQGFKNSPTLFNEALHRDLAPFRALNPQVVLLQYVDDLLVAAPTYEDCKKGTQKLLQELSKLGYRVSAKKAQLCQREVTYLGYLLKEGKRWLTPARKATVMKIPVPTTPRQVREFLGKAGFCRLFIPGFASLAAPLYPLTKPSIPFIWTEEHQQAFDHIKKALLSAPALALPDLTKPFTLYIDERAGVARGVLTQTLGPWRRPVAYLSKKLDPVASGWPTCLKAVAAVALLLKDADKLTLGQNVTVIASHSLESIVRQPPDRWMTNARMTHYQSLLLNERVSFAPPAVLNPATLLPVESEATPVHRCSEILAEETGTRRDLEDQPLPGVPTWYTDGSSFITEGKRRAGAPIVDGKRTVWASSLPEGTSAQKAELVALTQALRLAEGKNINIYTDSRYAFATAHIHGAIYKQRGWLTSAGKDIKNKEEILALLEAIHLPRRVAIIHCPGHQRGSNPVATGNRRADEAAKQAALSTRVLAGTTKPAGKRTADGSEFEKRTADGSEFESPKKKAKVE

SEQ ID NO: 7405 - protein, 2125 aa, synthetic construct
MPAAKRVKLDGGDKKYSIGLDIGTNSVGWAVITDEYKVPSKKFKVLGNTDRHSIKKNLIGALLFDSGETAEATRLKRTARRRYTRRKNRICYLQEIFSNEMAKVDDSFFHRLEESFLVEEDKKHERHPIFGNIVDEVAYHEKYPTIYHLRKKLVDSTDKADLRLIYLALAHMIKFRGHFLIEGDLNPDNSDVDKLFIQLVQTYNQLFEENPINASGVDAKAILSARLSKSRRLENLIAQLPGEKKNGLFGNLIALSLGLTPNFKSNFDLAEDAKLQLSKDTYDDDLDNLLAQIGDQYADLFLAAKNLSDAILLSDILRVNTEITKAPLSASMIKRYDEHHQDLTLLKALVRQQLPEKYKEIFFDQSKNGYAGYIDGGASQEEFYKFIKPILEKMDGTEELLVKLNREDLLRKQRTFDNGSIPHQIHLGELHAILRRQEDFYPFLKDNREKIEKILTFRIPYYVGPLARGNSRFAWMTRKSEETITPWNFEEVVDKGASAQSFIERMTNFDKNLPNEKVLPKHSLLYEYFTVYNELTKVKYVTEGMRKPAFLSGEQKKAIVDLLFKTNRKVTVKQLKEDYFKKIECFDSVEISGVEDRFNASLGTYHDLLKIIKDKDFLDNEENEDILEDIVLTLTLFEDREMIEERLKTYAHLFDDKVMKQLKRRRYTGWGRLSRKLINGIRDKQSGKTILDFLKSDGFANRNFMQLIHDDSLTFKEDIQKAQVSGQGDSLHEHIANLAGSPAIKKGILQTVKVVDELVKVMGRHKPENIVIEMARENQTTQKGQKNSRERMKRIEEGIKELGSQILKEHPVENTQLQNEKLYLYYLQNGRDMYVDQELDINRLSDYDVDHIVPQSFLKDDSIDNKVLTRSDKARGKSDNVPSEEVVKKMKNYWRQLLNAKLITQRKFDNLTKAERGGLSELDKAGFIKRQLVETRQITKHVAQILDSRMNTKYDENDKLIREVKVITLKSKLVSDFRKDFQFYKVREINNYHHAHDAYLNAVVGTALIKKYPKLESEFVYGDYKVYDVRKMIAKSEQEIGKATAKYFFYSNIMNFFKTEITLANGEIRKRPLIETNGETGEIVWDKGRDFATVRKVLSMPQVNIVKKTEVQTGGFSKESILPKRNSDKLIARKKDWDPKKYGGFDSPTVAYSVLVVAKVEKGKSKKLKSVKELLGITIMERSSFEKNPIDFLEAKGYKEVKKDLIIKLPKYSLFELENGRKRMLASAGELQKGNELALPSKYVNFLYLASHYEKLKGSPEDNEQKQLFVEQHKHYLDEIIEQISEFSKRVILADANLDKVLSAYNKHRDKPIREQAENIIHLFTLTNLGAPAAFKYFDTTIDRKRYTSTKEVLDATLIHQSITGLYETRIDLSQLGGDGGGSSPAPGGGGGLLGRDLLTKLKAQIQFSTEGPQVTWEDRPAMCLVLNLEEEYRLHEKPVPPSIDPSWLQLFPMVWAEKAGMGLANQVPPVVVELKSDASPVAVRQYPMSKEAREGIRPHIQRFLDLGILVPCQSPWNTPLLPVKKPGTNDYRPVQDLREVNKRVQDIHPTVPNPYNLLSSLPPSHTWYSVLDLKDAFFCLKLHPNSQPLFAFEWRDPEKGNTGQLTWTRLPQGFKNSPTLFDEALHRDLASFRALNPQVVMLQYVDDLLVAAPTYRDCKEGTRRLLQELSKLGYRVSAKKAQLCREEVTYLGYLLKGGKRWLTPARKATVMKIPTPTTPRQVREFLGTAGFCRLWIPGFASLAAPLYPLTREKVPFTWTEAHQEAFGRIKEALLSAPALALPDLTKPFALYVDEKEGVARGVLTQTLGPWRRPVAYLSKKLDPVASGWPTCLKAIAAVALLLKDADKLTLGQNVLVIAPHNLESIVRQPPDRWMTNARMTHYQSLLLNERVSFAPPAILNPATLLPVESDDTPIHICSEILAEETGTRPDLRDQPLPGVPAWYTDGSSFIMDGRRQAGAAIVDNKRTVWASNLPEGTSAQKAELIALTQALRLAEGKSINIYTDSRYAFATAHVHGAIYKQRGLLTSAGKDIKNKEEILALLEAIHLPKRVAIIHCPGHQRGTDPVATGNRKADEAAKQAAQSTRILTETTKNAGKRTADGSEFEKRTADGSEFESPKKKAKVE

SEQ ID NO: 7406 - protein, 2216 aa, synthetic construct
MPAAKRVKLDGGDKKYSIGLDIGTNSVGWAVITDEYKVPSKKFKVLGNTDRHSIKKNLIGALLFDSGETAEATRLKRTARRRYTRRKNRICYLQEIFSNEMAKVDDSFFHRLEESFLVEEDKKHERHPIFGNIVDEVAYHEKYPTIYHLRKKLVDSTDKADLRLIYLALAHMIKFRGHFLIEGDLNPDNSDVDKLFIQLVQTYNQLFEENPINASGVDAKAILSARLSKSRRLENLIAQLPGEKKNGLFGNLIALSLGLTPNFKSNFDLAEDAKLQLSKDTYDDDLDNLLAQIGDQYADLFLAAKNLSDAILLSDILRVNTEITKAPLSASMIKRYDEHHQDLTLLKALVRQQLPEKYKEIFFDQSKNGYAGYIDGGASQEEFYKFIKPILEKMDGTEELLVKLNREDLLRKQRTFDNGSIPHQIHLGELHAILRRQEDFYPFLKDNREKIEKILTFRIPYYVGPLARGNSRFAWMTRKSEETITPWNFEEVVDKGASAQSFIERMTNFDKNLPNEKVLPKHSLLYEYFTVYNELTKVKYVTEGMRKPAFLSGEQKKAIVDLLFKTNRKVTVKQLKEDYFKKIECFDSVEISGVEDRFNASLGTYHDLLKIIKDKDFLDNEENEDILEDIVLTLTLFEDREMIEERLKTYAHLFDDKVMKQLKRRRYTGWGRLSRKLINGIRDKQSGKTILDFLKSDGFANRNFMQLIHDDSLTFKEDIQKAQVSGQGDSLHEHIANLAGSPAIKKGILQTVKVVDELVKVMGRHKPENIVIEMARENQTTQKGQKNSRERMKRIEEGIKELGSQILKEHPVENTQLQNEKLYLYYLQNGRDMYVDQELDINRLSDYDVDHIVPQSFLKDDSIDNKVLTRSDKARGKSDNVPSEEVVKKMKNYWRQLLNAKLITQRKFDNLTKAERGGLSELDKAGFIKRQLVETRQITKHVAQILDSRMNTKYDENDKLIREVKVITLKSKLVSDFRKDFQFYKVREINNYHHAHDAYLNAVVGTALIKKYPKLESEFVYGDYKVYDVRKMIAKSEQEIGKATAKYFFYSNIMNFFKTEITLANGEIRKRPLIETNGETGEIVWDKGRDFATVRKVLSMPQVNIVKKTEVQTGGFSKESILPKRNSDKLIARKKDWDPKKYGGFDSPTVAYSVLVVAKVEKGKSKKLKSVKELLGITIMERSSFEKNPIDFLEAKGYKEVKKDLIIKLPKYSLFELENGRKRMLASAGELQKGNELALPSKYVNFLYLASHYEKLKGSPEDNEQKQLFVEQHKHYLDEIIEQISEFSKRVILADANLDKVLSAYNKHRDKPIREQAENIIHLFTLTNLGAPAAFKYFDTTIDRKRYTSTKEVLDATLIHQSITGLYETRIDLSQLGGDGGGSSPAPGGGGGTLGDQGSRGSDPLPEPRVTLTVEGIPTEFLVNTGAEHSVLTKPMGKMGSKRTVVAGATGSKVYPWTTKRLLKIGQKQVTHSFLVIPECPAPLLGRDLLTKLKAQIQFSTEGPQVTWEDRPAMCLVLNLEEEYRLHEKPVPPSIDPSWLQLFPMVWAEKAGMGLANQVPPVVVELKSDASPVAVRQYPMSKEAREGIRPHIQRFLDLGILVPCQSPWNTPLLPVKKPGTNDYRPVQDLREVNKRVQDIHPTVPNPYNLLSSLPPSHTWYSVLDLKDAFFCLKLHPNSQPLFAFEWRDPEKGNTGQLTWTRLPQGFKNSPTLFNEALHRDLASFRALNPQVVMLQYVDDLLVAAPTYRDCKEGTRRLLQELSKLGYRVSAKKAQLCREEVTYLGYLLKGGKRWLTPARKATVMKIPTPTTPRQVREFLGTAGFCRLWIPGFASLAAPLYPLTRPKVPFTWTEAHQEAFGRIKEALLSAPALALPDLTKPFALYVDEKEGVARGVLTQTLGPWRRPVAYLSKKLDPVASGWPTCLKAIAAVALLLKDADKLTLGQNVLVIAPHNLESIVRQPPDRWMTNARMTHYQSLLLNERVSFAPPAILNPATLLPVESDDTPIHICSEILAEETGTRPDLRDQPLPGVPAWYTDGSSFIMDGRRQAGAAIVDNKRTVWASNLPEGTSAQKAELIALTQALRLAEGKSINIYTDSRYAFATAHVHGAIYKQRGWLTSAGKDIKNKEEILALLEAIHLPKRVAIIHCPGHQRGTDPVATGNRKADEAAKQAAQSTRILTETTKNAGKRTADGSEFEKRTADGSEFESPKKKAKVE

SEQ ID NO: 7407 - protein, 2216 aa, synthetic construct
MPAAKRVKLDGGDKKYSIGLDIGTNSVGWAVITDEYKVPSKKFKVLGNTDRHSIKKNLIGALLFDSGETAEATRLKRTARRRYTRRKNRICYLQEIFSNEMAKVDDSFFHRLEESFLVEEDKKHERHPIFGNIVDEVAYHEKYPTIYHLRKKLVDSTDKADLRLIYLALAHMIKFRGHFLIEGDLNPDNSDVDKLFIQLVQTYNQLFEENPINASGVDAKAILSARLSKSRRLENLIAQLPGEKKNGLFGNLIALSLGLTPNFKSNFDLAEDAKLQLSKDTYDDDLDNLLAQIGDQYADLFLAAKNLSDAILLSDILRVNTEITKAPLSASMIKRYDEHHQDLTLLKALVRQQLPEKYKEIFFDQSKNGYAGYIDGGASQEEFYKFIKPILEKMDGTEELLVKLNREDLLRKQRTFDNGSIPHQIHLGELHAILRRQEDFYPFLKDNREKIEKILTFRIPYYVGPLARGNSRFAWMTRKSEETITPWNFEEVVDKGASAQSFIERMTNFDKNLPNEKVLPKHSLLYEYFTVYNELTKVKYVTEGMRKPAFLSGEQKKAIVDLLFKTNRKVTVKQLKEDYFKKIECFDSVEISGVEDRFNASLGTYHDLLKIIKDKDFLDNEENEDILEDIVLTLTLFEDREMIEERLKTYAHLFDDKVMKQLKRRRYTGWGRLSRKLINGIRDKQSGKTILDFLKSDGFANRNFMQLIHDDSLTFKEDIQKAQVSGQGDSLHEHIANLAGSPAIKKGILQTVKVVDELVKVMGRHKPENIVIEMARENQTTQKGQKNSRERMKRIEEGIKELGSQILKEHPVENTQLQNEKLYLYYLQNGRDMYVDQELDINRLSDYDVDHIVPQSFLKDDSIDNKVLTRSDKARGKSDNVPSEEVVKKMKNYWRQLLNAKLITQRKFDNLTKAERGGLSELDKAGFIKRQLVETRQITKHVAQILDSRMNTKYDENDKLIREVKVITLKSKLVSDFRKDFQFYKVREINNYHHAHDAYLNAVVGTALIKKYPKLESEFVYGDYKVYDVRKMIAKSEQEIGKATAKYFFYSNIMNFFKTEITLANGEIRKRPLIETNGETGEIVWDKGRDFATVRKVLSMPQVNIVKKTEVQTGGFSKESILPKRNSDKLIARKKDWDPKKYGGFDSPTVAYSVLVVAKVEKGKSKKLKSVKELLGITIMERSSFEKNPIDFLEAKGYKEVKKDLIIKLPKYSLFELENGRKRMLASAGELQKGNELALPSKYVNFLYLASHYEKLKGSPEDNEQKQLFVEQHKHYLDEIIEQISEFSKRVILADANLDKVLSAYNKHRDKPIREQAENIIHLFTLTNLGAPAAFKYFDTTIDRKRYTSTKEVLDATLIHQSITGLYETRIDLSQLGGDGGGSSPAPGGGGGTLGDQGSRGSDPLPEPRVTLTVEGIPTEFLVNTGAEHSVLTKPMGKMGSKRTVVAGATGSKVYPWTTKRLLKIGQKQVTHSFLVIPECPAPLLGRDLLTKLKAQIQFSTEGPQVTWEDRPAMCLVLNLEEEYRLHEKPVPPSIDPSWLQLFPMVWAEKAGMGLANQVPPVVVELKSDASPVAVRQYPMSKEAREGIRPHIQRFLDLGILVPCQSPWNTPLLPVKKPGTNDYRPVQDLREVNKRVQDIHPTVPNPYNLLSSLPPSHTWYSVLDLKDAFFCLKLHPNSQPLFAFEWRDPEKGNTGQLTWTRLPQGFKNSPTLFNEALHRDLASFRALNPQVVMLQYVDDLLVAAPTYRDCKEGTRRLLQELSKLGYRVSAKKAQLCREEVTYLGYLLKGGKRWLTPARKATVMKIPTPTTPRQVREFLGKAGFCRLFIPGFASLAAPLYPLTRPKVPFTWTEAHQEAFGRIKEALLSAPALALPDLTKPFALYVDEKEGVARGVLTQTLGPWRRPVAYLSKKLDPVASGWPTCLKAIAAVALLLKDADKLTLGQNVLVIAPHNLESIVRQPPDRWMTNARMTHYQSLLLNERVSFAPPAILNPATLLPVESDDTPIHICSEILAEETGTRPDLRDQPLPGVPAWYTDGSSFIMDGRRQAGAAIVDNKRTVWASNLPEGTSAQKAELIALTQALRLAEGKSINIYTDSRYAFATAHVHGAIYKQRGWLTSAGKDIKNKEEILALLEAIHLPKRVAIIHCPGHQRGTDPVATGNRKADEAAKQAAQSTRILTETTKNAGKRTADGSEFEKRTADGSEFESPKKKAKVE

SEQ ID NO: 7408 - protein, 2094 aa, synthetic construct
MPAAKRVKLDGGDKKYSIGLDIGTNSVGWAVITDEYKVPSKKFKVLGNTDRHSIKKNLIGALLFDSGETAEATRLKRTARRRYTRRKNRICYLQEIFSNEMAKVDDSFFHRLEESFLVEEDKKHERHPIFGNIVDEVAYHEKYPTIYHLRKKLVDSTDKADLRLIYLALAHMIKFRGHFLIEGDLNPDNSDVDKLFIQLVQTYNQLFEENPINASGVDAKAILSARLSKSRRLENLIAQLPGEKKNGLFGNLIALSLGLTPNFKSNFDLAEDAKLQLSKDTYDDDLDNLLAQIGDQYADLFLAAKNLSDAILLSDILRVNTEITKAPLSASMIKRYDEHHQDLTLLKALVRQQLPEKYKEIFFDQSKNGYAGYIDGGASQEEFYKFIKPILEKMDGTEELLVKLNREDLLRKQRTFDNGSIPHQIHLGELHAILRRQEDFYPFLKDNREKIEKILTFRIPYYVGPLARGNSRFAWMTRKSEETITPWNFEEVVDKGASAQSFIERMTNFDKNLPNEKVLPKHSLLYEYFTVYNELTKVKYVTEGMRKPAFLSGEQKKAIVDLLFKTNRKVTVKQLKEDYFKKIECFDSVEISGVEDRFNASLGTYHDLLKIIKDKDFLDNEENEDILEDIVLTLTLFEDREMIEERLKTYAHLFDDKVMKQLKRRRYTGWGRLSRKLINGIRDKQSGKTILDFLKSDGFANRNFMQLIHDDSLTFKEDIQKAQVSGQGDSLHEHIANLAGSPAIKKGILQTVKVVDELVKVMGRHKPENIVIEMARENQTTQKGQKNSRERMKRIEEGIKELGSQILKEHPVENTQLQNEKLYLYYLQNGRDMYVDQELDINRLSDYDVDHIVPQSFLKDDSIDNKVLTRSDKARGKSDNVPSEEVVKKMKNYWRQLLNAKLITQRKFDNLTKAERGGLSELDKAGFIKRQLVETRQITKHVAQILDSRMNTKYDENDKLIREVKVITLKSKLVSDFRKDFQFYKVREINNYHHAHDAYLNAVVGTALIKKYPKLESEFVYGDYKVYDVRKMIAKSEQEIGKATAKYFFYSNIMNFFKTEITLANGEIRKRPLIETNGETGEIVWDKGRDFATVRKVLSMPQVNIVKKTEVQTGGFSKESILPKRNSDKLIARKKDWDPKKYGGFDSPTVAYSVLVVAKVEKGKSKKLKSVKELLGITIMERSSFEKNPIDFLEAKGYKEVKKDLIIKLPKYSLFELENGRKRMLASAGELQKGNELALPSKYVNFLYLASHYEKLKGSPEDNEQKQLFVEQHKHYLDEIIEQISEFSKRVILADANLDKVLSAYNKHRDKPIREQAENIIHLFTLTNLGAPAAFKYFDTTIDRKRYTSTKEVLDATLIHQSITGLYETRIDLSQLGGDGGGSSPAPGGGGGTLNLEDEYRLYETSAEPEVSPGSTWLSDFPQAWAETGGMGLAVRQAPLIIPLKATSTPVSIKQYPMSQEAKLGIKPHIQRLLDQGILVPCQSPWNTPLLPVKKPGTNDYRPVQDLREVNKRVEDIHPTVPNPYNLLSGLPPSHRWYTVLDLKDAFFCLRLHPTSQPLFAFEWRDPGMGISGQLTWTRLPQGFKNSPTLFNEALHRDLADFRIQHPDLILLQYVDDILLAATSELDCQQGTRALLLTLGNLGYRASAKKAQLCQKQVKYLGYLLKEGQRWLTEARKETVMGQPTPKTPRQLREFLGTAGFCRLWIPGFAEMAAPLYPLTKPGTLFNWGPDQQKAYQEIKQALLTAPALGLPDLTKPFELFVDEKQGYAKGVLTQKLGPWRRPVAYLSKKLDPVAAGWPPCLRMVAAIAVLRKDAGKLTMGQPLVILAPHAVEALVKQPPDRWLSNARMTHYQAMLLDTDRVQFGPVVALNPATLLPLPEEGAPHDCLEILAETHGTRPDLTDQPIPDADHTWYTDGSSFLQEGQRKAGAAVTTETEVIWARALPAGTSAQRAELIALTQALKMAEGKRLNVYTDSRYAFATAHIHGEIYRRRGWLTSEGREIKNKSEILALLKALFLPKRLSIIHCLGHQKGDSAEARGNRLADQAAREAAIKTPPDTSTLLAGKRTADGSEFEKRTADGSEFESPKKKAKVE

SEQ ID NO: 7409 - protein, 2094 aa, synthetic construct
MPAAKRVKLDGGDKKYSIGLDIGTNSVGWAVITDEYKVPSKKFKVLGNTDRHSIKKNLIGALLFDSGETAEATRLKRTARRRYTRRKNRICYLQEIFSNEMAKVDDSFFHRLEESFLVEEDKKHERHPIFGNIVDEVAYHEKYPTIYHLRKKLVDSTDKADLRLIYLALAHMIKFRGHFLIEGDLNPDNSDVDKLFIQLVQTYNQLFEENPINASGVDAKAILSARLSKSRRLENLIAQLPGEKKNGLFGNLIALSLGLTPNFKSNFDLAEDAKLQLSKDTYDDDLDNLLAQIGDQYADLFLAAKNLSDAILLSDILRVNTEITKAPLSASMIKRYDEHHQDLTLLKALVRQQLPEKYKEIFFDQSKNGYAGYIDGGASQEEFYKFIKPILEKMDGTEELLVKLNREDLLRKQRTFDNGSIPHQIHLGELHAILRRQEDFYPFLKDNREKIEKILTFRIPYYVGPLARGNSRFAWMTRKSEETITPWNFEEVVDKGASAQSFIERMTNFDKNLPNEKVLPKHSLLYEYFTVYNELTKVKYVTEGMRKPAFLSGEQKKAIVDLLFKTNRKVTVKQLKEDYFKKIECFDSVEISGVEDRFNASLGTYHDLLKIIKDKDFLDNEENEDILEDIVLTLTLFEDREMIEERLKTYAHLFDDKVMKQLKRRRYTGWGRLSRKLINGIRDKQSGKTILDFLKSDGFANRNFMQLIHDDSLTFKEDIQKAQVSGQGDSLHEHIANLAGSPAIKKGILQTVKVVDELVKVMGRHKPENIVIEMARENQTTQKGQKNSRERMKRIEEGIKELGSQILKEHPVENTQLQNEKLYLYYLQNGRDMYVDQELDINRLSDYDVDHIVPQSFLKDDSIDNKVLTRSDKARGKSDNVPSEEVVKKMKNYWRQLLNAKLITQRKFDNLTKAERGGLSELDKAGFIKRQLVETRQITKHVAQILDSRMNTKYDENDKLIREVKVITLKSKLVSDFRKDFQFYKVREINNYHHAHDAYLNAVVGTALIKKYPKLESEFVYGDYKVYDVRKMIAKSEQEIGKATAKYFFYSNIMNFFKTEITLANGEIRKRPLIETNGETGEIVWDKGRDFATVRKVLSMPQVNIVKKTEVQTGGFSKESILPKRNSDKLIARKKDWDPKKYGGFDSPTVAYSVLVVAKVEKGKSKKLKSVKELLGITIMERSSFEKNPIDFLEAKGYKEVKKDLIIKLPKYSLFELENGRKRMLASAGELQKGNELALPSKYVNFLYLASHYEKLKGSPEDNEQKQLFVEQHKHYLDEIIEQISEFSKRVILADANLDKVLSAYNKHRDKPIREQAENIIHLFTLTNLGAPAAFKYFDTTIDRKRYTSTKEVLDATLIHQSITGLYETRIDLSQLGGDGGGSSPAPGGGGGTLNIEDEYRLHETSKGPDVPLGSTWLSDFPQAWAETGGMGLAFRQAPLIISLKATSTPVSIKQYPMSQEARLGIKPHIQRLLDQGILVPCQSPWNTPLLPVKKPGTNDYRPVQDLREVNKRVEDIHPTVPNPYNLLSGLPPSHQWYTVLDLKDAFFCLRLHPTSQSLFAFEWKDPEMGISGQLTWTRLPQGFKNSPTLFNEALHRDLADFRIQHPDLILLQYVDDLLLAATSELDCQQGTRALLQTLGDLGYRASAKKAQICQKQVKYLGYLLKEGQRWLTEARKETVMGQPTPKTPRQLREFLGTAGLCRLWIPGFAEMAAPLYPLTKPGTLFKWGPDQQKAYQEIKQALLTAPALGLPDLTKPFELFVDEKQGYAKGVLTQKLGPWRRPVAYLSKKLDPVAAGWPPCLRMVAAIAVLTKDVGKLTMGQPLVILAPHAVEALVKQPPDRWLSNARMTHYQALLLDTDRVQFGPIVALNPATLLPLPEEGLQHDCLDILAEAHGTRPDLTDQPLPDADHTWYTDGSSFLQEGQRRAGAAVTTETEVIWAKALPAGTSAQRAELIALTQALKMAAGKKLNVYTDSRYAFATAHIHGEIYRRRGWLTSEGKEIKNKDEILALLKALFLPKRLSIIHCPGHQKGNHAEARGNRMADQAAREVATRETPETSTLLAGKRTADGSEFEKRTADGSEFESPKKKAKVE

SEQ ID NO: 7410 - protein, 2094 aa, synthetic construct
MPAAKRVKLDGGDKKYSIGLDIGTNSVGWAVITDEYKVPSKKFKVLGNTDRHSIKKNLIGALLFDSGETAEATRLKRTARRRYTRRKNRICYLQEIFSNEMAKVDDSFFHRLEESFLVEEDKKHERHPIFGNIVDEVAYHEKYPTIYHLRKKLVDSTDKADLRLIYLALAHMIKFRGHFLIEGDLNPDNSDVDKLFIQLVQTYNQLFEENPINASGVDAKAILSARLSKSRRLENLIAQLPGEKKNGLFGNLIALSLGLTPNFKSNFDLAEDAKLQLSKDTYDDDLDNLLAQIGDQYADLFLAAKNLSDAILLSDILRVNTEITKAPLSASMIKRYDEHHQDLTLLKALVRQQLPEKYKEIFFDQSKNGYAGYIDGGASQEEFYKFIKPILEKMDGTEELLVKLNREDLLRKQRTFDNGSIPHQIHLGELHAILRRQEDFYPFLKDNREKIEKILTFRIPYYVGPLARGNSRFAWMTRKSEETITPWNFEEVVDKGASAQSFIERMTNFDKNLPNEKVLPKHSLLYEYFTVYNELTKVKYVTEGMRKPAFLSGEQKKAIVDLLFKTNRKVTVKQLKEDYFKKIECFDSVEISGVEDRFNASLGTYHDLLKIIKDKDFLDNEENEDILEDIVLTLTLFEDREMIEERLKTYAHLFDDKVMKQLKRRRYTGWGRLSRKLINGIRDKQSGKTILDFLKSDGFANRNFMQLIHDDSLTFKEDIQKAQVSGQGDSLHEHIANLAGSPAIKKGILQTVKVVDELVKVMGRHKPENIVIEMARENQTTQKGQKNSRERMKRIEEGIKELGSQILKEHPVENTQLQNEKLYLYYLQNGRDMYVDQELDINRLSDYDVDHIVPQSFLKDDSIDNKVLTRSDKARGKSDNVPSEEVVKKMKNYWRQLLNAKLITQRKFDNLTKAERGGLSELDKAGFIKRQLVETRQITKHVAQILDSRMNTKYDENDKLIREVKVITLKSKLVSDFRKDFQFYKVREINNYHHAHDAYLNAVVGTALIKKYPKLESEFVYGDYKVYDVRKMIAKSEQEIGKATAKYFFYSNIMNFFKTEITLANGEIRKRPLIETNGETGEIVWDKGRDFATVRKVLSMPQVNIVKKTEVQTGGFSKESILPKRNSDKLIARKKDWDPKKYGGFDSPTVAYSVLVVAKVEKGKSKKLKSVKELLGITIMERSSFEKNPIDFLEAKGYKEVKKDLIIKLPKYSLFELENGRKRMLASAGELQKGNELALPSKYVNFLYLASHYEKLKGSPEDNEQKQLFVEQHKHYLDEIIEQISEFSKRVILADANLDKVLSAYNKHRDKPIREQAENIIHLFTLTNLGAPAAFKYFDTTIDRKRYTSTKEVLDATLIHQSITGLYETRIDLSQLGGDGGGSSPAPGGGGGTLNIEDEYRLHETSKGPDVPLGSTWLSDFPQAWAETGGMGLAVRQAPLIIPLKATSTPVSIKQYPMSQEARLGIKPHIQRLLDQGILVPCQSPWNTPLLPVKKPGTNDYRPVQDLREVNKRVEDIHPTVPNPYNLLSGLPPSHQWYTVLDLKDAFFCLRLHPTSQSLFAFEWRDPEMGISGQLTWTRLPQGFKNSPTLFNEALHRDLADFRIQHPDLILLQYVDDLLLAATSELDCQQGTRALLQTLGDLGYRASAKKAQICQKQVKYLGYLLKEGQRWLTEARKETVMGQPTPKTPRQLREFLGTAGFCRLWIPGFAEMAAPLYPLTKPGTLFEWGPDQQKAYQEIKQALLTAPALGLPDLTKPFELFVDEKQGYAKGVLTQKLGPWRRPVAYLSKKLDPVAAGWPPCLRMVAAIAVLTKDAGKLTMGQPLVILAPHAVEALVKQPPDRWLSNARMTHYQALLLDTDRVQFGPIVALNPATLLPLPEEGLQHDCLDILAEAHGTRPDLTDQPLPDADHTWYTDGSSFLQEGQRKAGAAVTTETEVVWAKALPAGTSAQRAELIALTQALKMAEGKKLNVYTDSRYAFATAHIHGEIYRRRGWLTSEGKEIKNKDEILALLKALFLPKRLSIIHCPGHQKGNRAEARGNRMADQAAREVATRETPETSTLLAGKRTADGSEFEKRTADGSEFESPKKKAKVE

SEQ ID NO: 7411 - protein, 2094 aa, synthetic construct
MPAAKRVKLDGGDKKYSIGLDIGTNSVGWAVITDEYKVPSKKFKVLGNTDRHSIKKNLIGALLFDSGETAEATRLKRTARRRYTRRKNRICYLQEIFSNEMAKVDDSFFHRLEESFLVEEDKKHERHPIFGNIVDEVAYHEKYPTIYHLRKKLVDSTDKADLRLIYLALAHMIKFRGHFLIEGDLNPDNSDVDKLFIQLVQTYNQLFEENPINASGVDAKAILSARLSKSRRLENLIAQLPGEKKNGLFGNLIALSLGLTPNFKSNFDLAEDAKLQLSKDTYDDDLDNLLAQIGDQYADLFLAAKNLSDAILLSDILRVNTEITKAPLSASMIKRYDEHHQDLTLLKALVRQQLPEKYKEIFFDQSKNGYAGYIDGGASQEEFYKFIKPILEKMDGTEELLVKLNREDLLRKQRTFDNGSIPHQIHLGELHAILRRQEDFYPFLKDNREKIEKILTFRIPYYVGPLARGNSRFAWMTRKSEETITPWNFEEVVDKGASAQSFIERMTNFDKNLPNEKVLPKHSLLYEYFTVYNELTKVKYVTEGMRKPAFLSGEQKKAIVDLLFKTNRKVTVKQLKEDYFKKIECFDSVEISGVEDRFNASLGTYHDLLKIIKDKDFLDNEENEDILEDIVLTLTLFEDREMIEERLKTYAHLFDDKVMKQLKRRRYTGWGRLSRKLINGIRDKQSGKTILDFLKSDGFANRNFMQLIHDDSLTFKEDIQKAQVSGQGDSLHEHIANLAGSPAIKKGILQTVKVVDELVKVMGRHKPENIVIEMARENQTTQKGQKNSRERMKRIEEGIKELGSQILKEHPVENTQLQNEKLYLYYLQNGRDMYVDQELDINRLSDYDVDHIVPQSFLKDDSIDNKVLTRSDKARGKSDNVPSEEVVKKMKNYWRQLLNAKLITQRKFDNLTKAERGGLSELDKAGFIKRQLVETRQITKHVAQILDSRMNTKYDENDKLIREVKVITLKSKLVSDFRKDFQFYKVREINNYHHAHDAYLNAVVGTALIKKYPKLESEFVYGDYKVYDVRKMIAKSEQEIGKATAKYFFYSNIMNFFKTEITLANGEIRKRPLIETNGETGEIVWDKGRDFATVRKVLSMPQVNIVKKTEVQTGGFSKESILPKRNSDKLIARKKDWDPKKYGGFDSPTVAYSVLVVAKVEKGKSKKLKSVKELLGITIMERSSFEKNPIDFLEAKGYKEVKKDLIIKLPKYSLFELENGRKRMLASAGELQKGNELALPSKYVNFLYLASHYEKLKGSPEDNEQKQLFVEQHKHYLDEIIEQISEFSKRVILADANLDKVLSAYNKHRDKPIREQAENIIHLFTLTNLGAPAAFKYFDTTIDRKRYTSTKEVLDATLIHQSITGLYETRIDLSQLGGDGGGSSPAPGGGGGTLNIEDEHRLHETSKEPDVSLGSTWLSDFPQAWAETGGMGLAVRQAPLIIPLKATSTPVSIKQYPMSQEARLGIKPHIQRLLDQGILVPCQSPWNTPLLPVKKPGTNDYRPVQDLREVNKRVEDIHPTVPNPYNLLSGLPPSHQWYTVLDLKDAFFCLRLHPTSQPLFAFEWRDPEMGISGQLTWTRLPQGFKNSPTLFDEALHRDLADFRIQHPDLILLQYVDDLLLAATSELDCQQGTRALLQTLGNLGYRASAKKAQICQKQVKYLGYLLKEGQRWLTEARKETVMGQPTPKTPRQLREFLGTAGFCRLWIPGFAEMAAPLYPLTKTGTLFNWGPDQQKAYQEIKQALLTAPALGLPDLTKPFELFVDEKQGYAKGVLTQKLGPWRRPVAYLSKKLDPVAAGWPPCLRMVAAIAVLTKDAGKLTMGQPLVILAPHAVEALVKQPPDRWLSNARMTHYQALLLDTDRVQFGPVVALNPATLLPLPEEGLQHNCLDILAEAHGTRPDLTDQPLPDADHTWYTDGSSLLQEGQRKAGAAVTTETEVIWAKALPAGTSAQRAELIALTQALKMAEGKKLNVYTDSRYAFATAHIHGEIYRRRGLLTSEGKEIKNKDEILALLKALFLPKRLSIIHCPGHQKGHSAEARGNRMADQAARKAAITETPDTSTLLAGKRTADGSEFEKRTADGSEFESPKKKAKVE

SEQ ID NO: 7412 - protein, 2100 aa, synthetic construct
MPAAKRVKLDGGDKKYSIGLDIGTNSVGWAVITDEYKVPSKKFKVLGNTDRHSIKKNLIGALLFDSGETAEATRLKRTARRRYTRRKNRICYLQEIFSNEMAKVDDSFFHRLEESFLVEEDKKHERHPIFGNIVDEVAYHEKYPTIYHLRKKLVDSTDKADLRLIYLALAHMIKFRGHFLIEGDLNPDNSDVDKLFIQLVQTYNQLFEENPINASGVDAKAILSARLSKSRRLENLIAQLPGEKKNGLFGNLIALSLGLTPNFKSNFDLAEDAKLQLSKDTYDDDLDNLLAQIGDQYADLFLAAKNLSDAILLSDILRVNTEITKAPLSASMIKRYDEHHQDLTLLKALVRQQLPEKYKEIFFDQSKNGYAGYIDGGASQEEFYKFIKPILEKMDGTEELLVKLNREDLLRKQRTFDNGSIPHQIHLGELHAILRRQEDFYPFLKDNREKIEKILTFRIPYYVGPLARGNSRFAWMTRKSEETITPWNFEEVVDKGASAQSFIERMTNFDKNLPNEKVLPKHSLLYEYFTVYNELTKVKYVTEGMRKPAFLSGEQKKAIVDLLFKTNRKVTVKQLKEDYFKKIECFDSVEISGVEDRFNASLGTYHDLLKIIKDKDFLDNEENEDILEDIVLTLTLFEDREMIEERLKTYAHLFDDKVMKQLKRRRYTGWGRLSRKLINGIRDKQSGKTILDFLKSDGFANRNFMQLIHDDSLTFKEDIQKAQVSGQGDSLHEHIANLAGSPAIKKGILQTVKVVDELVKVMGRHKPENIVIEMARENQTTQKGQKNSRERMKRIEEGIKELGSQILKEHPVENTQLQNEKLYLYYLQNGRDMYVDQELDINRLSDYDVDHIVPQSFLKDDSIDNKVLTRSDKARGKSDNVPSEEVVKKMKNYWRQLLNAKLITQRKFDNLTKAERGGLSELDKAGFIKRQLVETRQITKHVAQILDSRMNTKYDENDKLIREVKVITLKSKLVSDFRKDFQFYKVREINNYHHAHDAYLNAVVGTALIKKYPKLESEFVYGDYKVYDVRKMIAKSEQEIGKATAKYFFYSNIMNFFKTEITLANGEIRKRPLIETNGETGEIVWDKGRDFATVRKVLSMPQVNIVKKTEVQTGGFSKESILPKRNSDKLIARKKDWDPKKYGGFDSPTVAYSVLVVAKVEKGKSKKLKSVKELLGITIMERSSFEKNPIDFLEAKGYKEVKKDLIIKLPKYSLFELENGRKRMLASAGELQKGNELALPSKYVNFLYLASHYEKLKGSPEDNEQKQLFVEQHKHYLDEIIEQISEFSKRVILADANLDKVLSAYNKHRDKPIREQAENIIHLFTLTNLGAPAAFKYFDTTIDRKRYTSTKEVLDATLIHQSITGLYETRIDLSQLGGDGGPAPGGGGSSGGTVSLQDEHRLFDIPVTTSLPDVWLQDFPQAWAETGGLGRAKCQAPIIIDLKPTAVPVSIKQYPMSLEAHMGIRQHIIKFLELGVLRPCRSPWNTPLLPVKKPGTQDYRPVQDLREINKRTVDIHPTVPNPYNLLSTLKPDYSWYTVLDLKDAFFCLPLAPQSQELFAFEWKDPERGISGQLTWTRLPQGFKNSPTLFNEALHRDLTDFRTQHPEVTLLQYVDDLLLAAPTKKACTQGTRHLLQELGEKGYRASAKKAQICQTKVTYLGYILSEGKRWLTPGRIETVARIPPPRNPREVREFLGTAGFCRLWIPGFAELAAPLYALTKPSTPFTWQTEHQLAFEALKKALLSAPALGLPDTSKPFTLFLDERQGIAKGVLTQKLGPWKRPVAYLSKKLDPVAAGWPPCLRIMAATAMLVKDSAKLTLGQPLTVITPHTLEAIVRQPPDRWITNARLTHYQALLLDTDRVQFGPPVTLNPATLLPVPENQPSPHDCRQVLAETHGTREDLKDQELPDADHTWYTDGSSYLDSGTRRAGAAVVDGHNTIWAQSLPPGTSAQKAELIALTKALELSKGKKANIYTDSRYAFATAHTHGSIYERRGWLTSEGKEIKNKAEIIALLKALFLPQEVAIIHCPGHQKGQDPVAVGNRQADRVARQAAMAEVLTLATEPDNTSHITAGKRTADGSEFEKRTADGSEFESPKKKAKVE

SEQ ID NO: 7413 - protein, 1999 aa, synthetic construct
MPAAKRVKLDGGDKKYSIGLDIGTNSVGWAVITDEYKVPSKKFKVLGNTDRHSIKKNLIGALLFDSGETAEATRLKRTARRRYTRRKNRICYLQEIFSNEMAKVDDSFFHRLEESFLVEEDKKHERHPIFGNIVDEVAYHEKYPTIYHLRKKLVDSTDKADLRLIYLALAHMIKFRGHFLIEGDLNPDNSDVDKLFIQLVQTYNQLFEENPINASGVDAKAILSARLSKSRRLENLIAQLPGEKKNGLFGNLIALSLGLTPNFKSNFDLAEDAKLQLSKDTYDDDLDNLLAQIGDQYADLFLAAKNLSDAILLSDILRVNTEITKAPLSASMIKRYDEHHQDLTLLKALVRQQLPEKYKEIFFDQSKNGYAGYIDGGASQEEFYKFIKPILEKMDGTEELLVKLNREDLLRKQRTFDNGSIPHQIHLGELHAILRRQEDFYPFLKDNREKIEKILTFRIPYYVGPLARGNSRFAWMTRKSEETITPWNFEEVVDKGASAQSFIERMTNFDKNLPNEKVLPKHSLLYEYFTVYNELTKVKYVTEGMRKPAFLSGEQKKAIVDLLFKTNRKVTVKQLKEDYFKKIECFDSVEISGVEDRFNASLGTYHDLLKIIKDKDFLDNEENEDILEDIVLTLTLFEDREMIEERLKTYAHLFDDKVMKQLKRRRYTGWGRLSRKLINGIRDKQSGKTILDFLKSDGFANRNFMQLIHDDSLTFKEDIQKAQVSGQGDSLHEHIANLAGSPAIKKGILQTVKVVDELVKVMGRHKPENIVIEMARENQTTQKGQKNSRERMKRIEEGIKELGSQILKEHPVENTQLQNEKLYLYYLQNGRDMYVDQELDINRLSDYDVDHIVPQSFLKDDSIDNKVLTRSDKARGKSDNVPSEEVVKKMKNYWRQLLNAKLITQRKFDNLTKAERGGLSELDKAGFIKRQLVETRQITKHVAQILDSRMNTKYDENDKLIREVKVITLKSKLVSDFRKDFQFYKVREINNYHHAHDAYLNAVVGTALIKKYPKLESEFVYGDYKVYDVRKMIAKSEQEIGKATAKYFFYSNIMNFFKTEITLANGEIRKRPLIETNGETGEIVWDKGRDFATVRKVLSMPQVNIVKKTEVQTGGFSKESILPKRNSDKLIARKKDWDPKKYGGFDSPTVAYSVLVVAKVEKGKSKKLKSVKELLGITIMERSSFEKNPIDFLEAKGYKEVKKDLIIKLPKYSLFELENGRKRMLASAGELQKGNELALPSKYVNFLYLASHYEKLKGSPEDNEQKQLFVEQHKHYLDEIIEQISEFSKRVILADANLDKVLSAYNKHRDKPIREQAENIIHLFTLTNLGAPAAFKYFDTTIDRKRYTSTKEVLDATLIHQSITGLYETRIDLSQLGGDGGPAPGGGGSSGGGVLDTPPSHIGLEHLPPPPEVPQFPLNLERLQALQDLVHRSLEAGYISPWDGPGNNPVFPVRKPNGAWRFVHDLRATNALTKPIPALSPGPPDLTAPPTHPPHIICLDLKDAFFQIPVEDRFRFYLSFTLPSPGGLQPHRRFAWRVLPQGFINSPALFQRALQEPLRQVSAAFSQSLLVSYMDDILYASPTEEQRSQCYQALAARLRDLGFQVASEKTSQTPSPVPFLGQMVHEQIVTYQSLPTLQISSPISLHQLQAVLGDLQWVSRGTPTTRRPLQLLYSSLKRHHDPRAIIQLSPEQLQGIAELRQALSHNARSRYNEQEPLLAYVHLTRAGSTLVLFQKGAQFPLAYFQTPLTDNQASPWGLLLLLGCQYLQTQALSSYAKPILKYYHNLPKTSLDNWIQSSEDPRVQELLQLWPQISSQGIQPPGPWKTLITRAEVFLTPQFSPDPIPAALCLFSDGATGRGAYCLWKDHLLDFQAVPAPESAQKGELAGLLAGLAAAPPEPVNIWVDSKYLYSLLRTWVLGAWLQPDPVPSYALLYKSLLRHPAIVVGHVRSHSSASHPIASLNNYVDQLAGKRTADGSEFEKRTADGSEFESPKKKAKVE

SEQ ID NO: 7414 - protein, 2171 aa, synthetic construct
MPAAKRVKLDGGDKKYSIGLDIGTNSVGWAVITDEYKVPSKKFKVLGNTDRHSIKKNLIGALLFDSGETAEATRLKRTARRRYTRRKNRICYLQEIFSNEMAKVDDSFFHRLEESFLVEEDKKHERHPIFGNIVDEVAYHEKYPTIYHLRKKLVDSTDKADLRLIYLALAHMIKFRGHFLIEGDLNPDNSDVDKLFIQLVQTYNQLFEENPINASGVDAKAILSARLSKSRRLENLIAQLPGEKKNGLFGNLIALSLGLTPNFKSNFDLAEDAKLQLSKDTYDDDLDNLLAQIGDQYADLFLAAKNLSDAILLSDILRVNTEITKAPLSASMIKRYDEHHQDLTLLKALVRQQLPEKYKEIFFDQSKNGYAGYIDGGASQEEFYKFIKPILEKMDGTEELLVKLNREDLLRKQRTFDNGSIPHQIHLGELHAILRRQEDFYPFLKDNREKIEKILTFRIPYYVGPLARGNSRFAWMTRKSEETITPWNFEEVVDKGASAQSFIERMTNFDKNLPNEKVLPKHSLLYEYFTVYNELTKVKYVTEGMRKPAFLSGEQKKAIVDLLFKTNRKVTVKQLKEDYFKKIECFDSVEISGVEDRFNASLGTYHDLLKIIKDKDFLDNEENEDILEDIVLTLTLFEDREMIEERLKTYAHLFDDKVMKQLKRRRYTGWGRLSRKLINGIRDKQSGKTILDFLKSDGFANRNFMQLIHDDSLTFKEDIQKAQVSGQGDSLHEHIANLAGSPAIKKGILQTVKVVDELVKVMGRHKPENIVIEMARENQTTQKGQKNSRERMKRIEEGIKELGSQILKEHPVENTQLQNEKLYLYYLQNGRDMYVDQELDINRLSDYDVDHIVPQSFLKDDSIDNKVLTRSDKARGKSDNVPSEEVVKKMKNYWRQLLNAKLITQRKFDNLTKAERGGLSELDKAGFIKRQLVETRQITKHVAQILDSRMNTKYDENDKLIREVKVITLKSKLVSDFRKDFQFYKVREINNYHHAHDAYLNAVVGTALIKKYPKLESEFVYGDYKVYDVRKMIAKSEQEIGKATAKYFFYSNIMNFFKTEITLANGEIRKRPLIETNGETGEIVWDKGRDFATVRKVLSMPQVNIVKKTEVQTGGFSKESILPKRNSDKLIARKKDWDPKKYGGFDSPTVAYSVLVVAKVEKGKSKKLKSVKELLGITIMERSSFEKNPIDFLEAKGYKEVKKDLIIKLPKYSLFELENGRKRMLASAGELQKGNELALPSKYVNFLYLASHYEKLKGSPEDNEQKQLFVEQHKHYLDEIIEQISEFSKRVILADANLDKVLSAYNKHRDKPIREQAENIIHLFTLTNLGAPAAFKYFDTTIDRKRYTSTKEVLDATLIHQSITGLYETRIDLSQLGGDGGPAPGGGGSSGGMDLLKPLTVERKGVKIKGYWNSQADITCVPKDLLQGEEPVRQQNVTTIHGTQEGDVYYVNLKIDGRRINTEVIGTTLDYAIITPGDVPWILKKPLELTIKLDLEEQQGTLLNNSILSKKGKEELKQLFEKYSALWQSWENQVGHRRIRPHKIATGTVKPTPQKQYHINPKAKPDIQIVINDLLKQGVLIQKESTMNTPVYPVPKPNGRWRMVLDYRAVNKVTPLIAVQNQHSYGILGSLFKGRYKTTIDLSNGFWAHPIVPEDYWITAFTWQGKQYCWTVLPQGFLNSPGLFTGDVVDLLQGIPNVEVYVDDVYISHDSEKEHLEYLDILFNRLKEAGYIISLKKSNIANSIVDFLGFQITNEGRGLTDTFKEKLENITAPTTLKQLQSILGLLNFARNFIPDFTELIAPLYALIPKSTKNYVPWQIEHSTTLETLITKLNGAEYLQGRKGDKTLIMKVNASYTTGYIRYYNEGEKKPISYVSIVFSKTELKFTELEKLLTTVHKGLLKALDLSMGQNIHVYSPIVSMQNIQKTPQTAKKALASRWLSWLSYLEDPRIRFFYDPQMPALKDLPAVDTGKDNKKHPSNFQHIFYTDGSAITSPTKEGHLNAGMGIVYFINKDGNLQKQQEWSISLGNHTAQFAEIAAFEFALKKCLPLGGNILVVTDSNYVAKAYNEELDVWASNGFVNNRKKPLKHISKWKSVADLKRLRPDVVVTHEPGHQKLDSSPHAYGNNLADQLATQASFKVHAGKRTADGSEFEKRTADGSEFESPKKKAKVE

SEQ ID NO: 7415 - protein, 2093 aa, synthetic construct
MPAAKRVKLDGGDKKYSIGLDIGTNSVGWAVITDEYKVPSKKFKVLGNTDRHSIKKNLIGALLFDSGETAEATRLKRTARRRYTRRKNRICYLQEIFSNEMAKVDDSFFHRLEESFLVEEDKKHERHPIFGNIVDEVAYHEKYPTIYHLRKKLVDSTDKADLRLIYLALAHMIKFRGHFLIEGDLNPDNSDVDKLFIQLVQTYNQLFEENPINASGVDAKAILSARLSKSRRLENLIAQLPGEKKNGLFGNLIALSLGLTPNFKSNFDLAEDAKLQLSKDTYDDDLDNLLAQIGDQYADLFLAAKNLSDAILLSDILRVNTEITKAPLSASMIKRYDEHHQDLTLLKALVRQQLPEKYKEIFFDQSKNGYAGYIDGGASQEEFYKFIKPILEKMDGTEELLVKLNREDLLRKQRTFDNGSIPHQIHLGELHAILRRQEDFYPFLKDNREKIEKILTFRIPYYVGPLARGNSRFAWMTRKSEETITPWNFEEVVDKGASAQSFIERMTNFDKNLPNEKVLPKHSLLYEYFTVYNELTKVKYVTEGMRKPAFLSGEQKKAIVDLLFKTNRKVTVKQLKEDYFKKIECFDSVEISGVEDRFNASLGTYHDLLKIIKDKDFLDNEENEDILEDIVLTLTLFEDREMIEERLKTYAHLFDDKVMKQLKRRRYTGWGRLSRKLINGIRDKQSGKTILDFLKSDGFANRNFMQLIHDDSLTFKEDIQKAQVSGQGDSLHEHIANLAGSPAIKKGILQTVKVVDELVKVMGRHKPENIVIEMARENQTTQKGQKNSRERMKRIEEGIKELGSQILKEHPVENTQLQNEKLYLYYLQNGRDMYVDQELDINRLSDYDVDHIVPQSFLKDDSIDNKVLTRSDKARGKSDNVPSEEVVKKMKNYWRQLLNAKLITQRKFDNLTKAERGGLSELDKAGFIKRQLVETRQITKHVAQILDSRMNTKYDENDKLIREVKVITLKSKLVSDFRKDFQFYKVREINNYHHAHDAYLNAVVGTALIKKYPKLESEFVYGDYKVYDVRKMIAKSEQEIGKATAKYFFYSNIMNFFKTEITLANGEIRKRPLIETNGETGEIVWDKGRDFATVRKVLSMPQVNIVKKTEVQTGGFSKESILPKRNSDKLIARKKDWDPKKYGGFDSPTVAYSVLVVAKVEKGKSKKLKSVKELLGITIMERSSFEKNPIDFLEAKGYKEVKKDLIIKLPKYSLFELENGRKRMLASAGELQKGNELALPSKYVNFLYLASHYEKLKGSPEDNEQKQLFVEQHKHYLDEIIEQISEFSKRVILADANLDKVLSAYNKHRDKPIREQAENIIHLFTLTNLGAPAAFKYFDTTIDRKRYTSTKEVLDATLIHQSITGLYETRIDLSQLGGDGGPAPGGGGSSGGTLQLEEEYRLFEPESTQKQEMDIWLKNFPQAWAETGGMGTAHCQAPVLIQLKATATPISIRQYPMPHEAYQGIKPHIRRMLDQGILKPCQSPWNTPLLPVKKPGTEDYRPVQDLREVNKRVEDIHPTVPNPYNLLSTLPPSHPWYTVLDLKDAFFCLRLHSESQLLFAFEWRDPEIGLSGQLTWTRLPQGFKNSPTLFNEALHSDLADFRVRYPALVLLQYVDDLLLAAATRTECLEGTKALLETLGNKGYRASAKKAQICLQEVTYLGYSLKDGQRWLTKARKEAILSIPVPKNSRQVREFLGTAGYCRLWIPGFAELAAPLYPLTRPGTLFQWGTEQQLAFEDIKKALLSSPALGLPDITKPFELFIDENSGFAKGVLVQKLGPWKRPVAYLSKKLDTVASGWPPCLRMVAAIAILVKDAGKLTLGQPLTILTSHPVEALVRQPPNKWLSNARMTHYQAMLLDAERVHFGPTVSLNPATLLPLPSGGNHHDCLQILAETHGTRPDLTDQPLPDADLTWYTDGSSFIRNGEREAGAAVTTESEVIWAAPLPPGTSAQRAELIALTQALKMAEGKKLTVYTDSRYAFATTHVHGEIYRRRGWLTSEGKEIKNKNEILALLEALFLPKRLSIIHCPGHQKGDSPQAKGNRLADDTAKKAATETHSSLTVLPAGKRTADGSEFEKRTADGSEFESPKKKAKVE

SEQ ID NO: 7416 - protein, 2216 aa, synthetic construct
MPAAKRVKLDGGDKKYSIGLDIGTNSVGWAVITDEYKVPSKKFKVLGNTDRHSIKKNLIGALLFDSGETAEATRLKRTARRRYTRRKNRICYLQEIFSNEMAKVDDSFFHRLEESFLVEEDKKHERHPIFGNIVDEVAYHEKYPTIYHLRKKLVDSTDKADLRLIYLALAHMIKFRGHFLIEGDLNPDNSDVDKLFIQLVQTYNQLFEENPINASGVDAKAILSARLSKSRRLENLIAQLPGEKKNGLFGNLIALSLGLTPNFKSNFDLAEDAKLQLSKDTYDDDLDNLLAQIGDQYADLFLAAKNLSDAILLSDILRVNTEITKAPLSASMIKRYDEHHQDLTLLKALVRQQLPEKYKEIFFDQSKNGYAGYIDGGASQEEFYKFIKPILEKMDGTEELLVKLNREDLLRKQRTFDNGSIPHQIHLGELHAILRRQEDFYPFLKDNREKIEKILTFRIPYYVGPLARGNSRFAWMTRKSEETITPWNFEEVVDKGASAQSFIERMTNFDKNLPNEKVLPKHSLLYEYFTVYNELTKVKYVTEGMRKPAFLSGEQKKAIVDLLFKTNRKVTVKQLKEDYFKKIECFDSVEISGVEDRFNASLGTYHDLLKIIKDKDFLDNEENEDILEDIVLTLTLFEDREMIEERLKTYAHLFDDKVMKQLKRRRYTGWGRLSRKLINGIRDKQSGKTILDFLKSDGFANRNFMQLIHDDSLTFKEDIQKAQVSGQGDSLHEHIANLAGSPAIKKGILQTVKVVDELVKVMGRHKPENIVIEMARENQTTQKGQKNSRERMKRIEEGIKELGSQILKEHPVENTQLQNEKLYLYYLQNGRDMYVDQELDINRLSDYDVDHIVPQSFLKDDSIDNKVLTRSDKARGKSDNVPSEEVVKKMKNYWRQLLNAKLITQRKFDNLTKAERGGLSELDKAGFIKRQLVETRQITKHVAQILDSRMNTKYDENDKLIREVKVITLKSKLVSDFRKDFQFYKVREINNYHHAHDAYLNAVVGTALIKKYPKLESEFVYGDYKVYDVRKMIAKSEQEIGKATAKYFFYSNIMNFFKTEITLANGEIRKRPLIETNGETGEIVWDKGRDFATVRKVLSMPQVNIVKKTEVQTGGFSKESILPKRNSDKLIARKKDWDPKKYGGFDSPTVAYSVLVVAKVEKGKSKKLKSVKELLGITIMERSSFEKNPIDFLEAKGYKEVKKDLIIKLPKYSLFELENGRKRMLASAGELQKGNELALPSKYVNFLYLASHYEKLKGSPEDNEQKQLFVEQHKHYLDEIIEQISEFSKRVILADANLDKVLSAYNKHRDKPIREQAENIIHLFTLTNLGAPAAFKYFDTTIDRKRYTSTKEVLDATLIHQSITGLYETRIDLSQLGGDGGPAPGGGGSSGGTLGDQGSRGSDPLPEPRVTLTVEGIPTEFLVNTGAEHSVLTKPMGKMGSKRTVVAGATGSKVYPWTTKRLLKIGQKQVTHSFLVIPECPAPLLGRDLLTKLKAQIQFSTEGPQVTWEDRPAMCLVLNLEEEYRLHEKPVPPSIDPSWLQLFPMVWAEKAGMGLANQVPPVVVELKSDASPVAVRQYPMSKEAREGIRPHIQRFLDLGILVPCQSPWNTPLLPVKKPGTNDYRPVQDLREVNKRVQDIHPTVPNPYNLLSSLPPSHTWYSVLDLKDAFFCLKLHPNSQPLFAFEWRDPEKGNTGQLTWTRLPQGFKNSPTLFDEALHRDLASFRALNPQVVMLQYVDDLLVAAPTYRDCKEGTRRLLQELSKLGYRVSAKKAQLCREEVTYLGYLLKGGKRWLTPARKATVMKIPTPTTPRQVREFLGTAGFCRLWIPGFASLAAPLYPLTREKVPFTWTEAHQEAFGRIKEALLSAPALALPDLTKPFALYVDEKEGVARGVLTQTLGPWRRPVAYLSKKLDPVASGWPTCLKAIAAVALLLKDADKLTLGQNVLVIAPHNLESIVRQPPDRWMTNARMTHYQSLLLNERVSFAPPAILNPATLLPVESDDTPIHICSEILAEETGTRPDLRDQPLPGVPAWYTDGSSFIMDGRRQAGAAIVDNKRTVWASNLPEGTSAQKAELIALTQALRLAEGKSINIYTDSRYAFATAHVHGAIYKQRGLLTSAGKDIKNKEEILALLEAIHLPKRVAIIHCPGHQRGTDPVATGNRKADEAAKQAAQSTRILTETTKNAGKRTADGSEFEKRTADGSEFESPKKKAKVE

SEQ ID NO: 7417 - protein, 2125 aa, synthetic construct
MPAAKRVKLDGGDKKYSIGLDIGTNSVGWAVITDEYKVPSKKFKVLGNTDRHSIKKNLIGALLFDSGETAEATRLKRTARRRYTRRKNRICYLQEIFSNEMAKVDDSFFHRLEESFLVEEDKKHERHPIFGNIVDEVAYHEKYPTIYHLRKKLVDSTDKADLRLIYLALAHMIKFRGHFLIEGDLNPDNSDVDKLFIQLVQTYNQLFEENPINASGVDAKAILSARLSKSRRLENLIAQLPGEKKNGLFGNLIALSLGLTPNFKSNFDLAEDAKLQLSKDTYDDDLDNLLAQIGDQYADLFLAAKNLSDAILLSDILRVNTEITKAPLSASMIKRYDEHHQDLTLLKALVRQQLPEKYKEIFFDQSKNGYAGYIDGGASQEEFYKFIKPILEKMDGTEELLVKLNREDLLRKQRTFDNGSIPHQIHLGELHAILRRQEDFYPFLKDNREKIEKILTFRIPYYVGPLARGNSRFAWMTRKSEETITPWNFEEVVDKGASAQSFIERMTNFDKNLPNEKVLPKHSLLYEYFTVYNELTKVKYVTEGMRKPAFLSGEQKKAIVDLLFKTNRKVTVKQLKEDYFKKIECFDSVEISGVEDRFNASLGTYHDLLKIIKDKDFLDNEENEDILEDIVLTLTLFEDREMIEERLKTYAHLFDDKVMKQLKRRRYTGWGRLSRKLINGIRDKQSGKTILDFLKSDGFANRNFMQLIHDDSLTFKEDIQKAQVSGQGDSLHEHIANLAGSPAIKKGILQTVKVVDELVKVMGRHKPENIVIEMARENQTTQKGQKNSRERMKRIEEGIKELGSQILKEHPVENTQLQNEKLYLYYLQNGRDMYVDQELDINRLSDYDVDHIVPQSFLKDDSIDNKVLTRSDKARGKSDNVPSEEVVKKMKNYWRQLLNAKLITQRKFDNLTKAERGGLSELDKAGFIKRQLVETRQITKHVAQILDSRMNTKYDENDKLIREVKVITLKSKLVSDFRKDFQFYKVREINNYHHAHDAYLNAVVGTALIKKYPKLESEFVYGDYKVYDVRKMIAKSEQEIGKATAKYFFYSNIMNFFKTEITLANGEIRKRPLIETNGETGEIVWDKGRDFATVRKVLSMPQVNIVKKTEVQTGGFSKESILPKRNSDKLIARKKDWDPKKYGGFDSPTVAYSVLVVAKVEKGKSKKLKSVKELLGITIMERSSFEKNPIDFLEAKGYKEVKKDLIIKLPKYSLFELENGRKRMLASAGELQKGNELALPSKYVNFLYLASHYEKLKGSPEDNEQKQLFVEQHKHYLDEIIEQISEFSKRVILADANLDKVLSAYNKHRDKPIREQAENIIHLFTLTNLGAPAAFKYFDTTIDRKRYTSTKEVLDATLIHQSITGLYETRIDLSQLGGDGGPAPGGGGSSGGLLGRDLLTKLKAQIQFSTEGPQVTWEDRPAMCLVLNLEEEYRLHEKPVPPSIDPSWLQLFPMVWAEKAGMGLANQVPPVVVELKSDASPVAVRQYPMSKEAREGIRPHIQRFLDLGILVPCQSPWNTPLLPVKKPGTNDYRPVQDLREVNKRVQDIHPTVPNPYNLLSSLPPSHTWYSVLDLKDAFFCLKLHPNSQPLFAFEWRDPEKGNTGQLTWTRLPQGFKNSPTLFNEALHRDLASFRALNPQVVMLQYVDDLLVAAPTYRDCKEGTRRLLQELSKLGYRVSAKKAQLCREEVTYLGYLLKGGKRWLTPARKATVMKIPTPTTPRQVREFLGTAGFCRLWIPGFASLAAPLYPLTRPKVPFTWTEAHQEAFGRIKEALLSAPALALPDLTKPFALYVDEKEGVARGVLTQTLGPWRRPVAYLSKKLDPVASGWPTCLKAIAAVALLLKDADKLTLGQNVLVIAPHNLESIVRQPPDRWMTNARMTHYQSLLLNERVSFAPPAILNPATLLPVESDDTPIHICSEILAEETGTRPDLRDQPLPGVPAWYTDGSSFIMDGRRQAGAAIVDNKRTVWASNLPEGTSAQKAELIALTQALRLAEGKSINIYTDSRYAFATAHVHGAIYKQRGWLTSAGKDIKNKEEILALLEAIHLPKRVAIIHCPGHQRGTDPVATGNRKADEAAKQAAQSTRILTETTKNAGKRTADGSEFEKRTADGSEFESPKKKAKVE

SEQ ID NO: 7418 - protein, 2216 aa, synthetic construct
MPAAKRVKLDGGDKKYSIGLDIGTNSVGWAVITDEYKVPSKKFKVLGNTDRHSIKKNLIGALLFDSGETAEATRLKRTARRRYTRRKNRICYLQEIFSNEMAKVDDSFFHRLEESFLVEEDKKHERHPIFGNIVDEVAYHEKYPTIYHLRKKLVDSTDKADLRLIYLALAHMIKFRGHFLIEGDLNPDNSDVDKLFIQLVQTYNQLFEENPINASGVDAKAILSARLSKSRRLENLIAQLPGEKKNGLFGNLIALSLGLTPNFKSNFDLAEDAKLQLSKDTYDDDLDNLLAQIGDQYADLFLAAKNLSDAILLSDILRVNTEITKAPLSASMIKRYDEHHQDLTLLKALVRQQLPEKYKEIFFDQSKNGYAGYIDGGASQEEFYKFIKPILEKMDGTEELLVKLNREDLLRKQRTFDNGSIPHQIHLGELHAILRRQEDFYPFLKDNREKIEKILTFRIPYYVGPLARGNSRFAWMTRKSEETITPWNFEEVVDKGASAQSFIERMTNFDKNLPNEKVLPKHSLLYEYFTVYNELTKVKYVTEGMRKPAFLSGEQKKAIVDLLFKTNRKVTVKQLKEDYFKKIECFDSVEISGVEDRFNASLGTYHDLLKIIKDKDFLDNEENEDILEDIVLTLTLFEDREMIEERLKTYAHLFDDKVMKQLKRRRYTGWGRLSRKLINGIRDKQSGKTILDFLKSDGFANRNFMQLIHDDSLTFKEDIQKAQVSGQGDSLHEHIANLAGSPAIKKGILQTVKVVDELVKVMGRHKPENIVIEMARENQTTQKGQKNSRERMKRIEEGIKELGSQILKEHPVENTQLQNEKLYLYYLQNGRDMYVDQELDINRLSDYDVDHIVPQSFLKDDSIDNKVLTRSDKARGKSDNVPSEEVVKKMKNYWRQLLNAKLITQRKFDNLTKAERGGLSELDKAGFIKRQLVETRQITKHVAQILDSRMNTKYDENDKLIREVKVITLKSKLVSDFRKDFQFYKVREINNYHHAHDAYLNAVVGTALIKKYPKLESEFVYGDYKVYDVRKMIAKSEQEIGKATAKYFFYSNIMNFFKTEITLANGEIRKRPLIETNGETGEIVWDKGRDFATVRKVLSMPQVNIVKKTEVQTGGFSKESILPKRNSDKLIARKKDWDPKKYGGFDSPTVAYSVLVVAKVEKGKSKKLKSVKELLGITIMERSSFEKNPIDFLEAKGYKEVKKDLIIKLPKYSLFELENGRKRMLASAGELQKGNELALPSKYVNFLYLASHYEKLKGSPEDNEQKQLFVEQHKHYLDEIIEQISEFSKRVILADANLDKVLSAYNKHRDKPIREQAENIIHLFTLTNLGAPAAFKYFDTTIDRKRYTSTKEVLDATLIHQSITGLYETRIDLSQLGGDGGPAPGGGGSSGGTLGDQGSRGSDPLPEPRVTLTVEGIPTEFLVNTGAEHSVLTKPMGKMGSKRTVVAGATGSKVYPWTTKRLLKIGQKQVTHSFLVIPECPAPLLGRDLLTKLKAQIQFSTEGPQVTWEDRPAMCLVLNLEEEYRLHEKPVPPSIDPSWLQLFPMVWAEKAGMGLANQVPPVVVELKSDASPVAVRQYPMSKEAREGIRPHIQRFLDLGILVPCQSPWNTPLLPVKKPGTNDYRPVQDLREVNKRVQDIHPTVPNPYNLLSSLPPSHTWYSVLDLKDAFFCLKLHPNSQPLFAFEWRDPEKGNTGQLTWTRLPQGFKNSPTLFNEALHRDLASFRALNPQVVMLQYVDDLLVAAPTYRDCKEGTRRLLQELSKLGYRVSAKKAQLCREEVTYLGYLLKGGKRWLTPARKATVMKIPTPTTPRQVREFLGTAGFCRLWIPGFASLAAPLYPLTRPKVPFTWTEAHQEAFGRIKEALLSAPALALPDLTKPFALYVDEKEGVARGVLTQTLGPWRRPVAYLSKKLDPVASGWPTCLKAIAAVALLLKDADKLTLGQNVLVIAPHNLESIVRQPPDRWMTNARMTHYQSLLLNERVSFAPPAILNPATLLPVESDDTPIHICSEILAEETGTRPDLRDQPLPGVPAWYTDGSSFIMDGRRQAGAAIVDNKRTVWASNLPEGTSAQKAELIALTQALRLAEGKSINIYTDSRYAFATAHVHGAIYKQRGWLTSAGKDIKNKEEILALLEAIHLPKRVAIIHCPGHQRGTDPVATGNRKADEAAKQAAQSTRILTETTKNAGKRTADGSEFEKRTADGSEFESPKKKAKVE

SEQ ID NO: 7419 - protein, 2094 aa, synthetic construct
MPAAKRVKLDGGDKKYSIGLDIGTNSVGWAVITDEYKVPSKKFKVLGNTDRHSIKKNLIGALLFDSGETAEATRLKRTARRRYTRRKNRICYLQEIFSNEMAKVDDSFFHRLEESFLVEEDKKHERHPIFGNIVDEVAYHEKYPTIYHLRKKLVDSTDKADLRLIYLALAHMIKFRGHFLIEGDLNPDNSDVDKLFIQLVQTYNQLFEENPINASGVDAKAILSARLSKSRRLENLIAQLPGEKKNGLFGNLIALSLGLTPNFKSNFDLAEDAKLQLSKDTYDDDLDNLLAQIGDQYADLFLAAKNLSDAILLSDILRVNTEITKAPLSASMIKRYDEHHQDLTLLKALVRQQLPEKYKEIFFDQSKNGYAGYIDGGASQEEFYKFIKPILEKMDGTEELLVKLNREDLLRKQRTFDNGSIPHQIHLGELHAILRRQEDFYPFLKDNREKIEKILTFRIPYYVGPLARGNSRFAWMTRKSEETITPWNFEEVVDKGASAQSFIERMTNFDKNLPNEKVLPKHSLLYEYFTVYNELTKVKYVTEGMRKPAFLSGEQKKAIVDLLFKTNRKVTVKQLKEDYFKKIECFDSVEISGVEDRFNASLGTYHDLLKIIKDKDFLDNEENEDILEDIVLTLTLFEDREMIEERLKTYAHLFDDKVMKQLKRRRYTGWGRLSRKLINGIRDKQSGKTILDFLKSDGFANRNFMQLIHDDSLTFKEDIQKAQVSGQGDSLHEHIANLAGSPAIKKGILQTVKVVDELVKVMGRHKPENIVIEMARENQTTQKGQKNSRERMKRIEEGIKELGSQILKEHPVENTQLQNEKLYLYYLQNGRDMYVDQELDINRLSDYDVDHIVPQSFLKDDSIDNKVLTRSDKARGKSDNVPSEEVVKKMKNYWRQLLNAKLITQRKFDNLTKAERGGLSELDKAGFIKRQLVETRQITKHVAQILDSRMNTKYDENDKLIREVKVITLKSKLVSDFRKDFQFYKVREINNYHHAHDAYLNAVVGTALIKKYPKLESEFVYGDYKVYDVRKMIAKSEQEIGKATAKYFFYSNIMNFFKTEITLANGEIRKRPLIETNGETGEIVWDKGRDFATVRKVLSMPQVNIVKKTEVQTGGFSKESILPKRNSDKLIARKKDWDPKKYGGFDSPTVAYSVLVVAKVEKGKSKKLKSVKELLGITIMERSSFEKNPIDFLEAKGYKEVKKDLIIKLPKYSLFELENGRKRMLASAGELQKGNELALPSKYVNFLYLASHYEKLKGSPEDNEQKQLFVEQHKHYLDEIIEQISEFSKRVILADANLDKVLSAYNKHRDKPIREQAENIIHLFTLTNLGAPAAFKYFDTTIDRKRYTSTKEVLDATLIHQSITGLYETRIDLSQLGGDGGPAPGGGGSSGGTLNLEDEYRLYETSAEPEVSPGSTWLSDFPQAWAETGGMGLAVRQAPLIIPLKATSTPVSIKQYPMSQEAKLGIKPHIQRLLDQGILVPCQSPWNTPLLPVKKPGTNDYRPVQDLREVNKRVEDIHPTVPNPYNLLSGLPPSHRWYTVLDLKDAFFCLRLHPTSQPLFAFEWRDPGMGISGQLTWTRLPQGFKNSPTLFNEALHRDLADFRIQHPDLILLQYVDDILLAATSELDCQQGTRALLLTLGNLGYRASAKKAQLCQKQVKYLGYLLKEGQRWLTEARKETVMGQPTPKTPRQLREFLGTAGFCRLWIPGFAEMAAPLYPLTKPGTLFNWGPDQQKAYQEIKQALLTAPALGLPDLTKPFELFVDEKQGYAKGVLTQKLGPWRRPVAYLSKKLDPVAAGWPPCLRMVAAIAVLRKDAGKLTMGQPLVILAPHAVEALVKQPPDRWLSNARMTHYQAMLLDTDRVQFGPVVALNPATLLPLPEEGAPHDCLEILAETHGTRPDLTDQPIPDADHTWYTDGSSFLQEGQRKAGAAVTTETEVIWARALPAGTSAQRAELIALTQALKMAEGKRLNVYTDSRYAFATAHIHGEIYRRRGWLTSEGREIKNKSEILALLKALFLPKRLSIIHCLGHQKGDSAEARGNRLADQAAREAAIKTPPDTSTLLAGKRTADGSEFEKRTADGSEFESPKKKAKVE

SEQ ID NO: 7420 - protein, 2094 aa, synthetic construct
MPAAKRVKLDGGDKKYSIGLDIGTNSVGWAVITDEYKVPSKKFKVLGNTDRHSIKKNLIGALLFDSGETAEATRLKRTARRRYTRRKNRICYLQEIFSNEMAKVDDSFFHRLEESFLVEEDKKHERHPIFGNIVDEVAYHEKYPTIYHLRKKLVDSTDKADLRLIYLALAHMIKFRGHFLIEGDLNPDNSDVDKLFIQLVQTYNQLFEENPINASGVDAKAILSARLSKSRRLENLIAQLPGEKKNGLFGNLIALSLGLTPNFKSNFDLAEDAKLQLSKDTYDDDLDNLLAQIGDQYADLFLAAKNLSDAILLSDILRVNTEITKAPLSASMIKRYDEHHQDLTLLKALVRQQLPEKYKEIFFDQSKNGYAGYIDGGASQEEFYKFIKPILEKMDGTEELLVKLNREDLLRKQRTFDNGSIPHQIHLGELHAILRRQEDFYPFLKDNREKIEKILTFRIPYYVGPLARGNSRFAWMTRKSEETITPWNFEEVVDKGASAQSFIERMTNFDKNLPNEKVLPKHSLLYEYFTVYNELTKVKYVTEGMRKPAFLSGEQKKAIVDLLFKTNRKVTVKQLKEDYFKKIECFDSVEISGVEDRFNASLGTYHDLLKIIKDKDFLDNEENEDILEDIVLTLTLFEDREMIEERLKTYAHLFDDKVMKQLKRRRYTGWGRLSRKLINGIRDKQSGKTILDFLKSDGFANRNFMQLIHDDSLTFKEDIQKAQVSGQGDSLHEHIANLAGSPAIKKGILQTVKVVDELVKVMGRHKPENIVIEMARENQTTQKGQKNSRERMKRIEEGIKELGSQILKEHPVENTQLQNEKLYLYYLQNGRDMYVDQELDINRLSDYDVDHIVPQSFLKDDSIDNKVLTRSDKARGKSDNVPSEEVVKKMKNYWRQLLNAKLITQRKFDNLTKAERGGLSELDKAGFIKRQLVETRQITKHVAQILDSRMNTKYDENDKLIREVKVITLKSKLVSDFRKDFQFYKVREINNYHHAHDAYLNAVVGTALIKKYPKLESEFVYGDYKVYDVRKMIAKSEQEIGKATAKYFFYSNIMNFFKTEITLANGEIRKRPLIETNGETGEIVWDKGRDFATVRKVLSMPQVNIVKKTEVQTGGFSKESILPKRNSDKLIARKKDWDPKKYGGFDSPTVAYSVLVVAKVEKGKSKKLKSVKELLGITIMERSSFEKNPIDFLEAKGYKEVKKDLIIKLPKYSLFELENGRKRMLASAGELQKGNELALPSKYVNFLYLASHYEKLKGSPEDNEQKQLFVEQHKHYLDEIIEQISEFSKRVILADANLDKVLSAYNKHRDKPIREQAENIIHLFTLTNLGAPAAFKYFDTTIDRKRYTSTKEVLDATLIHQSITGLYETRIDLSQLGGDGGPAPGGGGSSGGTLGIEDEYRLHETSTEPDVSLGSTWLSDFPQAWAETGGMGLAVRQAPLIIPLKATSTPVSIQQYPMSHEARLGIKPHIQRLLDQGILVPCQSPWNTPLLPVKKPGTNDYRPVQDLREVNKRVEDIHPTVPNPYNLLSGLPPSHQWYTVLDLKDAFFCLRLHPTSQPLFAFEWRDPGMGISGQLTWTRLPQGFKNSPTLFDEALHRDLADFRIQHPDLILLQYVDDILLAATSELDCQQGTRALLQTLGDLGYRASAKKAQICQKQVKYLGYLLREGQRWLTEARKETVMGQPVPKTPRQLREFLGTAGFCRLWIPGFAEMAAPLYPLTKTGTLFSWGPDQQKAYQEIKQALLTAPALGLPDLTKPFELFVDEKQGYAKGVLTQKLGPWRRPVAYLSKKLDPVAAGWPPCLRMVAAIAVLTKDAGKLTMGQPLVILAPHAVEALVKQPPDRWLSNARMTHYQAMLLDTDRVQFGPVVALNPATLLPLPEEGAPHDCLEILAETHGTRPDLTDQPIPDADHTWYTDGSSFLQEGQRKAGAAVTTETEVIWAGALPAGTSAQRAELIALTQALKMAEGKRLNVYTDSRYAFATAHIHGEIYRRRGLLTSEGREIKNKSEILALLKALFLPKRLSIIHCLGHQKGDSAEARGNRLADQAAREAAIKTPPDTSTLLAGKRTADGSEFEKRTADGSEFESPKKKAKVE

SEQ ID NO: 7421 - protein, 2094 aa, synthetic construct
MPAAKRVKLDGGDKKYSIGLDIGTNSVGWAVITDEYKVPSKKFKVLGNTDRHSIKKNLIGALLFDSGETAEATRLKRTARRRYTRRKNRICYLQEIFSNEMAKVDDSFFHRLEESFLVEEDKKHERHPIFGNIVDEVAYHEKYPTIYHLRKKLVDSTDKADLRLIYLALAHMIKFRGHFLIEGDLNPDNSDVDKLFIQLVQTYNQLFEENPINASGVDAKAILSARLSKSRRLENLIAQLPGEKKNGLFGNLIALSLGLTPNFKSNFDLAEDAKLQLSKDTYDDDLDNLLAQIGDQYADLFLAAKNLSDAILLSDILRVNTEITKAPLSASMIKRYDEHHQDLTLLKALVRQQLPEKYKEIFFDQSKNGYAGYIDGGASQEEFYKFIKPILEKMDGTEELLVKLNREDLLRKQRTFDNGSIPHQIHLGELHAILRRQEDFYPFLKDNREKIEKILTFRIPYYVGPLARGNSRFAWMTRKSEETITPWNFEEVVDKGASAQSFIERMTNFDKNLPNEKVLPKHSLLYEYFTVYNELTKVKYVTEGMRKPAFLSGEQKKAIVDLLFKTNRKVTVKQLKEDYFKKIECFDSVEISGVEDRFNASLGTYHDLLKIIKDKDFLDNEENEDILEDIVLTLTLFEDREMIEERLKTYAHLFDDKVMKQLKRRRYTGWGRLSRKLINGIRDKQSGKTILDFLKSDGFANRNFMQLIHDDSLTFKEDIQKAQVSGQGDSLHEHIANLAGSPAIKKGILQTVKVVDELVKVMGRHKPENIVIEMARENQTTQKGQKNSRERMKRIEEGIKELGSQILKEHPVENTQLQNEKLYLYYLQNGRDMYVDQELDINRLSDYDVDHIVPQSFLKDDSIDNKVLTRSDKARGKSDNVPSEEVVKKMKNYWRQLLNAKLITQRKFDNLTKAERGGLSELDKAGFIKRQLVETRQITKHVAQILDSRMNTKYDENDKLIREVKVITLKSKLVSDFRKDFQFYKVREINNYHHAHDAYLNAVVGTALIKKYPKLESEFVYGDYKVYDVRKMIAKSEQEIGKATAKYFFYSNIMNFFKTEITLANGEIRKRPLIETNGETGEIVWDKGRDFATVRKVLSMPQVNIVKKTEVQTGGFSKESILPKRNSDKLIARKKDWDPKKYGGFDSPTVAYSVLVVAKVEKGKSKKLKSVKELLGITIMERSSFEKNPIDFLEAKGYKEVKKDLIIKLPKYSLFELENGRKRMLASAGELQKGNELALPSKYVNFLYLASHYEKLKGSPEDNEQKQLFVEQHKHYLDEIIEQISEFSKRVILADANLDKVLSAYNKHRDKPIREQAENIIHLFTLTNLGAPAAFKYFDTTIDRKRYTSTKEVLDATLIHQSITGLYETRIDLSQLGGDGGPAPGGGGSSGGTLGIEDEYRLHETSTEPDVSLGSTWLSDFPQAWAETGGMGLAVRQAPLIIPLKATSTPVSIQQYPMSHEARLGIKPHIQRLLDQGILVPCQSPWNTPLLPVKKPGTNDYRPVQDLREVNKRVEDIHPTVPNPYNLLSGLPPSHQWYTVLDLKDAFFCLRLHPTSQPLFAFEWRDPGMGISGQLTWTRLPQGFKNSPTLFNEALHRDLADFRIQHPDLILLQYVDDILLAATSELDCQQGTRALLQTLGDLGYRASAKKAQICQKQVKYLGYLLREGQRWLTEARKETVMGQPVPKTPRQLREFLGTAGFCRLWIPGFAEMAAPLYPLTKPGTLFSWGPDQQKAYQEIKQALLTAPALGLPDLTKPFELFVDEKQGYAKGVLTQKLGPWRRPVAYLSKKLDPVAAGWPPCLRMVAAIAVLTKDAGKLTMGQPLVILAPHAVEALVKQPPDRWLSNARMTHYQAMLLDTDRVQFGPVVALNPATLLPLPEEGAPHDCLEILAETHGTRPDLTDQPIPDADHTWYTDGSSFLQEGQRKAGAAVTTETEVIWAGALPAGTSAQRAELIALTQALKMAEGKRLNVYTDSRYAFATAHIHGEIYRRRGWLTSEGREIKNKSEILALLKALFLPKRLSIIHCLGHQKGDSAEARGNRLADQAAREAAIKTPPDTSTLLAGKRTADGSEFEKRTADGSEFESPKKKAKVE

SEQ ID NO: 7422 - protein, 2094 aa, synthetic construct; identical to SEQ ID NO: 7421

SEQ ID NO: 7423 - protein, 2094 aa, synthetic construct
MPAAKRVKLDGGDKKYSIGLDIGTNSVGWAVITDEYKVPSKKFKVLGNTDRHSIKKNLIGALLFDSGETAEATRLKRTARRRYTRRKNRICYLQEIFSNEMAKVDDSFFHRLEESFLVEEDKKHERHPIFGNIVDEVAYHEKYPTIYHLRKKLVDSTDKADLRLIYLALAHMIKFRGHFLIEGDLNPDNSDVDKLFIQLVQTYNQLFEENPINASGVDAKAILSARLSKSRRLENLIAQLPGEKKNGLFGNLIALSLGLTPNFKSNFDLAEDAKLQLSKDTYDDDLDNLLAQIGDQYADLFLAAKNLSDAILLSDILRVNTEITKAPLSASMIKRYDEHHQDLTLLKALVRQQLPEKYKEIFFDQSKNGYAGYIDGGASQEEFYKFIKPILEKMDGTEELLVKLNREDLLRKQRTFDNGSIPHQIHLGELHAILRRQEDFYPFLKDNREKIEKILTFRIPYYVGPLARGNSRFAWMTRKSEETITPWNFEEVVDKGASAQSFIERMTNFDKNLPNEKVLPKHSLLYEYFTVYNELTKVKYVTEGMRKPAFLSGEQKKAIVDLLFKTNRKVTVKQLKEDYFKKIECFDSVEISGVEDRFNASLGTYHDLLKIIKDKDFLDNEENEDILEDIVLTLTLFEDREMIEERLKTYAHLFDDKVMKQLKRRRYTGWGRLSRKLINGIRDKQSGKTILDFLKSDGFANRNFMQLIHDDSLTFKEDIQKAQVSGQGDSLHEHIANLAGSPAIKKGILQTVKVVDELVKVMGRHKPENIVIEMARENQTTQKGQKNSRERMKRIEEGIKELGSQILKEHPVENTQLQNEKLYLYYLQNGRDMYVDQELDINRLSDYDVDHIVPQSFLKDDSIDNKVLTRSDKARGKSDNVPSEEVVKKMKNYWRQLLNAKLITQRKFDNLTKAERGGLSELDKAGFIKRQLVETRQITKHVAQILDSRMNTKYDENDKLIREVKVITLKSKLVSDFRKDFQFYKVREINNYHHAHDAYLNAVVGTALIKKYPKLESEFVYGDYKVYDVRKMIAKSEQEIGKATAKYFFYSNIMNFFKTEITLANGEIRKRPLIETNGETGEIVWDKGRDFATVRKVLSMPQVNIVKKTEVQTGGFSKESILPKRNSDKLIARKKDWDPKKYGGFDSPTVAYSVLVVAKVEKGKSKKLKSVKELLGITIMERSSFEKNPIDFLEAKGYKEVKKDLIIKLPKYSLFELENGRKRMLASAGELQKGNELALPSKYVNFLYLASHYEKLKGSPEDNEQKQLFVEQHKHYLDEIIEQISEFSKRVILADANLDKVLSAYNKHRDKPIREQAENIIHLFTLTNLGAPAAFKYFDTTIDRKRYTSTKEVLDATLIHQSITGLYETRIDLSQLGGDGGPAPGGGGSSGGTLNIEDEYRLHETSKEPDVSLGSTWLSDFPQAWAETGGMGLAVRQAPLIIPLKATSTPVSIKQYPMSQEARLGIKPHIQRLLDQGILVPCQSPWNTPLLPVKKPGTNDYRPVQDLREVNKRVEDIHPTVPNPYNLLSGLPPSHQWYTVLDLKDAFFCLRLHPTSQPLFAFEWRDPEMGISGQLTWTRLPQGFKNSPTLFDEALHRDLAGFRIQHPDLILLQYVDDLLLAATSELDCQQGTRALLQTLGDLGYRASAKKAQICQKQVKYLGYLLKEGQRWLTEARKETVMGQPIPKTPRQLREFLGTAGFCRLWIPGFAEMAAPLYPLTKTGTLFNWGPDQQKAFQEIKQALLTAPALGLPDLTKPFELFVDEKQGYAKGVLTQKLGPWRRPVAYLSKKLDPVAAGWPPCLRMVAAIAVLTKDAGKLTMGQPLVILAPHAVEALVKQPPDRWLSNARMTHYQALLLDTDRVQFGPVVALNPATLLPLPEEGLQHDCLDILAEAHGTRSDLMDQPLPDADHTWYTDGSSFLQEGQRKAGAAVTTETEVIWARALPAGTSAQRAELIALTQALKMAEGKKLNVYTDSRYAFATAHIHGEIYRRRGLLTSEGKEIKNKDEILALLKALFLPKRLSIIHCPGHQKGNSAEARGNRMADQAAREVATRETPETSTLLAGKRTADGSEFEKRTADGSEFESPKKKAKVE

SEQ ID NO: 7424 - protein, 2094 aa, synthetic construct
MPAAKRVKLDGGDKKYSIGLDIGTNSVGWAVITDEYKVPSKKFKVLGNTDRHSIKKNLIGALLFDSGETAEATRLKRTARRRYTRRKNRICYLQEIFSNEMAKVDDSFFHRLEESFLVEEDKKHERHPIFGNIVDEVAYHEKYPTIYHLRKKLVDSTDKADLRLIYLALAHMIKFRGHFLIEGDLNPDNSDVDKLFIQLVQTYNQLFEENPINASGVDAKAILSARLSKSRRLENLIAQLPGEKKNGLFGNLIALSLGLTPNFKSNFDLAEDAKLQLSKDTYDDDLDNLLAQIGDQYADLFLAAKNLSDAILLSDILRVNTEITKAPLSASMIKRYDEHHQDLTLLKALVRQQLPEKYKEIFFDQSKNGYAGYIDGGASQEEFYKFIKPILEKMDGTEELLVKLNREDLLRKQRTFDNGSIPHQIHLGELHAILRRQEDFYPFLKDNREKIEKILTFRIPYYVGPLARGNSRFAWMTRKSEETITPWNFEEVVDKGASAQSFIERMTNFDKNLPNEKVLPKHSLLYEYFTVYNELTKVKYVTEGMRKPAFLSGEQKKAIVDLLFKTNRKVTVKQLKEDYFKKIECFDSVEISGVEDRFNASLGTYHDLLKIIKDKDFLDNEENEDILEDIVLTLTLFEDREMIEERLKTYAHLFDDKVMKQLKRRRYTGWGRLSRKLINGIRDKQSGKTILDFLKSDGFANRNFMQLIHDDSLTFKEDIQKAQVSGQGDSLHEHIANLAGSPAIKKGILQTVKVVDELVKVMGRHKPENIVIEMARENQTTQKGQKNSRERMKRIEEGIKELGSQILKEHPVENTQLQNEKLYLYYLQNGRDMYVDQELDINRLSDYDVDHIVPQSFLKDDSIDNKVLTRSDKARGKSDNVPSEEVVKKMKNYWRQLLNAKLITQRKFDNLTKAERGGLSELDKAGFIKRQLVETRQITKHVAQILDSRMNTKYDENDKLIREVKVITLKSKLVSDFRKDFQFYKVREINNYHHAHDAYLNAVVGTALIKKYPKLESEFVYGDYKVYDVRKMIAKSEQEIGKATAKYFFYSNIMNFFKTEITLANGEIRKRPLIETNGETGEIVWDKGRDFATVRKVLSMPQVNIVKKTEVQTGGFSKESILPKRNSDKLIARKKDWDPKKYGGFDSPTVAYSVLVVAKVEKGKSKKLKSVKELLGITIMERSSFEKNPIDFLEAKGYKEVKKDLIIKLPKYSLFELENGRKRMLASAGELQKGNELALPSKYVNFLYLASHYEKLKGSPEDNEQKQLFVEQHKHYLDEIIEQISEFSKRVILADANLDKVLSAYNKHRDKPIREQAENIIHLFTLTNLGAPAAFKYFDTTIDRKRYTSTKEVLDATLIHQSITGLYETRIDLSQLGGDGGPAPGGGGSSGGTLNIEDEYRLHETSKGPDVPLGSTWLSDFPQAWAETGGMGLAVRQAPLIIPLKATSTPVSIKQYPMSQEARLGIKPHIQRLLDQGILVPCQSPWNTPLLPVKKPGTNDYRPVQDLREVNKRVEDIHPTVPNPYNLLSGLPPSHQWYTVLDLKDAFFCLRLHPTSQSLFAFEWRDPEMGISGQLTWTRLPQGFKNSPTLFNEALHRDLADFRIQHPDLILLQYVDDLLLAATSELDCQQGTRALLQTLGDLGYRASAKKAQICQKQVKYLGYLLKEGQRWLTEARKETVMGQPTPKTPRQLREFLGKAGFCRLFIPGFAEMAAPLYPLTKPGTLFEWGPDQQKAYQEIKQALLTAPALGLPDLTKPFELFVDEKQGYAKGVLTQKLGPWRRPVAYLSKKLDPVAAGWPPCLRMVAAIAVLTKDAGKLTMGQPLVILAPHAVEALVKQPPDRWLSNARMTHYQALLLDTDRVQFGPIVALNPATLLPLPEEGLQHDCLDILAEAHGTRPDLTDQPLPDADHTWYTDGSSFLQEGQRKAGAAVTTETEVVWAKALPAGTSAQRAELIALTQALKMAEGKKLNVYTDSRYAFATAHIHGEIYRRRGWLTSEGKEIKNKDEILALLKALFLPKRLSIIHCPGHQKGNRAEARGNRMADQAAREVATRETPETSTLLAGKRTADGSEFEKRTADGSEFESPKKKAKVE

SEQ ID NO: 7425 - protein, 2094 aa, synthetic construct
MPAAKRVKLDGGDKKYSIGLDIGTNSVGWAVITDEYKVPSKKFKVLGNTDRHSIKKNLIGALLFDSGETAEATRLKRTARRRYTRRKNRICYLQEIFSNEMAKVDDSFFHRLEESFLVEEDKKHERHPIFGNIVDEVAYHEKYPTIYHLRKKLVDSTDKADLRLIYLALAHMIKFRGHFLIEGDLNPDNSDVDKLFIQLVQTYNQLFEENPINASGVDAKAILSARLSKSRRLENLIAQLPGEKKNGLFGNLIALSLGLTPNFKSNFDLAEDAKLQLSKDTYDDDLDNLLAQIGDQYADLFLAAKNLSDAILLSDILRVNTEITKAPLSASMIKRYDEHHQDLTLLKALVRQQLPEKYKEIFFDQSKNGYAGYIDGGASQEEFYKFIKPILEKMDGTEELLVKLNREDLLRKQRTFDNGSIPHQIHLGELHAILRRQEDFYPFLKDNREKIEKILTFRIPYYVGPLARGNSRFAWMTRKSEETITPWNFEEVVDKGASAQSFIERMTNFDKNLPNEKVLPKHSLLYEYFTVYNELTKVKYVTEGMRKPAFLSGEQKKAIVDLLFKTNRKVTVKQLKEDYFKKIECFDSVEISGVEDRFNASLGTYHDLLKIIKDKDFLDNEENEDILEDIVLTLTLFEDREMIEERLKTYAHLFDDKVMKQLKRRRYTGWGRLSRKLINGIRDKQSGKTILDFLKSDGFANRNFMQLIHDDSLTFKEDIQKAQVSGQGDSLHEHIANLAGSPAIKKGILQTVKVVDELVKVMGRHKPENIVIEMARENQTTQKGQKNSRERMKRIEEGIKELGSQILKEHPVENTQLQNEKLYLYYLQNGRDMYVDQELDINRLSDYDVDHIVPQSFLKDDSIDNKVLTRSDKARGKSDNVPSEEVVKKMKNYWRQLLNAKLITQRKFDNLTKAERGGLSELDKAGFIKRQLVETRQITKHVAQILDSRMNTKYDENDKLIREVKVITLKSKLVSDFRKDFQFYKVREINNYHHAHDAYLNAVVGTALIKKYPKLESEFVYGDYKVYDVRKMIAKSEQEIGKATAKYFFYSNIMNFFKTEITLANGEIRKRPLIETNGETGEIVWDKGRDFATVRKVLSMPQVNIVKKTEVQTGGFSKESILPKRNSDKLIARKKDWDPKKYGGFDSPTVAYSVLVVAKVEKGKSKKLKSVKELLGITIMERSSFEKNPIDFLEAKGYKEVKKDLIIKLPKYSLFELENGRKRMLASAGELQKGNELALPSKYVNFLYLASHYEKLKGSPEDNEQKQLFVEQHKHYLDEIIEQISEFSKRVILADANLDKVLSAYNKHRDKPIREQAENIIHLFTLTNLGAPAAFKYFDTTIDRKRYTSTKEVLDATLIHQSITGLYETRIDLSQLGGDGGPAPGGGGSSGGTLNIEDEHRLHETSKEPDVSLGSTWLSDFPQAWAETGGMGLAVRQAPLIIPLKATSTPVSIKQYPMSQEARLGIKPHIQRLLDQGILVPCQSPWNTPLLPVKKPGTNDYRPVQDLREVNKRVEDIHPTVPNPYNLLSGLPPSHQWYTVLDLKDAFFCLRLHPTSQPLFAFEWRDPEMGISGQLTWTRLPQGFKNSPTLFNEALHRDLADFRIQHPDLILLQYVDDLLLAATSELDCQQGTRALLQTLGNLGYRASAKKAQICQKQVKYLGYLLKEGQRWLTEARKETVMGQPTPKTPRQLREFLGTAGFCRLWIPGFAEMAAPLYPLTKPGTLFNWGPDQQKAYQEIKQALLTAPALGLPDLTKPFELFVDEKQGYAKGVLTQKLGPWRRPVAYLSKKLDPVAAGWPPCLRMVAAIAVLTKDAGKLTMGQPLVILAPHAVEALVKQPPDRWLSNARMTHYQALLLDTDRVQFGPVVALNPATLLPLPEEGLQHNCLDILAEAHGTRPDLTDQPLPDADHTWYTDGSSLLQEGQRKAGAAVTTETEVIWAKALPAGTSAQRAELIALTQALKMAEGKKLNVYTDSRYAFATAHIHGEIYRRRGWLTSEGKEIKNKDEILALLKALFLPKRLSIIHCPGHQKGHSAEARGNRMADQAARKAAITETPDTSTLLAGKRTADGSEFEKRTADGSEFESPKKKAKVE

SEQ ID NO: 7426 - protein, 2094 aa, synthetic construct; identical to SEQ ID NO: 7425

SEQ ID NO: 7427 - protein, 2114 aa, synthetic construct
MPAAKRVKLDGGDKKYSIGLDIGTNSVGWAVITDEYKVPSKKFKVLGNTDRHSIKKNLIGALLFDSGETAEATRLKRTARRRYTRRKNRICYLQEIFSNEMAKVDDSFFHRLEESFLVEEDKKHERHPIFGNIVDEVAYHEKYPTIYHLRKKLVDSTDKADLRLIYLALAHMIKFRGHFLIEGDLNPDNSDVDKLFIQLVQTYNQLFEENPINASGVDAKAILSARLSKSRRLENLIAQLPGEKKNGLFGNLIALSLGLTPNFKSNFDLAEDAKLQLSKDTYDDDLDNLLAQIGDQYADLFLAAKNLSDAILLSDILRVNTEITKAPLSASMIKRYDEHHQDLTLLKALVRQQLPEKYKEIFFDQSKNGYAGYIDGGASQEEFYKFIKPILEKMDGTEELLVKLNREDLLRKQRTFDNGSIPHQIHLGELHAILRRQEDFYPFLKDNREKIEKILTFRIPYYVGPLARGNSRFAWMTRKSEETITPWNFEEVVDKGASAQSFIERMTNFDKNLPNEKVLPKHSLLYEYFTVYNELTKVKYVTEGMRKPAFLSGEQKKAIVDLLFKTNRKVTVKQLKEDYFKKIECFDSVEISGVEDRFNASLGTYHDLLKIIKDKDFLDNEENEDILEDIVLTLTLFEDREMIEERLKTYAHLFDDKVMKQLKRRRYTGWGRLSRKLINGIRDKQSGKTILDFLKSDGFANRNFMQLIHDDSLTFKEDIQKAQVSGQGDSLHEHIANLAGSPAIKKGILQTVKVVDELVKVMGRHKPENIVIEMARENQTTQKGQKNSRERMKRIEEGIKELGSQILKEHPVENTQLQNEKLYLYYLQNGRDMYVDQELDINRLSDYDVDHIVPQSFLKDDSIDNKVLTRSDKARGKSDNVPSEEVVKKMKNYWRQLLNAKLITQRKFDNLTKAERGGLSELDKAGFIKRQLVETRQITKHVAQILDSRMNTKYDENDKLIREVKVITLKSKLVSDFRKDFQFYKVREINNYHHAHDAYLNAVVGTALIKKYPKLESEFVYGDYKVYDVRKMIAKSEQEIGKATAKYFFYSNIMNFFKTEITLANGEIRKRPLIETNGETGEIVWDKGRDFATVRKVLSMPQVNIVKKTEVQTGGFSKESILPKRNSDKLIARKKDWDPKKYGGFDSPTVAYSVLVVAKVEKGKSKKLKSVKELLGITIMERSSFEKNPIDFLEAKGYKEVKKDLIIKLPKYSLFELENGRKRMLASAGELQKGNELALPSKYVNFLYLASHYEKLKGSPEDNEQKQLFVEQHKHYLDEIIEQISEFSKRVILADANLDKVLSAYNKHRDKPIREQAENIIHLFTLTNLGAPAAFKYFDTTIDRKRYTSTKEVLDATLIHQSITGLYETRIDLSQLGGDGGPAPGGGGSSGGVQEISDSRPMLHIYLNGRRFLGLLDTGADKTCIAGRDWPANWPIHQTESSLQGLGMACGVARSSQPLRWQHEDKSGIIHPFVIPTLPFTLWGRDIMKDIKVRLMTDSPDDSQDLMIGAIESNLFADQISWKSDQPVWLNQWPLKQEKLQALQQLVTEQLQLGHLEESNSPWNTPVFVIKKKSGKWRLLQDLRAVNATMHDMGALQPGLPSPVAVPKGWEIIIIDLQDCFFNIKLHPEDCKRFAFSVPSPNFKRPYQRFQWKVLPQGMKNSPTLCQKFVDKAILTVRDKYQDSYIVHYMDDILLAHPSRSIVDEILTSMIQALNKHGLVVSTEKIQKYDNLKYLGTHIQGDSVSYQKLQIRTDKLRTLNDFQKLLGNINWIRPFLKLTTGELKPLFEILNPDSNPISTRKLTPEACKALQLMNERLSTARVKRLDLSQPWSLCILKTEYTPTACLWQDGVVEWIHLPHISPKVITPYDIFCTQLIIKGRHRSKELFSKDPDYIVVPYTKVQFDLLLQEKEDWPISLLGFLGEVHFHLPKDPLLTFTLQTAIIFPHMTSTTPLEKGIVIFTDGSANGRSVTYIQGREPIIKENTQNTAQQAEIVAVITAFEEVSQPFNLYTDSKYVTGLFPEIETATLSPRTKIYTELKHLQRLIHKRQEKFYIGHIRGHTGLPGPLAQGNAYADSLTRILTAAGKRTADGSEFEKRTADGSEFESPKKKAKVE

SEQ ID NO: 7428 - protein, 2114 aa, synthetic construct
MPAAKRVKLDGGDKKYSIGLDIGTNSVGWAVITDEYKVPSKKFKVLGNTDRHSIKKNLIGALLFDSGETAEATRLKRTARRRYTRRKNRICYLQEIFSNEMAKVDDSFFHRLEESFLVEEDKKHERHPIFGNIVDEVAYHEKYPTIYHLRKKLVDSTDKADLRLIYLALAHMIKFRGHFLIEGDLNPDNSDVDKLFIQLVQTYNQLFEENPINASGVDAKAILSARLSKSRRLENLIAQLPGEKKNGLFGNLIALSLGLTPNFKSNFDLAEDAKLQLSKDTYDDDLDNLLAQIGDQYADLFLAAKNLSDAILLSDILRVNTEITKAPLSASMIKRYDEHHQDLTLLKALVRQQLPEKYKEIFFDQSKNGYAGYIDGGASQEEFYKFIKPILEKMDGTEELLVKLNREDLLRKQRTFDNGSIPHQIHLGELHAILRRQEDFYPFLKDNREKIEKILTFRIPYYVGPLARGNSRFAWMTRKSEETITPWNFEEVVDKGASAQSFIERMTNFDKNLPNEKVLPKHSLLYEYFTVYNELTKVKYVTEGMRKPAFLSGEQKKAIVDLLFKTNRKVTVKQLKEDYFKKIECFDSVEISGVEDRFNASLGTYHDLLKIIKDKDFLDNEENEDILEDIVLTLTLFEDREMIEERLKTYAHLFDDKVMKQLKRRRYTGWGRLSRKLINGIRDKQSGKTILDFLKSDGFANRNFMQLIHDDSLTFKEDIQKAQVSGQGDSLHEHIANLAGSPAIKKGILQTVKVVDELVKVMGRHKPENIVIEMARENQTTQKGQKNSRERMKRIEEGIKELGSQILKEHPVENTQLQNEKLYLYYLQNGRDMYVDQELDINRLSDYDVDHIVPQSFLKDDSIDNKVLTRSDKARGKSDNVPSEEVVKKMKNYWRQLLNAKLITQRKFDNLTKAERGGLSELDKAGFIKRQLVETRQITKHVAQILDSRMNTKYDENDKLIREVKVITLKSKLVSDFRKDFQFYKVREINNYHHAHDAYLNAVVGTALIKKYPKLESEFVYGDYKVYDVRKMIAKSEQEIGKATAKYFFYSNIMNFFKTEITLANGEIRKRPLIETNGETGEIVWDKGRDFATVRKVLSMPQVNIVKKTEVQTGGFSKESILPKRNSDKLIARKKDWDPKKYGGFDSPTVAYSVLVVAKVEKGKSKKLKSVKELLGITIMERSSFEKNPIDFLEAKGYKEVKKDLIIKLPKYSLFELENGRKRMLASAGELQKGNELALPSKYVNFLYLASHYEKLKGSPEDNEQKQLFVEQHKHYLDEIIEQISEFSKRVILADANLDKVLSAYNKHRDKPIREQAENIIHLFTLTNLGAPAAFKYFDTTIDRKRYTSTKEVLDATLIHQSITGLYETRIDLSQLGGDGGPAPGGGGSSGGVQEISDSRPMLHIYLNGRRFLGLLDTGADKTCIAGRDWPANWPIHQTESSLQGLGMACGVARSSQPLRWQHEDKSGIIHPFVIPTLPFTLWGRDIMKDIKVRLMTDSPDDSQDLMIGAIESNLFADQISWKSDQPVWLNQWPLKQEKLQALQQLVTEQLQLGHLEESNSPWNTPVFVIKKKSGKWRLLQDLRAVNATMHDMGALQPGLPSPVAVPKGWEIIIIDLQDCFFNIKLHPEDCKRFAFSVPSPNFKRPYQRFQWKVLPQGMKNSPTLCQKFVDKAILTVRDKYQDSYIVHYMDDILLAHPSRSIVDEILTSMIQALNKHGLVVSTEKIQKYDNLKYLGTHIQGDSVSYQKLQIRTDKLRTLNDFQKLLGNINWIRPFLKLTTGELKPLFEILNGDSNPISTRKLTPEACKALQLMNERLSTARVKRLDLSQPWSLCILKTEYTPTACLWQDGVVEWIHLPHISPKVITPYDIFCTQLIIKGRHRSKELFSKDPDYIVVPYTKVQFDLLLQEKEDWPISLLGFLGEVHFHLPKDPLLTFTLQTAIIFPHMTSTTPLEKGIVIFTDGSANGRSVTYIQGREPIIKENTQNTAQQAEIVAVITAFEEVSQPFNLYTDSKYVTGLFPEIETATLSPRTKIYTELKHLQRLIHKRQEKFYIGHIRGHTGLPGPLAQGNAYADSLTRILTAAGKRTADGSEFEKRTADGSEFESPKKKAKVE

SEQ ID NO: 7429 - protein, 2086 aa, synthetic construct
MPAAKRVKLDGGDKKYSIGLDIGTNSVGWAVITDEYKVPSKKFKVLGNTDRHSIKKNLIGALLFDSGETAEATRLKRTARRRYTRRKNRICYLQEIFSNEMAKVDDSFFHRLEESFLVEEDKKHERHPIFGNIVDEVAYHEKYPTIYHLRKKLVDSTDKADLRLIYLALAHMIKFRGHFLIEGDLNPDNSDVDKLFIQLVQTYNQLFEENPINASGVDAKAILSARLSKSRRLENLIAQLPGEKKNGLFGNLIALSLGLTPNFKSNFDLAEDAKLQLSKDTYDDDLDNLLAQIGDQYADLFLAAKNLSDAILLSDILRVNTEITKAPLSASMIKRYDEHHQDLTLLKALVRQQLPEKYKEIFFDQSKNGYAGYIDGGASQEEFYKFIKPILEKMDGTEELLVKLNREDLLRKQRTFDNGSIPHQIHLGELHAILRRQEDFYPFLKDNREKIEKILTFRIPYYVGPLARGNSRFAWMTRKSEETITPWNFEEVVDKGASAQSFIERMTNFDKNLPNEKVLPKHSLLYEYFTVYNELTKVKYVTEGMRKPAFLSGEQKKAIVDLLFKTNRKVTVKQLKEDYFKKIECFDSVEISGVEDRFNASLGTYHDLLKIIKDKDFLDNEENEDILEDIVLTLTLFEDREMIEERLKTYAHLFDDKVMKQLKRRRYTGWGRLSRKLINGIRDKQSGKTILDFLKSDGFANRNFMQLIHDDSLTFKEDIQKAQVSGQGDSLHEHIANLAGSPAIKKGILQTVKVVDELVKVMGRHKPENIVIEMARENQTTQKGQKNSRERMKRIEEGIKELGSQILKEHPVENTQLQNEKLYLYYLQNGRDMYVDQELDINRLSDYDVDHIVPQSFLKDDSIDNKVLTRSDKARGKSDNVPSEEVVKKMKNYWRQLLNAKLITQRKFDNLTKAERGGLSELDKAGFIKRQLVETRQITKHVAQILDSRMNTKYDENDKLIREVKVITLKSKLVSDFRKDFQFYKVREINNYHHAHDAYLNAVVGTALIKKYPKLESEFVYGDYKVYDVRKMIAKSEQEIGKATAKYFFYSNIMNFFKTEITLANGEIRKRPLIETNGETGEIVWDKGRDFATVRKVLSMPQVNIVKKTEVQTGGFSKESILPKRNSDKLIARKKDWDPKKYGGFDSPTVAYSVLVVAKVEKGKSKKLKSVKELLGITIMERSSFEKNPIDFLEAKGYKEVKKDLIIKLPKYSLFELENGRKRMLASAGELQKGNELALPSKYVNFLYLASHYEKLKGSPEDNEQKQLFVEQHKHYLDEIIEQISEFSKRVILADANLDKVLSAYNKHRDKPIREQAENIIHLFTLTNLGAPAAFKYFDTTIDRKRYTSTKEVLDATLIHQSITGLYETRIDLSQLGGDGGPAPGGGGSSGGLDDEYRLYSPLVKPDQNIQFWLEQFPQAWAETAGMGLAKQVPPQVIQLKASATPVSVRQYPLSKEAQEGIRPHVQRLIQQGILVPVQSPWNTPLLPVRKPGTNDYRPVQDLREVNKRVQDIHPTVPNPYNLLCALPPQRSWYTVLDLKDAFFCLRLHPTSQPLFAFEWRDPGTGRTGQLTWTRLPQGFKNSPTIFNEALHRDLANFRIQHPQVTLLQYVDDLLLAGATKQDCLEGTKALLLELSDLGYRASAKKAQICRREVTYLGYSLRDGQRWLTEARKKTVVQIPAPTTAKQVREFLGKAGFCRLFIPGFATLAAPLYPLTKPKGEFSWAPEHQKAFDAIKKALLSAPALALPDVTKPFTLYVDERKGVARGVLTQTLGPWRRPVAYLSKKLDPVASGWPVCLKAIAAVAILVKDADKLTLGQNITVIAPHALENIVRQPPDRWMTNARMTHYQSLLLTERVTFAPPAALNPATLLPEETDEPVTHDCHQLLIEETGVRKDLTDIPLTGEVLTWFTDGSSYVVEGKRMAGAAVVDGTRTIWASSLPEGTSAQKAELMALTQALRLAEGKSINIYTDSRYAFATAHVHGAIYKQRGWLTSAGREIKNKEEILSLLEALHLPKRLAIIHCPGHQKAKDPISRGNQMADRVAKQAAQGVNLLPAGKRTADGSEFEKRTADGSEFESPKKKAKVE

SEQ ID NO: 7430 - protein, 2086 aa, synthetic construct; identical to SEQ ID NO: 7429

SEQ ID NO: 7431 - protein, 2085 aa, synthetic construct
MPAAKRVKLDGGDKKYSIGLDIGTNSVGWAVITDEYKVPSKKFKVLGNTDRHSIKKNLIGALLFDSGETAEATRLKRTARRRYTRRKNRICYLQEIFSNEMAKVDDSFFHRLEESFLVEEDKKHERHPIFGNIVDEVAYHEKYPTIYHLRKKLVDSTDKADLRLIYLALAHMIKFRGHFLIEGDLNPDNSDVDKLFIQLVQTYNQLFEENPINASGVDAKAILSARLSKSRRLENLIAQLPGEKKNGLFGNLIALSLGLTPNFKSNFDLAEDAKLQLSKDTYDDDLDNLLAQIGDQYADLFLAAKNLSDAILLSDILRVNTEITKAPLSASMIKRYDEHHQDLTLLKALVRQQLPEKYKEIFFDQSKNGYAGYIDGGASQEEFYKFIKPILEKMDGTEELLVKLNREDLLRKQRTFDNGSIPHQIHLGELHAILRRQEDFYPFLKDNREKIEKILTFRIPYYVGPLARGNSRFAWMTRKSEETITPWNFEEVVDKGASAQSFIERMTNFDKNLPNEKVLPKHSLLYEYFTVYNELTKVKYVTEGMRKPAFLSGEQKKAIVDLLFKTNRKVTVKQLKEDYFKKIECFDSVEISGVEDRFNASLGTYHDLLKIIKDKDFLDNEENEDILEDIVLTLTLFEDREMIEERLKTYAHLFDDKVMKQLKRRRYTGWGRLSRKLINGIRDKQSGKTILDFLKSDGFANRNFMQLIHDDSLTFKEDIQKAQVSGQGDSLHEHIANLAGSPAIKKGILQTVKVVDELVKVMGRHKPENIVIEMARENQTTQKGQKNSRERMKRIEEGIKELGSQILKEHPVENTQLQNEKLYLYYLQNGRDMYVDQELDINRLSDYDVDHIVPQSFLKDDSIDNKVLTRSDKARGKSDNVPSEEVVKKMKNYWRQLLNAKLITQRKFDNLTKAERGGLSELDKAGFIKRQLVETRQITKHVAQILDSRMNTKYDENDKLIREVKVITLKSKLVSDFRKDFQFYKVREINNYHHAHDAYLNAVVGTALIKKYPKLESEFVYGDYKVYDVRKMIAKSEQEIGKATAKYFFYSNIMNFFKTEITLANGEIRKRPLIETNGETGEIVWDKGRDFATVRKVLSMPQVNIVKKTEVQTGGFSKESILPKRNSDKLIARKKDWDPKKYGGFDSPTVAYSVLVVAKVEKGKSKKLKSVKELLGITIMERSSFEKNPIDFLEAKGYKEVKKDLIIKLPKYSLFELENGRKRMLASAGELQKGNELALPSKYVNFLYLASHYEKLKGSPEDNEQKQLFVEQHKHYLDEIIEQISEFSKRVILADANLDKVLSAYNKHRDKPIREQAENIIHLFTLTNLGAPAAFKYFDTTIDRKRYTSTKEVLDATLIHQSITGLYETRIDLSQLGGDGGPAPGGGGSSGGIPWLMKKPLQLTTLVPLQEYEERLLKQTMLTGSYKEKLQSLFLKYDALWQHWENQVGHRRIKPHHIATGTVNPRPQKQYPINPKAKASIQTVINDLLKQGVLIQQNSIMNTPVYPVPKPDGKWRMVLDYREVNKTIPLIAAQNQHSAGILSSIFRGKYKTTLDLSNGFWAHSITPESYWLTAFTWLGQQYCWTRLPQGFLNSPALFTADVVDLLKEVPNVQVYVDDIYISHDDPREHLEQLEKVFSLLLNAGYVVSLKKSEIAQHEVEFLGFNITKEGRGLTETFKQKLLNITPPRDLKQLQSILGLLNFARNFIPNFSELVKPLYNIIATANGKYITWTTDNSQQLQNIISMLNSAENLEERNPEVRLIMKVNTSPSAGYIRFYNEFAKRPIMYLNYVYTKAEVKFTNTEKLLTTIHKGLIKALDLGMGQEILVYSPIVSMTKIQKTPLPERKALPIRWITWMSYLEDPRIQFHYDKTLPELQQVPTVTDDIIAKIKHPSEFSMVFYTDGSAIKHPNVNKSHNAGMGIAQVQFKPEFTVINTWSIPLGDHTAQLAEVAAVEFACKKALKIDGPVLIVTDSFYVAESVNKELPYWQSNGFFNNKKKPLKHVSKWKSIADCIQLKPDIIIIHEKGHQPTASTFHTEGNNLADKLATQGSYVVNAGKRTADGSEFEKRTADGSEFESPKKKAKVE

SEQ ID NO: 7432 - protein, 2085 aa, synthetic construct
MPAAKRVKLDGGDKKYSIGLDIGTNSVGWAVITDEYKVPSKKFKVLGNTDRHSIKKNLIGALLFDSGETAEATRLKRTARRRYTRRKNRICYLQEIFSNEMAKVDDSFFHRLEESFLVEEDKKHERHPIFGNIVDEVAYHEKYPTIYHLRKKLVDSTDKADLRLIYLALAHMIKFRGHFLIEGDLNPDNSDVDKLFIQLVQTYNQLFEENPINASGVDAKAILSARLSKSRRLENLIAQLPGEKKNGLFGNLIALSLGLTPNFKSNFDLAEDAKLQLSKDTYDDDLDNLLAQIGDQYADLFLAAKNLSDAILLSDILRVNTEITKAPLSASMIKRYDEHHQDLTLLKALVRQQLPEKYKEIFFDQSKNGYAGYIDGGASQEEFYKFIKPILEKMDGTEELLVKLNREDLLRKQRTFDNGSIPHQIHLGELHAILRRQEDFYPFLKDNREKIEKILTFRIPYYVGPLARGNSRFAWMTRKSEETITPWNFEEVVDKGASAQSFIERMTNFDKNLPNEKVLPKHSLLYEYFTVYNELTKVKYVTEGMRKPAFLSGEQKKAIVDLLFKTNRKVTVKQLKEDYFKKIECFDSVEISGVEDRFNASLGTYHDLLKIIKDKDFLDNEENEDILEDIVLTLTLFEDREMIEERLKTYAHLFDDKVMKQLKRRRYTGWGRLSRKLINGIRDKQSGKTILDFLKSDGFANRNFMQLIHDDSLTFKEDIQKAQVSGQGDSLHEHIANLAGSPAIKKGILQTVKVVDELVKVMGRHKPENIVIEMARENQTTQKGQKNSRERMKRIEEGIKELGSQILKEHPVENTQLQNEKLYLYYLQNGRDMYVDQELDINRLSDYDVDHIVPQSFLKDDSIDNKVLTRSDKARGKSDNVPSEEVVKKMKNYWRQLLNAKLITQRKFDNLTKAERGGLSELDKAGFIKRQLVETRQITKHVAQILDSRMNTKYDENDKLIREVKVITLKSKLVSDFRKDFQFYKVREINNYHHAHDAYLNAVVGTALIKKYPKLESEFVYGDYKVYDVRKMIAKSEQEIGKATAKYFFYSNIMNFFKTEITLANGEIRKRPLIETNGETGEIVWDKGRDFATVRKVLSMPQVNIVKKTEVQTGGFSKESILPKRNSDKLIARKKDWDPKKYGGFDSPTVAYSVLVVAKVEKGKSKKLKSVKELLGITIMERSSFEKNPIDFLEAKGYKEVKKDLIIKLPKYSLFELENGRKRMLASAGELQKGNELALPSKYVNFLYLASHYEKLKGSPEDNEQKQLFVEQHKHYLDEIIEQISEFSKRVILADANLDKVLSAYNKHRDKPIREQAENIIHLFTLTNLGAPAAFKYFDTTIDRKRYTSTKEVLDATLIHQSITGLYETRIDLSQLGGDGGPAPGGGGSSGGIPWLMKKPLQLTTLVPLQEYEERLLKQTMLTGSYKEKLQSLFLKYDALWQHWENQVGHRRIKPHHIATGTVNPRPQKQYPINPKAKASIQTVINDLLKQGVLIQQNSIMNTPVYPVPKPDGKWRMVLDYREVNKTIPLIAAQNQHSAGILSSIFRGKYKTTLDLSNGFWAHSITPESYWLTAFTWLGQQYCWTRLPQGFLNSPALFNADVVDLLKEVPNVQVYVDDIYISHDDPREHLEQLEKVFSLLLNAGYVVSLKKSEIAQHEVEFLGFNITKEGRGLTETFKQKLLNITPPRDLKQLQSILGLLNFARNFIPNFSELVKPLYNIIATAPGKYITWTTDNSQQLQNIISMLNSAENLEERNPEVRLIMKVNTSPSAGYIRFYNEFAKRPIMYLNYVYTKAEVKFTNTEKLLTTIHKGLIKALDLGMGQEILVYSPIVSMTKIQKTPLPERKALPIRWITWMSYLEDPRIQFHYDKTLPELQQVPTVTDDIIAKIKHPSEFSMVFYTDGSAIKHPNVNKSHNAGMGIAQVQFKPEFTVINTWSIPLGDHTAQLAEVAAVEFACKKALKIDGPVLIVTDSFYVAESVNKELPYWQSNGFFNNKKKPLKHVSKWKSIADCIQLKPDIIIIHEKGHQPTASTFHTEGNNLADKLATQGSYVVNAGKRTADGSEFEKRTADGSEFESPKKKAKVE

SEQ ID NO: 7433 - protein, 2085 aa, synthetic construct
MPAAKRVKLDGGDKKYSIGLDIGTNSVGWAVITDEYKVPSKKFKVLGNTDRHSIKKNLIGALLFDSGETAEATRLKRTARRRYTRRKNRICYLQEIFSNEMAKVDDSFFHRLEESFLVEEDKKHERHPIFGNIVDEVAYHEKYPTIYHLRKKLVDSTDKADLRLIYLALAHMIKFRGHFLIEGDLNPDNSDVDKLFIQLVQTYNQLFEENPINASGVDAKAILSARLSKSRRLENLIAQLPGEKKNGLFGNLIALSLGLTPNFKSNFDLAEDAKLQLSKDTYDDDLDNLLAQIGDQYADLFLAAKNLSDAILLSDILRVNTEITKAPLSASMIKRYDEHHQDLTLLKALVRQQLPEKYKEIFFDQSKNGYAGYIDGGASQEEFYKFIKPILEKMDGTEELLVKLNREDLLRKQRTFDNGSIPHQIHLGELHAILRRQEDFYPFLKDNREKIEKILTFRIPYYVGPLARGNSRFAWMTRKSEETITPWNFEEVVDKGASAQSFIERMTNFDKNLPNEKVLPKHSLLYEYFTVYNELTKVKYVTEGMRKPAFLSGEQKKAIVDLLFKTNRKVTVKQLKEDYFKKIECFDSVEISGVEDRFNASLGTYHDLLKIIKDKDFLDNEENEDILEDIVLTLTLFEDREMIEERLKTYAHLFDDKVMKQLKRRRYTGWGRLSRKLINGIRDKQSGKTILDFLKSDGFANRNFMQLIHDDSLTFKEDIQKAQVSGQGDSLHEHIANLAGSPAIKKGILQTVKVVDELVKVMGRHKPENIVIEMARENQTTQKGQKNSRERMKRIEEGIKELGSQILKEHPVENTQLQNEKLYLYYLQNGRDMYVDQELDINRLSDYDVDHIVPQSFLKDDSIDNKVLTRSDKARGKSDNVPSEEVVKKMKNYWRQLLNAKLITQRKFDNLTKAERGGLSELDKAGFIKRQLVETRQITKHVAQILDSRMNTKYDENDKLIREVKVITLKSKLVSDFRKDFQFYKVREINNYHHAHDAYLNAVVGTALIKKYPKLESEFVYGDYKVYDVRKMIAKSEQEIGKATAKYFFYSNIMNFFKTEITLANGEIRKRPLIETNGETGEIVWDKGRDFATVRKVLSMPQVNIVKKTEVQTGGFSKESILPKRNSDKLIARKKDWDPKKYGGFDSPTVAYSVLVVAKVEKGKSKKLKSVKELLGITIMERSSFEKNPIDFLEAKGYKEVKKDLIIKLPKYSLFELENGRKRMLASAGELQKGNELALPSKYVNFLYLASHYEKLKGSPEDNEQKQLFVEQHKHYLDEIIEQISEFSKRVILADANLDKVLSAYNKHRDKPIREQAENIIHLFTLTNLGAPAAFKYFDTTIDRKRYTSTKEVLDATLIHQSITGLYETRIDLSQLGGDGGPAPGGGGSSGGIPWLMKKPLQLTTLVPLQEYEERLLKQTMLTGSYKEKLQSLFLKYDALWQHWENQVGHRRIKPHHIATGTVNPRPQKQYPINPKAKASIQTVINDLLKQGVLIQQNSIMNTPVYPVPKPDGKWRMVLDYREVNKTIPLIAAQNQHSAGILSSIFRGKYKTTLDLSNGFWAHSITPESYWLTAFTWLGQQYCWTRLPQGFLNSPALFNADVVDLLKEVPNVQVYVDDIYISHDDPREHLEQLEKVFSLLLNAGYVVSLKKSEIAQHEVEFLGFNITKEGRGLTETFKQKLLNITPPRDLKQLQSILGKLNFARNFIPNFSELVKPLYNIIATAPGKYITWTTDNSQQLQNIISMLNSAENLEERNPEVRLIMKVNTSPSAGYIRFYNEFAKRPIMYLNYVYTKAEVKFTNTEKLLTTIHKGLIKALDLGMGQEILVYSPIVSMTKIQKTPLPERKALPIRWITWMSYLEDPRIQFHYDKTLPELQQVPTVTDDIIAKIKHPSEFSMVFYTDGSAIKHPNVNKSHNAGMGIAQVQFKPEFTVINTWSIPLGDHTAQLAEVAAVEFACKKALKIDGPVLIVTDSFYVAESVNKELPYWQSNGFFNNKKKPLKHVSKWKSIADCIQLKPDIIIIHEKGHQPTASTFHTEGNNLADKLATQGSYVVNAGKRTADGSEFEKRTADGSEFESPKKKAKVE

SEQ ID NO: 7434 - protein, 2174 aa, synthetic construct
MPAAKRVKLDGGDKKYSIGLDIGTNSVGWAVITDEYKVPSKKFKVLGNTDRHSIKKNLIGALLFDSGETAEATRLKRTARRRYTRRKNRICYLQEIFSNEMAKVDDSFFHRLEESFLVEEDKKHERHPIFGNIVDEVAYHEKYPTIYHLRKKLVDSTDKADLRLIYLALAHMIKFRGHFLIEGDLNPDNSDVDKLFIQLVQTYNQLFEENPINASGVDAKAILSARLSKSRRLENLIAQLPGEKKNGLFGNLIALSLGLTPNFKSNFDLAEDAKLQLSKDTYDDDLDNLLAQIGDQYADLFLAAKNLSDAILLSDILRVNTEITKAPLSASMIKRYDEHHQDLTLLKALVRQQLPEKYKEIFFDQSKNGYAGYIDGGASQEEFYKFIKPILEKMDGTEELLVKLNREDLLRKQRTFDNGSIPHQIHLGELHAILRRQEDFYPFLKDNREKIEKILTFRIPYYVGPLARGNSRFAWMTRKSEETITPWNFEEVVDKGASAQSFIERMTNFDKNLPNEKVLPKHSLLYEYFTVYNELTKVKYVTEGMRKPAFLSGEQKKAIVDLLFKTNRKVTVKQLKEDYFKKIECFDSVEISGVEDRFNASLGTYHDLLKIIKDKDFLDNEENEDILEDIVLTLTLFEDREMIEERLKTYAHLFDDKVMKQLKRRRYTGWGRLSRKLINGIRDKQSGKTILDFLKSDGFANRNFMQLIHDDSLTFKEDIQKAQVSGQGDSLHEHIANLAGSPAIKKGILQTVKVVDELVKVMGRHKPENIVIEMARENQTTQKGQKNSRERMKRIEEGIKELGSQILKEHPVENTQLQNEKLYLYYLQNGRDMYVDQELDINRLSDYDVDHIVPQSFLKDDSIDNKVLTRSDKARGKSDNVPSEEVVKKMKNYWRQLLNAKLITQRKFDNLTKAERGGLSELDKAGFIKRQLVETRQITKHVAQILDSRMNTKYDENDKLIREVKVITLKSKLVSDFRKDFQFYKVREINNYHHAHDAYLNAVVGTALIKKYPKLESEFVYGDYKVYDVRKMIAKSEQEIGKATAKYFFYSNIMNFFKTEITLANGEIRKRPLIETNGETGEIVWDKGRDFATVRKVLSMPQVNIVKKTEVQTGGFSKESILPKRNSDKLIARKKDWDPKKYGGFDSPTVAYSVLVVAKVEKGKSKKLKSVKELLGITIMERSSFEKNPIDFLEAKGYKEVKKDLIIKLPKYSLFELENGRKRMLASAGELQKGNELALPSKYVNFLYLASHYEKLKGSPEDNEQKQLFVEQHKHYLDEIIEQISEFSKRVILADANLDKVLSAYNKHRDKPIREQAENIIHLFTLTNLGAPAAFKYFDTTIDRKRYTSTKEVLDATLIHQSITGLYETRIDLSQLGGDGGPAPGGGGSSGGMDPLQLLQPLEAEIKGTKLKAHWNSGATITCVPQAFLEEEVPIKNIWIKTIHGEKEQPVYYLTFKIQGRKVEAEVISSPYDYILVSPSDIPWLMKKPLQLTTLVPLQEYEERLLKQTMLTGSYKEKLQSLFLKYDALWQHWENQVGHRRIKPHHIATGTVNPRPQKQYPINPKAKASIQTVINDLLKQGVLIQQNSIMNTPVYPVPKPDGKWRMVLDYREVNKTIPLIAAQNQHSAGILSSIFRGKYKTTLDLSNGFWAHSITPESYWLTAFTWLGQQYCWTRLPQGFLNSPALFNADVVDLLKEVPNVQVYVDDIYISHDDPREHLEQLEKVFSLLLNAGYVVSLKKSEIAQHEVEFLGFNITKEGRGLTETFKQKLLNITPPRDLKQLQSILGKLNFARNFIPNFSELVKPLYNIIATAPGKYITWTTDNSQQLQNIISMLNSAENLEERNPEVRLIMKVNTSPSAGYIRFYNEFAKRPIMYLNYVYTKAEVKFTNTEKLLTTIHKGLIKALDLGMGQEILVYSPIVSMTKIQKTPLPERKALPIRWITWMSYLEDPRIQFHYDKTLPELQQVPTVTDDIIAKIKHPSEFSMVFYTDGSAIKHPNVNKSHNAGMGIAQVQFKPEFTVINTWSIPLGDHTAQLAEVAAVEFACKKALKIDGPVLIVTDSFYVAESVNKELPYWQSNGFFNNKKKPLKHVSKWKSIADCIQLKPDIIIIHEKGHQPTASTFHTEGNNLADKLATQGSYVVNAGKRTADGSEFEKRTADGSEFESPKKKAKVE

SEQ ID NO: 7435 - protein, 2092 aa, synthetic construct
MPAAKRVKLDGGDKKYSIGLDIGTNSVGWAVITDEYKVPSKKFKVLGNTDRHSIKKNLIGALLFDSGETAEATRLKRTARRRYTRRKNRICYLQEIFSNEMAKVDDSFFHRLEESFLVEEDKKHERHPIFGNIVDEVAYHEKYPTIYHLRKKLVDSTDKADLRLIYLALAHMIKFRGHFLIEGDLNPDNSDVDKLFIQLVQTYNQLFEENPINASGVDAKAILSARLSKSRRLENLIAQLPGEKKNGLFGNLIALSLGLTPNFKSNFDLAEDAKLQLSKDTYDDDLDNLLAQIGDQYADLFLAAKNLSDAILLSDILRVNTEITKAPLSASMIKRYDEHHQDLTLLKALVRQQLPEKYKEIFFDQSKNGYAGYIDGGASQEEFYKFIKPILEKMDGTEELLVKLNREDLLRKQRTFDNGSIPHQIHLGELHAILRRQEDFYPFLKDNREKIEKILTFRIPYYVGPLARGNSRFAWMTRKSEETITPWNFEEVVDKGASAQSFIERMTNFDKNLPNEKVLPKHSLLYEYFTVYNELTKVKYVTEGMRKPAFLSGEQKKAIVDLLFKTNRKVTVKQLKEDYFKKIECFDSVEISGVEDRFNASLGTYHDLLKIIKDKDFLDNEENEDILEDIVLTLTLFEDREMIEERLKTYAHLFDDKVMKQLKRRRYTGWGRLSRKLINGIRDKQSGKTILDFLKSDGFANRNFMQLIHDDSLTFKEDIQKAQVSGQGDSLHEHIANLAGSPAIKKGILQTVKVVDELVKVMGRHKPENIVIEMARENQTTQKGQKNSRERMKRIEEGIKELGSQILKEHPVENTQLQNEKLYLYYLQNGRDMYVDQELDINRLSDYDVDHIVPQSFLKDDSIDNKVLTRSDKARGKSDNVPSEEVVKKMKNYWRQLLNAKLITQRKFDNLTKAERGGLSELDKAGFIKRQLVETRQITKHVAQILDSRMNTKYDENDKLIREVKVITLKSKLVSDFRKDFQFYKVREINNYHHAHDAYLNAVVGTALIKKYPKLESEFVYGDYKVYDVRKMIAKSEQEIGKATAKYFFYSNIMNFFKTEITLANGEIRKRPLIETNGETGEIVWDKGRDFATVRKVLSMPQVNIVKKTEVQTGGFSKESILPKRNSDKLIARKKDWDPKKYGGFDSPTVAYSVLVVAKVEKGKSKKLKSVKELLGITIMERSSFEKNPIDFLEAKGYKEVKKDLIIKLPKYSLFELENGRKRMLASAGELQKGNELALPSKYVNFLYLASHYEKLKGSPEDNEQKQLFVEQHKHYLDEIIEQISEFSKRVILADANLDKVLSAYNKHRDKPIREQAENIIHLFTLTNLGAPAAFKYFDTTIDRKRYTSTKEVLDATLIHQSITGLYETRIDLSQLGGDGGPAPGGGGSSGGVLNLEEEYRLHEKPVPSSIDPSWLQLFPTVWAERAGMGLANQVPPVVVELRSGASPVAVRQYPMSKEAREGIRPHIQRFLDLGVLVPCQSPWNTPLLPVKKPGTNDYRPVQDLREINKRVQDIHPTVPNPYNLLSSLPPSHTWYSVLDLKDAFFCLKLHPNSQPLFAFEWRDPEKGNTGQLTWTRLPQGFKNSPTLFNEALHRDLAPFRALNPQVVLLQYVDDLLVAAPTYRDCKEGTQKLLQELSKLGYRVSAKKAQLCQKEVTYLGYLLKEGKRWLTPARKATVMKIPPPTTPRQVREFLGTAGFCRLWIPGFASLAAPLYPLTKPSIPFIWTEEHQKAFDRIKEALLSAPALALPDLTKPFTLYVDERAGVARGVLTQTLGPWRRPVAYLSKKLDPVASGWPTCLKAVAAVALLLKDADKLTLGQNVTVIASHSLESIVRQPPDRWMTNARMTHYQSLLLNERVSFAPPAVLNPATLLPVESEATPVHRCSEILAEETGTRRDLKDQPLPGVPAWYTDGSSFIAEGKRRAGAAIVDGKRTVWASSLPEGTSAQKAELVALTQALRLAEGKDINIYTDSRYAFATAHIHGAIYKQRGWLTSAGKDIKNKEEILALLEAIHLPKRVAIIHCPGHQKGNDPVATGNRRADEAAKQAALSTRVLAETTKPAGKRTADGSEFEKRTADGSEFESPKKKAKVE

SEQ ID NO: 7436 - protein, 2094 aa, synthetic construct
MPAAKRVKLDGGDKKYSIGLDIGTNSVGWAVITDEYKVPSKKFKVLGNTDRHSIKKNLIGALLFDSGETAEATRLKRTARRRYTRRKNRICYLQEIFSNEMAKVDDSFFHRLEESFLVEEDKKHERHPIFGNIVDEVAYHEKYPTIYHLRKKLVDSTDKADLRLIYLALAHMIKFRGHFLIEGDLNPDNSDVDKLFIQLVQTYNQLFEENPINASGVDAKAILSARLSKSRRLENLIAQLPGEKKNGLFGNLIALSLGLTPNFKSNFDLAEDAKLQLSKDTYDDDLDNLLAQIGDQYADLFLAAKNLSDAILLSDILRVNTEITKAPLSASMIKRYDEHHQDLTLLKALVRQQLPEKYKEIFFDQSKNGYAGYIDGGASQEEFYKFIKPILEKMDGTEELLVKLNREDLLRKQRTFDNGSIPHQIHLGELHAILRRQEDFYPFLKDNREKIEKILTFRIPYYVGPLARGNSRFAWMTRKSEETITPWNFEEVVDKGASAQSFIERMTNFDKNLPNEKVLPKHSLLYEYFTVYNELTKVKYVTEGMRKPAFLSGEQKKAIVDLLFKTNRKVTVKQLKEDYFKKIECFDSVEISGVEDRFNASLGTYHDLLKIIKDKDFLDNEENEDILEDIVLTLTLFEDREMIEERLKTYAHLFDDKVMKQLKRRRYTGWGRLSRKLINGIRDKQSGKTILDFLKSDGFANRNFMQLIHDDSLTFKEDIQKAQVSGQGDSLHEHIANLAGSPAIKKGILQTVKVVDELVKVMGRHKPENIVIEMARENQTTQKGQKNSRERMKRIEEGIKELGSQILKEHPVENTQLQNEKLYLYYLQNGRDMYVDQELDINRLSDYDVDHIVPQSFLKDDSIDNKVLTRSDKARGKSDNVPSEEVVKKMKNYWRQLLNAKLITQRKFDNLTKAERGGLSELDKAGFIKRQLVETRQITKHVAQILDSRMNTKYDENDKLIREVKVITLKSKLVSDFRKDFQFYKVREINNYHHAHDAYLNAVVGTALIKKYPKLESEFVYGDYKVYDVRKMIAKSEQEIGKATAKYFFYSNIMNFFKTEITLANGEIRKRPLIETNGETGEIVWDKGRDFATVRKVLSMPQVNIVKKTEVQTGGFSKESILPKRNSDKLIARKKDWDPKKYGGFDSPTVAYSVLVVAKVEKGKSKKLKSVKELLGITIMERSSFEKNPIDFLEAKGYKEVKKDLIIKLPKYSLFELENGRKRMLASAGELQKGNELALPSKYVNFLYLASHYEKLKGSPEDNEQKQLFVEQHKHYLDEIIEQISEFSKRVILADANLDKVLSAYNKHRDKPIREQAENIIHLFTLTNLGAPAAFKYFDTTIDRKRYTSTKEVLDATLIHQSITGLYETRIDLSQLGGDGGPAPGGGGSSGGTLNIEDEYRLHETSKEPDVPLGSTWLSDFPQAWAETGGMGLAVRQAPLIIPLKATSTPVSIKQYPMSQEARLGIKPHIQRLLDQGILVPCQSPWNTPLLPVKKPGTNDYRPVQDLREVNKRVEDIHPTVPNPYNLLSGLPPSHQWYTVLDLKDAFFCLRLHPTSQPLFAFEWRDPEMGISGQLTWTRLPQGFKNSPTLFNEALHRDLADFRIQHPDLILLQYVDDLLLAATSEQDCQRGTRALLQTLGNLGYRASAKKAQICQKQVKYLGYLLKEGQRWLTEARKETVMGQPTPKTPRQLREFLGTAGFCRLWIPGFAEMAAPLYPLTKPGTLFNWGPDQQKAYQEIKQALLTAPALGLPDLTKPFELFVDEKQGYAKGVLTQKLGPWRRPVAYLSKKLDPVAAGWPPCLRMVAAIAVLTKDAGKLTMGQPLVILAPHAVEALVKQPPDRWLSNARMTHYQAMLLDTDRVQFGPVVALNPATLLPLPEKEAPHDCLEILAETHGTRPDLTDQPIPDADYTWYTDGSSFLQEGQRRAGAAVTTETEVIWARALPAGTSAQRAELIALTQALKMAEGKKLNVYTDSRYAFATAHVHGEIYRRRGWLTSEGREIKNKNEILALLKALFLPKRLSIIHCPGHQKGNSAEARGNRMADQAAREAAMKAVLETSTLLAGKRTADGSEFEKRTADGSEFESPKKKAKVE

SEQ ID NO: 7437 - protein, 2094 aa, synthetic construct
MPAAKRVKLDGGDKKYSIGLDIGTNSVGWAVITDEYKVPSKKFKVLGNTDRHSIKKNLIGALLFDSGETAEATRLKRTARRRYTRRKNRICYLQEIFSNEMAKVDDSFFHRLEESFLVEEDKKHERHPIFGNIVDEVAYHEKYPTIYHLRKKLVDSTDKADLRLIYLALAHMIKFRGHFLIEGDLNPDNSDVDKLFIQLVQTYNQLFEENPINASGVDAKAILSARLSKSRRLENLIAQLPGEKKNGLFGNLIALSLGLTPNFKSNFDLAEDAKLQLSKDTYDDDLDNLLAQIGDQYADLFLAAKNLSDAILLSDILRVNTEITKAPLSASMIKRYDEHHQDLTLLKALVRQQLPEKYKEIFFDQSKNGYAGYIDGGASQEEFYKFIKPILEKMDGTEELLVKLNREDLLRKQRTFDNGSIPHQIHLGELHAILRRQEDFYPFLKDNREKIEKILTFRIPYYVGPLARGNSRFAWMTRKSEETITPWNFEEVVDKGASAQSFIERMTNFDKNLPNEKVLPKHSLLYEYFTVYNELTKVKYVTEGMRKPAFLSGEQKKAIVDLLFKTNRKVTVKQLKEDYFKKIECFDSVEISGVEDRFNASLGTYHDLLKIIKDKDFLDNEENEDILEDIVLTLTLFEDREMIEERLKTYAHLFDDKVMKQLKRRRYTGWGRLSRKLINGIRDKQSGKTILDFLKSDGFANRNFMQLIHDDSLTFKEDIQKAQVSGQGDSLHEHIANLAGSPAIKKGILQTVKVVDELVKVMGRHKPENIVIEMARENQTTQKGQKNSRERMKRIEEGIKELGSQILKEHPVENTQLQNEKLYLYYLQNGRDMYVDQELDINRLSDYDVDHIVPQSFLKDDSIDNKVLTRSDKARGKSDNVPSEEVVKKMKNYWRQLLNAKLITQRKFDNLTKAERGGLSELDKAGFIKRQLVETRQITKHVAQILDSRMNTKYDENDKLIREVKVITLKSKLVSDFRKDFQFYKVREINNYHHAHDAYLNAVVGTALIKKYPKLESEFVYGDYKVYDVRKMIAKSEQEIGKATAKYFFYSNIMNFFKTEITLANGEIRKRPLIETNGETGEIVWDKGRDFATVRKVLSMPQVNIVKKTEVQTGGFSKESILPKRNSDKLIARKKDWDPKKYGGFDSPTVAYSVLVVAKVEKGKSKKLKSVKELLGITIMERSSFEKNPIDFLEAKGYKEVKKDLIIKLPKYSLFELENGRKRMLASAGELQKGNELALPSKYVNFLYLASHYEKLKGSPEDNEQKQLFVEQHKHYLDEIIEQISEFSKRVILADANLDKVLSAYNKHRDKPIREQAENIIHLFTLTNLGAPAAFKYFDTTIDRKRYTSTKEVLDATLIHQSITGLYETRIDLSQLGGDGGPAPGGGGSSGGTLNIEDEYRLHETSKEPDVPLGSTWLSDFPQAWAETGGMGLAVRQAPLIIPLKATSTPVSIKQYPMSQEARLGIKPHIQRLLDQGILVPCQSPWNTPLLPVKKPGTNDYRPVQDLREVNKRVEDIHPTVPNPYNLLSGLPPSHQWYTVLDLKDAFFCLRLHPTSQPLFAFEWRDPEMGISGQLTWTRLPQGFKNSPTLFNEALHRDLADFRIQHPDLILLQYVDDLLLAATSEQDCQRGTRALLQTLGNLGYRASAKKAQICQKQVKYLGYLLKEGQRWLTEARKETVMGQPTPKTPRQLREFLGKAGFCRLFIPGFAEMAAPLYPLTKPGTLFNWGPDQQKAYQEIKQALLTAPALGLPDLTKPFELFVDEKQGYAKGVLTQKLGPWRRPVAYLSKKLDPVAAGWPPCLRMVAAIAVLTKDAGKLTMGQPLVILAPHAVEALVKQPPDRWLSNARMTHYQAMLLDTDRVQFGPVVALNPATLLPLPEKEAPHDCLEILAETHGTRPDLTDQPIPDADYTWYTDGSSFLQEGQRRAGAAVTTETEVIWARALPAGTSAQRAELIALTQALKMAEGKKLNVYTDSRYAFATAHVHGEIYRRRGWLTSEGREIKNKNEILALLKALFLPKRLSIIHCPGHQKGNSAEARGNRMADQAAREAAMKAVLETSTLLAGKRTADGSEFEKRTADGSEFESPKKKAKVE

SEQ ID NO: 7438 - protein, 2096 aa, synthetic construct
MPAAKRVKLDGGDKKYSIGLDIGTNSVGWAVITDEYKVPSKKFKVLGNTDRHSIKKNLIGALLFDSGETAEATRLKRTARRRYTRRKNRICYLQEIFSNEMAKVDDSFFHRLEESFLVEEDKKHERHPIFGNIVDEVAYHEKYPTIYHLRKKLVDSTDKADLRLIYLALAHMIKFRGHFLIEGDLNPDNSDVDKLFIQLVQTYNQLFEENPINASGVDAKAILSARLSKSRRLENLIAQLPGEKKNGLFGNLIALSLGLTPNFKSNFDLAEDAKLQLSKDTYDDDLDNLLAQIGDQYADLFLAAKNLSDAILLSDILRVNTEITKAPLSASMIKRYDEHHQDLTLLKALVRQQLPEKYKEIFFDQSKNGYAGYIDGGASQEEFYKFIKPILEKMDGTEELLVKLNREDLLRKQRTFDNGSIPHQIHLGELHAILRRQEDFYPFLKDNREKIEKILTFRIPYYVGPLARGNSRFAWMTRKSEETITPWNFEEVVDKGASAQSFIERMTNFDKNLPNEKVLPKHSLLYEYFTVYNELTKVKYVTEGMRKPAFLSGEQKKAIVDLLFKTNRKVTVKQLKEDYFKKIECFDSVEISGVEDRFNASLGTYHDLLKIIKDKDFLDNEENEDILEDIVLTLTLFEDREMIEERLKTYAHLFDDKVMKQLKRRRYTGWGRLSRKLINGIRDKQSGKTILDFLKSDGFANRNFMQLIHDDSLTFKEDIQKAQVSGQGDSLHEHIANLAGSPAIKKGILQTVKVVDELVKVMGRHKPENIVIEMARENQTTQKGQKNSRERMKRIEEGIKELGSQILKEHPVENTQLQNEKLYLYYLQNGRDMYVDQELDINRLSDYDVDHIVPQSFLKDDSIDNKVLTRSDKARGKSDNVPSEEVVKKMKNYWRQLLNAKLITQRKFDNLTKAERGGLSELDKAGFIKRQLVETRQITKHVAQILDSRMNTKYDENDKLIREVKVITLKSKLVSDFRKDFQFYKVREINNYHHAHDAYLNAVVGTALIKKYPKLESEFVYGDYKVYDVRKMIAKSEQEIGKATAKYFFYSNIMNFFKTEITLANGEIRKRPLIETNGETGEIVWDKGRDFATVRKVLSMPQVNIVKKTEVQTGGFSKESILPKRNSDKLIARKKDWDPKKYGGFDSPTVAYSVLVVAKVEKGKSKKLKSVKELLGITIMERSSFEKNPIDFLEAKGYKEVKKDLIIKLPKYSLFELENGRKRMLASAGELQKGNELALPSKYVNFLYLASHYEKLKGSPEDNEQKQLFVEQHKHYLDEIIEQISEFSKRVILADANLDKVLSAYNKHRDKPIREQAENIIHLFTLTNLGAPAAFKYFDTTIDRKRYTSTKEVLDATLIHQSITGLYETRIDLSQLGGDGGPAPGSSGGGGGTAPLEEEYRLFLEAPIQNVTLLEQWKREIPKVWAEINPPGLASTQAPIHVQLLSTALPVRVRQYPITLEAKRSLRETIRKFRAAGILRPVHSPWNTPLLPVRKSGTSEYRMVQDLREVNKRVETIHPTVPNPYTLLSLLPPDRIWYSVLDLKDAFFCIPLAPESQLIFAFEWADAEEGESGQLTWTRLPQGFKNSPTLFNEALNRDLQGFRLDHPSVSLLQYVDDLLIAADTQAACLSATRDLLMTLAELGYRVSGKKAQLCQEEVTYLGFKIHKGSRSLSNSRTQAILQIPVPKTKRQVREFLGKIGYCRLFIPGFAELAQPLYAATRPGNDPLVWGEKEEEAFQSLKLALTQPPALALPSLDKPFQLFVEETSGAAKGVLTQALGPWKRPVAYLSKRLDPVAAGWPRCLRAIAAAALLTREASKLTFGQDIEITSSHNLESLLRSPPDKWLTNARITQYQVLLLDPPRVRFKQTAALNPATLLPETDDTLPIHHCLDTLDSLTSTRPDLTDQPLAQAEATLFTDGSSYIRDGKRYAGAAVVTLDSVIWAEPLPIGTSAQKAELIALTKALEWSKDKSVNIYTDSRYAFATLHVHGMIYRERGWLTAGGKAIKNAPEILALLTAVWLPKRVAVMHCKGHQKDDAPTSTGNRRADEVAREVAIRPLSTQATISAGKRTADGSEFEKRTADGSEFESPKKKAKVE

SEQ ID NO: 7439 - protein, 2171 aa, synthetic construct
MPAAKRVKLDGGDKKYSIGLDIGTNSVGWAVITDEYKVPSKKFKVLGNTDRHSIKKNLIGALLFDSGETAEATRLKRTARRRYTRRKNRICYLQEIFSNEMAKVDDSFFHRLEESFLVEEDKKHERHPIFGNIVDEVAYHEKYPTIYHLRKKLVDSTDKADLRLIYLALAHMIKFRGHFLIEGDLNPDNSDVDKLFIQLVQTYNQLFEENPINASGVDAKAILSARLSKSRRLENLIAQLPGEKKNGLFGNLIALSLGLTPNFKSNFDLAEDAKLQLSKDTYDDDLDNLLAQIGDQYADLFLAAKNLSDAILLSDILRVNTEITKAPLSASMIKRYDEHHQDLTLLKALVRQQLPEKYKEIFFDQSKNGYAGYIDGGASQEEFYKFIKPILEKMDGTEELLVKLNREDLLRKQRTFDNGSIPHQIHLGELHAILRRQEDFYPFLKDNREKIEKILTFRIPYYVGPLARGNSRFAWMTRKSEETITPWNFEEVVDKGASAQSFIERMTNFDKNLPNEKVLPKHSLLYEYFTVYNELTKVKYVTEGMRKPAFLSGEQKKAIVDLLFKTNRKVTVKQLKEDYFKKIECFDSVEISGVEDRFNASLGTYHDLLKIIKDKDFLDNEENEDILEDIVLTLTLFEDREMIEERLKTYAHLFDDKVMKQLKRRRYTGWGRLSRKLINGIRDKQSGKTILDFLKSDGFANRNFMQLIHDDSLTFKEDIQKAQVSGQGDSLHEHIANLAGSPAIKKGILQTVKVVDELVKVMGRHKPENIVIEMARENQTTQKGQKNSRERMKRIEEGIKELGSQILKEHPVENTQLQNEKLYLYYLQNGRDMYVDQELDINRLSDYDVDHIVPQSFLKDDSIDNKVLTRSDKARGKSDNVPSEEVVKKMKNYWRQLLNAKLITQRKFDNLTKAERGGLSELDKAGFIKRQLVETRQITKHVAQILDSRMNTKYDENDKLIREVKVITLKSKLVSDFRKDFQFYKVREINNYHHAHDAYLNAVVGTALIKKYPKLESEFVYGDYKVYDVRKMIAKSEQEIGKATAKYFFYSNIMNFFKTEITLANGEIRKRPLIETNGETGEIVWDKGRDFATVRKVLSMPQVNIVKKTEVQTGGFSKESILPKRNSDKLIARKKDWDPKKYGGFDSPTVAYSVLVVAKVEKGKSKKLKSVKELLGITIMERSSFEKNPIDFLEAKGYKEVKKDLIIKLPKYSLFELENGRKRMLASAGELQKGNELALPSKYVNFLYLASHYEKLKGSPEDNEQKQLFVEQHKHYLDEIIEQISEFSKRVILADANLDKVLSAYNKHRDKPIREQAENIIHLFTLTNLGAPAAFKYFDTTIDRKRYTSTKEVLDATLIHQSITGLYETRIDLSQLGGDGGPAPGSSGGGGGMDLLKPLTVERKGVKIKGYWNSQADITCVPKDLLQGEEPVRQQNVTTIHGTQEGDVYYVNLKIDGRRINTEVIGTTLDYAIITPGDVPWILKKPLELTIKLDLEEQQGTLLNNSILSKKGKEELKQLFEKYSALWQSWENQVGHRRIRPHKIATGTVKPTPQKQYHINPKAKPDIQIVINDLLKQGVLIQKESTMNTPVYPVPKPNGRWRMVLDYRAVNKVTPLIAVQNQHSYGILGSLFKGRYKTTIDLSNGFWAHPIVPEDYWITAFTWQGKQYCWTVLPQGFLNSPGLFTGDVVDLLQGIPNVEVYVDDVYISHDSEKEHLEYLDILFNRLKEAGYIISLKKSNIANSIVDFLGFQITNEGRGLTDTFKEKLENITAPTTLKQLQSILGLLNFARNFIPDFTELIAPLYALIPKSTKNYVPWQIEHSTTLETLITKLNGAEYLQGRKGDKTLIMKVNASYTTGYIRYYNEGEKKPISYVSIVFSKTELKFTELEKLLTTVHKGLLKALDLSMGQNIHVYSPIVSMQNIQKTPQTAKKALASRWLSWLSYLEDPRIRFFYDPQMPALKDLPAVDTGKDNKKHPSNFQHIFYTDGSAITSPTKEGHLNAGMGIVYFINKDGNLQKQQEWSISLGNHTAQFAEIAAFEFALKKCLPLGGNILVVTDSNYVAKAYNEELDVWASNGFVNNRKKPLKHISKWKSVADLKRLRPDVVVTHEPGHQKLDSSPHAYGNNLADQLATQASFKVHAGKRTADGSEFEKRTADGSEFESPKKKAKVE

SEQ ID NO: 7440 - protein, 2174 aa, synthetic construct
MPAAKRVKLDGGDKKYSIGLDIGTNSVGWAVITDEYKVPSKKFKVLGNTDRHSIKKNLIGALLFDSGETAEATRLKRTARRRYTRRKNRICYLQEIFSNEMAKVDDSFFHRLEESFLVEEDKKHERHPIFGNIVDEVAYHEKYPTIYHLRKKLVDSTDKADLRLIYLALAHMIKFRGHFLIEGDLNPDNSDVDKLFIQLVQTYNQLFEENPINASGVDAKAILSARLSKSRRLENLIAQLPGEKKNGLFGNLIALSLGLTPNFKSNFDLAEDAKLQLSKDTYDDDLDNLLAQIGDQYADLFLAAKNLSDAILLSDILRVNTEITKAPLSASMIKRYDEHHQDLTLLKALVRQQLPEKYKEIFFDQSKNGYAGYIDGGASQEEFYKFIKPILEKMDGTEELLVKLNREDLLRKQRTFDNGSIPHQIHLGELHAILRRQEDFYPFLKDNREKIEKILTFRIPYYVGPLARGNSRFAWMTRKSEETITPWNFEEVVDKGASAQSFIERMTNFDKNLPNEKVLPKHSLLYEYFTVYNELTKVKYVTEGMRKPAFLSGEQKKAIVDLLFKTNRKVTVKQLKEDYFKKIECFDSVEISGVEDRFNASLGTYHDLLKIIKDKDFLDNEENEDILEDIVLTLTLFEDREMIEERLKTYAHLFDDKVMKQLKRRRYTGWGRLSRKLINGIRDKQSGKTILDFLKSDGFANRNFMQLIHDDSLTFKEDIQKAQVSGQGDSLHEHIANLAGSPAIKKGILQTVKVVDELVKVMGRHKPENIVIEMARENQTTQKGQKNSRERMKRIEEGIKELGSQILKEHPVENTQLQNEKLYLYYLQNGRDMYVDQELDINRLSDYDVDHIVPQSFLKDDSIDNKVLTRSDKARGKSDNVPSEEVVKKMKNYWRQLLNAKLITQRKFDNLTKAERGGLSELDKAGFIKRQLVETRQITKHVAQILDSRMNTKYDENDKLIREVKVITLKSKLVSDFRKDFQFYKVREINNYHHAHDAYLNAVVGTALIKKYPKLESEFVYGDYKVYDVRKMIAKSEQEIGKATAKYFFYSNIMNFFKTEITLANGEIRKRPLIETNGETGEIVWDKGRDFATVRKVLSMPQVNIVKKTEVQTGGFSKESILPKRNSDKLIARKKDWDPKKYGGFDSPTVAYSVLVVAKVEKGKSKKLKSVKELLGITIMERSSFEKNPIDFLEAKGYKEVKKDLIIKLPKYSLFELENGRKRMLASAGELQKGNELALPSKYVNFLYLASHYEKLKGSPEDNEQKQLFVEQHKHYLDEIIEQISEFSKRVILADANLDKVLSAYNKHRDKPIREQAENIIHLFTLTNLGAPAAFKYFDTTIDRKRYTSTKEVLDATLIHQSITGLYETRIDLSQLGGDGGPAPGSSGGGGGMNPLQLLQPLPAEIKGTKLLAHWNSGATITCIPESFLEDEQPIKKTLIKTIHGEKQQNVYYVTFKVKGRKVEAEVIASPYEYILLSPTDVPWLTQQPLQLTILVPLQEYQEKILSKTALPEDQKQQLKTLFVKYDNLWQHWENQVGHRKIRPHNIATGDYPPRPQKQYPINPKAKPSIQIVIDDLLKQGVLTPQNSTMNTPVYPVPKPDGRWRMVLDYREVNKTIPLTAAQNQHSAGILATIVRQKYKTTLDLANGFWAHPITPESYWLTAFTWQGKQYCWTRLPQGFLNSPALFNADVVDLLKEIPNVQVYVDDIYLSHDDPKEHVQQLEKVFQILLQAGYVVSLKKSEIGQKTVEFLGFNITKEGRGLTDTFKTKLLNITPPKDLKQLQSILGKLNFARNFIPNFAELVQPLYNLIAPAKGKYIEWSEENTKQLNMVIEALNTASNLEERLPEQRLVIKVNTSPSAGYVRYYNETGKKPIMYLNYVFSKAELKFSMLEKLLTTMHKALIKAMDLAMGQEILVYSPIVSMTKIQKTPLPERKALPIRWITWMTYLEDPRIQFHYDKTLPELKHIPDVYTSSQSPVKHPSQYEGVFYTDGSAIKSPDPTKSNNAGMGIVHATYKPEYQVLNQWSIPLGNHTAQMAEIAAVEFACKKALKIPGPVLVITDSFYVAESANKELPYWKSNGFVNNKKKPLKHISKWKSIAECLSMKPDITIQHEKGISLQIPVFILKGNALADKLATQGSYVVNAGKRTADGSEFEKRTADGSEFESPKKKAKVE

SEQ ID NO: 7441 - protein, 2125 aa, synthetic construct
MPAAKRVKLDGGDKKYSIGLDIGTNSVGWAVITDEYKVPSKKFKVLGNTDRHSIKKNLIGALLFDSGETAEATRLKRTARRRYTRRKNRICYLQEIFSNEMAKVDDSFFHRLEESFLVEEDKKHERHPIFGNIVDEVAYHEKYPTIYHLRKKLVDSTDKADLRLIYLALAHMIKFRGHFLIEGDLNPDNSDVDKLFIQLVQTYNQLFEENPINASGVDAKAILSARLSKSRRLENLIAQLPGEKKNGLFGNLIALSLGLTPNFKSNFDLAEDAKLQLSKDTYDDDLDNLLAQIGDQYADLFLAAKNLSDAILLSDILRVNTEITKAPLSASMIKRYDEHHQDLTLLKALVRQQLPEKYKEIFFDQSKNGYAGYIDGGASQEEFYKFIKPILEKMDGTEELLVKLNREDLLRKQRTFDNGSIPHQIHLGELHAILRRQEDFYPFLKDNREKIEKILTFRIPYYVGPLARGNSRFAWMTRKSEETITPWNFEEVVDKGASAQSFIERMTNFDKNLPNEKVLPKHSLLYEYFTVYNELTKVKYVTEGMRKPAFLSGEQKKAIVDLLFKTNRKVTVKQLKEDYFKKIECFDSVEISGVEDRFNASLGTYHDLLKIIKDKDFLDNEENEDILEDIVLTLTLFEDREMIEERLKTYAHLFDDKVMKQLKRRRYTGWGRLSRKLINGIRDKQSGKTILDFLKSDGFANRNFMQLIHDDSLTFKEDIQKAQVSGQGDSLHEHIANLAGSPAIKKGILQTVKVVDELVKVMGRHKPENIVIEMARENQTTQKGQKNSRERMKRIEEGIKELGSQILKEHPVENTQLQNEKLYLYYLQNGRDMYVDQELDINRLSDYDVDHIVPQSFLKDDSIDNKVLTRSDKARGKSDNVPSEEVVKKMKNYWRQLLNAKLITQRKFDNLTKAERGGLSELDKAGFIKRQLVETRQITKHVAQILDSRMNTKYDENDKLIREVKVITLKSKLVSDFRKDFQFYKVREINNYHHAHDAYLNAVVGTALIKKYPKLESEFVYGDYKVYDVRKMIAKSEQEIGKATAKYFFYSNIMNFFKTEITLANGEIRKRPLIETNGETGEIVWDKGRDFATVRKVLSMPQVNIVKKTEVQTGGFSKESILPKRNSDKLIARKKDWDPKKYGGFDSPTVAYSVLVVAKVEKGKSKKLKSVKELLGITIMERSSFEKNPIDFLEAKGYKEVKKDLIIKLPKYSLFELENGRKRMLASAGELQKGNELALPSKYVNFLYLASHYEKLKGSPEDNEQKQLFVEQHKHYLDEIIEQISEFSKRVILADANLDKVLSAYNKHRDKPIREQAENIIHLFTLTNLGAPAAFKYFDTTIDRKRYTSTKEVLDATLIHQSITGLYETRIDLSQLGGDGGPAPGSSGGGGGLLGRDLLTKLKAQIQFSTEGPQVTWEDRPAMCLVLNLEEEYRLHEKPVPPSIDPSWLQLFPMVWAEKAGMGLANQVPPVVVELKSDASPVAVRQYPMSKEAREGIRPHIQRFLDLGILVPCQSPWNTPLLPVKKPGTNDYRPVQDLREVNKRVQDIHPTVPNPYNLLSSLPPSHTWYSVLDLKDAFFCLKLHPNSQPLFAFEWRDPEKGNTGQLTWTRLPQGFKNSPTLFNEALHRDLASFRALNPQVVMLQYVDDLLVAAPTYRDCKEGTRRLLQELSKLGYRVSAKKAQLCREEVTYLGYLLKGGKRWLTPARKATVMKIPTPTTPRQVREFLGTAGFCRLWIPGFASLAAPLYPLTRPKVPFTWTEAHQEAFGRIKEALLSAPALALPDLTKPFALYVDEKEGVARGVLTQTLGPWRRPVAYLSKKLDPVASGWPTCLKAIAAVALLLKDADKLTLGQNVLVIAPHNLESIVRQPPDRWMTNARMTHYQSLLLNERVSFAPPAILNPATLLPVESDDTPIHICSEILAEETGTRPDLRDQPLPGVPAWYTDGSSFIMDGRRQAGAAIVDNKRTVWASNLPEGTSAQKAELIALTQALRLAEGKSINIYTDSRYAFATAHVHGAIYKQRGWLTSAGKDIKNKEEILALLEAIHLPKRVAIIHCPGHQRGTDPVATGNRKADEAAKQAAQSTRILTETTKNAGKRTADGSEFEKRTADGSEFESPKKKAKVE

SEQ ID NO: 7442 - protein, 2094 aa, synthetic construct
MPAAKRVKLDGGDKKYSIGLDIGTNSVGWAVITDEYKVPSKKFKVLGNTDRHSIKKNLIGALLFDSGETAEATRLKRTARRRYTRRKNRICYLQEIFSNEMAKVDDSFFHRLEESFLVEEDKKHERHPIFGNIVDEVAYHEKYPTIYHLRKKLVDSTDKADLRLIYLALAHMIKFRGHFLIEGDLNPDNSDVDKLFIQLVQTYNQLFEENPINASGVDAKAILSARLSKSRRLENLIAQLPGEKKNGLFGNLIALSLGLTPNFKSNFDLAEDAKLQLSKDTYDDDLDNLLAQIGDQYADLFLAAKNLSDAILLSDILRVNTEITKAPLSASMIKRYDEHHQDLTLLKALVRQQLPEKYKEIFFDQSKNGYAGYIDGGASQEEFYKFIKPILEKMDGTEELLVKLNREDLLRKQRTFDNGSIPHQIHLGELHAILRRQEDFYPFLKDNREKIEKILTFRIPYYVGPLARGNSRFAWMTRKSEETITPWNFEEVVDKGASAQSFIERMTNFDKNLPNEKVLPKHSLLYEYFTVYNELTKVKYVTEGMRKPAFLSGEQKKAIVDLLFKTNRKVTVKQLKEDYFKKIECFDSVEISGVEDRFNASLGTYHDLLKIIKDKDFLDNEENEDILEDIVLTLTLFEDREMIEERLKTYAHLFDDKVMKQLKRRRYTGWGRLSRKLINGIRDKQSGKTILDFLKSDGFANRNFMQLIHDDSLTFKEDIQKAQVSGQGDSLHEHIANLAGSPAIKKGILQTVKVVDELVKVMGRHKPENIVIEMARENQTTQKGQKNSRERMKRIEEGIKELGSQILKEHPVENTQLQNEKLYLYYLQNGRDMYVDQELDINRLSDYDVDHIVPQSFLKDDSIDNKVLTRSDKARGKSDNVPSEEVVKKMKNYWRQLLNAKLITQRKFDNLTKAERGGLSELDKAGFIKRQLVETRQITKHVAQILDSRMNTKYDENDKLIREVKVITLKSKLVSDFRKDFQFYKVREINNYHHAHDAYLNAVVGTALIKKYPKLESEFVYGDYKVYDVRKMIAKSEQEIGKATAKYFFYSNIMNFFKTEITLANGEIRKRPLIETNGETGEIVWDKGRDFATVRKVLSMPQVNIVKKTEVQTGGFSKESILPKRNSDKLIARKKDWDPKKYGGFDSPTVAYSVLVVAKVEKGKSKKLKSVKELLGITIMERSSFEKNPIDFLEAKGYKEVKKDLIIKLPKYSLFELENGRKRMLASAGELQKGNELALPSKYVNFLYLASHYEKLKGSPEDNEQKQLFVEQHKHYLDEIIEQISEFSKRVILADANLDKVLSAYNKHRDKPIREQAENIIHLFTLTNLGAPAAFKYFDTTIDRKRYTSTKEVLDATLIHQSITGLYETRIDLSQLGGDGGPAPGSSGGGGGTLNLEDEYRLYETSAEPEVSPGSTWLSDFPQAWAETGGMGLAVRQAPLIIPLKATSTPVSIKQYPMSQEAKLGIKPHIQRLLDQGILVPCQSPWNTPLLPVKKPGTNDYRPVQDLREVNKRVEDIHPTVPNPYNLLSGLPPSHRWYTVLDLKDAFFCLRLHPTSQPLFAFEWRDPGMGISGQLTWTRLPQGFKNSPTLFNEALHRDLADFRIQHPDLILLQYVDDILLAATSELDCQQGTRALLLTLGNLGYRASAKKAQLCQKQVKYLGYLLKEGQRWLTEARKETVMGQPTPKTPRQLREFLGTAGFCRLWIPGFAEMAAPLYPLTKPGTLFNWGPDQQKAYQEIKQALLTAPALGLPDLTKPFELFVDEKQGYAKGVLTQKLGPWRRPVAYLSKKLDPVAAGWPPCLRMVAAIAVLRKDAGKLTMGQPLVILAPHAVEALVKQPPDRWLSNARMTHYQAMLLDTDRVQFGPVVALNPATLLPLPEEGAPHDCLEILAETHGTRPDLTDQPIPDADHTWYTDGSSFLQEGQRKAGAAVTTETEVIWARALPAGTSAQRAELIALTQALKMAEGKRLNVYTDSRYAFATAHIHGEIYRRRGWLTSEGREIKNKSEILALLKALFLPKRLSIIHCLGHQKGDSAEARGNRLADQAAREAAIKTPPDTSTLLAGKRTADGSEFEKRTADGSEFESPKKKAKVE

SEQ ID NO: 7443 - protein, 2094 aa, synthetic construct; identical to SEQ ID NO: 4533

SEQ ID NO: 7444 - protein, 2094 aa, synthetic construct
MPAAKRVKLDGGDKKYSIGLDIGTNSVGWAVITDEYKVPSKKFKVLGNTDRHSIKKNLIGALLFDSGETAEATRLKRTARRRYTRRKNRICYLQEIFSNEMAKVDDSFFHRLEESFLVEEDKKHERHPIFGNIVDEVAYHEKYPTIYHLRKKLVDSTDKADLRLIYLALAHMIKFRGHFLIEGDLNPDNSDVDKLFIQLVQTYNQLFEENPINASGVDAKAILSARLSKSRRLENLIAQLPGEKKNGLFGNLIALSLGLTPNFKSNFDLAEDAKLQLSKDTYDDDLDNLLAQIGDQYADLFLAAKNLSDAILLSDILRVNTEITKAPLSASMIKRYDEHHQDLTLLKALVRQQLPEKYKEIFFDQSKNGYAGYIDGGASQEEFYKFIKPILEKMDGTEELLVKLNREDLLRKQRTFDNGSIPHQIHLGELHAILRRQEDFYPFLKDNREKIEKILTFRIPYYVGPLARGNSRFAWMTRKSEETITPWNFEEVVDKGASAQSFIERMTNFDKNLPNEKVLPKHSLLYEYFTVYNELTKVKYVTEGMRKPAFLSGEQKKAIVDLLFKTNRKVTVKQLKEDYFKKIECFDSVEISGVEDRFNASLGTYHDLLKIIKDKDFLDNEENEDILEDIVLTLTLFEDREMIEERLKTYAHLFDDKVMKQLKRRRYTGWGRLSRKLINGIRDKQSGKTILDFLKSDGFANRNFMQLIHDDSLTFKEDIQKAQVSGQGDSLHEHIANLAGSPAIKKGILQTVKVVDELVKVMGRHKPENIVIEMARENQTTQKGQKNSRERMKRIEEGIKELGSQILKEHPVENTQLQNEKLYLYYLQNGRDMYVDQELDINRLSDYDVDHIVPQSFLKDDSIDNKVLTRSDKARGKSDNVPSEEVVKKMKNYWRQLLNAKLITQRKFDNLTKAERGGLSELDKAGFIKRQLVETRQITKHVAQILDSRMNTKYDENDKLIREVKVITLKSKLVSDFRKDFQFYKVREINNYHHAHDAYLNAVVGTALIKKYPKLESEFVYGDYKVYDVRKMIAKSEQEIGKATAKYFFYSNIMNFFKTEITLANGEIRKRPLIETNGETGEIVWDKGRDFATVRKVLSMPQVNIVKKTEVQTGGFSKESILPKRNSDKLIARKKDWDPKKYGGFDSPTVAYSVLVVAKVEKGKSKKLKSVKELLGITIMERSSFEKNPIDFLEAKGYKEVKKDLIIKLPKYSLFELENGRKRMLASAGELQKGNELALPSKYVNFLYLASHYEKLKGSPEDNEQKQLFVEQHKHYLDEIIEQISEFSKRVILADANLDKVLSAYNKHRDKPIREQAENIIHLFTLTNLGAPAAFKYFDTTIDRKRYTSTKEVLDATLIHQSITGLYETRIDLSQLGGDGGPAPGSSGGGGGTLNIEDEHRLHETSKEPDVSLGSTWLSDFPQAWAETGGMGLAVRQAPLIIPLKATSTPVSIKQYPMSQEARLGIKPHIQRLLDQGILVPCQSPWNTPLLPVKKPGTNDYRPVQDLREVNKRVEDIHPTVPNPYNLLSGLPPSHQWYTVLDLKDAFFCLRLHPTSQPLFAFEWRDPEMGISGQLTWTRLPQGFKNSPTLFNEALHRDLADFRIQHPDLILLQYVDDLLLAATSELDCQQGTRALLQTLGNLGYRASAKKAQICQKQVKYLGYLLKEGQRWLTEARKETVMGQPTPKTPRQLREFLGTAGFCRLWIPGFAEMAAPLYPLTKPGTLFNWGPDQQKAYQEIKQALLTAPALGLPDLTKPFELFVDEKQGYAKGVLTQKLGPWRRPVAYLSKKLDPVAAGWPPCLRMVAAIAVLTKDAGKLTMGQPLVILAPHAVEALVKQPPDRWLSNARMTHYQALLLDTDRVQFGPVVALNPATLLPLPEEGLQHNCLDILAEAHGTRPDLTDQPLPDADHTWYTDGSSLLQEGQRKAGAAVTTETEVIWAKALPAGTSAQRAELIALTQALKMAEGKKLNVYTDSRYAFATAHIHGEIYRRRGWLTSEGKEIKNKDEILALLKALFLPKRLSIIHCPGHQKGHSAEARGNRMADQAARKAAITETPDTSTLLAGKRTADGSEFEKRTADGSEFESPKKKAKVE

SEQ ID NO: 7445 - protein, 2094 aa, synthetic construct; identical to SEQ ID NO: 7444

SEQ ID NO: 7446 - protein, 2174 aa, synthetic construct
MPAAKRVKLDGGDKKYSIGLDIGTNSVGWAVITDEYKVPSKKFKVLGNTDRHSIKKNLIGALLFDSGETAEATRLKRTARRRYTRRKNRICYLQEIFSNEMAKVDDSFFHRLEESFLVEEDKKHERHPIFGNIVDEVAYHEKYPTIYHLRKKLVDSTDKADLRLIYLALAHMIKFRGHFLIEGDLNPDNSDVDKLFIQLVQTYNQLFEENPINASGVDAKAILSARLSKSRRLENLIAQLPGEKKNGLFGNLIALSLGLTPNFKSNFDLAEDAKLQLSKDTYDDDLDNLLAQIGDQYADLFLAAKNLSDAILLSDILRVNTEITKAPLSASMIKRYDEHHQDLTLLKALVRQQLPEKYKEIFFDQSKNGYAGYIDGGASQEEFYKFIKPILEKMDGTEELLVKLNREDLLRKQRTFDNGSIPHQIHLGELHAILRRQEDFYPFLKDNREKIEKILTFRIPYYVGPLARGNSRFAWMTRKSEETITPWNFEEVVDKGASAQSFIERMTNFDKNLPNEKVLPKHSLLYEYFTVYNELTKVKYVTEGMRKPAFLSGEQKKAIVDLLFKTNRKVTVKQLKEDYFKKIECFDSVEISGVEDRFNASLGTYHDLLKIIKDKDFLDNEENEDILEDIVLTLTLFEDREMIEERLKTYAHLFDDKVMKQLKRRRYTGWGRLSRKLINGIRDKQSGKTILDFLKSDGFANRNFMQLIHDDSLTFKEDIQKAQVSGQGDSLHEHIANLAGSPAIKKGILQTVKVVDELVKVMGRHKPENIVIEMARENQTTQKGQKNSRERMKRIEEGIKELGSQILKEHPVENTQLQNEKLYLYYLQNGRDMYVDQELDINRLSDYDVDHIVPQSFLKDDSIDNKVLTRSDKARGKSDNVPSEEVVKKMKNYWRQLLNAKLITQRKFDNLTKAERGGLSELDKAGFIKRQLVETRQITKHVAQILDSRMNTKYDENDKLIREVKVITLKSKLVSDFRKDFQFYKVREINNYHHAHDAYLNAVVGTALIKKYPKLESEFVYGDYKVYDVRKMIAKSEQEIGKATAKYFFYSNIMNFFKTEITLANGEIRKRPLIETNGETGEIVWDKGRDFATVRKVLSMPQVNIVKKTEVQTGGFSKESILPKRNSDKLIARKKDWDPKKYGGFDSPTVAYSVLVVAKVEKGKSKKLKSVKELLGITIMERSSFEKNPIDFLEAKGYKEVKKDLIIKLPKYSLFELENGRKRMLASAGELQKGNELALPSKYVNFLYLASHYEKLKGSPEDNEQKQLFVEQHKHYLDEIIEQISEFSKRVILADANLDKVLSAYNKHRDKPIREQAENIIHLFTLTNLGAPAAFKYFDTTIDRKRYTSTKEVLDATLIHQSITGLYETRIDLSQLGGDGGPAPGSSGGGGGMDPLQLLQPLEAEIKGTKLKAHWNSGATITCVPQAFLEEEVPIKNIWIKTIHGEKEQPVYYLTFKIQGRKVEAEVISSPYDYILVSPSDIPWLMKKPLQLTTLVPLQEYEERLLKQTMLTGSYKEKLQSLFLKYDALWQHWENQVGHRRIKPHHIATGTVNPRPQKQYPINPKAKASIQTVINDLLKQGVLIQQNSIMNTPVYPVPKPDGKWRMVLDYREVNKTIPLIAAQNQHSAGILSSIFRGKYKTTLDLSNGFWAHSITPESYWLTAFTWLGQQYCWTRLPQGFLNSPALFNADVVDLLKEVPNVQVYVDDIYISHDDPREHLEQLEKVFSLLLNAGYVVSLKKSEIAQHEVEFLGFNITKEGRGLTETFKQKLLNITPPRDLKQLQSILGKLNFARNFIPNFSELVKPLYNIIATAPGKYITWTTDNSQQLQNIISMLNSAENLEERNPEVRLIMKVNTSPSAGYIRFYNEFAKRPIMYLNYVYTKAEVKFTNTEKLLTTIHKGLIKALDLGMGQEILVYSPIVSMTKIQKTPLPERKALPIRWITWMSYLEDPRIQFHYDKTLPELQQVPTVTDDIIAKIKHPSEFSMVFYTDGSAIKHPNVNKSHNAGMGIAQVQFKPEFTVINTWSIPLGDHTAQLAEVAAVEFACKKALKIDGPVLIVTDSFYVAESVNKELPYWQSNGFFNNKKKPLKHVSKWKSIADCIQLKPDIIIIHEKGHQPTASTFHTEGNNLADKLATQGSYVVNAGKRTADGSEFEKRTADGSEFESPKKKAKVE

SEQ ID NO: 7447 - protein, 2094 aa, synthetic construct
MPAAKRVKLDGGDKKYSIGLDIGTNSVGWAVITDEYKVPSKKFKVLGNTDRHSIKKNLIGALLFDSGETAEATRLKRTARRRYTRRKNRICYLQEIFSNEMAKVDDSFFHRLEESFLVEEDKKHERHPIFGNIVDEVAYHEKYPTIYHLRKKLVDSTDKADLRLIYLALAHMIKFRGHFLIEGDLNPDNSDVDKLFIQLVQTYNQLFEENPINASGVDAKAILSARLSKSRRLENLIAQLPGEKKNGLFGNLIALSLGLTPNFKSNFDLAEDAKLQLSKDTYDDDLDNLLAQIGDQYADLFLAAKNLSDAILLSDILRVNTEITKAPLSASMIKRYDEHHQDLTLLKALVRQQLPEKYKEIFFDQSKNGYAGYIDGGASQEEFYKFIKPILEKMDGTEELLVKLNREDLLRKQRTFDNGSIPHQIHLGELHAILRRQEDFYPFLKDNREKIEKILTFRIPYYVGPLARGNSRFAWMTRKSEETITPWNFEEVVDKGASAQSFIERMTNFDKNLPNEKVLPKHSLLYEYFTVYNELTKVKYVTEGMRKPAFLSGEQKKAIVDLLFKTNRKVTVKQLKEDYFKKIECFDSVEISGVEDRFNASLGTYHDLLKIIKDKDFLDNEENEDILEDIVLTLTLFEDREMIEERLKTYAHLFDDKVMKQLKRRRYTGWGRLSRKLINGIRDKQSGKTILDFLKSDGFANRNFMQLIHDDSLTFKEDIQKAQVSGQGDSLHEHIANLAGSPAIKKGILQTVKVVDELVKVMGRHKPENIVIEMARENQTTQKGQKNSRERMKRIEEGIKELGSQILKEHPVENTQLQNEKLYLYYLQNGRDMYVDQELDINRLSDYDVDHIVPQSFLKDDSIDNKVLTRSDKARGKSDNVPSEEVVKKMKNYWRQLLNAKLITQRKFDNLTKAERGGLSELDKAGFIKRQLVETRQITKHVAQILDSRMNTKYDENDKLIREVKVITLKSKLVSDFRKDFQFYKVREINNYHHAHDAYLNAVVGTALIKKYPKLESEFVYGDYKVYDVRKMIAKSEQEIGKATAKYFFYSNIMNFFKTEITLANGEIRKRPLIETNGETGEIVWDKGRDFATVRKVLSMPQVNIVKKTEVQTGGFSKESILPKRNSDKLIARKKDWDPKKYGGFDSPTVAYSVLVVAKVEKGKSKKLKSVKELLGITIMERSSFEKNPIDFLEAKGYKEVKKDLIIKLPKYSLFELENGRKRMLASAGELQKGNELALPSKYVNFLYLASHYEKLKGSPEDNEQKQLFVEQHKHYLDEIIEQISEFSKRVILADANLDKVLSAYNKHRDKPIREQAENIIHLFTLTNLGAPAAFKYFDTTIDRKRYTSTKEVLDATLIHQSITGLYETRIDLSQLGGDGGPAPGSSGGGGGTLNIEDEYRLHETSKEPDVPLGSTWLSDFPQAWAETGGMGLAVRQAPLIIPLKATSTPVSIKQYPMSQEARLGIKPHIQRLLDQGILVPCQSPWNTPLLPVKKPGTNDYRPVQDLREVNKRVEDIHPTVPNPYNLLSGLPPSHQWYTVLDLKDAFFCLRLHPTSQPLFAFEWRDPEMGISGQLTWTRLPQGFKNSPTLFNEALHRDLADFRIQHPDLILLQYVDDLLLAATSEQDCQRGTRALLQTLGNLGYRASAKKAQICQKQVKYLGYLLKEGQRWLTEARKETVMGQPTPKTPRQLREFLGTAGFCRLWIPGFAEMAAPLYPLTKPGTLFNWGPDQQKAYQEIKQALLTAPALGLPDLTKPFELFVDEKQGYAKGVLTQKLGPWRRPVAYLSKKLDPVAAGWPPCLRMVAAIAVLTKDAGKLTMGQPLVILAPHAVEALVKQPPDRWLSNARMTHYQAMLLDTDRVQFGPVVALNPATLLPLPEKEAPHDCLEILAETHGTRPDLTDQPIPDADYTWYTDGSSFLQEGQRRAGAAVTTETEVIWARALPAGTSAQRAELIALTQALKMAEGKKLNVYTDSRYAFATAHVHGEIYRRRGWLTSEGREIKNKNEILALLKALFLPKRLSIIHCPGHQKGNSAEARGNRMADQAAREAAMKAVLETSTLLAGKRTADGSEFEKRTADGSEFESPKKKAKVE

SEQ ID NO: 7448 - protein, 2087 aa, synthetic construct
MPAAKRVKLDGGDKKYSIGLDIGTNSVGWAVITDEYKVPSKKFKVLGNTDRHSIKKNLIGALLFDSGETAEATRLKRTARRRYTRRKNRICYLQEIFSNEMAKVDDSFFHRLEESFLVEEDKKHERHPIFGNIVDEVAYHEKYPTIYHLRKKLVDSTDKADLRLIYLALAHMIKFRGHFLIEGDLNPDNSDVDKLFIQLVQTYNQLFEENPINASGVDAKAILSARLSKSRRLENLIAQLPGEKKNGLFGNLIALSLGLTPNFKSNFDLAEDAKLQLSKDTYDDDLDNLLAQIGDQYADLFLAAKNLSDAILLSDILRVNTEITKAPLSASMIKRYDEHHQDLTLLKALVRQQLPEKYKEIFFDQSKNGYAGYIDGGASQEEFYKFIKPILEKMDGTEELLVKLNREDLLRKQRTFDNGSIPHQIHLGELHAILRRQEDFYPFLKDNREKIEKILTFRIPYYVGPLARGNSRFAWMTRKSEETITPWNFEEVVDKGASAQSFIERMTNFDKNLPNEKVLPKHSLLYEYFTVYNELTKVKYVTEGMRKPAFLSGEQKKAIVDLLFKTNRKVTVKQLKEDYFKKIECFDSVEISGVEDRFNASLGTYHDLLKIIKDKDFLDNEENEDILEDIVLTLTLFEDREMIEERLKTYAHLFDDKVMKQLKRRRYTGWGRLSRKLINGIRDKQSGKTILDFLKSDGFANRNFMQLIHDDSLTFKEDIQKAQVSGQGDSLHEHIANLAGSPAIKKGILQTVKVVDELVKVMGRHKPENIVIEMARENQTTQKGQKNSRERMKRIEEGIKELGSQILKEHPVENTQLQNEKLYLYYLQNGRDMYVDQELDINRLSDYDVDHIVPQSFLKDDSIDNKVLTRSDKARGKSDNVPSEEVVKKMKNYWRQLLNAKLITQRKFDNLTKAERGGLSELDKAGFIKRQLVETRQITKHVAQILDSRMNTKYDENDKLIREVKVITLKSKLVSDFRKDFQFYKVREINNYHHAHDAYLNAVVGTALIKKYPKLESEFVYGDYKVYDVRKMIAKSEQEIGKATAKYFFYSNIMNFFKTEITLANGEIRKRPLIETNGETGEIVWDKGRDFATVRKVLSMPQVNIVKKTEVQTGGFSKESILPKRNSDKLIARKKDWDPKKYGGFDSPTVAYSVLVVAKVEKGKSKKLKSVKELLGITIMERSSFEKNPIDFLEAKGYKEVKKDLIIKLPKYSLFELENGRKRMLASAGELQKGNELALPSKYVNFLYLASHYEKLKGSPEDNEQKQLFVEQHKHYLDEIIEQISEFSKRVILADANLDKVLSAYNKHRDKPIREQAENIIHLFTLTNLGAPAAFKYFDTTIDRKRYTSTKEVLDATLIHQSITGLYETRIDLSQLGGDGGGGGEAAAKPAPGGVPWILKKPLELTIKLDLEEQQGTLLNNSILSKKGKEELKQLFEKYSALWQSWENQVGHRRIRPHKIATGTVKPTPQKQYHINPKAKPDIQIVINDLLKQGVLIQKESTMNTPVYPVPKPNGRWRMVLDYRAVNKVTPLIAVQNQHSYGILGSLFKGRYKTTIDLSNGFWAHPIVPEDYWITAFTWQGKQYCWTVLPQGFLNSPGLFTGDVVDLLQGIPNVEVYVDDVYISHDSEKEHLEYLDILFNRLKEAGYIISLKKSNIANSIVDFLGFQITNEGRGLTDTFKEKLENITAPTTLKQLQSILGLLNFARNFIPDFTELIAPLYALIPKSTKNYVPWQIEHSTTLETLITKLNGAEYLQGRKGDKTLIMKVNASYTTGYIRYYNEGEKKPISYVSIVFSKTELKFTELEKLLTTVHKGLLKALDLSMGQNIHVYSPIVSMQNIQKTPQTAKKALASRWLSWLSYLEDPRIRFFYDPQMPALKDLPAVDTGKDNKKHPSNFQHIFYTDGSAITSPTKEGHLNAGMGIVYFINKDGNLQKQQEWSISLGNHTAQFAEIAAFEFALKKCLPLGGNILVVTDSNYVAKAYNEELDVWASNGFVNNRKKPLKHISKWKSVADLKRLRPDVVVTHEPGHQKLDSSPHAYGNNLADQLATQASFKVHAGKRTADGSEFEKRTADGSEFESPKKKAKVE

SEQ ID NO: 7449 - protein, 2087 aa, synthetic construct
MPAAKRVKLDGGDKKYSIGLDIGTNSVGWAVITDEYKVPSKKFKVLGNTDRHSIKKNLIGALLFDSGETAEATRLKRTARRRYTRRKNRICYLQEIFSNEMAKVDDSFFHRLEESFLVEEDKKHERHPIFGNIVDEVAYHEKYPTIYHLRKKLVDSTDKADLRLIYLALAHMIKFRGHFLIEGDLNPDNSDVDKLFIQLVQTYNQLFEENPINASGVDAKAILSARLSKSRRLENLIAQLPGEKKNGLFGNLIALSLGLTPNFKSNFDLAEDAKLQLSKDTYDDDLDNLLAQIGDQYADLFLAAKNLSDAILLSDILRVNTEITKAPLSASMIKRYDEHHQDLTLLKALVRQQLPEKYKEIFFDQSKNGYAGYIDGGASQEEFYKFIKPILEKMDGTEELLVKLNREDLLRKQRTFDNGSIPHQIHLGELHAILRRQEDFYPFLKDNREKIEKILTFRIPYYVGPLARGNSRFAWMTRKSEETITPWNFEEVVDKGASAQSFIERMTNFDKNLPNEKVLPKHSLLYEYFTVYNELTKVKYVTEGMRKPAFLSGEQKKAIVDLLFKTNRKVTVKQLKEDYFKKIECFDSVEISGVEDRFNASLGTYHDLLKIIKDKDFLDNEENEDILEDIVLTLTLFEDREMIEERLKTYAHLFDDKVMKQLKRRRYTGWGRLSRKLINGIRDKQSGKTILDFLKSDGFANRNFMQLIHDDSLTFKEDIQKAQVSGQGDSLHEHIANLAGSPAIKKGILQTVKVVDELVKVMGRHKPENIVIEMARENQTTQKGQKNSRERMKRIEEGIKELGSQILKEHPVENTQLQNEKLYLYYLQNGRDMYVDQELDINRLSDYDVDHIVPQSFLKDDSIDNKVLTRSDKARGKSDNVPSEEVVKKMKNYWRQLLNAKLITQRKFDNLTKAERGGLSELDKAGFIKRQLVETRQITKHVAQILDSRMNTKYDENDKLIREVKVITLKSKLVSDFRKDFQFYKVREINNYHHAHDAYLNAVVGTALIKKYPKLESEFVYGDYKVYDVRKMIAKSEQEIGKATAKYFFYSNIMNFFKTEITLANGEIRKRPLIETNGETGEIVWDKGRDFATVRKVLSMPQVNIVKKTEVQTGGFSKESILPKRNSDKLIARKKDWDPKKYGGFDSPTVAYSVLVVAKVEKGKSKKLKSVKELLGITIMERSSFEKNPIDFLEAKGYKEVKKDLIIKLPKYSLFELENGRKRMLASAGELQKGNELALPSKYVNFLYLASHYEKLKGSPEDNEQKQLFVEQHKHYLDEIIEQISEFSKRVILADANLDKVLSAYNKHRDKPIREQAENIIHLFTLTNLGAPAAFKYFDTTIDRKRYTSTKEVLDATLIHQSITGLYETRIDLSQLGGDGGGGGEAAAKPAPGGVPWILKKPLELTIKLDLEEQQGTLLNNSILSKKGKEELKQLFEKYSALWQSWENQVGHRRIRPHKIATGTVKPTPQKQYHINPKAKPDIQIVINDLLKQGVLIQKESTMNTPVYPVPKPNGRWRMVLDYRAVNKVTPLIAVQNQHSYGILGSLFKGRYKTTIDLSNGFWAHPIVPEDYWITAFTWQGKQYCWTVLPQGFLNSPGLFNGDVVDLLQGIPNVEVYVDDVYISHDSEKEHLEYLDILFNRLKEAGYIISLKKSNIANSIVDFLGFQITNEGRGLTDTFKEKLENITAPTTLKQLQSILGLLNFARNFIPDFTELIAPLYALIPKSPKNYVPWQIEHSTTLETLITKLNGAEYLQGRKGDKTLIMKVNASYTTGYIRYYNEGEKKPISYVSIVFSKTELKFTELEKLLTTVHKGLLKALDLSMGQNIHVYSPIVSMQNIQKTPQTAKKALASRWLSWLSYLEDPRIRFFYDPQMPALKDLPAVDTGKDNKKHPSNFQHIFYTDGSAITSPTKEGHLNAGMGIVYFINKDGNLQKQQEWSISLGNHTAQFAEIAAFEFALKKCLPLGGNILVVTDSNYVAKAYNEELDVWASNGFVNNRKKPLKHISKWKSVADLKRLRPDVVVTHEPGHQKLDSSPHAYGNNLADQLATQASFKVHAGKRTADGSEFEKRTADGSEFESPKKKAKVE

SEQ ID NO: 7450 - protein, 2176 aa, synthetic construct
MPAAKRVKLDGGDKKYSIGLDIGTNSVGWAVITDEYKVPSKKFKVLGNTDRHSIKKNLIGALLFDSGETAEATRLKRTARRRYTRRKNRICYLQEIFSNEMAKVDDSFFHRLEESFLVEEDKKHERHPIFGNIVDEVAYHEKYPTIYHLRKKLVDSTDKADLRLIYLALAHMIKFRGHFLIEGDLNPDNSDVDKLFIQLVQTYNQLFEENPINASGVDAKAILSARLSKSRRLENLIAQLPGEKKNGLFGNLIALSLGLTPNFKSNFDLAEDAKLQLSKDTYDDDLDNLLAQIGDQYADLFLAAKNLSDAILLSDILRVNTEITKAPLSASMIKRYDEHHQDLTLLKALVRQQLPEKYKEIFFDQSKNGYAGYIDGGASQEEFYKFIKPILEKMDGTEELLVKLNREDLLRKQRTFDNGSIPHQIHLGELHAILRRQEDFYPFLKDNREKIEKILTFRIPYYVGPLARGNSRFAWMTRKSEETITPWNFEEVVDKGASAQSFIERMTNFDKNLPNEKVLPKHSLLYEYFTVYNELTKVKYVTEGMRKPAFLSGEQKKAIVDLLFKTNRKVTVKQLKEDYFKKIECFDSVEISGVEDRFNASLGTYHDLLKIIKDKDFLDNEENEDILEDIVLTLTLFEDREMIEERLKTYAHLFDDKVMKQLKRRRYTGWGRLSRKLINGIRDKQSGKTILDFLKSDGFANRNFMQLIHDDSLTFKEDIQKAQVSGQGDSLHEHIANLAGSPAIKKGILQTVKVVDELVKVMGRHKPENIVIEMARENQTTQKGQKNSRERMKRIEEGIKELGSQILKEHPVENTQLQNEKLYLYYLQNGRDMYVDQELDINRLSDYDVDHIVPQSFLKDDSIDNKVLTRSDKARGKSDNVPSEEVVKKMKNYWRQLLNAKLITQRKFDNLTKAERGGLSELDKAGFIKRQLVETRQITKHVAQILDSRMNTKYDENDKLIREVKVITLKSKLVSDFRKDFQFYKVREINNYHHAHDAYLNAVVGTALIKKYPKLESEFVYGDYKVYDVRKMIAKSEQEIGKATAKYFFYSNIMNFFKTEITLANGEIRKRPLIETNGETGEIVWDKGRDFATVRKVLSMPQVNIVKKTEVQTGGFSKESILPKRNSDKLIARKKDWDPKKYGGFDSPTVAYSVLVVAKVEKGKSKKLKSVKELLGITIMERSSFEKNPIDFLEAKGYKEVKKDLIIKLPKYSLFELENGRKRMLASAGELQKGNELALPSKYVNFLYLASHYEKLKGSPEDNEQKQLFVEQHKHYLDEIIEQISEFSKRVILADANLDKVLSAYNKHRDKPIREQAENIIHLFTLTNLGAPAAFKYFDTTIDRKRYTSTKEVLDATLIHQSITGLYETRIDLSQLGGDGGGGGEAAAKPAPGGMNPLQLLQPLPAEIKGTKLLAHWNSGATITCIPESFLEDEQPIKKTLIKTIHGEKQQNVYYVTFKVKGRKVEAEVIASPYEYILLSPTDVPWLTQQPLQLTILVPLQEYQEKILSKTALPEDQKQQLKTLFVKYDNLWQHWENQVGHRKIRPHNIATGDYPPRPQKQYPINPKAKPSIQIVIDDLLKQGVLTPQNSTMNTPVYPVPKPDGRWRMVLDYREVNKTIPLTAAQNQHSAGILATIVRQKYKTTLDLANGFWAHPITPESYWLTAFTWQGKQYCWTRLPQGFLNSPALFNADVVDLLKEIPNVQVYVDDIYLSHDDPKEHVQQLEKVFQILLQAGYVVSLKKSEIGQKTVEFLGFNITKEGRGLTDTFKTKLLNITPPKDLKQLQSILGKLNFARNFIPNFAELVQPLYNLIAPAKGKYIEWSEENTKQLNMVIEALNTASNLEERLPEQRLVIKVNTSPSAGYVRYYNETGKKPIMYLNYVFSKAELKFSMLEKLLTTMHKALIKAMDLAMGQEILVYSPIVSMTKIQKTPLPERKALPIRWITWMTYLEDPRIQFHYDKTLPELKHIPDVYTSSQSPVKHPSQYEGVFYTDGSAIKSPDPTKSNNAGMGIVHATYKPEYQVLNQWSIPLGNHTAQMAEIAAVEFACKKALKIPGPVLVITDSFYVAESANKELPYWKSNGFVNNKKKPLKHISKWKSIAECLSMKPDITIQHEKGISLQIPVFILKGNALADKLATQGSYVVNAGKRTADGSEFEKRTADGSEFESPKKKAKVE

SEQ ID NO: 7451 - protein, 2127 aa, synthetic construct
MPAAKRVKLDGGDKKYSIGLDIGTNSVGWAVITDEYKVPSKKFKVLGNTDRHSIKKNLIGALLFDSGETAEATRLKRTARRRYTRRKNRICYLQEIFSNEMAKVDDSFFHRLEESFLVEEDKKHERHPIFGNIVDEVAYHEKYPTIYHLRKKLVDSTDKADLRLIYLALAHMIKFRGHFLIEGDLNPDNSDVDKLFIQLVQTYNQLFEENPINASGVDAKAILSARLSKSRRLENLIAQLPGEKKNGLFGNLIALSLGLTPNFKSNFDLAEDAKLQLSKDTYDDDLDNLLAQIGDQYADLFLAAKNLSDAILLSDILRVNTEITKAPLSASMIKRYDEHHQDLTLLKALVRQQLPEKYKEIFFDQSKNGYAGYIDGGASQEEFYKFIKPILEKMDGTEELLVKLNREDLLRKQRTFDNGSIPHQIHLGELHAILRRQEDFYPFLKDNREKIEKILTFRIPYYVGPLARGNSRFAWMTRKSEETITPWNFEEVVDKGASAQSFIERMTNFDKNLPNEKVLPKHSLLYEYFTVYNELTKVKYVTEGMRKPAFLSGEQKKAIVDLLFKTNRKVTVKQLKEDYFKKIECFDSVEISGVEDRFNASLGTYHDLLKIIKDKDFLDNEENEDILEDIVLTLTLFEDREMIEERLKTYAHLFDDKVMKQLKRRRYTGWGRLSRKLINGIRDKQSGKTILDFLKSDGFANRNFMQLIHDDSLTFKEDIQKAQVSGQGDSLHEHIANLAGSPAIKKGILQTVKVVDELVKVMGRHKPENIVIEMARENQTTQKGQKNSRERMKRIEEGIKELGSQILKEHPVENTQLQNEKLYLYYLQNGRDMYVDQELDINRLSDYDVDHIVPQSFLKDDSIDNKVLTRSDKARGKSDNVPSEEVVKKMKNYWRQLLNAKLITQRKFDNLTKAERGGLSELDKAGFIKRQLVETRQITKHVAQILDSRMNTKYDENDKLIREVKVITLKSKLVSDFRKDFQFYKVREINNYHHAHDAYLNAVVGTALIKKYPKLESEFVYGDYKVYDVRKMIAKSEQEIGKATAKYFFYSNIMNFFKTEITLANGEIRKRPLIETNGETGEIVWDKGRDFATVRKVLSMPQVNIVKKTEVQTGGFSKESILPKRNSDKLIARKKDWDPKKYGGFDSPTVAYSVLVVAKVEKGKSKKLKSVKELLGITIMERSSFEKNPIDFLEAKGYKEVKKDLIIKLPKYSLFELENGRKRMLASAGELQKGNELALPSKYVNFLYLASHYEKLKGSPEDNEQKQLFVEQHKHYLDEIIEQISEFSKRVILADANLDKVLSAYNKHRDKPIREQAENIIHLFTLTNLGAPAAFKYFDTTIDRKRYTSTKEVLDATLIHQSITGLYETRIDLSQLGGDGGGGGEAAAKPAPGGLLGRDLLTKLKAQIQFSTEGPQVTWEDRPAMCLVLNLEEEYRLHEKPVPPSIDPSWLQLFPMVWAEKAGMGLANQVPPVVVELKSDASPVAVRQYPMSKEAREGIRPHIQRFLDLGILVPCQSPWNTPLLPVKKPGTNDYRPVQDLREVNKRVQDIHPTVPNPYNLLSSLPPSHTWYSVLDLKDAFFCLKLHPNSQPLFAFEWRDPEKGNTGQLTWTRLPQGFKNSPTLFNEALHRDLASFRALNPQVVMLQYVDDLLVAAPTYRDCKEGTRRLLQELSKLGYRVSAKKAQLCREEVTYLGYLLKGGKRWLTPARKATVMKIPTPTTPRQVREFLGTAGFCRLWIPGFASLAAPLYPLTRPKVPFTWTEAHQEAFGRIKEALLSAPALALPDLTKPFALYVDEKEGVARGVLTQTLGPWRRPVAYLSKKLDPVASGWPTCLKAIAAVALLLKDADKLTLGQNVLVIAPHNLESIVRQPPDRWMTNARMTHYQSLLLNERVSFAPPAILNPATLLPVESDDTPIHICSEILAEETGTRPDLRDQPLPGVPAWYTDGSSFIMDGRRQAGAAIVDNKRTVWASNLPEGTSAQKAELIALTQALRLAEGKSINIYTDSRYAFATAHVHGAIYKQRGWLTSAGKDIKNKEEILALLEAIHLPKRVAIIHCPGHQRGTDPVATGNRKADEAAKQAAQSTRILTETTKNAGKRTADGSEFEKRTADGSEFESPKKKAKVE

SEQ ID NO: 7452 - protein, 2096 aa, synthetic construct
MPAAKRVKLDGGDKKYSIGLDIGTNSVGWAVITDEYKVPSKKFKVLGNTDRHSIKKNLIGALLFDSGETAEATRLKRTARRRYTRRKNRICYLQEIFSNEMAKVDDSFFHRLEESFLVEEDKKHERHPIFGNIVDEVAYHEKYPTIYHLRKKLVDSTDKADLRLIYLALAHMIKFRGHFLIEGDLNPDNSDVDKLFIQLVQTYNQLFEENPINASGVDAKAILSARLSKSRRLENLIAQLPGEKKNGLFGNLIALSLGLTPNFKSNFDLAEDAKLQLSKDTYDDDLDNLLAQIGDQYADLFLAAKNLSDAILLSDILRVNTEITKAPLSASMIKRYDEHHQDLTLLKALVRQQLPEKYKEIFFDQSKNGYAGYIDGGASQEEFYKFIKPILEKMDGTEELLVKLNREDLLRKQRTFDNGSIPHQIHLGELHAILRRQEDFYPFLKDNREKIEKILTFRIPYYVGPLARGNSRFAWMTRKSEETITPWNFEEVVDKGASAQSFIERMTNFDKNLPNEKVLPKHSLLYEYFTVYNELTKVKYVTEGMRKPAFLSGEQKKAIVDLLFKTNRKVTVKQLKEDYFKKIECFDSVEISGVEDRFNASLGTYHDLLKIIKDKDFLDNEENEDILEDIVLTLTLFEDREMIEERLKTYAHLFDDKVMKQLKRRRYTGWGRLSRKLINGIRDKQSGKTILDFLKSDGFANRNFMQLIHDDSLTFKEDIQKAQVSGQGDSLHEHIANLAGSPAIKKGILQTVKVVDELVKVMGRHKPENIVIEMARENQTTQKGQKNSRERMKRIEEGIKELGSQILKEHPVENTQLQNEKLYLYYLQNGRDMYVDQELDINRLSDYDVDHIVPQSFLKDDSIDNKVLTRSDKARGKSDNVPSEEVVKKMKNYWRQLLNAKLITQRKFDNLTKAERGGLSELDKAGFIKRQLVETRQITKHVAQILDSRMNTKYDENDKLIREVKVITLKSKLVSDFRKDFQFYKVREINNYHHAHDAYLNAVVGTALIKKYPKLESEFVYGDYKVYDVRKMIAKSEQEIGKATAKYFFYSNIMNFFKTEITLANGEIRKRPLIETNGETGEIVWDKGRDFATVRKVLSMPQVNIVKKTEVQTGGFSKESILPKRNSDKLIARKKDWDPKKYGGFDSPTVAYSVLVVAKVEKGKSKKLKSVKELLGITIMERSSFEKNPIDFLEAKGYKEVKKDLIIKLPKYSLFELENGRKRMLASAGELQKGNELALPSKYVNFLYLASHYEKLKGSPEDNEQKQLFVEQHKHYLDEIIEQISEFSKRVILADANLDKVLSAYNKHRDKPIREQAENIIHLFTLTNLGAPAAFKYFDTTIDRKRYTSTKEVLDATLIHQSITGLYETRIDLSQLGGDGGGGGEAAAKPAPGGTLGIEDEYRLHETSTEPDVSLGSTWLSDFPQAWAETGGMGLAVRQAPLIIPLKATSTPVSIQQYPMSHEARLGIKPHIQRLLDQGILVPCQSPWNTPLLPVKKPGTNDYRPVQDLREVNKRVEDIHPTVPNPYNLLSGLPPSHQWYTVLDLKDAFFCLRLHPTSQPLFAFEWRDPGMGISGQLTWTRLPQGFKNSPTLFDEALHRDLADFRIQHPDLILLQYVDDILLAATSELDCQQGTRALLQTLGDLGYRASAKKAQICQKQVKYLGYLLREGQRWLTEARKETVMGQPVPKTPRQLREFLGTAGFCRLWIPGFAEMAAPLYPLTKTGTLFSWGPDQQKAYQEIKQALLTAPALGLPDLTKPFELFVDEKQGYAKGVLTQKLGPWRRPVAYLSKKLDPVAAGWPPCLRMVAAIAVLTKDAGKLTMGQPLVILAPHAVEALVKQPPDRWLSNARMTHYQAMLLDTDRVQFGPVVALNPATLLPLPEEGAPHDCLEILAETHGTRPDLTDQPIPDADHTWYTDGSSFLQEGQRKAGAAVTTETEVIWAGALPAGTSAQRAELIALTQALKMAEGKRLNVYTDSRYAFATAHIHGEIYRRRGLLTSEGREIKNKSEILALLKALFLPKRLSIIHCLGHQKGDSAEARGNRLADQAAREAAIKTPPDTSTLLAGKRTADGSEFEKRTADGSEFESPKKKAKVE

SEQ ID NO: 7453 - protein, 2096 aa, synthetic construct
MPAAKRVKLDGGDKKYSIGLDIGTNSVGWAVITDEYKVPSKKFKVLGNTDRHSIKKNLIGALLFDSGETAEATRLKRTARRRYTRRKNRICYLQEIFSNEMAKVDDSFFHRLEESFLVEEDKKHERHPIFGNIVDEVAYHEKYPTIYHLRKKLVDSTDKADLRLIYLALAHMIKFRGHFLIEGDLNPDNSDVDKLFIQLVQTYNQLFEENPINASGVDAKAILSARLSKSRRLENLIAQLPGEKKNGLFGNLIALSLGLTPNFKSNFDLAEDAKLQLSKDTYDDDLDNLLAQIGDQYADLFLAAKNLSDAILLSDILRVNTEITKAPLSASMIKRYDEHHQDLTLLKALVRQQLPEKYKEIFFDQSKNGYAGYIDGGASQEEFYKFIKPILEKMDGTEELLVKLNREDLLRKQRTFDNGSIPHQIHLGELHAILRRQEDFYPFLKDNREKIEKILTFRIPYYVGPLARGNSRFAWMTRKSEETITPWNFEEVVDKGASAQSFIERMTNFDKNLPNEKVLPKHSLLYEYFTVYNELTKVKYVTEGMRKPAFLSGEQKKAIVDLLFKTNRKVTVKQLKEDYFKKIECFDSVEISGVEDRFNASLGTYHDLLKIIKDKDFLDNEENEDILEDIVLTLTLFEDREMIEERLKTYAHLFDDKVMKQLKRRRYTGWGRLSRKLINGIRDKQSGKTILDFLKSDGFANRNFMQLIHDDSLTFKEDIQKAQVSGQGDSLHEHIANLAGSPAIKKGILQTVKVVDELVKVMGRHKPENIVIEMARENQTTQKGQKNSRERMKRIEEGIKELGSQILKEHPVENTQLQNEKLYLYYLQNGRDMYVDQELDINRLSDYDVDHIVPQSFLKDDSIDNKVLTRSDKARGKSDNVPSEEVVKKMKNYWRQLLNAKLITQRKFDNLTKAERGGLSELDKAGFIKRQLVETRQITKHVAQILDSRMNTKYDENDKLIREVKVITLKSKLVSDFRKDFQFYKVREINNYHHAHDAYLNAVVGTALIKKYPKLESEFVYGDYKVYDVRKMIAKSEQEIGKATAKYFFYSNIMNFFKTEITLANGEIRKRPLIETNGETGEIVWDKGRDFATVRKVLSMPQVNIVKKTEVQTGGFSKESILPKRNSDKLIARKKDWDPKKYGGFDSPTVAYSVLVVAKVEKGKSKKLKSVKELLGITIMERSSFEKNPIDFLEAKGYKEVKKDLIIKLPKYSLFELENGRKRMLASAGELQKGNELALPSKYVNFLYLASHYEKLKGSPEDNEQKQLFVEQHKHYLDEIIEQISEFSKRVILADANLDKVLSAYNKHRDKPIREQAENIIHLFTLTNLGAPAAFKYFDTTIDRKRYTSTKEVLDATLIHQSITGLYETRIDLSQLGGDGGGGGEAAAKPAPGGTLGIEDEYRLHETSTEPDVSLGSTWLSDFPQAWAETGGMGLAVRQAPLIIPLKATSTPVSIQQYPMSHEARLGIKPHIQRLLDQGILVPCQSPWNTPLLPVKKPGTNDYRPVQDLREVNKRVEDIHPTVPNPYNLLSGLPPSHQWYTVLDLKDAFFCLRLHPTSQPLFAFEWRDPGMGISGQLTWTRLPQGFKNSPTLFNEALHRDLADFRIQHPDLILLQYVDDILLAATSELDCQQGTRALLQTLGDLGYRASAKKAQICQKQVKYLGYLLREGQRWLTEARKETVMGQPVPKTPRQLREFLGTAGFCRLWIPGFAEMAAPLYPLTKPGTLFSWGPDQQKAYQEIKQALLTAPALGLPDLTKPFELFVDEKQGYAKGVLTQKLGPWRRPVAYLSKKLDPVAAGWPPCLRMVAAIAVLTKDAGKLTMGQPLVILAPHAVEALVKQPPDRWLSNARMTHYQAMLLDTDRVQFGPVVALNPATLLPLPEEGAPHDCLEILAETHGTRPDLTDQPIPDADHTWYTDGSSFLQEGQRKAGAAVTTETEVIWAGALPAGTSAQRAELIALTQALKMAEGKRLNVYTDSRYAFATAHIHGEIYRRRGWLTSEGREIKNKSEILALLKALFLPKRLSIIHCLGHQKGDSAEARGNRLADQAAREAAIKTPPDTSTLLAGKRTADGSEFEKRTADGSEFESPKKKAKVE

SEQ ID NO: 7454 - protein, 2096 aa, synthetic construct
MPAAKRVKLDGGDKKYSIGLDIGTNSVGWAVITDEYKVPSKKFKVLGNTDRHSIKKNLIGALLFDSGETAEATRLKRTARRRYTRRKNRICYLQEIFSNEMAKVDDSFFHRLEESFLVEEDKKHERHPIFGNIVDEVAYHEKYPTIYHLRKKLVDSTDKADLRLIYLALAHMIKFRGHFLIEGDLNPDNSDVDKLFIQLVQTYNQLFEENPINASGVDAKAILSARLSKSRRLENLIAQLPGEKKNGLFGNLIALSLGLTPNFKSNFDLAEDAKLQLSKDTYDDDLDNLLAQIGDQYADLFLAAKNLSDAILLSDILRVNTEITKAPLSASMIKRYDEHHQDLTLLKALVRQQLPEKYKEIFFDQSKNGYAGYIDGGASQEEFYKFIKPILEKMDGTEELLVKLNREDLLRKQRTFDNGSIPHQIHLGELHAILRRQEDFYPFLKDNREKIEKILTFRIPYYVGPLARGNSRFAWMTRKSEETITPWNFEEVVDKGASAQSFIERMTNFDKNLPNEKVLPKHSLLYEYFTVYNELTKVKYVTEGMRKPAFLSGEQKKAIVDLLFKTNRKVTVKQLKEDYFKKIECFDSVEISGVEDRFNASLGTYHDLLKIIKDKDFLDNEENEDILEDIVLTLTLFEDREMIEERLKTYAHLFDDKVMKQLKRRRYTGWGRLSRKLINGIRDKQSGKTILDFLKSDGFANRNFMQLIHDDSLTFKEDIQKAQVSGQGDSLHEHIANLAGSPAIKKGILQTVKVVDELVKVMGRHKPENIVIEMARENQTTQKGQKNSRERMKRIEEGIKELGSQILKEHPVENTQLQNEKLYLYYLQNGRDMYVDQELDINRLSDYDVDHIVPQSFLKDDSIDNKVLTRSDKARGKSDNVPSEEVVKKMKNYWRQLLNAKLITQRKFDNLTKAERGGLSELDKAGFIKRQLVETRQITKHVAQILDSRMNTKYDENDKLIREVKVITLKSKLVSDFRKDFQFYKVREINNYHHAHDAYLNAVVGTALIKKYPKLESEFVYGDYKVYDVRKMIAKSEQEIGKATAKYFFYSNIMNFFKTEITLANGEIRKRPLIETNGETGEIVWDKGRDFATVRKVLSMPQVNIVKKTEVQTGGFSKESILPKRNSDKLIARKKDWDPKKYGGFDSPTVAYSVLVVAKVEKGKSKKLKSVKELLGITIMERSSFEKNPIDFLEAKGYKEVKKDLIIKLPKYSLFELENGRKRMLASAGELQKGNELALPSKYVNFLYLASHYEKLKGSPEDNEQKQLFVEQHKHYLDEIIEQISEFSKRVILADANLDKVLSAYNKHRDKPIREQAENIIHLFTLTNLGAPAAFKYFDTTIDRKRYTSTKEVLDATLIHQSITGLYETRIDLSQLGGDGGGGGEAAAKPAPGGTLNIEDEYRLHETSKGPDVPLGSTWLSDFPQAWAETGGMGLAVRQAPLIIPLKATSTPVSIKQYPMSQEARLGIKPHIQRLLDQGILVPCQSPWNTPLLPVKKPGTNDYRPVQDLREVNKRVEDIHPTVPNPYNLLSGLPPSHQWYTVLDLKDAFFCLRLHPTSQSLFAFEWRDPEMGISGQLTWTRLPQGFKNSPTLFNEALHRDLADFRIQHPDLILLQYVDDLLLAATSELDCQQGTRALLQTLGDLGYRASAKKAQICQKQVKYLGYLLKEGQRWLTEARKETVMGQPTPKTPRQLREFLGTAGFCRLWIPGFAEMAAPLYPLTKPGTLFEWGPDQQKAYQEIKQALLTAPALGLPDLTKPFELFVDEKQGYAKGVLTQKLGPWRRPVAYLSKKLDPVAAGWPPCLRMVAAIAVLTKDAGKLTMGQPLVILAPHAVEALVKQPPDRWLSNARMTHYQALLLDTDRVQFGPIVALNPATLLPLPEEGLQHDCLDILAEAHGTRPDLTDQPLPDADHTWYTDGSSFLQEGQRKAGAAVTTETEVVWAKALPAGTSAQRAELIALTQALKMAEGKKLNVYTDSRYAFATAHIHGEIYRRRGWLTSEGKEIKNKDEILALLKALFLPKRLSIIHCPGHQKGNRAEARGNRMADQAAREVATRETPETSTLLAGKRTADGSEFEKRTADGSEFESPKKKAKVE

SEQ ID NO: 7455 - protein, 2096 aa, synthetic construct
MPAAKRVKLDGGDKKYSIGLDIGTNSVGWAVITDEYKVPSKKFKVLGNTDRHSIKKNLIGALLFDSGETAEATRLKRTARRRYTRRKNRICYLQEIFSNEMAKVDDSFFHRLEESFLVEEDKKHERHPIFGNIVDEVAYHEKYPTIYHLRKKLVDSTDKADLRLIYLALAHMIKFRGHFLIEGDLNPDNSDVDKLFIQLVQTYNQLFEENPINASGVDAKAILSARLSKSRRLENLIAQLPGEKKNGLFGNLIALSLGLTPNFKSNFDLAEDAKLQLSKDTYDDDLDNLLAQIGDQYADLFLAAKNLSDAILLSDILRVNTEITKAPLSASMIKRYDEHHQDLTLLKALVRQQLPEKYKEIFFDQSKNGYAGYIDGGASQEEFYKFIKPILEKMDGTEELLVKLNREDLLRKQRTFDNGSIPHQIHLGELHAILRRQEDFYPFLKDNREKIEKILTFRIPYYVGPLARGNSRFAWMTRKSEETITPWNFEEVVDKGASAQSFIERMTNFDKNLPNEKVLPKHSLLYEYFTVYNELTKVKYVTEGMRKPAFLSGEQKKAIVDLLFKTNRKVTVKQLKEDYFKKIECFDSVEISGVEDRFNASLGTYHDLLKIIKDKDFLDNEENEDILEDIVLTLTLFEDREMIEERLKTYAHLFDDKVMKQLKRRRYTGWGRLSRKLINGIRDKQSGKTILDFLKSDGFANRNFMQLIHDDSLTFKEDIQKAQVSGQGDSLHEHIANLAGSPAIKKGILQTVKVVDELVKVMGRHKPENIVIEMARENQTTQKGQKNSRERMKRIEEGIKELGSQILKEHPVENTQLQNEKLYLYYLQNGRDMYVDQELDINRLSDYDVDHIVPQSFLKDDSIDNKVLTRSDKARGKSDNVPSEEVVKKMKNYWRQLLNAKLITQRKFDNLTKAERGGLSELDKAGFIKRQLVETRQITKHVAQILDSRMNTKYDENDKLIREVKVITLKSKLVSDFRKDFQFYKVREINNYHHAHDAYLNAVVGTALIKKYPKLESEFVYGDYKVYDVRKMIAKSEQEIGKATAKYFFYSNIMNFFKTEITLANGEIRKRPLIETNGETGEIVWDKGRDFATVRKVLSMPQVNIVKKTEVQTGGFSKESILPKRNSDKLIARKKDWDPKKYGGFDSPTVAYSVLVVAKVEKGKSKKLKSVKELLGITIMERSSFEKNPIDFLEAKGYKEVKKDLIIKLPKYSLFELENGRKRMLASAGELQKGNELALPSKYVNFLYLASHYEKLKGSPEDNEQKQLFVEQHKHYLDEIIEQISEFSKRVILADANLDKVLSAYNKHRDKPIREQAENIIHLFTLTNLGAPAAFKYFDTTIDRKRYTSTKEVLDATLIHQSITGLYETRIDLSQLGGDGGGGGEAAAKPAPGGTLNIEDEHRLHETSKEPDVSLGSTWLSDFPQAWAETGGMGLAVRQAPLIIPLKATSTPVSIKQYPMSQEARLGIKPHIQRLLDQGILVPCQSPWNTPLLPVKKPGTNDYRPVQDLREVNKRVEDIHPTVPNPYNLLSGLPPSHQWYTVLDLKDAFFCLRLHPTSQPLFAFEWRDPEMGISGQLTWTRLPQGFKNSPTLFDEALHRDLADFRIQHPDLILLQYVDDLLLAATSELDCQQGTRALLQTLGNLGYRASAKKAQICQKQVKYLGYLLKEGQRWLTEARKETVMGQPTPKTPRQLREFLGTAGFCRLWIPGFAEMAAPLYPLTKTGTLFNWGPDQQKAYQEIKQALLTAPALGLPDLTKPFELFVDEKQGYAKGVLTQKLGPWRRPVAYLSKKLDPVAAGWPPCLRMVAAIAVLTKDAGKLTMGQPLVILAPHAVEALVKQPPDRWLSNARMTHYQALLLDTDRVQFGPVVALNPATLLPLPEEGLQHNCLDILAEAHGTRPDLTDQPLPDADHTWYTDGSSLLQEGQRKAGAAVTTETEVIWAKALPAGTSAQRAELIALTQALKMAEGKKLNVYTDSRYAFATAHIHGEIYRRRGLLTSEGKEIKNKDEILALLKALFLPKRLSIIHCPGHQKGHSAEARGNRMADQAARKAAITETPDTSTLLAGKRTADGSEFEKRTADGSEFESPKKKAKVE

SEQ ID NO: 7456 - protein, 2087 aa, synthetic construct
MPAAKRVKLDGGDKKYSIGLDIGTNSVGWAVITDEYKVPSKKFKVLGNTDRHSIKKNLIGALLFDSGETAEATRLKRTARRRYTRRKNRICYLQEIFSNEMAKVDDSFFHRLEESFLVEEDKKHERHPIFGNIVDEVAYHEKYPTIYHLRKKLVDSTDKADLRLIYLALAHMIKFRGHFLIEGDLNPDNSDVDKLFIQLVQTYNQLFEENPINASGVDAKAILSARLSKSRRLENLIAQLPGEKKNGLFGNLIALSLGLTPNFKSNFDLAEDAKLQLSKDTYDDDLDNLLAQIGDQYADLFLAAKNLSDAILLSDILRVNTEITKAPLSASMIKRYDEHHQDLTLLKALVRQQLPEKYKEIFFDQSKNGYAGYIDGGASQEEFYKFIKPILEKMDGTEELLVKLNREDLLRKQRTFDNGSIPHQIHLGELHAILRRQEDFYPFLKDNREKIEKILTFRIPYYVGPLARGNSRFAWMTRKSEETITPWNFEEVVDKGASAQSFIERMTNFDKNLPNEKVLPKHSLLYEYFTVYNELTKVKYVTEGMRKPAFLSGEQKKAIVDLLFKTNRKVTVKQLKEDYFKKIECFDSVEISGVEDRFNASLGTYHDLLKIIKDKDFLDNEENEDILEDIVLTLTLFEDREMIEERLKTYAHLFDDKVMKQLKRRRYTGWGRLSRKLINGIRDKQSGKTILDFLKSDGFANRNFMQLIHDDSLTFKEDIQKAQVSGQGDSLHEHIANLAGSPAIKKGILQTVKVVDELVKVMGRHKPENIVIEMARENQTTQKGQKNSRERMKRIEEGIKELGSQILKEHPVENTQLQNEKLYLYYLQNGRDMYVDQELDINRLSDYDVDHIVPQSFLKDDSIDNKVLTRSDKARGKSDNVPSEEVVKKMKNYWRQLLNAKLITQRKFDNLTKAERGGLSELDKAGFIKRQLVETRQITKHVAQILDSRMNTKYDENDKLIREVKVITLKSKLVSDFRKDFQFYKVREINNYHHAHDAYLNAVVGTALIKKYPKLESEFVYGDYKVYDVRKMIAKSEQEIGKATAKYFFYSNIMNFFKTEITLANGEIRKRPLIETNGETGEIVWDKGRDFATVRKVLSMPQVNIVKKTEVQTGGFSKESILPKRNSDKLIARKKDWDPKKYGGFDSPTVAYSVLVVAKVEKGKSKKLKSVKELLGITIMERSSFEKNPIDFLEAKGYKEVKKDLIIKLPKYSLFELENGRKRMLASAGELQKGNELALPSKYVNFLYLASHYEKLKGSPEDNEQKQLFVEQHKHYLDEIIEQISEFSKRVILADANLDKVLSAYNKHRDKPIREQAENIIHLFTLTNLGAPAAFKYFDTTIDRKRYTSTKEVLDATLIHQSITGLYETRIDLSQLGGDGGGGGEAAAKPAPGGVPWLMKKPLQLTVLVPLHEYQERLLQQTALPKEQKELLQKLFLKYDALWQHWENQVGHRRIKPHNIATGTLAPRPQKQYPINPKAKPSIQIVIDDLLKQGVLIQQNSTMNTPVYPVPKPDGKWRMVLDYREVNKTIPLIAAQNQHSAGILSSIYRGKYKTTLDLTNGFWAHPITPESYWLTAFTWQGKQYCWTRLPQGFLNSPALFNADVVDLLKEIPNVQAYVDDIYISHDDPQEHLEQLEKIFSILLNAGYVVSLKKSEIAQREVEFLGFNITKEGRGLTDTFKQKLLNITPPKDLKQLQSILGKLNFARNFIPNYSELVKPLYTIVAPANGKFISWTEDNSNQLQHIISVLNQADNLEERNPETRLIIKVNSSPSAGYIRYYNEGSKRPIMYVNYIFSKAEAKFTQTEKLLTTMHKGLIKAMDLAMGQEILVYSPIVSMTKIQRTPLPERKALPVRWITWMTYLEDPRIQFHYDKSLPELQQIPNVTEDVIAKTKHPSEFAMVFYTDGSAIKHPDVNKSHSAGMGIAQVQFIPEYKIVHQWSIPLGDHTAQLAEIAAVEFACKKALKISGPVLIVTDSFYVAESANKELPYWKSNGFLNNKKKPLRHVSKWKSIAECLQLKPDIIIMHEKGHQQPMTTLHTEGNNLADKLATQGSYVVHAGKRTADGSEFEKRTADGSEFESPKKKAKVE

SEQ ID NO: 7457 - protein, 2087 aa, synthetic construct
MPAAKRVKLDGGDKKYSIGLDIGTNSVGWAVITDEYKVPSKKFKVLGNTDRHSIKKNLIGALLFDSGETAEATRLKRTARRRYTRRKNRICYLQEIFSNEMAKVDDSFFHRLEESFLVEEDKKHERHPIFGNIVDEVAYHEKYPTIYHLRKKLVDSTDKADLRLIYLALAHMIKFRGHFLIEGDLNPDNSDVDKLFIQLVQTYNQLFEENPINASGVDAKAILSARLSKSRRLENLIAQLPGEKKNGLFGNLIALSLGLTPNFKSNFDLAEDAKLQLSKDTYDDDLDNLLAQIGDQYADLFLAAKNLSDAILLSDILRVNTEITKAPLSASMIKRYDEHHQDLTLLKALVRQQLPEKYKEIFFDQSKNGYAGYIDGGASQEEFYKFIKPILEKMDGTEELLVKLNREDLLRKQRTFDNGSIPHQIHLGELHAILRRQEDFYPFLKDNREKIEKILTFRIPYYVGPLARGNSRFAWMTRKSEETITPWNFEEVVDKGASAQSFIERMTNFDKNLPNEKVLPKHSLLYEYFTVYNELTKVKYVTEGMRKPAFLSGEQKKAIVDLLFKTNRKVTVKQLKEDYFKKIECFDSVEISGVEDRFNASLGTYHDLLKIIKDKDFLDNEENEDILEDIVLTLTLFEDREMIEERLKTYAHLFDDKVMKQLKRRRYTGWGRLSRKLINGIRDKQSGKTILDFLKSDGFANRNFMQLIHDDSLTFKEDIQKAQVSGQGDSLHEHIANLAGSPAIKKGILQTVKVVDELVKVMGRHKPENIVIEMARENQTTQKGQKNSRERMKRIEEGIKELGSQILKEHPVENTQLQNEKLYLYYLQNGRDMYVDQELDINRLSDYDVDHIVPQSFLKDDSIDNKVLTRSDKARGKSDNVPSEEVVKKMKNYWRQLLNAKLITQRKFDNLTKAERGGLSELDKAGFIKRQLVETRQITKHVAQILDSRMNTKYDENDKLIREVKVITLKSKLVSDFRKDFQFYKVREINNYHHAHDAYLNAVVGTALIKKYPKLESEFVYGDYKVYDVRKMIAKSEQEIGKATAKYFFYSNIMNFFKTEITLANGEIRKRPLIETNGETGEIVWDKGRDFATVRKVLSMPQVNIVKKTEVQTGGFSKESILPKRNSDKLIARKKDWDPKKYGGFDSPTVAYSVLVVAKVEKGKSKKLKSVKELLGITIMERSSFEKNPIDFLEAKGYKEVKKDLIIKLPKYSLFELENGRKRMLASAGELQKGNELALPSKYVNFLYLASHYEKLKGSPEDNEQKQLFVEQHKHYLDEIIEQISEFSKRVILADANLDKVLSAYNKHRDKPIREQAENIIHLFTLTNLGAPAAFKYFDTTIDRKRYTSTKEVLDATLIHQSITGLYETRIDLSQLGGDGGGGGEAAAKPAPGGIPWLMKKPLQLTTLVPLQEYEERLLKQTMLTGSYKEKLQSLFLKYDALWQHWENQVGHRRIKPHHIATGTVNPRPQKQYPINPKAKASIQTVINDLLKQGVLIQQNSIMNTPVYPVPKPDGKWRMVLDYREVNKTIPLIAAQNQHSAGILSSIFRGKYKTTLDLSNGFWAHSITPESYWLTAFTWLGQQYCWTRLPQGFLNSPALFNADVVDLLKEVPNVQVYVDDIYISHDDPREHLEQLEKVFSLLLNAGYVVSLKKSEIAQHEVEFLGFNITKEGRGLTETFKQKLLNITPPRDLKQLQSILGLLNFARNFIPNFSELVKPLYNIIATAPGKYITWTTDNSQQLQNIISMLNSAENLEERNPEVRLIMKVNTSPSAGYIRFYNEFAKRPIMYLNYVYTKAEVKFTNTEKLLTTIHKGLIKALDLGMGQEILVYSPIVSMTKIQKTPLPERKALPIRWITWMSYLEDPRIQFHYDKTLPELQQVPTVTDDIIAKIKHPSEFSMVFYTDGSAIKHPNVNKSHNAGMGIAQVQFKPEFTVINTWSIPLGDHTAQLAEVAAVEFACKKALKIDGPVLIVTDSFYVAESVNKELPYWQSNGFFNNKKKPLKHVSKWKSIADCIQLKPDIIIIHEKGHQPTASTFHTEGNNLADKLATQGSYVVNAGKRTADGSEFEKRTADGSEFESPKKKAKVE

SEQ ID NO: 7458 - protein, 2176 aa, synthetic construct
MPAAKRVKLDGGDKKYSIGLDIGTNSVGWAVITDEYKVPSKKFKVLGNTDRHSIKKNLIGALLFDSGETAEATRLKRTARRRYTRRKNRICYLQEIFSNEMAKVDDSFFHRLEESFLVEEDKKHERHPIFGNIVDEVAYHEKYPTIYHLRKKLVDSTDKADLRLIYLALAHMIKFRGHFLIEGDLNPDNSDVDKLFIQLVQTYNQLFEENPINASGVDAKAILSARLSKSRRLENLIAQLPGEKKNGLFGNLIALSLGLTPNFKSNFDLAEDAKLQLSKDTYDDDLDNLLAQIGDQYADLFLAAKNLSDAILLSDILRVNTEITKAPLSASMIKRYDEHHQDLTLLKALVRQQLPEKYKEIFFDQSKNGYAGYIDGGASQEEFYKFIKPILEKMDGTEELLVKLNREDLLRKQRTFDNGSIPHQIHLGELHAILRRQEDFYPFLKDNREKIEKILTFRIPYYVGPLARGNSRFAWMTRKSEETITPWNFEEVVDKGASAQSFIERMTNFDKNLPNEKVLPKHSLLYEYFTVYNELTKVKYVTEGMRKPAFLSGEQKKAIVDLLFKTNRKVTVKQLKEDYFKKIECFDSVEISGVEDRFNASLGTYHDLLKIIKDKDFLDNEENEDILEDIVLTLTLFEDREMIEERLKTYAHLFDDKVMKQLKRRRYTGWGRLSRKLINGIRDKQSGKTILDFLKSDGFANRNFMQLIHDDSLTFKEDIQKAQVSGQGDSLHEHIANLAGSPAIKKGILQTVKVVDELVKVMGRHKPENIVIEMARENQTTQKGQKNSRERMKRIEEGIKELGSQILKEHPVENTQLQNEKLYLYYLQNGRDMYVDQELDINRLSDYDVDHIVPQSFLKDDSIDNKVLTRSDKARGKSDNVPSEEVVKKMKNYWRQLLNAKLITQRKFDNLTKAERGGLSELDKAGFIKRQLVETRQITKHVAQILDSRMNTKYDENDKLIREVKVITLKSKLVSDFRKDFQFYKVREINNYHHAHDAYLNAVVGTALIKKYPKLESEFVYGDYKVYDVRKMIAKSEQEIGKATAKYFFYSNIMNFFKTEITLANGEIRKRPLIETNGETGEIVWDKGRDFATVRKVLSMPQVNIVKKTEVQTGGFSKESILPKRNSDKLIARKKDWDPKKYGGFDSPTVAYSVLVVAKVEKGKSKKLKSVKELLGITIMERSSFEKNPIDFLEAKGYKEVKKDLIIKLPKYSLFELENGRKRMLASAGELQKGNELALPSKYVNFLYLASHYEKLKGSPEDNEQKQLFVEQHKHYLDEIIEQISEFSKRVILADANLDKVLSAYNKHRDKPIREQAENIIHLFTLTNLGAPAAFKYFDTTIDRKRYTSTKEVLDATLIHQSITGLYETRIDLSQLGGDGGGGGEAAAKPAPGGMDPLQLLQPLEAEIKGTKLKAHWNSGATITCVPQAFLEEEVPIKNIWIKTIHGEKEQPVYYLTFKIQGRKVEAEVISSPYDYILVSPSDIPWLMKKPLQLTTLVPLQEYEERLLKQTMLTGSYKEKLQSLFLKYDALWQHWENQVGHRRIKPHHIATGTVNPRPQKQYPINPKAKASIQTVINDLLKQGVLIQQNSIMNTPVYPVPKPDGKWRMVLDYREVNKTIPLIAAQNQHSAGILSSIFRGKYKTTLDLSNGFWAHSITPESYWLTAFTWLGQQYCWTRLPQGFLNSPALFNADVVDLLKEVPNVQVYVDDIYISHDDPREHLEQLEKVFSLLLNAGYVVSLKKSEIAQHEVEFLGFNITKEGRGLTETFKQKLLNITPPRDLKQLQSILGKLNFARNFIPNFSELVKPLYNIIATAPGKYITWTTDNSQQLQNIISMLNSAENLEERNPEVRLIMKVNTSPSAGYIRFYNEFAKRPIMYLNYVYTKAEVKFTNTEKLLTTIHKGLIKALDLGMGQEILVYSPIVSMTKIQKTPLPERKALPIRWITWMSYLEDPRIQFHYDKTLPELQQVPTVTDDIIAKIKHPSEFSMVFYTDGSAIKHPNVNKSHNAGMGIAQVQFKPEFTVINTWSIPLGDHTAQLAEVAAVEFACKKALKIDGPVLIVTDSFYVAESVNKELPYWQSNGFFNNKKKPLKHVSKWKSIADCIQLKPDIIIIHEKGHQPTASTFHTEGNNLADKLATQGSYVVNAGKRTADGSEFEKRTADGSEFESPKKKAKVE

SEQ ID NO: 7459 - protein, 2094 aa, synthetic construct
MPAAKRVKLDGGDKKYSIGLDIGTNSVGWAVITDEYKVPSKKFKVLGNTDRHSIKKNLIGALLFDSGETAEATRLKRTARRRYTRRKNRICYLQEIFSNEMAKVDDSFFHRLEESFLVEEDKKHERHPIFGNIVDEVAYHEKYPTIYHLRKKLVDSTDKADLRLIYLALAHMIKFRGHFLIEGDLNPDNSDVDKLFIQLVQTYNQLFEENPINASGVDAKAILSARLSKSRRLENLIAQLPGEKKNGLFGNLIALSLGLTPNFKSNFDLAEDAKLQLSKDTYDDDLDNLLAQIGDQYADLFLAAKNLSDAILLSDILRVNTEITKAPLSASMIKRYDEHHQDLTLLKALVRQQLPEKYKEIFFDQSKNGYAGYIDGGASQEEFYKFIKPILEKMDGTEELLVKLNREDLLRKQRTFDNGSIPHQIHLGELHAILRRQEDFYPFLKDNREKIEKILTFRIPYYVGPLARGNSRFAWMTRKSEETITPWNFEEVVDKGASAQSFIERMTNFDKNLPNEKVLPKHSLLYEYFTVYNELTKVKYVTEGMRKPAFLSGEQKKAIVDLLFKTNRKVTVKQLKEDYFKKIECFDSVEISGVEDRFNASLGTYHDLLKIIKDKDFLDNEENEDILEDIVLTLTLFEDREMIEERLKTYAHLFDDKVMKQLKRRRYTGWGRLSRKLINGIRDKQSGKTILDFLKSDGFANRNFMQLIHDDSLTFKEDIQKAQVSGQGDSLHEHIANLAGSPAIKKGILQTVKVVDELVKVMGRHKPENIVIEMARENQTTQKGQKNSRERMKRIEEGIKELGSQILKEHPVENTQLQNEKLYLYYLQNGRDMYVDQELDINRLSDYDVDHIVPQSFLKDDSIDNKVLTRSDKARGKSDNVPSEEVVKKMKNYWRQLLNAKLITQRKFDNLTKAERGGLSELDKAGFIKRQLVETRQITKHVAQILDSRMNTKYDENDKLIREVKVITLKSKLVSDFRKDFQFYKVREINNYHHAHDAYLNAVVGTALIKKYPKLESEFVYGDYKVYDVRKMIAKSEQEIGKATAKYFFYSNIMNFFKTEITLANGEIRKRPLIETNGETGEIVWDKGRDFATVRKVLSMPQVNIVKKTEVQTGGFSKESILPKRNSDKLIARKKDWDPKKYGGFDSPTVAYSVLVVAKVEKGKSKKLKSVKELLGITIMERSSFEKNPIDFLEAKGYKEVKKDLIIKLPKYSLFELENGRKRMLASAGELQKGNELALPSKYVNFLYLASHYEKLKGSPEDNEQKQLFVEQHKHYLDEIIEQISEFSKRVILADANLDKVLSAYNKHRDKPIREQAENIIHLFTLTNLGAPAAFKYFDTTIDRKRYTSTKEVLDATLIHQSITGLYETRIDLSQLGGDGGGGGEAAAKPAPGGVLNLEEEYRLHEKPVPSSIDPSWLQLFPTVWAERAGMGLANQVPPVVVELRSGASPVAVRQYPMSKEAREGIRPHIQRFLDLGVLVPCQSPWNTPLLPVKKPGTNDYRPVQDLREINKRVQDIHPTVPNPYNLLSSLPPSHTWYSVLDLKDAFFCLKLHPNSQPLFAFEWRDPEKGNTGQLTWTRLPQGFKNSPTLFNEALHRDLAPFRALNPQVVLLQYVDDLLVAAPTYRDCKEGTQKLLQELSKLGYRVSAKKAQLCQKEVTYLGYLLKEGKRWLTPARKATVMKIPPPTTPRQVREFLGTAGFCRLWIPGFASLAAPLYPLTKPSIPFIWTEEHQKAFDRIKEALLSAPALALPDLTKPFTLYVDERAGVARGVLTQTLGPWRRPVAYLSKKLDPVASGWPTCLKAVAAVALLLKDADKLTLGQNVTVIASHSLESIVRQPPDRWMTNARMTHYQSLLLNERVSFAPPAVLNPATLLPVESEATPVHRCSEILAEETGTRRDLKDQPLPGVPAWYTDGSSFIAEGKRRAGAAIVDGKRTVWASSLPEGTSAQKAELVALTQALRLAEGKDINIYTDSRYAFATAHIHGAIYKQRGWLTSAGKDIKNKEEILALLEAIHLPKRVAIIHCPGHQKGNDPVATGNRRADEAAKQAALSTRVLAETTKPAGKRTADGSEFEKRTADGSEFESPKKKAKVE

SEQ ID NO: 7460 - protein, 2096 aa, synthetic construct
MPAAKRVKLDGGDKKYSIGLDIGTNSVGWAVITDEYKVPSKKFKVLGNTDRHSIKKNLIGALLFDSGETAEATRLKRTARRRYTRRKNRICYLQEIFSNEMAKVDDSFFHRLEESFLVEEDKKHERHPIFGNIVDEVAYHEKYPTIYHLRKKLVDSTDKADLRLIYLALAHMIKFRGHFLIEGDLNPDNSDVDKLFIQLVQTYNQLFEENPINASGVDAKAILSARLSKSRRLENLIAQLPGEKKNGLFGNLIALSLGLTPNFKSNFDLAEDAKLQLSKDTYDDDLDNLLAQIGDQYADLFLAAKNLSDAILLSDILRVNTEITKAPLSASMIKRYDEHHQDLTLLKALVRQQLPEKYKEIFFDQSKNGYAGYIDGGASQEEFYKFIKPILEKMDGTEELLVKLNREDLLRKQRTFDNGSIPHQIHLGELHAILRRQEDFYPFLKDNREKIEKILTFRIPYYVGPLARGNSRFAWMTRKSEETITPWNFEEVVDKGASAQSFIERMTNFDKNLPNEKVLPKHSLLYEYFTVYNELTKVKYVTEGMRKPAFLSGEQKKAIVDLLFKTNRKVTVKQLKEDYFKKIECFDSVEISGVEDRFNASLGTYHDLLKIIKDKDFLDNEENEDILEDIVLTLTLFEDREMIEERLKTYAHLFDDKVMKQLKRRRYTGWGRLSRKLINGIRDKQSGKTILDFLKSDGFANRNFMQLIHDDSLTFKEDIQKAQVSGQGDSLHEHIANLAGSPAIKKGILQTVKVVDELVKVMGRHKPENIVIEMARENQTTQKGQKNSRERMKRIEEGIKELGSQILKEHPVENTQLQNEKLYLYYLQNGRDMYVDQELDINRLSDYDVDHIVPQSFLKDDSIDNKVLTRSDKARGKSDNVPSEEVVKKMKNYWRQLLNAKLITQRKFDNLTKAERGGLSELDKAGFIKRQLVETRQITKHVAQILDSRMNTKYDENDKLIREVKVITLKSKLVSDFRKDFQFYKVREINNYHHAHDAYLNAVVGTALIKKYPKLESEFVYGDYKVYDVRKMIAKSEQEIGKATAKYFFYSNIMNFFKTEITLANGEIRKRPLIETNGETGEIVWDKGRDFATVRKVLSMPQVNIVKKTEVQTGGFSKESILPKRNSDKLIARKKDWDPKKYGGFDSPTVAYSVLVVAKVEKGKSKKLKSVKELLGITIMERSSFEKNPIDFLEAKGYKEVKKDLIIKLPKYSLFELENGRKRMLASAGELQKGNELALPSKYVNFLYLASHYEKLKGSPEDNEQKQLFVEQHKHYLDEIIEQISEFSKRVILADANLDKVLSAYNKHRDKPIREQAENIIHLFTLTNLGAPAAFKYFDTTIDRKRYTSTKEVLDATLIHQSITGLYETRIDLSQLGGDGGGGGEAAAKPAPGGTLNIEDEYRLHETSKEPDVPLGSTWLSDFPQAWAETGGMGLAVRQAPLIIPLKATSTPVSIKQYPMSQEARLGIKPHIQRLLDQGILVPCQSPWNTPLLPVKKPGTNDYRPVQDLREVNKRVEDIHPTVPNPYNLLSGLPPSHQWYTVLDLKDAFFCLRLHPTSQPLFAFEWRDPEMGISGQLTWTRLPQGFKNSPTLFDEALHRDLADFRIQHPDLILLQYVDDLLLAATSEQDCQRGTRALLQTLGNLGYRASAKKAQICQKQVKYLGYLLKEGQRWLTEARKETVMGQPTPKTPRQLREFLGTAGFCRLWIPGFAEMAAPLYPLTKTGTLFNWGPDQQKAYQEIKQALLTAPALGLPDLTKPFELFVDEKQGYAKGVLTQKLGPWRRPVAYLSKKLDPVAAGWPPCLRMVAAIAVLTKDAGKLTMGQPLVILAPHAVEALVKQPPDRWLSNARMTHYQAMLLDTDRVQFGPVVALNPATLLPLPEKEAPHDCLEILAETHGTRPDLTDQPIPDADYTWYTDGSSFLQEGQRRAGAAVTTETEVIWARALPAGTSAQRAELIALTQALKMAEGKKLNVYTDSRYAFATAHVHGEIYRRRGLLTSEGREIKNKNEILALLKALFLPKRLSIIHCPGHQKGNSAEARGNRMADQAAREAAMKAVLETSTLLAGKRTADGSEFEKRTADGSEFESPKKKAKVE

SEQ ID NO: 7461 - protein, 2096 aa, synthetic construct
MPAAKRVKLDGGDKKYSIGLDIGTNSVGWAVITDEYKVPSKKFKVLGNTDRHSIKKNLIGALLFDSGETAEATRLKRTARRRYTRRKNRICYLQEIFSNEMAKVDDSFFHRLEESFLVEEDKKHERHPIFGNIVDEVAYHEKYPTIYHLRKKLVDSTDKADLRLIYLALAHMIKFRGHFLIEGDLNPDNSDVDKLFIQLVQTYNQLFEENPINASGVDAKAILSARLSKSRRLENLIAQLPGEKKNGLFGNLIALSLGLTPNFKSNFDLAEDAKLQLSKDTYDDDLDNLLAQIGDQYADLFLAAKNLSDAILLSDILRVNTEITKAPLSASMIKRYDEHHQDLTLLKALVRQQLPEKYKEIFFDQSKNGYAGYIDGGASQEEFYKFIKPILEKMDGTEELLVKLNREDLLRKQRTFDNGSIPHQIHLGELHAILRRQEDFYPFLKDNREKIEKILTFRIPYYVGPLARGNSRFAWMTRKSEETITPWNFEEVVDKGASAQSFIERMTNFDKNLPNEKVLPKHSLLYEYFTVYNELTKVKYVTEGMRKPAFLSGEQKKAIVDLLFKTNRKVTVKQLKEDYFKKIECFDSVEISGVEDRFNASLGTYHDLLKIIKDKDFLDNEENEDILEDIVLTLTLFEDREMIEERLKTYAHLFDDKVMKQLKRRRYTGWGRLSRKLINGIRDKQSGKTILDFLKSDGFANRNFMQLIHDDSLTFKEDIQKAQVSGQGDSLHEHIANLAGSPAIKKGILQTVKVVDELVKVMGRHKPENIVIEMARENQTTQKGQKNSRERMKRIEEGIKELGSQILKEHPVENTQLQNEKLYLYYLQNGRDMYVDQELDINRLSDYDVDHIVPQSFLKDDSIDNKVLTRSDKARGKSDNVPSEEVVKKMKNYWRQLLNAKLITQRKFDNLTKAERGGLSELDKAGFIKRQLVETRQITKHVAQILDSRMNTKYDENDKLIREVKVITLKSKLVSDFRKDFQFYKVREINNYHHAHDAYLNAVVGTALIKKYPKLESEFVYGDYKVYDVRKMIAKSEQEIGKATAKYFFYSNIMNFFKTEITLANGEIRKRPLIETNGETGEIVWDKGRDFATVRKVLSMPQVNIVKKTEVQTGGFSKESILPKRNSDKLIARKKDWDPKKYGGFDSPTVAYSVLVVAKVEKGKSKKLKSVKELLGITIMERSSFEKNPIDFLEAKGYKEVKKDLIIKLPKYSLFELENGRKRMLASAGELQKGNELALPSKYVNFLYLASHYEKLKGSPEDNEQKQLFVEQHKHYLDEIIEQISEFSKRVILADANLDKVLSAYNKHRDKPIREQAENIIHLFTLTNLGAPAAFKYFDTTIDRKRYTSTKEVLDATLIHQSITGLYETRIDLSQLGGDGGGGGEAAAKPAPGGTLNIEDEYRLHETSKEPDVPLGSTWLSDFPQAWAETGGMGLAVRQAPLIIPLKATSTPVSIKQYPMSQEARLGIKPHIQRLLDQGILVPCQSPWNTPLLPVKKPGTNDYRPVQDLREVNKRVEDIHPTVPNPYNLLSGLPPSHQWYTVLDLKDAFFCLRLHPTSQPLFAFEWRDPEMGISGQLTWTRLPQGFKNSPTLFNEALHRDLADFRIQHPDLILLQYVDDLLLAATSEQDCQRGTRALLQTLGNLGYRASAKKAQICQKQVKYLGYLLKEGQRWLTEARKETVMGQPTPKTPRQLREFLGKAGFCRLFIPGFAEMAAPLYPLTKPGTLFNWGPDQQKAYQEIKQALLTAPALGLPDLTKPFELFVDEKQGYAKGVLTQKLGPWRRPVAYLSKKLDPVAAGWPPCLRMVAAIAVLTKDAGKLTMGQPLVILAPHAVEALVKQPPDRWLSNARMTHYQAMLLDTDRVQFGPVVALNPATLLPLPEKEAPHDCLEILAETHGTRPDLTDQPIPDADYTWYTDGSSFLQEGQRRAGAAVTTETEVIWARALPAGTSAQRAELIALTQALKMAEGKKLNVYTDSRYAFATAHVHGEIYRRRGWLTSEGREIKNKNEILALLKALFLPKRLSIIHCPGHQKGNSAEARGNRMADQAAREAAMKAVLETSTLLAGKRTADGSEFEKRTADGSEFESPKKKAKVE

SEQ ID NO: 7462 - protein, 2098 aa, synthetic construct
MPAAKRVKLDGGDKKYSIGLDIGTNSVGWAVITDEYKVPSKKFKVLGNTDRHSIKKNLIGALLFDSGETAEATRLKRTARRRYTRRKNRICYLQEIFSNEMAKVDDSFFHRLEESFLVEEDKKHERHPIFGNIVDEVAYHEKYPTIYHLRKKLVDSTDKADLRLIYLALAHMIKFRGHFLIEGDLNPDNSDVDKLFIQLVQTYNQLFEENPINASGVDAKAILSARLSKSRRLENLIAQLPGEKKNGLFGNLIALSLGLTPNFKSNFDLAEDAKLQLSKDTYDDDLDNLLAQIGDQYADLFLAAKNLSDAILLSDILRVNTEITKAPLSASMIKRYDEHHQDLTLLKALVRQQLPEKYKEIFFDQSKNGYAGYIDGGASQEEFYKFIKPILEKMDGTEELLVKLNREDLLRKQRTFDNGSIPHQIHLGELHAILRRQEDFYPFLKDNREKIEKILTFRIPYYVGPLARGNSRFAWMTRKSEETITPWNFEEVVDKGASAQSFIERMTNFDKNLPNEKVLPKHSLLYEYFTVYNELTKVKYVTEGMRKPAFLSGEQKKAIVDLLFKTNRKVTVKQLKEDYFKKIECFDSVEISGVEDRFNASLGTYHDLLKIIKDKDFLDNEENEDILEDIVLTLTLFEDREMIEERLKTYAHLFDDKVMKQLKRRRYTGWGRLSRKLINGIRDKQSGKTILDFLKSDGFANRNFMQLIHDDSLTFKEDIQKAQVSGQGDSLHEHIANLAGSPAIKKGILQTVKVVDELVKVMGRHKPENIVIEMARENQTTQKGQKNSRERMKRIEEGIKELGSQILKEHPVENTQLQNEKLYLYYLQNGRDMYVDQELDINRLSDYDVDHIVPQSFLKDDSIDNKVLTRSDKARGKSDNVPSEEVVKKMKNYWRQLLNAKLITQRKFDNLTKAERGGLSELDKAGFIKRQLVETRQITKHVAQILDSRMNTKYDENDKLIREVKVITLKSKLVSDFRKDFQFYKVREINNYHHAHDAYLNAVVGTALIKKYPKLESEFVYGDYKVYDVRKMIAKSEQEIGKATAKYFFYSNIMNFFKTEITLANGEIRKRPLIETNGETGEIVWDKGRDFATVRKVLSMPQVNIVKKTEVQTGGFSKESILPKRNSDKLIARKKDWDPKKYGGFDSPTVAYSVLVVAKVEKGKSKKLKSVKELLGITIMERSSFEKNPIDFLEAKGYKEVKKDLIIKLPKYSLFELENGRKRMLASAGELQKGNELALPSKYVNFLYLASHYEKLKGSPEDNEQKQLFVEQHKHYLDEIIEQISEFSKRVILADANLDKVLSAYNKHRDKPIREQAENIIHLFTLTNLGAPAAFKYFDTTIDRKRYTSTKEVLDATLIHQSITGLYETRIDLSQLGGDGGGGGPAPEAAAKGGTAPLEEEYRLFLEAPIQNVTLLEQWKREIPKVWAEINPPGLASTQAPIHVQLLSTALPVRVRQYPITLEAKRSLRETIRKFRAAGILRPVHSPWNTPLLPVRKSGTSEYRMVQDLREVNKRVETIHPTVPNPYTLLSLLPPDRIWYSVLDLKDAFFCIPLAPESQLIFAFEWADAEEGESGQLTWTRLPQGFKNSPTLFNEALNRDLQGFRLDHPSVSLLQYVDDLLIAADTQAACLSATRDLLMTLAELGYRVSGKKAQLCQEEVTYLGFKIHKGSRSLSNSRTQAILQIPVPKTKRQVREFLGTIGYCRLWIPGFAELAQPLYAATRPGNDPLVWGEKEEEAFQSLKLALTQPPALALPSLDKPFQLFVEETSGAAKGVLTQALGPWKRPVAYLSKRLDPVAAGWPRCLRAIAAAALLTREASKLTFGQDIEITSSHNLESLLRSPPDKWLTNARITQYQVLLLDPPRVRFKQTAALNPATLLPETDDTLPIHHCLDTLDSLTSTRPDLTDQPLAQAEATLFTDGSSYIRDGKRYAGAAVVTLDSVIWAEPLPIGTSAQKAELIALTKALEWSKDKSVNIYTDSRYAFATLHVHGMIYRERGWLTAGGKAIKNAPEILALLTAVWLPKRVAVMHCKGHQKDDAPTSTGNRRADEVAREVAIRPLSTQATISAGKRTADGSEFEKRTADGSEFESPKKKAKVE

SEQ ID NO: 7463 - protein, 2102 aa, synthetic construct
MPAAKRVKLDGGDKKYSIGLDIGTNSVGWAVITDEYKVPSKKFKVLGNTDRHSIKKNLIGALLFDSGETAEATRLKRTARRRYTRRKNRICYLQEIFSNEMAKVDDSFFHRLEESFLVEEDKKHERHPIFGNIVDEVAYHEKYPTIYHLRKKLVDSTDKADLRLIYLALAHMIKFRGHFLIEGDLNPDNSDVDKLFIQLVQTYNQLFEENPINASGVDAKAILSARLSKSRRLENLIAQLPGEKKNGLFGNLIALSLGLTPNFKSNFDLAEDAKLQLSKDTYDDDLDNLLAQIGDQYADLFLAAKNLSDAILLSDILRVNTEITKAPLSASMIKRYDEHHQDLTLLKALVRQQLPEKYKEIFFDQSKNGYAGYIDGGASQEEFYKFIKPILEKMDGTEELLVKLNREDLLRKQRTFDNGSIPHQIHLGELHAILRRQEDFYPFLKDNREKIEKILTFRIPYYVGPLARGNSRFAWMTRKSEETITPWNFEEVVDKGASAQSFIERMTNFDKNLPNEKVLPKHSLLYEYFTVYNELTKVKYVTEGMRKPAFLSGEQKKAIVDLLFKTNRKVTVKQLKEDYFKKIECFDSVEISGVEDRFNASLGTYHDLLKIIKDKDFLDNEENEDILEDIVLTLTLFEDREMIEERLKTYAHLFDDKVMKQLKRRRYTGWGRLSRKLINGIRDKQSGKTILDFLKSDGFANRNFMQLIHDDSLTFKEDIQKAQVSGQGDSLHEHIANLAGSPAIKKGILQTVKVVDELVKVMGRHKPENIVIEMARENQTTQKGQKNSRERMKRIEEGIKELGSQILKEHPVENTQLQNEKLYLYYLQNGRDMYVDQELDINRLSDYDVDHIVPQSFLKDDSIDNKVLTRSDKARGKSDNVPSEEVVKKMKNYWRQLLNAKLITQRKFDNLTKAERGGLSELDKAGFIKRQLVETRQITKHVAQILDSRMNTKYDENDKLIREVKVITLKSKLVSDFRKDFQFYKVREINNYHHAHDAYLNAVVGTALIKKYPKLESEFVYGDYKVYDVRKMIAKSEQEIGKATAKYFFYSNIMNFFKTEITLANGEIRKRPLIETNGETGEIVWDKGRDFATVRKVLSMPQVNIVKKTEVQTGGFSKESILPKRNSDKLIARKKDWDPKKYGGFDSPTVAYSVLVVAKVEKGKSKKLKSVKELLGITIMERSSFEKNPIDFLEAKGYKEVKKDLIIKLPKYSLFELENGRKRMLASAGELQKGNELALPSKYVNFLYLASHYEKLKGSPEDNEQKQLFVEQHKHYLDEIIEQISEFSKRVILADANLDKVLSAYNKHRDKPIREQAENIIHLFTLTNLGAPAAFKYFDTTIDRKRYTSTKEVLDATLIHQSITGLYETRIDLSQLGGDGGGGGPAPEAAAKGGTVSLQDEHRLFDIPVTTSLPDVWLQDFPQAWAETGGLGRAKCQAPIIIDLKPTAVPVSIKQYPMSLEAHMGIRQHIIKFLELGVLRPCRSPWNTPLLPVKKPGTQDYRPVQDLREINKRTVDIHPTVPNPYNLLSTLKPDYSWYTVLDLKDAFFCLPLAPQSQELFAFEWKDPERGISGQLTWTRLPQGFKNSPTLFNEALHRDLTDFRTQHPEVTLLQYVDDLLLAAPTKKACTQGTRHLLQELGEKGYRASAKKAQICQTKVTYLGYILSEGKRWLTPGRIETVARIPPPRNPREVREFLGTAGFCRLWIPGFAELAAPLYALTKPSTPFTWQTEHQLAFEALKKALLSAPALGLPDTSKPFTLFLDERQGIAKGVLTQKLGPWKRPVAYLSKKLDPVAAGWPPCLRIMAATAMLVKDSAKLTLGQPLTVITPHTLEAIVRQPPDRWITNARLTHYQALLLDTDRVQFGPPVTLNPATLLPVPENQPSPHDCRQVLAETHGTREDLKDQELPDADHTWYTDGSSYLDSGTRRAGAAVVDGHNTIWAQSLPPGTSAQKAELIALTKALELSKGKKANIYTDSRYAFATAHTHGSIYERRGWLTSEGKEIKNKAEIIALLKALFLPQEVAIIHCPGHQKGQDPVAVGNRQADRVARQAAMAEVLTLATEPDNTSHITAGKRTADGSEFEKRTADGSEFESPKKKAKVE

SEQ ID NO: 7464 - protein, 2173 aa, synthetic construct
MPAAKRVKLDGGDKKYSIGLDIGTNSVGWAVITDEYKVPSKKFKVLGNTDRHSIKKNLIGALLFDSGETAEATRLKRTARRRYTRRKNRICYLQEIFSNEMAKVDDSFFHRLEESFLVEEDKKHERHPIFGNIVDEVAYHEKYPTIYHLRKKLVDSTDKADLRLIYLALAHMIKFRGHFLIEGDLNPDNSDVDKLFIQLVQTYNQLFEENPINASGVDAKAILSARLSKSRRLENLIAQLPGEKKNGLFGNLIALSLGLTPNFKSNFDLAEDAKLQLSKDTYDDDLDNLLAQIGDQYADLFLAAKNLSDAILLSDILRVNTEITKAPLSASMIKRYDEHHQDLTLLKALVRQQLPEKYKEIFFDQSKNGYAGYIDGGASQEEFYKFIKPILEKMDGTEELLVKLNREDLLRKQRTFDNGSIPHQIHLGELHAILRRQEDFYPFLKDNREKIEKILTFRIPYYVGPLARGNSRFAWMTRKSEETITPWNFEEVVDKGASAQSFIERMTNFDKNLPNEKVLPKHSLLYEYFTVYNELTKVKYVTEGMRKPAFLSGEQKKAIVDLLFKTNRKVTVKQLKEDYFKKIECFDSVEISGVEDRFNASLGTYHDLLKIIKDKDFLDNEENEDILEDIVLTLTLFEDREMIEERLKTYAHLFDDKVMKQLKRRRYTGWGRLSRKLINGIRDKQSGKTILDFLKSDGFANRNFMQLIHDDSLTFKEDIQKAQVSGQGDSLHEHIANLAGSPAIKKGILQTVKVVDELVKVMGRHKPENIVIEMARENQTTQKGQKNSRERMKRIEEGIKELGSQILKEHPVENTQLQNEKLYLYYLQNGRDMYVDQELDINRLSDYDVDHIVPQSFLKDDSIDNKVLTRSDKARGKSDNVPSEEVVKKMKNYWRQLLNAKLITQRKFDNLTKAERGGLSELDKAGFIKRQLVETRQITKHVAQILDSRMNTKYDENDKLIREVKVITLKSKLVSDFRKDFQFYKVREINNYHHAHDAYLNAVVGTALIKKYPKLESEFVYGDYKVYDVRKMIAKSEQEIGKATAKYFFYSNIMNFFKTEITLANGEIRKRPLIETNGETGEIVWDKGRDFATVRKVLSMPQVNIVKKTEVQTGGFSKESILPKRNSDKLIARKKDWDPKKYGGFDSPTVAYSVLVVAKVEKGKSKKLKSVKELLGITIMERSSFEKNPIDFLEAKGYKEVKKDLIIKLPKYSLFELENGRKRMLASAGELQKGNELALPSKYVNFLYLASHYEKLKGSPEDNEQKQLFVEQHKHYLDEIIEQISEFSKRVILADANLDKVLSAYNKHRDKPIREQAENIIHLFTLTNLGAPAAFKYFDTTIDRKRYTSTKEVLDATLIHQSITGLYETRIDLSQLGGDGGGGGPAPEAAAKGGMDLLKPLTVERKGVKIKGYWNSQADITCVPKDLLQGEEPVRQQNVTTIHGTQEGDVYYVNLKIDGRRINTEVIGTTLDYAIITPGDVPWILKKPLELTIKLDLEEQQGTLLNNSILSKKGKEELKQLFEKYSALWQSWENQVGHRRIRPHKIATGTVKPTPQKQYHINPKAKPDIQIVINDLLKQGVLIQKESTMNTPVYPVPKPNGRWRMVLDYRAVNKVTPLIAVQNQHSYGILGSLFKGRYKTTIDLSNGFWAHPIVPEDYWITAFTWQGKQYCWTVLPQGFLNSPGLFTGDVVDLLQGIPNVEVYVDDVYISHDSEKEHLEYLDILFNRLKEAGYIISLKKSNIANSIVDFLGFQITNEGRGLTDTFKEKLENITAPTTLKQLQSILGLLNFARNFIPDFTELIAPLYALIPKSTKNYVPWQIEHSTTLETLITKLNGAEYLQGRKGDKTLIMKVNASYTTGYIRYYNEGEKKPISYVSIVFSKTELKFTELEKLLTTVHKGLLKALDLSMGQNIHVYSPIVSMQNIQKTPQTAKKALASRWLSWLSYLEDPRIRFFYDPQMPALKDLPAVDTGKDNKKHPSNFQHIFYTDGSAITSPTKEGHLNAGMGIVYFINKDGNLQKQQEWSISLGNHTAQFAEIAAFEFALKKCLPLGGNILVVTDSNYVAKAYNEELDVWASNGFVNNRKKPLKHISKWKSVADLKRLRPDVVVTHEPGHQKLDSSPHAYGNNLADQLATQASFKVHAGKRTADGSEFEKRTADGSEFESPKKKAKVE

SEQ ID NO: 7465 - protein, 2087 aa, synthetic construct
MPAAKRVKLDGGDKKYSIGLDIGTNSVGWAVITDEYKVPSKKFKVLGNTDRHSIKKNLIGALLFDSGETAEATRLKRTARRRYTRRKNRICYLQEIFSNEMAKVDDSFFHRLEESFLVEEDKKHERHPIFGNIVDEVAYHEKYPTIYHLRKKLVDSTDKADLRLIYLALAHMIKFRGHFLIEGDLNPDNSDVDKLFIQLVQTYNQLFEENPINASGVDAKAILSARLSKSRRLENLIAQLPGEKKNGLFGNLIALSLGLTPNFKSNFDLAEDAKLQLSKDTYDDDLDNLLAQIGDQYADLFLAAKNLSDAILLSDILRVNTEITKAPLSASMIKRYDEHHQDLTLLKALVRQQLPEKYKEIFFDQSKNGYAGYIDGGASQEEFYKFIKPILEKMDGTEELLVKLNREDLLRKQRTFDNGSIPHQIHLGELHAILRRQEDFYPFLKDNREKIEKILTFRIPYYVGPLARGNSRFAWMTRKSEETITPWNFEEVVDKGASAQSFIERMTNFDKNLPNEKVLPKHSLLYEYFTVYNELTKVKYVTEGMRKPAFLSGEQKKAIVDLLFKTNRKVTVKQLKEDYFKKIECFDSVEISGVEDRFNASLGTYHDLLKIIKDKDFLDNEENEDILEDIVLTLTLFEDREMIEERLKTYAHLFDDKVMKQLKRRRYTGWGRLSRKLINGIRDKQSGKTILDFLKSDGFANRNFMQLIHDDSLTFKEDIQKAQVSGQGDSLHEHIANLAGSPAIKKGILQTVKVVDELVKVMGRHKPENIVIEMARENQTTQKGQKNSRERMKRIEEGIKELGSQILKEHPVENTQLQNEKLYLYYLQNGRDMYVDQELDINRLSDYDVDHIVPQSFLKDDSIDNKVLTRSDKARGKSDNVPSEEVVKKMKNYWRQLLNAKLITQRKFDNLTKAERGGLSELDKAGFIKRQLVETRQITKHVAQILDSRMNTKYDENDKLIREVKVITLKSKLVSDFRKDFQFYKVREINNYHHAHDAYLNAVVGTALIKKYPKLESEFVYGDYKVYDVRKMIAKSEQEIGKATAKYFFYSNIMNFFKTEITLANGEIRKRPLIETNGETGEIVWDKGRDFATVRKVLSMPQVNIVKKTEVQTGGFSKESILPKRNSDKLIARKKDWDPKKYGGFDSPTVAYSVLVVAKVEKGKSKKLKSVKELLGITIMERSSFEKNPIDFLEAKGYKEVKKDLIIKLPKYSLFELENGRKRMLASAGELQKGNELALPSKYVNFLYLASHYEKLKGSPEDNEQKQLFVEQHKHYLDEIIEQISEFSKRVILADANLDKVLSAYNKHRDKPIREQAENIIHLFTLTNLGAPAAFKYFDTTIDRKRYTSTKEVLDATLIHQSITGLYETRIDLSQLGGDGGGGGPAPEAAAKGGVPWILKKPLELTIKLDLEEQQGTLLNNSILSKKGKEELKQLFEKYSALWQSWENQVGHRRIRPHKIATGTVKPTPQKQYHINPKAKPDIQIVINDLLKQGVLIQKESTMNTPVYPVPKPNGRWRMVLDYRAVNKVTPLIAVQNQHSYGILGSLFKGRYKTTIDLSNGFWAHPIVPEDYWITAFTWQGKQYCWTVLPQGFLNSPGLFNGDVVDLLQGIPNVEVYVDDVYISHDSEKEHLEYLDILFNRLKEAGYIISLKKSNIANSIVDFLGFQITNEGRGLTDTFKEKLENITAPTTLKQLQSILGLLNFARNFIPDFTELIAPLYALIPKSPKNYVPWQIEHSTTLETLITKLNGAEYLQGRKGDKTLIMKVNASYTTGYIRYYNEGEKKPISYVSIVFSKTELKFTELEKLLTTVHKGLLKALDLSMGQNIHVYSPIVSMQNIQKTPQTAKKALASRWLSWLSYLEDPRIRFFYDPQMPALKDLPAVDTGKDNKKHPSNFQHIFYTDGSAITSPTKEGHLNAGMGIVYFINKDGNLQKQQEWSISLGNHTAQFAEIAAFEFALKKCLPLGGNILVVTDSNYVAKAYNEELDVWASNGFVNNRKKPLKHISKWKSVADLKRLRPDVVVTHEPGHQKLDSSPHAYGNNLADQLATQASFKVHAGKRTADGSEFEKRTADGSEFESPKKKAKVE

SEQ ID NO: 7466 - protein, 2173 aa, synthetic construct
MPAAKRVKLDGGDKKYSIGLDIGTNSVGWAVITDEYKVPSKKFKVLGNTDRHSIKKNLIGALLFDSGETAEATRLKRTARRRYTRRKNRICYLQEIFSNEMAKVDDSFFHRLEESFLVEEDKKHERHPIFGNIVDEVAYHEKYPTIYHLRKKLVDSTDKADLRLIYLALAHMIKFRGHFLIEGDLNPDNSDVDKLFIQLVQTYNQLFEENPINASGVDAKAILSARLSKSRRLENLIAQLPGEKKNGLFGNLIALSLGLTPNFKSNFDLAEDAKLQLSKDTYDDDLDNLLAQIGDQYADLFLAAKNLSDAILLSDILRVNTEITKAPLSASMIKRYDEHHQDLTLLKALVRQQLPEKYKEIFFDQSKNGYAGYIDGGASQEEFYKFIKPILEKMDGTEELLVKLNREDLLRKQRTFDNGSIPHQIHLGELHAILRRQEDFYPFLKDNREKIEKILTFRIPYYVGPLARGNSRFAWMTRKSEETITPWNFEEVVDKGASAQSFIERMTNFDKNLPNEKVLPKHSLLYEYFTVYNELTKVKYVTEGMRKPAFLSGEQKKAIVDLLFKTNRKVTVKQLKEDYFKKIECFDSVEISGVEDRFNASLGTYHDLLKIIKDKDFLDNEENEDILEDIVLTLTLFEDREMIEERLKTYAHLFDDKVMKQLKRRRYTGWGRLSRKLINGIRDKQSGKTILDFLKSDGFANRNFMQLIHDDSLTFKEDIQKAQVSGQGDSLHEHIANLAGSPAIKKGILQTVKVVDELVKVMGRHKPENIVIEMARENQTTQKGQKNSRERMKRIEEGIKELGSQILKEHPVENTQLQNEKLYLYYLQNGRDMYVDQELDINRLSDYDVDHIVPQSFLKDDSIDNKVLTRSDKARGKSDNVPSEEVVKKMKNYWRQLLNAKLITQRKFDNLTKAERGGLSELDKAGFIKRQLVETRQITKHVAQILDSRMNTKYDENDKLIREVKVITLKSKLVSDFRKDFQFYKVREINNYHHAHDAYLNAVVGTALIKKYPKLESEFVYGDYKVYDVRKMIAKSEQEIGKATAKYFFYSNIMNFFKTEITLANGEIRKRPLIETNGETGEIVWDKGRDFATVRKVLSMPQVNIVKKTEVQTGGFSKESILPKRNSDKLIARKKDWDPKKYGGFDSPTVAYSVLVVAKVEKGKSKKLKSVKELLGITIMERSSFEKNPIDFLEAKGYKEVKKDLIIKLPKYSLFELENGRKRMLASAGELQKGNELALPSKYVNFLYLASHYEKLKGSPEDNEQKQLFVEQHKHYLDEIIEQISEFSKRVILADANLDKVLSAYNKHRDKPIREQAENIIHLFTLTNLGAPAAFKYFDTTIDRKRYTSTKEVLDATLIHQSITGLYETRIDLSQLGGDGGGGGPAPEAAAKGGMDLLKPLTVERKGVKIKGYWNSQADITCVPKDLLQGEEPVRQQNVTTIHGTQEGDVYYVNLKIDGRRINTEVIGTTLDYAIITPGDVPWILKKPLELTIKLDLEEQQGTLLNNSILSKKGKEELKQLFEKYSALWQSWENQVGHRRIRPHKIATGTVKPTPQKQYHINPKAKPDIQIVINDLLKQGVLIQKESTMNTPVYPVPKPNGRWRMVLDYRAVNKVTPLIAVQNQHSYGILGSLFKGRYKTTIDLSNGFWAHPIVPEDYWITAFTWQGKQYCWTVLPQGFLNSPGLFNGDVVDLLQGIPNVEVYVDDVYISHDSEKEHLEYLDILFNRLKEAGYIISLKKSNIANSIVDFLGFQITNEGRGLTDTFKEKLENITAPTTLKQLQSILGLLNFARNFIPDFTELIAPLYALIPKSPKNYVPWQIEHSTTLETLITKLNGAEYLQGRKGDKTLIMKVNASYTTGYIRYYNEGEKKPISYVSIVFSKTELKFTELEKLLTTVHKGLLKALDLSMGQNIHVYSPIVSMQNIQKTPQTAKKALASRWLSWLSYLEDPRIRFFYDPQMPALKDLPAVDTGKDNKKHPSNFQHIFYTDGSAITSPTKEGHLNAGMGIVYFINKDGNLQKQQEWSISLGNHTAQFAEIAAFEFALKKCLPLGGNILVVTDSNYVAKAYNEELDVWASNGFVNNRKKPLKHISKWKSVADLKRLRPDVVVTHEPGHQKLDSSPHAYGNNLADQLATQASFKVHAGKRTADGSEFEKRTADGSEFESPKKKAKVE

SEQ ID NO: 7467 - protein, 2094 aa, synthetic construct
MPAAKRVKLDGGDKKYSIGLDIGTNSVGWAVITDEYKVPSKKFKVLGNTDRHSIKKNLIGALLFDSGETAEATRLKRTARRRYTRRKNRICYLQEIFSNEMAKVDDSFFHRLEESFLVEEDKKHERHPIFGNIVDEVAYHEKYPTIYHLRKKLVDSTDKADLRLIYLALAHMIKFRGHFLIEGDLNPDNSDVDKLFIQLVQTYNQLFEENPINASGVDAKAILSARLSKSRRLENLIAQLPGEKKNGLFGNLIALSLGLTPNFKSNFDLAEDAKLQLSKDTYDDDLDNLLAQIGDQYADLFLAAKNLSDAILLSDILRVNTEITKAPLSASMIKRYDEHHQDLTLLKALVRQQLPEKYKEIFFDQSKNGYAGYIDGGASQEEFYKFIKPILEKMDGTEELLVKLNREDLLRKQRTFDNGSIPHQIHLGELHAILRRQEDFYPFLKDNREKIEKILTFRIPYYVGPLARGNSRFAWMTRKSEETITPWNFEEVVDKGASAQSFIERMTNFDKNLPNEKVLPKHSLLYEYFTVYNELTKVKYVTEGMRKPAFLSGEQKKAIVDLLFKTNRKVTVKQLKEDYFKKIECFDSVEISGVEDRFNASLGTYHDLLKIIKDKDFLDNEENEDILEDIVLTLTLFEDREMIEERLKTYAHLFDDKVMKQLKRRRYTGWGRLSRKLINGIRDKQSGKTILDFLKSDGFANRNFMQLIHDDSLTFKEDIQKAQVSGQGDSLHEHIANLAGSPAIKKGILQTVKVVDELVKVMGRHKPENIVIEMARENQTTQKGQKNSRERMKRIEEGIKELGSQILKEHPVENTQLQNEKLYLYYLQNGRDMYVDQELDINRLSDYDVDHIVPQSFLKDDSIDNKVLTRSDKARGKSDNVPSEEVVKKMKNYWRQLLNAKLITQRKFDNLTKAERGGLSELDKAGFIKRQLVETRQITKHVAQILDSRMNTKYDENDKLIREVKVITLKSKLVSDFRKDFQFYKVREINNYHHAHDAYLNAVVGTALIKKYPKLESEFVYGDYKVYDVRKMIAKSEQEIGKATAKYFFYSNIMNFFKTEITLANGEIRKRPLIETNGETGEIVWDKGRDFATVRKVLSMPQVNIVKKTEVQTGGFSKESILPKRNSDKLIARKKDWDPKKYGGFDSPTVAYSVLVVAKVEKGKSKKLKSVKELLGITIMERSSFEKNPIDFLEAKGYKEVKKDLIIKLPKYSLFELENGRKRMLASAGELQKGNELALPSKYVNFLYLASHYEKLKGSPEDNEQKQLFVEQHKHYLDEIIEQISEFSKRVILADANLDKVLSAYNKHRDKPIREQAENIIHLFTLTNLGAPAAFKYFDTTIDRKRYTSTKEVLDATLIHQSITGLYETRIDLSQLGGDGGGGGPAPEAAAKGGVLNLEEEYRLHEKPVPSSIDPSWLQLFPTVWAERAGMGLANQVPPVVVELRSGASPVAVRQYPMSKEAREGIRPHIQKFLDLGVLVPCRSPWNTPLLPVKKPGTNDYRPVQDLREINKRVQDIHPTVPNPYNLLSSLPPSYTWYSVLDLKDAFFCLRLHPNSQPLFAFEWKDPEKGNTGQLTWTRLPQGFKNSPTLFNEALHRDLAPFRALNPQVVLLQYVDDLLVAAPTYEDCKKGTQKLLQELSKLGYRVSAKKAQLCQREVTYLGYLLKEGKRWLTPARKATVMKIPVPTTPRQVREFLGKAGFCRLFIPGFASLAAPLYPLTKPSIPFIWTEEHQQAFDHIKKALLSAPALALPDLTKPFTLYIDERAGVARGVLTQTLGPWRRPVAYLSKKLDPVASGWPTCLKAVAAVALLLKDADKLTLGQNVTVIASHSLESIVRQPPDRWMTNARMTHYQSLLLNERVSFAPPAVLNPATLLPVESEATPVHRCSEILAEETGTRRDLEDQPLPGVPTWYTDGSSFITEGKRRAGAPIVDGKRTVWASSLPEGTSAQKAELVALTQALRLAEGKNINIYTDSRYAFATAHIHGAIYKQRGWLTSAGKDIKNKEEILALLEAIHLPRRVAIIHCPGHQRGSNPVATGNRRADEAAKQAALSTRVLAGTTKPAGKRTADGSEFEKRTADGSEFESPKKKAKVE

SEQ ID NO: 7468 - protein, 2009 aa, synthetic construct
MPAAKRVKLDGGDKKYSIGLDIGTNSVGWAVITDEYKVPSKKFKVLGNTDRHSIKKNLIGALLFDSGETAEATRLKRTARRRYTRRKNRICYLQEIFSNEMAKVDDSFFHRLEESFLVEEDKKHERHPIFGNIVDEVAYHEKYPTIYHLRKKLVDSTDKADLRLIYLALAHMIKFRGHFLIEGDLNPDNSDVDKLFIQLVQTYNQLFEENPINASGVDAKAILSARLSKSRRLENLIAQLPGEKKNGLFGNLIALSLGLTPNFKSNFDLAEDAKLQLSKDTYDDDLDNLLAQIGDQYADLFLAAKNLSDAILLSDILRVNTEITKAPLSASMIKRYDEHHQDLTLLKALVRQQLPEKYKEIFFDQSKNGYAGYIDGGASQEEFYKFIKPILEKMDGTEELLVKLNREDLLRKQRTFDNGSIPHQIHLGELHAILRRQEDFYPFLKDNREKIEKILTFRIPYYVGPLARGNSRFAWMTRKSEETITPWNFEEVVDKGASAQSFIERMTNFDKNLPNEKVLPKHSLLYEYFTVYNELTKVKYVTEGMRKPAFLSGEQKKAIVDLLFKTNRKVTVKQLKEDYFKKIECFDSVEISGVEDRFNASLGTYHDLLKIIKDKDFLDNEENEDILEDIVLTLTLFEDREMIEERLKTYAHLFDDKVMKQLKRRRYTGWGRLSRKLINGIRDKQSGKTILDFLKSDGFANRNFMQLIHDDSLTFKEDIQKAQVSGQGDSLHEHIANLAGSPAIKKGILQTVKVVDELVKVMGRHKPENIVIEMARENQTTQKGQKNSRERMKRIEEGIKELGSQILKEHPVENTQLQNEKLYLYYLQNGRDMYVDQELDINRLSDYDVDHIVPQSFLKDDSIDNKVLTRSDKARGKSDNVPSEEVVKKMKNYWRQLLNAKLITQRKFDNLTKAERGGLSELDKAGFIKRQLVETRQITKHVAQILDSRMNTKYDENDKLIREVKVITLKSKLVSDFRKDFQFYKVREINNYHHAHDAYLNAVVGTALIKKYPKLESEFVYGDYKVYDVRKMIAKSEQEIGKATAKYFFYSNIMNFFKTEITLANGEIRKRPLIETNGETGEIVWDKGRDFATVRKVLSMPQVNIVKKTEVQTGGFSKESILPKRNSDKLIARKKDWDPKKYGGFDSPTVAYSVLVVAKVEKGKSKKLKSVKELLGITIMERSSFEKNPIDFLEAKGYKEVKKDLIIKLPKYSLFELENGRKRMLASAGELQKGNELALPSKYVNFLYLASHYEKLKGSPEDNEQKQLFVEQHKHYLDEIIEQISEFSKRVILADANLDKVLSAYNKHRDKPIREQAENIIHLFTLTNLGAPAAFKYFDTTIDRKRYTSTKEVLDATLIHQSITGLYETRIDLSQLGGDGGGGGPAPEAAAKGGHLPPPPQVDQFPLNLPERLQALNDLVSKALEAGHIEPYSGPGNNPVFPVKKPNGKWRFIHDLRATNAITTTLTSPSPGPPDLTSLPTALPHLQTIDLTDAFFQIPLPKQYQPYFAFTIPQPCNYGPGTRYAWTVLPQGFKNSPTLFQQQLAAVLNPMRKMFPTSTIVQYMDDILLASPTNEELQQLSQLTLQALTTHGLPISQEKTQQTPGQIRFLGQVISPNHITYESTPTIPIKSQWTLTELQVILGEIQWVSKGTPILRKHLQSLYSALHPYRDPRACITLTPQQLHALHAIQQALQHNCRGRLNPALPLLGLISLSTSGTTSVIFQPKQNWPLAWLHTPHPPTSLCPWGHLLACTILTLDKYTLQHYGQLCQSFHHNMSKQALCDFLRNSPHPSVGILIHHMGRFHNLGSQPSGPWKTLLHLPTLLQEPRLLRPIFTLSPVVLDTAPCLFSDGSPQKAAYVLWDQTILQQDITPLPSHETHSAQKGELLALICGLRAAKPWPSLNIFLDSKYLIKYLHSLAIGAFLGTSAHQTLQAALPPLLQGKTIYLHHVRSHTNLPDPISTFNEYTDSLILAPLVPLAGKRTADGSEFEKRTADGSEFESPKKKAKVE

SEQ ID NO: 7469 - protein, 2127 aa, synthetic construct
MPAAKRVKLDGGDKKYSIGLDIGTNSVGWAVITDEYKVPSKKFKVLGNTDRHSIKKNLIGALLFDSGETAEATRLKRTARRRYTRRKNRICYLQEIFSNEMAKVDDSFFHRLEESFLVEEDKKHERHPIFGNIVDEVAYHEKYPTIYHLRKKLVDSTDKADLRLIYLALAHMIKFRGHFLIEGDLNPDNSDVDKLFIQLVQTYNQLFEENPINASGVDAKAILSARLSKSRRLENLIAQLPGEKKNGLFGNLIALSLGLTPNFKSNFDLAEDAKLQLSKDTYDDDLDNLLAQIGDQYADLFLAAKNLSDAILLSDILRVNTEITKAPLSASMIKRYDEHHQDLTLLKALVRQQLPEKYKEIFFDQSKNGYAGYIDGGASQEEFYKFIKPILEKMDGTEELLVKLNREDLLRKQRTFDNGSIPHQIHLGELHAILRRQEDFYPFLKDNREKIEKILTFRIPYYVGPLARGNSRFAWMTRKSEETITPWNFEEVVDKGASAQSFIERMTNFDKNLPNEKVLPKHSLLYEYFTVYNELTKVKYVTEGMRKPAFLSGEQKKAIVDLLFKTNRKVTVKQLKEDYFKKIECFDSVEISGVEDRFNASLGTYHDLLKIIKDKDFLDNEENEDILEDIVLTLTLFEDREMIEERLKTYAHLFDDKVMKQLKRRRYTGWGRLSRKLINGIRDKQSGKTILDFLKSDGFANRNFMQLIHDDSLTFKEDIQKAQVSGQGDSLHEHIANLAGSPAIKKGILQTVKVVDELVKVMGRHKPENIVIEMARENQTTQKGQKNSRERMKRIEEGIKELGSQILKEHPVENTQLQNEKLYLYYLQNGRDMYVDQELDINRLSDYDVDHIVPQSFLKDDSIDNKVLTRSDKARGKSDNVPSEEVVKKMKNYWRQLLNAKLITQRKFDNLTKAERGGLSELDKAGFIKRQLVETRQITKHVAQILDSRMNTKYDENDKLIREVKVITLKSKLVSDFRKDFQFYKVREINNYHHAHDAYLNAVVGTALIKKYPKLESEFVYGDYKVYDVRKMIAKSEQEIGKATAKYFFYSNIMNFFKTEITLANGEIRKRPLIETNGETGEIVWDKGRDFATVRKVLSMPQVNIVKKTEVQTGGFSKESILPKRNSDKLIARKKDWDPKKYGGFDSPTVAYSVLVVAKVEKGKSKKLKSVKELLGITIMERSSFEKNPIDFLEAKGYKEVKKDLIIKLPKYSLFELENGRKRMLASAGELQKGNELALPSKYVNFLYLASHYEKLKGSPEDNEQKQLFVEQHKHYLDEIIEQISEFSKRVILADANLDKVLSAYNKHRDKPIREQAENIIHLFTLTNLGAPAAFKYFDTTIDRKRYTSTKEVLDATLIHQSITGLYETRIDLSQLGGDGGGGGPAPEAAAKGGLLGRDLLTKLKAQIQFSTEGPQVTWEDRPAMCLVLNLEEEYRLHEKPVPPSIDPSWLQLFPMVWAEKAGMGLANQVPPVVVELKSDASPVAVRQYPMSKEAREGIRPHIQRFLDLGILVPCQSPWNTPLLPVKKPGTNDYRPVQDLREVNKRVQDIHPTVPNPYNLLSSLPPSHTWYSVLDLKDAFFCLKLHPNSQPLFAFEWRDPEKGNTGQLTWTRLPQGFKNSPTLFNEALHRDLASFRALNPQVVMLQYVDDLLVAAPTYRDCKEGTRRLLQELSKLGYRVSAKKAQLCREEVTYLGYLLKGGKRWLTPARKATVMKIPTPTTPRQVREFLGTAGFCRLWIPGFASLAAPLYPLTRPKVPFTWTEAHQEAFGRIKEALLSAPALALPDLTKPFALYVDEKEGVARGVLTQTLGPWRRPVAYLSKKLDPVASGWPTCLKAIAAVALLLKDADKLTLGQNVLVIAPHNLESIVRQPPDRWMTNARMTHYQSLLLNERVSFAPPAILNPATLLPVESDDTPIHICSEILAEETGTRPDLRDQPLPGVPAWYTDGSSFIMDGRRQAGAAIVDNKRTVWASNLPEGTSAQKAELIALTQALRLAEGKSINIYTDSRYAFATAHVHGAIYKQRGWLTSAGKDIKNKEEILALLEAIHLPKRVAIIHCPGHQRGTDPVATGNRKADEAAKQAAQSTRILTETTKNAGKRTADGSEFEKRTADGSEFESPKKKAKVE

SEQ ID NO: 7470 - protein, 2127 aa, synthetic construct
MPAAKRVKLDGGDKKYSIGLDIGTNSVGWAVITDEYKVPSKKFKVLGNTDRHSIKKNLIGALLFDSGETAEATRLKRTARRRYTRRKNRICYLQEIFSNEMAKVDDSFFHRLEESFLVEEDKKHERHPIFGNIVDEVAYHEKYPTIYHLRKKLVDSTDKADLRLIYLALAHMIKFRGHFLIEGDLNPDNSDVDKLFIQLVQTYNQLFEENPINASGVDAKAILSARLSKSRRLENLIAQLPGEKKNGLFGNLIALSLGLTPNFKSNFDLAEDAKLQLSKDTYDDDLDNLLAQIGDQYADLFLAAKNLSDAILLSDILRVNTEITKAPLSASMIKRYDEHHQDLTLLKALVRQQLPEKYKEIFFDQSKNGYAGYIDGGASQEEFYKFIKPILEKMDGTEELLVKLNREDLLRKQRTFDNGSIPHQIHLGELHAILRRQEDFYPFLKDNREKIEKILTFRIPYYVGPLARGNSRFAWMTRKSEETITPWNFEEVVDKGASAQSFIERMTNFDKNLPNEKVLPKHSLLYEYFTVYNELTKVKYVTEGMRKPAFLSGEQKKAIVDLLFKTNRKVTVKQLKEDYFKKIECFDSVEISGVEDRFNASLGTYHDLLKIIKDKDFLDNEENEDILEDIVLTLTLFEDREMIEERLKTYAHLFDDKVMKQLKRRRYTGWGRLSRKLINGIRDKQSGKTILDFLKSDGFANRNFMQLIHDDSLTFKEDIQKAQVSGQGDSLHEHIANLAGSPAIKKGILQTVKVVDELVKVMGRHKPENIVIEMARENQTTQKGQKNSRERMKRIEEGIKELGSQILKEHPVENTQLQNEKLYLYYLQNGRDMYVDQELDINRLSDYDVDHIVPQSFLKDDSIDNKVLTRSDKARGKSDNVPSEEVVKKMKNYWRQLLNAKLITQRKFDNLTKAERGGLSELDKAGFIKRQLVETRQITKHVAQILDSRMNTKYDENDKLIREVKVITLKSKLVSDFRKDFQFYKVREINNYHHAHDAYLNAVVGTALIKKYPKLESEFVYGDYKVYDVRKMIAKSEQEIGKATAKYFFYSNIMNFFKTEITLANGEIRKRPLIETNGETGEIVWDKGRDFATVRKVLSMPQVNIVKKTEVQTGGFSKESILPKRNSDKLIARKKDWDPKKYGGFDSPTVAYSVLVVAKVEKGKSKKLKSVKELLGITIMERSSFEKNPIDFLEAKGYKEVKKDLIIKLPKYSLFELENGRKRMLASAGELQKGNELALPSKYVNFLYLASHYEKLKGSPEDNEQKQLFVEQHKHYLDEIIEQISEFSKRVILADANLDKVLSAYNKHRDKPIREQAENIIHLFTLTNLGAPAAFKYFDTTIDRKRYTSTKEVLDATLIHQSITGLYETRIDLSQLGGDGGGGGPAPEAAAKGGLLGRDLLTKLKAQIQFSTEGPQVTWEDRPAMCLVLNLEEEYRLHEKPVPPSIDPSWLQLFPMVWAEKAGMGLANQVPPVVVELKSDASPVAVRQYPMSKEAREGIRPHIQRFLDLGILVPCQSPWNTPLLPVKKPGTNDYRPVQDLREVNKRVQDIHPTVPNPYNLLSSLPPSHTWYSVLDLKDAFFCLKLHPNSQPLFAFEWRDPEKGNTGQLTWTRLPQGFKNSPTLFNEALHRDLASFRALNPQVVMLQYVDDLLVAAPTYRDCKEGTRRLLQELSKLGYRVSAKKAQLCREEVTYLGYLLKGGKRWLTPARKATVMKIPTPTTPRQVREFLGKAGFCRLFIPGFASLAAPLYPLTRPKVPFTWTEAHQEAFGRIKEALLSAPALALPDLTKPFALYVDEKEGVARGVLTQTLGPWRRPVAYLSKKLDPVASGWPTCLKAIAAVALLLKDADKLTLGQNVLVIAPHNLESIVRQPPDRWMTNARMTHYQSLLLNERVSFAPPAILNPATLLPVESDDTPIHICSEILAEETGTRPDLRDQPLPGVPAWYTDGSSFIMDGRRQAGAAIVDNKRTVWASNLPEGTSAQKAELIALTQALRLAEGKSINIYTDSRYAFATAHVHGAIYKQRGWLTSAGKDIKNKEEILALLEAIHLPKRVAIIHCPGHQRGTDPVATGNRKADEAAKQAAQSTRILTETTKNAGKRTADGSEFEKRTADGSEFESPKKKAKVE

SEQ ID NO: 7471 - protein, 2096 aa, synthetic construct
MPAAKRVKLDGGDKKYSIGLDIGTNSVGWAVITDEYKVPSKKFKVLGNTDRHSIKKNLIGALLFDSGETAEATRLKRTARRRYTRRKNRICYLQEIFSNEMAKVDDSFFHRLEESFLVEEDKKHERHPIFGNIVDEVAYHEKYPTIYHLRKKLVDSTDKADLRLIYLALAHMIKFRGHFLIEGDLNPDNSDVDKLFIQLVQTYNQLFEENPINASGVDAKAILSARLSKSRRLENLIAQLPGEKKNGLFGNLIALSLGLTPNFKSNFDLAEDAKLQLSKDTYDDDLDNLLAQIGDQYADLFLAAKNLSDAILLSDILRVNTEITKAPLSASMIKRYDEHHQDLTLLKALVRQQLPEKYKEIFFDQSKNGYAGYIDGGASQEEFYKFIKPILEKMDGTEELLVKLNREDLLRKQRTFDNGSIPHQIHLGELHAILRRQEDFYPFLKDNREKIEKILTFRIPYYVGPLARGNSRFAWMTRKSEETITPWNFEEVVDKGASAQSFIERMTNFDKNLPNEKVLPKHSLLYEYFTVYNELTKVKYVTEGMRKPAFLSGEQKKAIVDLLFKTNRKVTVKQLKEDYFKKIECFDSVEISGVEDRFNASLGTYHDLLKIIKDKDFLDNEENEDILEDIVLTLTLFEDREMIEERLKTYAHLFDDKVMKQLKRRRYTGWGRLSRKLINGIRDKQSGKTILDFLKSDGFANRNFMQLIHDDSLTFKEDIQKAQVSGQGDSLHEHIANLAGSPAIKKGILQTVKVVDELVKVMGRHKPENIVIEMARENQTTQKGQKNSRERMKRIEEGIKELGSQILKEHPVENTQLQNEKLYLYYLQNGRDMYVDQELDINRLSDYDVDHIVPQSFLKDDSIDNKVLTRSDKARGKSDNVPSEEVVKKMKNYWRQLLNAKLITQRKFDNLTKAERGGLSELDKAGFIKRQLVETRQITKHVAQILDSRMNTKYDENDKLIREVKVITLKSKLVSDFRKDFQFYKVREINNYHHAHDAYLNAVVGTALIKKYPKLESEFVYGDYKVYDVRKMIAKSEQEIGKATAKYFFYSNIMNFFKTEITLANGEIRKRPLIETNGETGEIVWDKGRDFATVRKVLSMPQVNIVKKTEVQTGGFSKESILPKRNSDKLIARKKDWDPKKYGGFDSPTVAYSVLVVAKVEKGKSKKLKSVKELLGITIMERSSFEKNPIDFLEAKGYKEVKKDLIIKLPKYSLFELENGRKRMLASAGELQKGNELALPSKYVNFLYLASHYEKLKGSPEDNEQKQLFVEQHKHYLDEIIEQISEFSKRVILADANLDKVLSAYNKHRDKPIREQAENIIHLFTLTNLGAPAAFKYFDTTIDRKRYTSTKEVLDATLIHQSITGLYETRIDLSQLGGDGGGGGPAPEAAAKGGLGIEDEYRLHETSTEPDVSLGSTWLSDFPQAWAETGGMGLAVRQAPLIIPLKATSTPVSIQQYPMSHEARLGIKPHIQRLLDQGILVPCQSPWNTPLLPVKKPGTNDYRPVQDLREVNKRVEDIHPTVPNPYNLLSGLPPSHQWYTVLDLKDAFFCLRLHPTSQPLFAFEWRDPGMGISGQLTWTRLPQGFKNSPTLFNEALHRDLADFRIQHPDLILLQYVDDILLAATSELDCQQGTRALLQTLGDLGYRASAKKAQICQKQVKYLGYLLREGQRWLTEARKETVMGQPVPKTPRQLREFLGKAGFCRLFIPGFAEMAAPLYPLTKPGTLFSWGPDQQKAYQEIKQALLTAPALGLPDLTKPFELFVDEKQGYAKGVLTQKLGPWRRPVAYLSKKLDPVAAGWPPCLRMVAAIAVLTKDAGKLTMGQPLVILAPHAVEALVKQPPDRWLSNARMTHYQAMLLDTDRVQFGPVVALNPATLLPLPEEGAPHDCLEILAETHGTRPDLTDQPIPDADHTWYTDGSSFLQEGQRKAGAAVTTETEVIWAGALPAGTSAQRAELIALTQALKMAEGKRLNVYTDSRYAFATAHIHGEIYRRRGWLTSEGREIKNKSEILALLKALFLPKRLSIIHCLGHQKGDSAEARGNRLADQAAREAAIKTPPDTSTLLIAGKRTADGSEFEKRTADGSEFESPKKKAKVE

SEQ ID NO: 7472 - protein, 2096 aa, synthetic construct
MPAAKRVKLDGGDKKYSIGLDIGTNSVGWAVITDEYKVPSKKFKVLGNTDRHSIKKNLIGALLFDSGETAEATRLKRTARRRYTRRKNRICYLQEIFSNEMAKVDDSFFHRLEESFLVEEDKKHERHPIFGNIVDEVAYHEKYPTIYHLRKKLVDSTDKADLRLIYLALAHMIKFRGHFLIEGDLNPDNSDVDKLFIQLVQTYNQLFEENPINASGVDAKAILSARLSKSRRLENLIAQLPGEKKNGLFGNLIALSLGLTPNFKSNFDLAEDAKLQLSKDTYDDDLDNLLAQIGDQYADLFLAAKNLSDAILLSDILRVNTEITKAPLSASMIKRYDEHHQDLTLLKALVRQQLPEKYKEIFFDQSKNGYAGYIDGGASQEEFYKFIKPILEKMDGTEELLVKLNREDLLRKQRTFDNGSIPHQIHLGELHAILRRQEDFYPFLKDNREKIEKILTFRIPYYVGPLARGNSRFAWMTRKSEETITPWNFEEVVDKGASAQSFIERMTNFDKNLPNEKVLPKHSLLYEYFTVYNELTKVKYVTEGMRKPAFLSGEQKKAIVDLLFKTNRKVTVKQLKEDYFKKIECFDSVEISGVEDRFNASLGTYHDLLKIIKDKDFLDNEENEDILEDIVLTLTLFEDREMIEERLKTYAHLFDDKVMKQLKRRRYTGWGRLSRKLINGIRDKQSGKTILDFLKSDGFANRNFMQLIHDDSLTFKEDIQKAQVSGQGDSLHEHIANLAGSPAIKKGILQTVKVVDELVKVMGRHKPENIVIEMARENQTTQKGQKNSRERMKRIEEGIKELGSQILKEHPVENTQLQNEKLYLYYLQNGRDMYVDQELDINRLSDYDVDHIVPQSFLKDDSIDNKVLTRSDKARGKSDNVPSEEVVKKMKNYWRQLLNAKLITQRKFDNLTKAERGGLSELDKAGFIKRQLVETRQITKHVAQILDSRMNTKYDENDKLIREVKVITLKSKLVSDFRKDFQFYKVREINNYHHAHDAYLNAVVGTALIKKYPKLESEFVYGDYKVYDVRKMIAKSEQEIGKATAKYFFYSNIMNFFKTEITLANGEIRKRPLIETNGETGEIVWDKGRDFATVRKVLSMPQVNIVKKTEVQTGGFSKESILPKRNSDKLIARKKDWDPKKYGGFDSPTVAYSVLVVAKVEKGKSKKLKSVKELLGITIMERSSFEKNPIDFLEAKGYKEVKKDLIIKLPKYSLFELENGRKRMLASAGELQKGNELALPSKYVNFLYLASHYEKLKGSPEDNEQKQLFVEQHKHYLDEIIEQISEFSKRVILADANLDKVLSAYNKHRDKPIREQAENIIHLFTLTNLGAPAAFKYFDTTIDRKRYTSTKEVLDATLIHQSITGLYETRIDLSQLGGDGGGGGPAPEAAAKGGTLGIEDEYRLHETSTEPDVSLGSTWLSDFPQAWAETGGMGLAVRQAPLIIPLKATSTPVSIQQYPMSHEARLGIKPHIQRLLDQGILVPCQSPWNTPLLPVKKPGTNDYRPVQDLREVNKRVEDIHPTVPNPYNLLSGLPPSHQWYTVLDLKDAFFCLRLHPTSQPLFAFEWRDPGMGISGQLTWTRLPQGFKNSPTLFNEALHRDLADFRIQHPDLILLQYVDDILLAATSELDCQQGTRALLQTLGDLGYRASAKKAQICQKQVKYLGYLLREGQRWLTEARKETVMGQPVPKTPRQLREFLGTAGFCRLWIPGFAEMAAPLYPLTKPGTLFSWGPDQQKAYQEIKQALLTAPALGLPDLTKPFELFVDEKQGYAKGVLTQKLGPWRRPVAYLSKKLDPVAAGWPPCLRMVAAIAVLTKDAGKLTMGQPLVILAPHAVEALVKQPPDRWLSNARMTHYQAMLLDTDRVQFGPVVALNPATLLPLPEEGAPHDCLEILAETHGTRPDLTDQPIPDADHTWYTDGSSFLQEGQRKAGAAVTTETEVIWAGALPAGTSAQRAELIALTQALKMAEGKRLNVYTDSRYAFATAHIHGEIYRRRGWLTSEGREIKNKSEILALLKALFLPKRLSIIHCLGHQKGDSAEARGNRLADQAAREAAIKTPPDTSTLLAGKRTADGSEFEKRTADGSEFESPKKKAKVE

SEQ ID NO: 7473 - protein, 2096 aa, synthetic construct; identical to SEQ ID NO: 7471

SEQ ID NO: 7474 - protein, 2096 aa, synthetic construct; identical to SEQ ID NO: 7472

SEQ ID NO: 7475 - protein, 2096 aa, synthetic construct
MPAAKRVKLDGGDKKYSIGLDIGTNSVGWAVITDEYKVPSKKFKVLGNTDRHSIKKNLIGALLFDSGETAEATRLKRTARRRYTRRKNRICYLQEIFSNEMAKVDDSFFHRLEESFLVEEDKKHERHPIFGNIVDEVAYHEKYPTIYHLRKKLVDSTDKADLRLIYLALAHMIKFRGHFLIEGDLNPDNSDVDKLFIQLVQTYNQLFEENPINASGVDAKAILSARLSKSRRLENLIAQLPGEKKNGLFGNLIALSLGLTPNFKSNFDLAEDAKLQLSKDTYDDDLDNLLAQIGDQYADLFLAAKNLSDAILLSDILRVNTEITKAPLSASMIKRYDEHHQDLTLLKALVRQQLPEKYKEIFFDQSKNGYAGYIDGGASQEEFYKFIKPILEKMDGTEELLVKLNREDLLRKQRTFDNGSIPHQIHLGELHAILRRQEDFYPFLKDNREKIEKILTFRIPYYVGPLARGNSRFAWMTRKSEETITPWNFEEVVDKGASAQSFIERMTNFDKNLPNEKVLPKHSLLYEYFTVYNELTKVKYVTEGMRKPAFLSGEQKKAIVDLLFKTNRKVTVKQLKEDYFKKIECFDSVEISGVEDRFNASLGTYHDLLKIIKDKDFLDNEENEDILEDIVLTLTLFEDREMIEERLKTYAHLFDDKVMKQLKRRRYTGWGRLSRKLINGIRDKQSGKTILDFLKSDGFANRNFMQLIHDDSLTFKEDIQKAQVSGQGDSLHEHIANLAGSPAIKKGILQTVKVVDELVKVMGRHKPENIVIEMARENQTTQKGQKNSRERMKRIEEGIKELGSQILKEHPVENTQLQNEKLYLYYLQNGRDMYVDQELDINRLSDYDVDHIVPQSFLKDDSIDNKVLTRSDKARGKSDNVPSEEVVKKMKNYWRQLLNAKLITQRKFDNLTKAERGGLSELDKAGFIKRQLVETRQITKHVAQILDSRMNTKYDENDKLIREVKVITLKSKLVSDFRKDFQFYKVREINNYHHAHDAYLNAVVGTALIKKYPKLESEFVYGDYKVYDVRKMIAKSEQEIGKATAKYFFYSNIMNFFKTEITLANGEIRKRPLIETNGETGEIVWDKGRDFATVRKVLSMPQVNIVKKTEVQTGGFSKESILPKRNSDKLIARKKDWDPKKYGGFDSPTVAYSVLVVAKVEKGKSKKLKSVKELLGITIMERSSFEKNPIDFLEAKGYKEVKKDLIIKLPKYSLFELENGRKRMLASAGELQKGNELALPSKYVNFLYLASHYEKLKGSPEDNEQKQLFVEQHKHYLDEIIEQISEFSKRVILADANLDKVLSAYNKHRDKPIREQAENIIHLFTLTNLGAPAAFKYFDTTIDRKRYTSTKEVLDATLIHQSITGLYETRIDLSQLGGDGGGGGPAPEAAAKGGTLNIEDEYRLHETSKEPDVSLGSTWLSDFPQAWAETGGMGLAVRQAPLIIPLKATSTPVSIKQYPMSQEARLGIKPHIQRLLDQGILVPCQSPWNTPLLPVKKPGTNDYRPVQDLREVNKRVEDIHPTVPNPYNLLSGLPPSHQWYTVLDLKDAFFCLRLHPTSQPLFAFEWRDPEMGISGQLTWTRLPQGFKNSPTLFNEALHRDLAGFRIQHPDLILLQYVDDLLLAATSELDCQQGTRALLQTLGDLGYRASAKKAQICQKQVKYLGYLLKEGQRWLTEARKETVMGQPIPKTPRQLREFLGTAGFCRLWIPGFAEMAAPLYPLTKPGTLFNWGPDQQKAFQEIKQALLTAPALGLPDLTKPFELFVDEKQGYAKGVLTQKLGPWRRPVAYLSKKLDPVAAGWPPCLRMVAAIAVLTKDAGKLTMGQPLVILAPHAVEALVKQPPDRWLSNARMTHYQALLLDTDRVQFGPVVALNPATLLPLPEEGLQHDCLDILAEAHGTRSDLMDQPLPDADHTWYTDGSSFLQEGQRKAGAAVTTETEVIWARALPAGTSAQRAELIALTQALKMAEGKKLNVYTDSRYAFATAHIHGEIYRRRGWLTSEGKEIKNKDEILALLKALFLPKRLSIIHCPGHQKGNSAEARGNRMADQAAREVATRETPETSTLLAGKRTADGSEFEKRTADGSEFESPKKKAKVE

SEQ ID NO: 7476 - protein, 2096 aa, synthetic construct; identical to SEQ ID NO: 4534

SEQ ID NO: 7477 - protein, 2096 aa, synthetic construct
MPAAKRVKLDGGDKKYSIGLDIGTNSVGWAVITDEYKVPSKKFKVLGNTDRHSIKKNLIGALLFDSGETAEATRLKRTARRRYTRRKNRICYLQEIFSNEMAKVDDSFFHRLEESFLVEEDKKHERHPIFGNIVDEVAYHEKYPTIYHLRKKLVDSTDKADLRLIYLALAHMIKFRGHFLIEGDLNPDNSDVDKLFIQLVQTYNQLFEENPINASGVDAKAILSARLSKSRRLENLIAQLPGEKKNGLFGNLIALSLGLTPNFKSNFDLAEDAKLQLSKDTYDDDLDNLLAQIGDQYADLFLAAKNLSDAILLSDILRVNTEITKAPLSASMIKRYDEHHQDLTLLKALVRQQLPEKYKEIFFDQSKNGYAGYIDGGASQEEFYKFIKPILEKMDGTEELLVKLNREDLLRKQRTFDNGSIPHQIHLGELHAILRRQEDFYPFLKDNREKIEKILTFRIPYYVGPLARGNSRFAWMTRKSEETITPWNFEEVVDKGASAQSFIERMTNFDKNLPNEKVLPKHSLLYEYFTVYNELTKVKYVTEGMRKPAFLSGEQKKAIVDLLFKTNRKVTVKQLKEDYFKKIECFDSVEISGVEDRFNASLGTYHDLLKIIKDKDFLDNEENEDILEDIVLTLTLFEDREMIEERLKTYAHLFDDKVMKQLKRRRYTGWGRLSRKLINGIRDKQSGKTILDFLKSDGFANRNFMQLIHDDSLTFKEDIQKAQVSGQGDSLHEHIANLAGSPAIKKGILQTVKVVDELVKVMGRHKPENIVIEMARENQTTQKGQKNSRERMKRIEEGIKELGSQILKEHPVENTQLQNEKLYLYYLQNGRDMYVDQELDINRLSDYDVDHIVPQSFLKDDSIDNKVLTRSDKARGKSDNVPSEEVVKKMKNYWRQLLNAKLITQRKFDNLTKAERGGLSELDKAGFIKRQLVETRQITKHVAQILDSRMNTKYDENDKLIREVKVITLKSKLVSDFRKDFQFYKVREINNYHHAHDAYLNAVVGTALIKKYPKLESEFVYGDYKVYDVRKMIAKSEQEIGKATAKYFFYSNIMNFFKTEITLANGEIRKRPLIETNGETGEIVWDKGRDFATVRKVLSMPQVNIVKKTEVQTGGFSKESILPKRNSDKLIARKKDWDPKKYGGFDSPTVAYSVLVVAKVEKGKSKKLKSVKELLGITIMERSSFEKNPIDFLEAKGYKEVKKDLIIKLPKYSLFELENGRKRMLASAGELQKGNELALPSKYVNFLYLASHYEKLKGSPEDNEQKQLFVEQHKHYLDEIIEQISEFSKRVILADANLDKVLSAYNKHRDKPIREQAENIIHLFTLTNLGAPAAFKYFDTTIDRKRYTSTKEVLDATLIHQSITGLYETRIDLSQLGGDGGGGGPAPEAAAKGGTLNIEDEHRLHETSKEPDVSLGSTWLSDFPQAWAETGGMGLAVRQAPLIIPLKATSTPVSIKQYPMSQEARLGIKPHIQRLLDQGILVPCQSPWNTPLLPVKKPGTNDYRPVQDLREVNKRVEDIHPTVPNPYNLLSGLPPSHQWYTVLDLKDAFFCLRLHPTSQPLFAFEWRDPEMGISGQLTWTRLPQGFKNSPTLFDEALHRDLADFRIQHPDLILLQYVDDLLLAATSELDCQQGTRALLQTLGNLGYRASAKKAQICQKQVKYLGYLLKEGQRWLTEARKETVMGQPTPKTPRQLREFLGTAGFCRLWIPGFAEMAAPLYPLTKTGTLFNWGPDQQKAYQEIKQALLTAPALGLPDLTKPFELFVDEKQGYAKGVLTQKLGPWRRPVAYLSKKLDPVAAGWPPCLRMVAAIAVLTKDAGKLTMGQPLVILAPHAVEALVKQPPDRWLSNARMTHYQALLLDTDRVQFGPVVALNPATLLPLPEEGLQHNCLDILAEAHGTRPDLTDQPLPDADHTWYTDGSSLLQEGQRKAGAAVTTETEVIWAKALPAGTSAQRAELIALTQALKMAEGKKLNVYTDSRYAFATAHIHGEIYRRRGLLTSEGKEIKNKDEILALLKALFLPKRLSIIHCPGHQKGHSAEARGNRMADQAARKAAITETPDTSTLLAGKRTADGSEFEKRTADGSEFESPKKKAKVE

SEQ ID NO: 7478 - protein, 2096 aa, synthetic construct; identical to SEQ ID NO: 4534

SEQ ID NO: 7479 - protein, 2088 aa, synthetic construct
MPAAKRVKLDGGDKKYSIGLDIGTNSVGWAVITDEYKVPSKKFKVLGNTDRHSIKKNLIGALLFDSGETAEATRLKRTARRRYTRRKNRICYLQEIFSNEMAKVDDSFFHRLEESFLVEEDKKHERHPIFGNIVDEVAYHEKYPTIYHLRKKLVDSTDKADLRLIYLALAHMIKFRGHFLIEGDLNPDNSDVDKLFIQLVQTYNQLFEENPINASGVDAKAILSARLSKSRRLENLIAQLPGEKKNGLFGNLIALSLGLTPNFKSNFDLAEDAKLQLSKDTYDDDLDNLLAQIGDQYADLFLAAKNLSDAILLSDILRVNTEITKAPLSASMIKRYDEHHQDLTLLKALVRQQLPEKYKEIFFDQSKNGYAGYIDGGASQEEFYKFIKPILEKMDGTEELLVKLNREDLLRKQRTFDNGSIPHQIHLGELHAILRRQEDFYPFLKDNREKIEKILTFRIPYYVGPLARGNSRFAWMTRKSEETITPWNFEEVVDKGASAQSFIERMTNFDKNLPNEKVLPKHSLLYEYFTVYNELTKVKYVTEGMRKPAFLSGEQKKAIVDLLFKTNRKVTVKQLKEDYFKKIECFDSVEISGVEDRFNASLGTYHDLLKIIKDKDFLDNEENEDILEDIVLTLTLFEDREMIEERLKTYAHLFDDKVMKQLKRRRYTGWGRLSRKLINGIRDKQSGKTILDFLKSDGFANRNFMQLIHDDSLTFKEDIQKAQVSGQGDSLHEHIANLAGSPAIKKGILQTVKVVDELVKVMGRHKPENIVIEMARENQTTQKGQKNSRERMKRIEEGIKELGSQILKEHPVENTQLQNEKLYLYYLQNGRDMYVDQELDINRLSDYDVDHIVPQSFLKDDSIDNKVLTRSDKARGKSDNVPSEEVVKKMKNYWRQLLNAKLITQRKFDNLTKAERGGLSELDKAGFIKRQLVETRQITKHVAQILDSRMNTKYDENDKLIREVKVITLKSKLVSDFRKDFQFYKVREINNYHHAHDAYLNAVVGTALIKKYPKLESEFVYGDYKVYDVRKMIAKSEQEIGKATAKYFFYSNIMNFFKTEITLANGEIRKRPLIETNGETGEIVWDKGRDFATVRKVLSMPQVNIVKKTEVQTGGFSKESILPKRNSDKLIARKKDWDPKKYGGFDSPTVAYSVLVVAKVEKGKSKKLKSVKELLGITIMERSSFEKNPIDFLEAKGYKEVKKDLIIKLPKYSLFELENGRKRMLASAGELQKGNELALPSKYVNFLYLASHYEKLKGSPEDNEQKQLFVEQHKHYLDEIIEQISEFSKRVILADANLDKVLSAYNKHRDKPIREQAENIIHLFTLTNLGAPAAFKYFDTTIDRKRYTSTKEVLDATLIHQSITGLYETRIDLSQLGGDGGGGGPAPEAAAKGGLDDEYRLYSPLVKPDQNIQFWLEQFPQAWAETAGMGLAKQVPPQVIQLKASATPVSVRQYPLSKEAQEGIRPHVQRLIQQGILVPVQSPWNTPLLPVRKPGTNDYRPVQDLREVNKRVQDIHPTVPNPYNLLCALPPQRSWYTVLDLKDAFFCLRLHPTSQPLFAFEWRDPGTGRTGQLTWTRLPQGFKNSPTIFNEALHRDLANFRIQHPQVTLLQYVDDLLLAGATKQDCLEGTKALLLELSDLGYRASAKKAQICRREVTYLGYSLRDGQRWLTEARKKTVVQIPAPTTAKQVREFLGKAGFCRLFIPGFATLAAPLYPLTKPKGEFSWAPEHQKAFDAIKKALLSAPALALPDVTKPFTLYVDERKGVARGVLTQTLGPWRRPVAYLSKKLDPVASGWPVCLKAIAAVAILVKDADKLTLGQNITVIAPHALENIVRQPPDRWMTNARMTHYQSLLLTERVTFAPPAALNPATLLPEETDEPVTHDCHQLLIEETGVRKDLTDIPLTGEVLTWFTDGSSYVVEGKRMAGAAVVDGTRTIWASSLPEGTSAQKAELMALTQALRLAEGKSINIYTDSRYAFATAHVHGAIYKQRGWLTSAGREIKNKEEILSLLEALHLPKRLAIIHCPGHQKAKDPISRGNQMADRVAKQAAQGVNLLPAGKRTADGSEFEKRTADGSEFESPKKKAKVE

SEQ ID NO: 7480 - protein, 2088 aa, synthetic construct; identical to SEQ ID NO: 7479

SEQ ID NO: 7481 - protein, 2090 aa, synthetic construct
MPAAKRVKLDGGDKKYSIGLDIGTNSVGWAVITDEYKVPSKKFKVLGNTDRHSIKKNLIGALLFDSGETAEATRLKRTARRRYTRRKNRICYLQEIFSNEMAKVDDSFFHRLEESFLVEEDKKHERHPIFGNIVDEVAYHEKYPTIYHLRKKLVDSTDKADLRLIYLALAHMIKFRGHFLIEGDLNPDNSDVDKLFIQLVQTYNQLFEENPINASGVDAKAILSARLSKSRRLENLIAQLPGEKKNGLFGNLIALSLGLTPNFKSNFDLAEDAKLQLSKDTYDDDLDNLLAQIGDQYADLFLAAKNLSDAILLSDILRVNTEITKAPLSASMIKRYDEHHQDLTLLKALVRQQLPEKYKEIFFDQSKNGYAGYIDGGASQEEFYKFIKPILEKMDGTEELLVKLNREDLLRKQRTFDNGSIPHQIHLGELHAILRRQEDFYPFLKDNREKIEKILTFRIPYYVGPLARGNSRFAWMTRKSEETITPWNFEEVVDKGASAQSFIERMTNFDKNLPNEKVLPKHSLLYEYFTVYNELTKVKYVTEGMRKPAFLSGEQKKAIVDLLFKTNRKVTVKQLKEDYFKKIECFDSVEISGVEDRFNASLGTYHDLLKIIKDKDFLDNEENEDILEDIVLTLTLFEDREMIEERLKTYAHLFDDKVMKQLKRRRYTGWGRLSRKLINGIRDKQSGKTILDFLKSDGFANRNFMQLIHDDSLTFKEDIQKAQVSGQGDSLHEHIANLAGSPAIKKGILQTVKVVDELVKVMGRHKPENIVIEMARENQTTQKGQKNSRERMKRIEEGIKELGSQILKEHPVENTQLQNEKLYLYYLQNGRDMYVDQELDINRLSDYDVDHIVPQSFLKDDSIDNKVLTRSDKARGKSDNVPSEEVVKKMKNYWRQLLNAKLITQRKFDNLTKAERGGLSELDKAGFIKRQLVETRQITKHVAQILDSRMNTKYDENDKLIREVKVITLKSKLVSDFRKDFQFYKVREINNYHHAHDAYLNAVVGTALIKKYPKLESEFVYGDYKVYDVRKMIAKSEQEIGKATAKYFFYSNIMNFFKTEITLANGEIRKRPLIETNGETGEIVWDKGRDFATVRKVLSMPQVNIVKKTEVQTGGFSKESILPKRNSDKLIARKKDWDPKKYGGFDSPTVAYSVLVVAKVEKGKSKKLKSVKELLGITIMERSSFEKNPIDFLEAKGYKEVKKDLIIKLPKYSLFELENGRKRMLASAGELQKGNELALPSKYVNFLYLASHYEKLKGSPEDNEQKQLFVEQHKHYLDEIIEQISEFSKRVILADANLDKVLSAYNKHRDKPIREQAENIIHLFTLTNLGAPAAFKYFDTTIDRKRYTSTKEVLDATLIHQSITGLYETRIDLSQLGGDGGGGGPAPEAAAKGGTLQLDDEYRLYSPLVKPDQNIQFWLEQFPQAWAETAGMGLAKQVPPQVIQLKASATPVSVRQYPLSKEAQEGIRPHVQRLIQQGILVPVQSPWNTPLLPVRKPGTNDYRPVQDLREVNKRVQDIHPTVPNPYNLLCALPPQRSWYTVLDLKDAFFCLRLHPTSQPLFAFEWRDPGTGRTGQLTWTRLPQGFKNSPTIFDEALHRDLANFRIQHPQVTLLQYVDDLLLAGATKQDCLEGTKALLLELSDLGYRASAKKAQICRREVTYLGYSLRDGQRWLTEARKKTVVQIPAPTTAKQVREFLGTAGFCRLWIPGFATLAAPLYPLTKEKGEFSWAPEHQKAFDAIKKALLSAPALALPDVTKPFTLYVDERKGVARGVLTQTLGPWRRPVAYLSKKLDPVASGWPVCLKAIAAVAILVKDADKLTLGQNITVIAPHALENIVRQPPDRWMTNARMTHYQSLLLTERVTFAPPAALNPATLLPEETDEPVTHDCHQLLIEETGVRKDLTDIPLTGEVLTWFTDGSSYVVEGKRMAGAAVVDGTRTIWASSLPEGTSAQKAELMALTQALRLAEGKSINIYTDSRYAFATAHVHGAIYKQRGLLTSAGREIKNKEEILSLLEALHLPKRLAIIHCPGHQKAKDPISRGNQMADRVAKQAAQGVNLLAGKRTADGSEFEKRTADGSEFESPKKKAKVE

SEQ ID NO: 7482 - protein, 2176 aa, synthetic construct
MPAAKRVKLDGGDKKYSIGLDIGTNSVGWAVITDEYKVPSKKFKVLGNTDRHSIKKNLIGALLFDSGETAEATRLKRTARRRYTRRKNRICYLQEIFSNEMAKVDDSFFHRLEESFLVEEDKKHERHPIFGNIVDEVAYHEKYPTIYHLRKKLVDSTDKADLRLIYLALAHMIKFRGHFLIEGDLNPDNSDVDKLFIQLVQTYNQLFEENPINASGVDAKAILSARLSKSRRLENLIAQLPGEKKNGLFGNLIALSLGLTPNFKSNFDLAEDAKLQLSKDTYDDDLDNLLAQIGDQYADLFLAAKNLSDAILLSDILRVNTEITKAPLSASMIKRYDEHHQDLTLLKALVRQQLPEKYKEIFFDQSKNGYAGYIDGGASQEEFYKFIKPILEKMDGTEELLVKLNREDLLRKQRTFDNGSIPHQIHLGELHAILRRQEDFYPFLKDNREKIEKILTFRIPYYVGPLARGNSRFAWMTRKSEETITPWNFEEVVDKGASAQSFIERMTNFDKNLPNEKVLPKHSLLYEYFTVYNELTKVKYVTEGMRKPAFLSGEQKKAIVDLLFKTNRKVTVKQLKEDYFKKIECFDSVEISGVEDRFNASLGTYHDLLKIIKDKDFLDNEENEDILEDIVLTLTLFEDREMIEERLKTYAHLFDDKVMKQLKRRRYTGWGRLSRKLINGIRDKQSGKTILDFLKSDGFANRNFMQLIHDDSLTFKEDIQKAQVSGQGDSLHEHIANLAGSPAIKKGILQTVKVVDELVKVMGRHKPENIVIEMARENQTTQKGQKNSRERMKRIEEGIKELGSQILKEHPVENTQLQNEKLYLYYLQNGRDMYVDQELDINRLSDYDVDHIVPQSFLKDDSIDNKVLTRSDKARGKSDNVPSEEVVKKMKNYWRQLLNAKLITQRKFDNLTKAERGGLSELDKAGFIKRQLVETRQITKHVAQILDSRMNTKYDENDKLIREVKVITLKSKLVSDFRKDFQFYKVREINNYHHAHDAYLNAVVGTALIKKYPKLESEFVYGDYKVYDVRKMIAKSEQEIGKATAKYFFYSNIMNFFKTEITLANGEIRKRPLIETNGETGEIVWDKGRDFATVRKVLSMPQVNIVKKTEVQTGGFSKESILPKRNSDKLIARKKDWDPKKYGGFDSPTVAYSVLVVAKVEKGKSKKLKSVKELLGITIMERSSFEKNPIDFLEAKGYKEVKKDLIIKLPKYSLFELENGRKRMLASAGELQKGNELALPSKYVNFLYLASHYEKLKGSPEDNEQKQLFVEQHKHYLDEIIEQISEFSKRVILADANLDKVLSAYNKHRDKPIREQAENIIHLFTLTNLGAPAAFKYFDTTIDRKRYTSTKEVLDATLIHQSITGLYETRIDLSQLGGDGGGGGPAPEAAAKGGMDPLQLLQPLEAEIKGTKLKAHWNSGATITCVPEAFLEDERPIQTMLIKTIHGEKQQDVYYLTFKVQGRKVEAEVLASPYDYILLNPSDVPWLMKKPLQLTVLVPLHEYQERLLQQTALPKEQKELLQKLFLKYDALWQHWENQVGHRRIKPHNIATGTLAPRPQKQYPINPKAKPSIQIVIDDLLKQGVLIQQNSTMNTPVYPVPKPDGKWRMVLDYREVNKTIPLIAAQNQHSAGILSSIYRGKYKTTLDLTNGFWAHPITPESYWLTAFTWQGKQYCWTRLPQGFLNSPALFNADVVDLLKEIPNVQAYVDDIYISHDDPQEHLEQLEKIFSILLNAGYVVSLKKSEIAQREVEFLGFNITKEGRGLTDTFKQKLLNITPPKDLKQLQSILGKLNFARNFIPNYSELVKPLYTIVAPANGKFISWTEDNSNQLQHIISVLNQADNLEERNPETRLIIKVNSSPSAGYIRYYNEGSKRPIMYVNYIFSKAEAKFTQTEKLLTTMHKGLIKAMDLAMGQEILVYSPIVSMTKIQRTPLPERKALPVRWITWMTYLEDPRIQFHYDKSLPELQQIPNVTEDVIAKTKHPSEFAMVFYTDGSAIKHPDVNKSHSAGMGIAQVQFIPEYKIVHQWSIPLGDHTAQLAEIAAVEFACKKALKISGPVLIVTDSFYVAESANKELPYWKSNGFLNNKKKPLRHVSKWKSIAECLQLKPDIIIMHEKGHQQPMTTLHTEGNNLADKLATQGSYVVHAGKRTADGSEFEKRTADGSEFESPKKKAKVE

SEQ ID NO: 7483 - protein, 2176 aa, synthetic construct
MPAAKRVKLDGGDKKYSIGLDIGTNSVGWAVITDEYKVPSKKFKVLGNTDRHSIKKNLIGALLFDSGETAEATRLKRTARRRYTRRKNRICYLQEIFSNEMAKVDDSFFHRLEESFLVEEDKKHERHPIFGNIVDEVAYHEKYPTIYHLRKKLVDSTDKADLRLIYLALAHMIKFRGHFLIEGDLNPDNSDVDKLFIQLVQTYNQLFEENPINASGVDAKAILSARLSKSRRLENLIAQLPGEKKNGLFGNLIALSLGLTPNFKSNFDLAEDAKLQLSKDTYDDDLDNLLAQIGDQYADLFLAAKNLSDAILLSDILRVNTEITKAPLSASMIKRYDEHHQDLTLLKALVRQQLPEKYKEIFFDQSKNGYAGYIDGGASQEEFYKFIKPILEKMDGTEELLVKLNREDLLRKQRTFDNGSIPHQIHLGELHAILRRQEDFYPFLKDNREKIEKILTFRIPYYVGPLARGNSRFAWMTRKSEETITPWNFEEVVDKGASAQSFIERMTNFDKNLPNEKVLPKHSLLYEYFTVYNELTKVKYVTEGMRKPAFLSGEQKKAIVDLLFKTNRKVTVKQLKEDYFKKIECFDSVEISGVEDRFNASLGTYHDLLKIIKDKDFLDNEENEDILEDIVLTLTLFEDREMIEERLKTYAHLFDDKVMKQLKRRRYTGWGRLSRKLINGIRDKQSGKTILDFLKSDGFANRNFMQLIHDDSLTFKEDIQKAQVSGQGDSLHEHIANLAGSPAIKKGILQTVKVVDELVKVMGRHKPENIVIEMARENQTTQKGQKNSRERMKRIEEGIKELGSQILKEHPVENTQLQNEKLYLYYLQNGRDMYVDQELDINRLSDYDVDHIVPQSFLKDDSIDNKVLTRSDKARGKSDNVPSEEVVKKMKNYWRQLLNAKLITQRKFDNLTKAERGGLSELDKAGFIKRQLVETRQITKHVAQILDSRMNTKYDENDKLIREVKVITLKSKLVSDFRKDFQFYKVREINNYHHAHDAYLNAVVGTALIKKYPKLESEFVYGDYKVYDVRKMIAKSEQEIGKATAKYFFYSNIMNFFKTEITLANGEIRKRPLIETNGETGEIVWDKGRDFATVRKVLSMPQVNIVKKTEVQTGGFSKESILPKRNSDKLIARKKDWDPKKYGGFDSPTVAYSVLVVAKVEKGKSKKLKSVKELLGITIMERSSFEKNPIDFLEAKGYKEVKKDLIIKLPKYSLFELENGRKRMLASAGELQKGNELALPSKYVNFLYLASHYEKLKGSPEDNEQKQLFVEQHKHYLDEIIEQISEFSKRVILADANLDKVLSAYNKHRDKPIREQAENIIHLFTLTNLGAPAAFKYFDTTIDRKRYTSTKEVLDATLIHQSITGLYETRIDLSQLGGDGGGGGPAPEAAAKGGMNPLQLLQPLPAEVKGTKLLAHWNSGATITCIPESFLEDEQPIKQTLIKTIHGEKQQNVYYLTFKVKGRKVEAEVIASPYEYILLSPTDVPWLTQQPLQLTILVPLQEYQDRILNKTALPEEQKQQLKALFTKYDNLWQHWENQVGHRKIRPHNIATGDYPPRPQKQYPINPKAKPSIQIVIDDLLKQGVLTPQNSTMNTPVYPVPKPDGRWRMVLDYREVNKTIPLTAAQNQHSAGILATIVRQKYKTTLDLANGFWAHPITPDSYWLTAFTWQGKQYCWTRLPQGFLNSPALFNADAVDLLKEVPNVQVYVDDIYLSHDNPHEHIQQLEKVFQILLQAGYVVSLKKSEIGQRTVEFLGFNITKEGRGLTDTFKTKLLNVTPPKDLKQLQSILGLLNFARNFIPNFAELVQTLYNLIASSPGKYIEWTEDNTKQLNKVIEALNTASNLEERLPDQRLVIKVNTSPSAGYVRYYNESGKKPIMYLNYVFSKAELKFSMLEKLLTTMHKALIKAMDLAMGQEILVYSPIVSMTKIQKTPLPERKALPIRWITWMTYLEDPRIQFHYDKTLPELKHIPDVYTSSIPPLKHPSQYEGVFCTDGSAIKSPDPTKSNNAGMGIVHAIYNPEYKILNQWSIPLGHHTAQMAEIAAVEFACKKALKVPGPVLVITDSFYVAESANKELPYWKSNGFVNNKKEPLKHISKWKSIAECLSIKPDITIQHEKGHQPINTSIHTEGNALADKLATQGSYVVNAGKRTADGSEFEKRTADGSEFESPKKKAKVE

SEQ ID NO: 7484 - protein, 2094 aa, synthetic construct
MPAAKRVKLDGGDKKYSIGLDIGTNSVGWAVITDEYKVPSKKFKVLGNTDRHSIKKNLIGALLFDSGETAEATRLKRTARRRYTRRKNRICYLQEIFSNEMAKVDDSFFHRLEESFLVEEDKKHERHPIFGNIVDEVAYHEKYPTIYHLRKKLVDSTDKADLRLIYLALAHMIKFRGHFLIEGDLNPDNSDVDKLFIQLVQTYNQLFEENPINASGVDAKAILSARLSKSRRLENLIAQLPGEKKNGLFGNLIALSLGLTPNFKSNFDLAEDAKLQLSKDTYDDDLDNLLAQIGDQYADLFLAAKNLSDAILLSDILRVNTEITKAPLSASMIKRYDEHHQDLTLLKALVRQQLPEKYKEIFFDQSKNGYAGYIDGGASQEEFYKFIKPILEKMDGTEELLVKLNREDLLRKQRTFDNGSIPHQIHLGELHAILRRQEDFYPFLKDNREKIEKILTFRIPYYVGPLARGNSRFAWMTRKSEETITPWNFEEVVDKGASAQSFIERMTNFDKNLPNEKVLPKHSLLYEYFTVYNELTKVKYVTEGMRKPAFLSGEQKKAIVDLLFKTNRKVTVKQLKEDYFKKIECFDSVEISGVEDRFNASLGTYHDLLKIIKDKDFLDNEENEDILEDIVLTLTLFEDREMIEERLKTYAHLFDDKVMKQLKRRRYTGWGRLSRKLINGIRDKQSGKTILDFLKSDGFANRNFMQLIHDDSLTFKEDIQKAQVSGQGDSLHEHIANLAGSPAIKKGILQTVKVVDELVKVMGRHKPENIVIEMARENQTTQKGQKNSRERMKRIEEGIKELGSQILKEHPVENTQLQNEKLYLYYLQNGRDMYVDQELDINRLSDYDVDHIVPQSFLKDDSIDNKVLTRSDKARGKSDNVPSEEVVKKMKNYWRQLLNAKLITQRKFDNLTKAERGGLSELDKAGFIKRQLVETRQITKHVAQILDSRMNTKYDENDKLIREVKVITLKSKLVSDFRKDFQFYKVREINNYHHAHDAYLNAVVGTALIKKYPKLESEFVYGDYKVYDVRKMIAKSEQEIGKATAKYFFYSNIMNFFKTEITLANGEIRKRPLIETNGETGEIVWDKGRDFATVRKVLSMPQVNIVKKTEVQTGGFSKESILPKRNSDKLIARKKDWDPKKYGGFDSPTVAYSVLVVAKVEKGKSKKLKSVKELLGITIMERSSFEKNPIDFLEAKGYKEVKKDLIIKLPKYSLFELENGRKRMLASAGELQKGNELALPSKYVNFLYLASHYEKLKGSPEDNEQKQLFVEQHKHYLDEIIEQISEFSKRVILADANLDKVLSAYNKHRDKPIREQAENIIHLFTLTNLGAPAAFKYFDTTIDRKRYTSTKEVLDATLIHQSITGLYETRIDLSQLGGDGGGGGPAPEAAAKGGVLNLEEEYRLHEKPVPSSIDPSWLQLFPTVWAERAGMGLANQVPPVVVELRSGASPVAVRQYPMSKEAREGIRPHIQRFLDLGVLVPCQSPWNTPLLPVKKPGTNDYRPVQDLREINKRVQDIHPTVPNPYNLLSSLPPSHTWYSVLDLKDAFFCLKLHPNSQPLFAFEWRDPEKGNTGQLTWTRLPQGFKNSPTLFNEALHRDLAPFRALNPQVVLLQYVDDLLVAAPTYRDCKEGTQKLLQELSKLGYRVSAKKAQLCQKEVTYLGYLLKEGKRWLTPARKATVMKIPPPTTPRQVREFLGKAGFCRLFIPGFASLAAPLYPLTKPSIPFIWTEEHQKAFDRIKEALLSAPALALPDLTKPFTLYVDERAGVARGVLTQTLGPWRRPVAYLSKKLDPVASGWPTCLKAVAAVALLLKDADKLTLGQNVTVIASHSLESIVRQPPDRWMTNARMTHYQSLLLNERVSFAPPAVLNPATLLPVESEATPVHRCSEILAEETGTRRDLKDQPLPGVPAWYTDGSSFIAEGKRRAGAAIVDGKRTVWASSLPEGTSAQKAELVALTQALRLAEGKDINIYTDSRYAFATAHIHGAIYKQRGWLTSAGKDIKNKEEILALLEAIHLPKRVAIIHCPGHQKGNDPVATGNRRADEAAKQAALSTRVLAETTKPAGKRTADGSEFEKRTADGSEFESPKKKAKVE

SEQ ID NO: 7485 - protein, 2096 aa, synthetic construct
MPAAKRVKLDGGDKKYSIGLDIGTNSVGWAVITDEYKVPSKKFKVLGNTDRHSIKKNLIGALLFDSGETAEATRLKRTARRRYTRRKNRICYLQEIFSNEMAKVDDSFFHRLEESFLVEEDKKHERHPIFGNIVDEVAYHEKYPTIYHLRKKLVDSTDKADLRLIYLALAHMIKFRGHFLIEGDLNPDNSDVDKLFIQLVQTYNQLFEENPINASGVDAKAILSARLSKSRRLENLIAQLPGEKKNGLFGNLIALSLGLTPNFKSNFDLAEDAKLQLSKDTYDDDLDNLLAQIGDQYADLFLAAKNLSDAILLSDILRVNTEITKAPLSASMIKRYDEHHQDLTLLKALVRQQLPEKYKEIFFDQSKNGYAGYIDGGASQEEFYKFIKPILEKMDGTEELLVKLNREDLLRKQRTFDNGSIPHQIHLGELHAILRRQEDFYPFLKDNREKIEKILTFRIPYYVGPLARGNSRFAWMTRKSEETITPWNFEEVVDKGASAQSFIERMTNFDKNLPNEKVLPKHSLLYEYFTVYNELTKVKYVTEGMRKPAFLSGEQKKAIVDLLFKTNRKVTVKQLKEDYFKKIECFDSVEISGVEDRFNASLGTYHDLLKIIKDKDFLDNEENEDILEDIVLTLTLFEDREMIEERLKTYAHLFDDKVMKQLKRRRYTGWGRLSRKLINGIRDKQSGKTILDFLKSDGFANRNFMQLIHDDSLTFKEDIQKAQVSGQGDSLHEHIANLAGSPAIKKGILQTVKVVDELVKVMGRHKPENIVIEMARENQTTQKGQKNSRERMKRIEEGIKELGSQILKEHPVENTQLQNEKLYLYYLQNGRDMYVDQELDINRLSDYDVDHIVPQSFLKDDSIDNKVLTRSDKARGKSDNVPSEEVVKKMKNYWRQLLNAKLITQRKFDNLTKAERGGLSELDKAGFIKRQLVETRQITKHVAQILDSRMNTKYDENDKLIREVKVITLKSKLVSDFRKDFQFYKVREINNYHHAHDAYLNAVVGTALIKKYPKLESEFVYGDYKVYDVRKMIAKSEQEIGKATAKYFFYSNIMNFFKTEITLANGEIRKRPLIETNGETGEIVWDKGRDFATVRKVLSMPQVNIVKKTEVQTGGFSKESILPKRNSDKLIARKKDWDPKKYGGFDSPTVAYSVLVVAKVEKGKSKKLKSVKELLGITIMERSSFEKNPIDFLEAKGYKEVKKDLIIKLPKYSLFELENGRKRMLASAGELQKGNELALPSKYVNFLYLASHYEKLKGSPEDNEQKQLFVEQHKHYLDEIIEQISEFSKRVILADANLDKVLSAYNKHRDKPIREQAENIIHLFTLTNLGAPAAFKYFDTTIDRKRYTSTKEVLDATLIHQSITGLYETRIDLSQLGGDGGGGGPAPEAAAKGGTLNIEDEYRLHETSKEPDVPLGSTWLSDFPQAWAETGGMGLAVRQAPLIIPLKATSTPVSIKQYPMSQEARLGIKPHIQRLLDQGILVPCQSPWNTPLLPVKKPGTNDYRPVQDLREVNKRVEDIHPTVPNPYNLLSGLPPSHQWYTVLDLKDAFFCLRLHPTSQPLFAFEWRDPEMGISGQLTWTRLPQGFKNSPTLFNEALHRDLADFRIQHPDLILLQYVDDLLLAATSEQDCQRGTRALLQTLGNLGYRASAKKAQICQKQVKYLGYLLKEGQRWLTEARKETVMGQPTPKTPRQLREFLGTAGFCRLWIPGFAEMAAPLYPLTKPGTLFNWGPDQQKAYQEIKQALLTAPALGLPDLTKPFELFVDEKQGYAKGVLTQKLGPWRRPVAYLSKKLDPVAAGWPPCLRMVAAIAVLTKDAGKLTMGQPLVILAPHAVEALVKQPPDRWLSNARMTHYQAMLLDTDRVQFGPVVALNPATLLPLPEKEAPHDCLEILAETHGTRPDLTDQPIPDADYTWYTDGSSFLQEGQRRAGAAVTTETEVIWARALPAGTSAQRAELIALTQALKMAEGKKLNVYTDSRYAFATAHVHGEIYRRRGWLTSEGREIKNKNEILALLKALFLPKRLSIIHCPGHQKGNSAEARGNRMADQAAREAAMKAVLETSTLLAGKRTADGSEFEKRTADGSEFESPKKKAKVE

SEQ ID NO: 7486 - protein, 2098 aa, synthetic construct
MPAAKRVKLDGGDKKYSIGLDIGTNSVGWAVITDEYKVPSKKFKVLGNTDRHSIKKNLIGALLFDSGETAEATRLKRTARRRYTRRKNRICYLQEIFSNEMAKVDDSFFHRLEESFLVEEDKKHERHPIFGNIVDEVAYHEKYPTIYHLRKKLVDSTDKADLRLIYLALAHMIKFRGHFLIEGDLNPDNSDVDKLFIQLVQTYNQLFEENPINASGVDAKAILSARLSKSRRLENLIAQLPGEKKNGLFGNLIALSLGLTPNFKSNFDLAEDAKLQLSKDTYDDDLDNLLAQIGDQYADLFLAAKNLSDAILLSDILRVNTEITKAPLSASMIKRYDEHHQDLTLLKALVRQQLPEKYKEIFFDQSKNGYAGYIDGGASQEEFYKFIKPILEKMDGTEELLVKLNREDLLRKQRTFDNGSIPHQIHLGELHAILRRQEDFYPFLKDNREKIEKILTFRIPYYVGPLARGNSRFAWMTRKSEETITPWNFEEVVDKGASAQSFIERMTNFDKNLPNEKVLPKHSLLYEYFTVYNELTKVKYVTEGMRKPAFLSGEQKKAIVDLLFKTNRKVTVKQLKEDYFKKIECFDSVEISGVEDRFNASLGTYHDLLKIIKDKDFLDNEENEDILEDIVLTLTLFEDREMIEERLKTYAHLFDDKVMKQLKRRRYTGWGRLSRKLINGIRDKQSGKTILDFLKSDGFANRNFMQLIHDDSLTFKEDIQKAQVSGQGDSLHEHIANLAGSPAIKKGILQTVKVVDELVKVMGRHKPENIVIEMARENQTTQKGQKNSRERMKRIEEGIKELGSQILKEHPVENTQLQNEKLYLYYLQNGRDMYVDQELDINRLSDYDVDHIVPQSFLKDDSIDNKVLTRSDKARGKSDNVPSEEVVKKMKNYWRQLLNAKLITQRKFDNLTKAERGGLSELDKAGFIKRQLVETRQITKHVAQILDSRMNTKYDENDKLIREVKVITLKSKLVSDFRKDFQFYKVREINNYHHAHDAYLNAVVGTALIKKYPKLESEFVYGDYKVYDVRKMIAKSEQEIGKATAKYFFYSNIMNFFKTEITLANGEIRKRPLIETNGETGEIVWDKGRDFATVRKVLSMPQVNIVKKTEVQTGGFSKESILPKRNSDKLIARKKDWDPKKYGGFDSPTVAYSVLVVAKVEKGKSKKLKSVKELLGITIMERSSFEKNPIDFLEAKGYKEVKKDLIIKLPKYSLFELENGRKRMLASAGELQKGNELALPSKYVNFLYLASHYEKLKGSPEDNEQKQLFVEQHKHYLDEIIEQISEFSKRVILADANLDKVLSAYNKHRDKPIREQAENIIHLFTLTNLGAPAAFKYFDTTIDRKRYTSTKEVLDATLIHQSITGLYETRIDLSQLGGDGGEAAAKGGGPAPGGTAPLEEEYRLFLEAPIQNVTLLEQWKREIPKVWAEINPPGLASTQAPIHVQLLSTALPVRVRQYPITLEAKRSLRETIRKFRAAGILRPVHSPWNTPLLPVRKSGTSEYRMVQDLREVNKRVETIHPTVPNPYTLLSLLPPDRIWYSVLDLKDAFFCIPLAPESQLIFAFEWADAEEGESGQLTWTRLPQGFKNSPTLFDEALNRDLQGFRLDHPSVSLLQYVDDLLIAADTQAACLSATRDLLMTLAELGYRVSGKKAQLCQEEVTYLGFKIHKGSRSLSNSRTQAILQIPVPKTKRQVREFLGTIGYCRLWIPGFAELAQPLYAATRGGNDPLVWGEKEEEAFQSLKLALTQPPALALPSLDKPFQLFVEETSGAAKGVLTQALGPWKRPVAYLSKRLDPVAAGWPRCLRAIAAAALLTREASKLTFGQDIEITSSHNLESLLRSPPDKWLTNARITQYQVLLLDPPRVRFKQTAALNPATLLPETDDTLPIHHCLDTLDSLTSTRPDLTDQPLAQAEATLFTDGSSYIRDGKRYAGAAVVTLDSVIWAEPLPIGTSAQKAELIALTKALEWSKDKSVNIYTDSRYAFATLHVHGMIYRERGLLTAGGKAIKNAPEILALLTAVWLPKRVAVMHCKGHQKDDAPTSTGNRRADEVAREVAIRPLSTQATISAGKRTADGSEFEKRTADGSEFESPKKKAKVE

SEQ ID NO: 7487 - protein, 2098 aa, synthetic construct
MPAAKRVKLDGGDKKYSIGLDIGTNSVGWAVITDEYKVPSKKFKVLGNTDRHSIKKNLIGALLFDSGETAEATRLKRTARRRYTRRKNRICYLQEIFSNEMAKVDDSFFHRLEESFLVEEDKKHERHPIFGNIVDEVAYHEKYPTIYHLRKKLVDSTDKADLRLIYLALAHMIKFRGHFLIEGDLNPDNSDVDKLFIQLVQTYNQLFEENPINASGVDAKAILSARLSKSRRLENLIAQLPGEKKNGLFGNLIALSLGLTPNFKSNFDLAEDAKLQLSKDTYDDDLDNLLAQIGDQYADLFLAAKNLSDAILLSDILRVNTEITKAPLSASMIKRYDEHHQDLTLLKALVRQQLPEKYKEIFFDQSKNGYAGYIDGGASQEEFYKFIKPILEKMDGTEELLVKLNREDLLRKQRTFDNGSIPHQIHLGELHAILRRQEDFYPFLKDNREKIEKILTFRIPYYVGPLARGNSRFAWMTRKSEETITPWNFEEVVDKGASAQSFIERMTNFDKNLPNEKVLPKHSLLYEYFTVYNELTKVKYVTEGMRKPAFLSGEQKKAIVDLLFKTNRKVTVKQLKEDYFKKIECFDSVEISGVEDRFNASLGTYHDLLKIIKDKDFLDNEENEDILEDIVLTLTLFEDREMIEERLKTYAHLFDDKVMKQLKRRRYTGWGRLSRKLINGIRDKQSGKTILDFLKSDGFANRNFMQLIHDDSLTFKEDIQKAQVSGQGDSLHEHIANLAGSPAIKKGILQTVKVVDELVKVMGRHKPENIVIEMARENQTTQKGQKNSRERMKRIEEGIKELGSQILKEHPVENTQLQNEKLYLYYLQNGRDMYVDQELDINRLSDYDVDHIVPQSFLKDDSIDNKVLTRSDKARGKSDNVPSEEVVKKMKNYWRQLLNAKLITQRKFDNLTKAERGGLSELDKAGFIKRQLVETRQITKHVAQILDSRMNTKYDENDKLIREVKVITLKSKLVSDFRKDFQFYKVREINNYHHAHDAYLNAVVGTALIKKYPKLESEFVYGDYKVYDVRKMIAKSEQEIGKATAKYFFYSNIMNFFKTEITLANGEIRKRPLIETNGETGEIVWDKGRDFATVRKVLSMPQVNIVKKTEVQTGGFSKESILPKRNSDKLIARKKDWDPKKYGGFDSPTVAYSVLVVAKVEKGKSKKLKSVKELLGITIMERSSFEKNPIDFLEAKGYKEVKKDLIIKLPKYSLFELENGRKRMLASAGELQKGNELALPSKYVNFLYLASHYEKLKGSPEDNEQKQLFVEQHKHYLDEIIEQISEFSKRVILADANLDKVLSAYNKHRDKPIREQAENIIHLFTLTNLGAPAAFKYFDTTIDRKRYTSTKEVLDATLIHQSITGLYETRIDLSQLGGDGGEAAAKGGGPAPGGTAPLEEEYRLFLEAPIQNVTLLEQWKREIPKVWAEINPPGLASTQAPIHVQLLSTALPVRVRQYPITLEAKRSLRETIRKFRAAGILRPVHSPWNTPLLPVRKSGTSEYRMVQDLREVNKRVETIHPTVPNPYTLLSLLPPDRIWYSVLDLKDAFFCIPLAPESQLIFAFEWADAEEGESGQLTWTRLPQGFKNSPTLFNEALNRDLQGFRLDHPSVSLLQYVDDLLIAADTQAACLSATRDLLMTLAELGYRVSGKKAQLCQEEVTYLGFKIHKGSRSLSNSRTQAILQIPVPKTKRQVREFLGTIGYCRLWIPGFAELAQPLYAATRPGNDPLVWGEKEEEAFQSLKLALTQPPALALPSLDKPFQLFVEETSGAAKGVLTQALGPWKRPVAYLSKRLDPVAAGWPRCLRAIAAAALLTREASKLTFGQDIEITSSHNLESLLRSPPDKWLTNARITQYQVLLLDPPRVRFKQTAALNPATLLPETDDTLPIHHCLDTLDSLTSTRPDLTDQPLAQAEATLFTDGSSYIRDGKRYAGAAVVTLDSVIWAEPLPIGTSAQKAELIALTKALEWSKDKSVNIYTDSRYAFATLHVHGMIYRERGWLTAGGKAIKNAPEILALLTAVWLPKRVAVMHCKGHQKDDAPTSTGNRRADEVAREVAIRPLSTQATISAGKRTADGSEFEKRTADGSEFESPKKKAKVE

SEQ ID NO: 7488 - protein, 2098 aa, synthetic construct
MPAAKRVKLDGGDKKYSIGLDIGTNSVGWAVITDEYKVPSKKFKVLGNTDRHSIKKNLIGALLFDSGETAEATRLKRTARRRYTRRKNRICYLQEIFSNEMAKVDDSFFHRLEESFLVEEDKKHERHPIFGNIVDEVAYHEKYPTIYHLRKKLVDSTDKADLRLIYLALAHMIKFRGHFLIEGDLNPDNSDVDKLFIQLVQTYNQLFEENPINASGVDAKAILSARLSKSRRLENLIAQLPGEKKNGLFGNLIALSLGLTPNFKSNFDLAEDAKLQLSKDTYDDDLDNLLAQIGDQYADLFLAAKNLSDAILLSDILRVNTEITKAPLSASMIKRYDEHHQDLTLLKALVRQQLPEKYKEIFFDQSKNGYAGYIDGGASQEEFYKFIKPILEKMDGTEELLVKLNREDLLRKQRTFDNGSIPHQIHLGELHAILRRQEDFYPFLKDNREKIEKILTFRIPYYVGPLARGNSRFAWMTRKSEETITPWNFEEVVDKGASAQSFIERMTNFDKNLPNEKVLPKHSLLYEYFTVYNELTKVKYVTEGMRKPAFLSGEQKKAIVDLLFKTNRKVTVKQLKEDYFKKIECFDSVEISGVEDRFNASLGTYHDLLKIIKDKDFLDNEENEDILEDIVLTLTLFEDREMIEERLKTYAHLFDDKVMKQLKRRRYTGWGRLSRKLINGIRDKQSGKTILDFLKSDGFANRNFMQLIHDDSLTFKEDIQKAQVSGQGDSLHEHIANLAGSPAIKKGILQTVKVVDELVKVMGRHKPENIVIEMARENQTTQKGQKNSRERMKRIEEGIKELGSQILKEHPVENTQLQNEKLYLYYLQNGRDMYVDQELDINRLSDYDVDHIVPQSFLKDDSIDNKVLTRSDKARGKSDNVPSEEVVKKMKNYWRQLLNAKLITQRKFDNLTKAERGGLSELDKAGFIKRQLVETRQITKHVAQILDSRMNTKYDENDKLIREVKVITLKSKLVSDFRKDFQFYKVREINNYHHAHDAYLNAVVGTALIKKYPKLESEFVYGDYKVYDVRKMIAKSEQEIGKATAKYFFYSNIMNFFKTEITLANGEIRKRPLIETNGETGEIVWDKGRDFATVRKVLSMPQVNIVKKTEVQTGGFSKESILPKRNSDKLIARKKDWDPKKYGGFDSPTVAYSVLVVAKVEKGKSKKLKSVKELLGITIMERSSFEKNPIDFLEAKGYKEVKKDLIIKLPKYSLFELENGRKRMLASAGELQKGNELALPSKYVNFLYLASHYEKLKGSPEDNEQKQLFVEQHKHYLDEIIEQISEFSKRVILADANLDKVLSAYNKHRDKPIREQAENIIHLFTLTNLGAPAAFKYFDTTIDRKRYTSTKEVLDATLIHQSITGLYETRIDLSQLGGDGGEAAAKGGGPAPGGTAPLEEEYRLFLEAPIQNVTLLEQWKREIPKVWAEINPPGLASTQAPIHVQLLSTALPVRVRQYPITLEAKRSLRETIRKFRAAGILRPVHSPWNTPLLPVRKSGTSEYRMVQDLREVNKRVETIHPTVPNPYTLLSLLPPDRIWYSVLDLKDAFFCIPLAPESQLIFAFEWADAEEGESGQLTWTRLPQGFKNSPTLFNEALNRDLQGFRLDHPSVSLLQYVDDLLIAADTQAACLSATRDLLMTLAELGYRVSGKKAQLCQEEVTYLGFKIHKGSRSLSNSRTQAILQIPVPKTKRQVREFLGKIGYCRLFIPGFAELAQPLYAATRPGNDPLVWGEKEEEAFQSLKLALTQPPALALPSLDKPFQLFVEETSGAAKGVLTQALGPWKRPVAYLSKRLDPVAAGWPRCLRAIAAAALLTREASKLTFGQDIEITSSHNLESLLRSPPDKWLTNARITQYQVLLLDPPRVRFKQTAALNPATLLPETDDTLPIHHCLDTLDSLTSTRPDLTDQPLAQAEATLFTDGSSYIRDGKRYAGAAVVTLDSVIWAEPLPIGTSAQKAELIALTKALEWSKDKSVNIYTDSRYAFATLHVHGMIYRERGWLTAGGKAIKNAPEILALLTAVWLPKRVAVMHCKGHQKDDAPTSTGNRRADEVAREVAIRPLSTQATISAGKRTADGSEFEKRTADGSEFESPKKKAKVE

SEQ ID NO: 7489 - protein, 2102 aa, synthetic construct
MPAAKRVKLDGGDKKYSIGLDIGTNSVGWAVITDEYKVPSKKFKVLGNTDRHSIKKNLIGALLFDSGETAEATRLKRTARRRYTRRKNRICYLQEIFSNEMAKVDDSFFHRLEESFLVEEDKKHERHPIFGNIVDEVAYHEKYPTIYHLRKKLVDSTDKADLRLIYLALAHMIKFRGHFLIEGDLNPDNSDVDKLFIQLVQTYNQLFEENPINASGVDAKAILSARLSKSRRLENLIAQLPGEKKNGLFGNLIALSLGLTPNFKSNFDLAEDAKLQLSKDTYDDDLDNLLAQIGDQYADLFLAAKNLSDAILLSDILRVNTEITKAPLSASMIKRYDEHHQDLTLLKALVRQQLPEKYKEIFFDQSKNGYAGYIDGGASQEEFYKFIKPILEKMDGTEELLVKLNREDLLRKQRTFDNGSIPHQIHLGELHAILRRQEDFYPFLKDNREKIEKILTFRIPYYVGPLARGNSRFAWMTRKSEETITPWNFEEVVDKGASAQSFIERMTNFDKNLPNEKVLPKHSLLYEYFTVYNELTKVKYVTEGMRKPAFLSGEQKKAIVDLLFKTNRKVTVKQLKEDYFKKIECFDSVEISGVEDRFNASLGTYHDLLKIIKDKDFLDNEENEDILEDIVLTLTLFEDREMIEERLKTYAHLFDDKVMKQLKRRRYTGWGRLSRKLINGIRDKQSGKTILDFLKSDGFANRNFMQLIHDDSLTFKEDIQKAQVSGQGDSLHEHIANLAGSPAIKKGILQTVKVVDELVKVMGRHKPENIVIEMARENQTTQKGQKNSRERMKRIEEGIKELGSQILKEHPVENTQLQNEKLYLYYLQNGRDMYVDQELDINRLSDYDVDHIVPQSFLKDDSIDNKVLTRSDKARGKSDNVPSEEVVKKMKNYWRQLLNAKLITQRKFDNLTKAERGGLSELDKAGFIKRQLVETRQITKHVAQILDSRMNTKYDENDKLIREVKVITLKSKLVSDFRKDFQFYKVREINNYHHAHDAYLNAVVGTALIKKYPKLESEFVYGDYKVYDVRKMIAKSEQEIGKATAKYFFYSNIMNFFKTEITLANGEIRKRPLIETNGETGEIVWDKGRDFATVRKVLSMPQVNIVKKTEVQTGGFSKESILPKRNSDKLIARKKDWDPKKYGGFDSPTVAYSVLVVAKVEKGKSKKLKSVKELLGITIMERSSFEKNPIDFLEAKGYKEVKKDLIIKLPKYSLFELENGRKRMLASAGELQKGNELALPSKYVNFLYLASHYEKLKGSPEDNEQKQLFVEQHKHYLDEIIEQISEFSKRVILADANLDKVLSAYNKHRDKPIREQAENIIHLFTLTNLGAPAAFKYFDTTIDRKRYTSTKEVLDATLIHQSITGLYETRIDLSQLGGDGGEAAAKGGGPAPGGTVSLQDEHRLFDIPVTTSLPDVWLQDFPQAWAETGGLGRAKCQAPIIIDLKPTAVPVSIKQYPMSLEAHMGIRQHIIKFLELGVLRPCRSPWNTPLLPVKKPGTQDYRPVQDLREINKRTVDIHPTVPNPYNLLSTLKPDYSWYTVLDLKDAFFCLPLAPQSQELFAFEWKDPERGISGQLTWTRLPQGFKNSPTLFDEALHRDLTDFRTQHPEVTLLQYVDDLLLAAPTKKACTQGTRHLLQELGEKGYRASAKKAQICQTKVTYLGYILSEGKRWLTPGRIETVARIPPPRNPREVREFLGTAGFCRLWIPGFAELAAPLYALTKESTPFTWQTEHQLAFEALKKALLSAPALGLPDTSKPFTLFLDERQGIAKGVLTQKLGPWKRPVAYLSKKLDPVAAGWPPCLRIMAATAMLVKDSAKLTLGQPLTVITPHTLEAIVRQPPDRWITNARLTHYQALLLDTDRVQFGPPVTLNPATLLPVPENQPSPHDCRQVLAETHGTREDLKDQELPDADHTWYTDGSSYLDSGTRRAGAAVVDGHNTIWAQSLPPGTSAQKAELIALTKALELSKGKKANIYTDSRYAFATAHTHGSIYERRGLLTSEGKEIKNKAEIIALLKALFLPQEVAIIHCPGHQKGQDPVAVGNRQADRVARQAAMAEVLTLATEPDNTSHITAGKRTADGSEFEKRTADGSEFESPKKKAKVE

SEQ ID NO: 7490 - protein, 2102 aa, synthetic construct
MPAAKRVKLDGGDKKYSIGLDIGTNSVGWAVITDEYKVPSKKFKVLGNTDRHSIKKNLIGALLFDSGETAEATRLKRTARRRYTRRKNRICYLQEIFSNEMAKVDDSFFHRLEESFLVEEDKKHERHPIFGNIVDEVAYHEKYPTIYHLRKKLVDSTDKADLRLIYLALAHMIKFRGHFLIEGDLNPDNSDVDKLFIQLVQTYNQLFEENPINASGVDAKAILSARLSKSRRLENLIAQLPGEKKNGLFGNLIALSLGLTPNFKSNFDLAEDAKLQLSKDTYDDDLDNLLAQIGDQYADLFLAAKNLSDAILLSDILRVNTEITKAPLSASMIKRYDEHHQDLTLLKALVRQQLPEKYKEIFFDQSKNGYAGYIDGGASQEEFYKFIKPILEKMDGTEELLVKLNREDLLRKQRTFDNGSIPHQIHLGELHAILRRQEDFYPFLKDNREKIEKILTFRIPYYVGPLARGNSRFAWMTRKSEETITPWNFEEVVDKGASAQSFIERMTNFDKNLPNEKVLPKHSLLYEYFTVYNELTKVKYVTEGMRKPAFLSGEQKKAIVDLLFKTNRKVTVKQLKEDYFKKIECFDSVEISGVEDRFNASLGTYHDLLKIIKDKDFLDNEENEDILEDIVLTLTLFEDREMIEERLKTYAHLFDDKVMKQLKRRRYTGWGRLSRKLINGIRDKQSGKTILDFLKSDGFANRNFMQLIHDDSLTFKEDIQKAQVSGQGDSLHEHIANLAGSPAIKKGILQTVKVVDELVKVMGRHKPENIVIEMARENQTTQKGQKNSRERMKRIEEGIKELGSQILKEHPVENTQLQNEKLYLYYLQNGRDMYVDQELDINRLSDYDVDHIVPQSFLKDDSIDNKVLTRSDKARGKSDNVPSEEVVKKMKNYWRQLLNAKLITQRKFDNLTKAERGGLSELDKAGFIKRQLVETRQITKHVAQILDSRMNTKYDENDKLIREVKVITLKSKLVSDFRKDFQFYKVREINNYHHAHDAYLNAVVGTALIKKYPKLESEFVYGDYKVYDVRKMIAKSEQEIGKATAKYFFYSNIMNFFKTEITLANGEIRKRPLIETNGETGEIVWDKGRDFATVRKVLSMPQVNIVKKTEVQTGGFSKESILPKRNSDKLIARKKDWDPKKYGGFDSPTVAYSVLVVAKVEKGKSKKLKSVKELLGITIMERSSFEKNPIDFLEAKGYKEVKKDLIIKLPKYSLFELENGRKRMLASAGELQKGNELALPSKYVNFLYLASHYEKLKGSPEDNEQKQLFVEQHKHYLDEIIEQISEFSKRVILADANLDKVLSAYNKHRDKPIREQAENIIHLFTLTNLGAPAAFKYFDTTIDRKRYTSTKEVLDATLIHQSITGLYETRIDLSQLGGDGGEAAAKGGGPAPGGTVSLQDEHRLFDIPVTTSLPDVWLQDFPQAWAETGGLGRAKCQAPIIIDLKPTAVPVSIKQYPMSLEAHMGIRQHIIKFLELGVLRPCRSPWNTPLLPVKKPGTQDYRPVQDLREINKRTVDIHPTVPNPYNLLSTLKPDYSWYTVLDLKDAFFCLPLAPQSQELFAFEWKDPERGISGQLTWTRLPQGFKNSPTLFNEALHRDLTDFRTQHPEVTLLQYVDDLLLAAPTKKACTQGTRHLLQELGEKGYRASAKKAQICQTKVTYLGYILSEGKRWLTPGRIETVARIPPPRNPREVREFLGTAGFCRLWIPGFAELAAPLYALTKPSTPFTWQTEHQLAFEALKKALLSAPALGLPDTSKPFTLFLDERQGIAKGVLTQKLGPWKRPVAYLSKKLDPVAAGWPPCLRIMAATAMLVKDSAKLTLGQPLTVITPHTLEAIVRQPPDRWITNARLTHYQALLLDTDRVQFGPPVTLNPATLLPVPENQPSPHDCRQVLAETHGTREDLKDQELPDADHTWYTDGSSYLDSGTRRAGAAVVDGHNTIWAQSLPPGTSAQKAELIALTKALELSKGKKANIYTDSRYAFATAHTHGSIYERRGWLTSEGKEIKNKAEIIALLKALFLPQEVAIIHCPGHQKGQDPVAVGNRQADRVARQAAMAEVLTLATEPDNTSHITAGKRTADGSEFEKRTADGSEFESPKKKAKVE

SEQ ID NO: 7491 - protein, 2173 aa, synthetic construct
MPAAKRVKLDGGDKKYSIGLDIGTNSVGWAVITDEYKVPSKKFKVLGNTDRHSIKKNLIGALLFDSGETAEATRLKRTARRRYTRRKNRICYLQEIFSNEMAKVDDSFFHRLEESFLVEEDKKHERHPIFGNIVDEVAYHEKYPTIYHLRKKLVDSTDKADLRLIYLALAHMIKFRGHFLIEGDLNPDNSDVDKLFIQLVQTYNQLFEENPINASGVDAKAILSARLSKSRRLENLIAQLPGEKKNGLFGNLIALSLGLTPNFKSNFDLAEDAKLQLSKDTYDDDLDNLLAQIGDQYADLFLAAKNLSDAILLSDILRVNTEITKAPLSASMIKRYDEHHQDLTLLKALVRQQLPEKYKEIFFDQSKNGYAGYIDGGASQEEFYKFIKPILEKMDGTEELLVKLNREDLLRKQRTFDNGSIPHQIHLGELHAILRRQEDFYPFLKDNREKIEKILTFRIPYYVGPLARGNSRFAWMTRKSEETITPWNFEEVVDKGASAQSFIERMTNFDKNLPNEKVLPKHSLLYEYFTVYNELTKVKYVTEGMRKPAFLSGEQKKAIVDLLFKTNRKVTVKQLKEDYFKKIECFDSVEISGVEDRFNASLGTYHDLLKIIKDKDFLDNEENEDILEDIVLTLTLFEDREMIEERLKTYAHLFDDKVMKQLKRRRYTGWGRLSRKLINGIRDKQSGKTILDFLKSDGFANRNFMQLIHDDSLTFKEDIQKAQVSGQGDSLHEHIANLAGSPAIKKGILQTVKVVDELVKVMGRHKPENIVIEMARENQTTQKGQKNSRERMKRIEEGIKELGSQILKEHPVENTQLQNEKLYLYYLQNGRDMYVDQELDINRLSDYDVDHIVPQSFLKDDSIDNKVLTRSDKARGKSDNVPSEEVVKKMKNYWRQLLNAKLITQRKFDNLTKAERGGLSELDKAGFIKRQLVETRQITKHVAQILDSRMNTKYDENDKLIREVKVITLKSKLVSDFRKDFQFYKVREINNYHHAHDAYLNAVVGTALIKKYPKLESEFVYGDYKVYDVRKMIAKSEQEIGKATAKYFFYSNIMNFFKTEITLANGEIRKRPLIETNGETGEIVWDKGRDFATVRKVLSMPQVNIVKKTEVQTGGFSKESILPKRNSDKLIARKKDWDPKKYGGFDSPTVAYSVLVVAKVEKGKSKKLKSVKELLGITIMERSSFEKNPIDFLEAKGYKEVKKDLIIKLPKYSLFELENGRKRMLASAGELQKGNELALPSKYVNFLYLASHYEKLKGSPEDNEQKQLFVEQHKHYLDEIIEQISEFSKRVILADANLDKVLSAYNKHRDKPIREQAENIIHLFTLTNLGAPAAFKYFDTTIDRKRYTSTKEVLDATLIHQSITGLYETRIDLSQLGGDGGEAAAKGGGPAPGGMDLLKPLTVERKGVKIKGYWNSQADITCVPKDLLQGEEPVRQQNVTTIHGTQEGDVYYVNLKIDGRRINTEVIGTTLDYAIITPGDVPWILKKPLELTIKLDLEEQQGTLLNNSILSKKGKEELKQLFEKYSALWQSWENQVGHRRIRPHKIATGTVKPTPQKQYHINPKAKPDIQIVINDLLKQGVLIQKESTMNTPVYPVPKPNGRWRMVLDYRAVNKVTPLIAVQNQHSYGILGSLFKGRYKTTIDLSNGFWAHPIVPEDYWITAFTWQGKQYCWTVLPQGFLNSPGLFTGDVVDLLQGIPNVEVYVDDVYISHDSEKEHLEYLDILFNRLKEAGYIISLKKSNIANSIVDFLGFQITNEGRGLTDTFKEKLENITAPTTLKQLQSILGLLNFARNFIPDFTELIAPLYALIPKSTKNYVPWQIEHSTTLETLITKLNGAEYLQGRKGDKTLIMKVNASYTTGYIRYYNEGEKKPISYVSIVFSKTELKFTELEKLLTTVHKGLLKALDLSMGQNIHVYSPIVSMQNIQKTPQTAKKALASRWLSWLSYLEDPRIRFFYDPQMPALKDLPAVDTGKDNKKHPSNFQHIFYTDGSAITSPTKEGHLNAGMGIVYFINKDGNLQKQQEWSISLGNHTAQFAEIAAFEFALKKCLPLGGNILVVTDSNYVAKAYNEELDVWASNGFVNNRKKPLKHISKWKSVADLKRLRPDVVVTHEPGHQKLDSSPHAYGNNLADQLATQASFKVHAGKRTADGSEFEKRTADGSEFESPKKKAKVE

SEQ ID NO: 7492 - protein, 2094 aa, synthetic construct
MPAAKRVKLDGGDKKYSIGLDIGTNSVGWAVITDEYKVPSKKFKVLGNTDRHSIKKNLIGALLFDSGETAEATRLKRTARRRYTRRKNRICYLQEIFSNEMAKVDDSFFHRLEESFLVEEDKKHERHPIFGNIVDEVAYHEKYPTIYHLRKKLVDSTDKADLRLIYLALAHMIKFRGHFLIEGDLNPDNSDVDKLFIQLVQTYNQLFEENPINASGVDAKAILSARLSKSRRLENLIAQLPGEKKNGLFGNLIALSLGLTPNFKSNFDLAEDAKLQLSKDTYDDDLDNLLAQIGDQYADLFLAAKNLSDAILLSDILRVNTEITKAPLSASMIKRYDEHHQDLTLLKALVRQQLPEKYKEIFFDQSKNGYAGYIDGGASQEEFYKFIKPILEKMDGTEELLVKLNREDLLRKQRTFDNGSIPHQIHLGELHAILRRQEDFYPFLKDNREKIEKILTFRIPYYVGPLARGNSRFAWMTRKSEETITPWNFEEVVDKGASAQSFIERMTNFDKNLPNEKVLPKHSLLYEYFTVYNELTKVKYVTEGMRKPAFLSGEQKKAIVDLLFKTNRKVTVKQLKEDYFKKIECFDSVEISGVEDRFNASLGTYHDLLKIIKDKDFLDNEENEDILEDIVLTLTLFEDREMIEERLKTYAHLFDDKVMKQLKRRRYTGWGRLSRKLINGIRDKQSGKTILDFLKSDGFANRNFMQLIHDDSLTFKEDIQKAQVSGQGDSLHEHIANLAGSPAIKKGILQTVKVVDELVKVMGRHKPENIVIEMARENQTTQKGQKNSRERMKRIEEGIKELGSQILKEHPVENTQLQNEKLYLYYLQNGRDMYVDQELDINRLSDYDVDHIVPQSFLKDDSIDNKVLTRSDKARGKSDNVPSEEVVKKMKNYWRQLLNAKLITQRKFDNLTKAERGGLSELDKAGFIKRQLVETRQITKHVAQILDSRMNTKYDENDKLIREVKVITLKSKLVSDFRKDFQFYKVREINNYHHAHDAYLNAVVGTALIKKYPKLESEFVYGDYKVYDVRKMIAKSEQEIGKATAKYFFYSNIMNFFKTEITLANGEIRKRPLIETNGETGEIVWDKGRDFATVRKVLSMPQVNIVKKTEVQTGGFSKESILPKRNSDKLIARKKDWDPKKYGGFDSPTVAYSVLVVAKVEKGKSKKLKSVKELLGITIMERSSFEKNPIDFLEAKGYKEVKKDLIIKLPKYSLFELENGRKRMLASAGELQKGNELALPSKYVNFLYLASHYEKLKGSPEDNEQKQLFVEQHKHYLDEIIEQISEFSKRVILADANLDKVLSAYNKHRDKPIREQAENIIHLFTLTNLGAPAAFKYFDTTIDRKRYTSTKEVLDATLIHQSITGLYETRIDLSQLGGDGGEAAAKGGGPAPGGVLNLEEEYRLHEKPVPSSIDPSWLQLFPTVWAERAGMGLANQVPPVVVELRSGASPVAVRQYPMSKEAREGIRPHIQKFLDLGVLVPCRSPWNTPLLPVKKPGTNDYRPVQDLREINKRVQDIHPTVPNPYNLLSSLPPSYTWYSVLDLKDAFFCLRLHPNSQPLFAFEWKDPEKGNTGQLTWTRLPQGFKNSPTLFDEALHRDLAPFRALNPQVVLLQYVDDLLVAAPTYEDCKKGTQKLLQELSKLGYRVSAKKAQLCQREVTYLGYLLKEGKRWLTPARKATVMKIPVPTTPRQVREFLGTAGFCRLWIPGFASLAAPLYPLTKESIPFIWTEEHQQAFDHIKKALLSAPALALPDLTKPFTLYIDERAGVARGVLTQTLGPWRRPVAYLSKKLDPVASGWPTCLKAVAAVALLLKDADKLTLGQNVTVIASHSLESIVRQPPDRWMTNARMTHYQSLLLNERVSFAPPAVLNPATLLPVESEATPVHRCSEILAEETGTRRDLEDQPLPGVPTWYTDGSSFITEGKRRAGAPIVDGKRTVWASSLPEGTSAQKAELVALTQALRLAEGKNINIYTDSRYAFATAHIHGAIYKQRGLLTSAGKDIKNKEEILALLEAIHLPRRVAIIHCPGHQRGSNPVATGNRRADEAAKQAALSTRVLAGTTKPAGKRTADGSEFEKRTADGSEFESPKKKAKVE

SEQ ID NO: 7493 - protein, 2218 aa, synthetic construct
MPAAKRVKLDGGDKKYSIGLDIGTNSVGWAVITDEYKVPSKKFKVLGNTDRHSIKKNLIGALLFDSGETAEATRLKRTARRRYTRRKNRICYLQEIFSNEMAKVDDSFFHRLEESFLVEEDKKHERHPIFGNIVDEVAYHEKYPTIYHLRKKLVDSTDKADLRLIYLALAHMIKFRGHFLIEGDLNPDNSDVDKLFIQLVQTYNQLFEENPINASGVDAKAILSARLSKSRRLENLIAQLPGEKKNGLFGNLIALSLGLTPNFKSNFDLAEDAKLQLSKDTYDDDLDNLLAQIGDQYADLFLAAKNLSDAILLSDILRVNTEITKAPLSASMIKRYDEHHQDLTLLKALVRQQLPEKYKEIFFDQSKNGYAGYIDGGASQEEFYKFIKPILEKMDGTEELLVKLNREDLLRKQRTFDNGSIPHQIHLGELHAILRRQEDFYPFLKDNREKIEKILTFRIPYYVGPLARGNSRFAWMTRKSEETITPWNFEEVVDKGASAQSFIERMTNFDKNLPNEKVLPKHSLLYEYFTVYNELTKVKYVTEGMRKPAFLSGEQKKAIVDLLFKTNRKVTVKQLKEDYFKKIECFDSVEISGVEDRFNASLGTYHDLLKIIKDKDFLDNEENEDILEDIVLTLTLFEDREMIEERLKTYAHLFDDKVMKQLKRRRYTGWGRLSRKLINGIRDKQSGKTILDFLKSDGFANRNFMQLIHDDSLTFKEDIQKAQVSGQGDSLHEHIANLAGSPAIKKGILQTVKVVDELVKVMGRHKPENIVIEMARENQTTQKGQKNSRERMKRIEEGIKELGSQILKEHPVENTQLQNEKLYLYYLQNGRDMYVDQELDINRLSDYDVDHIVPQSFLKDDSIDNKVLTRSDKARGKSDNVPSEEVVKKMKNYWRQLLNAKLITQRKFDNLTKAERGGLSELDKAGFIKRQLVETRQITKHVAQILDSRMNTKYDENDKLIREVKVITLKSKLVSDFRKDFQFYKVREINNYHHAHDAYLNAVVGTALIKKYPKLESEFVYGDYKVYDVRKMIAKSEQEIGKATAKYFFYSNIMNFFKTEITLANGEIRKRPLIETNGETGEIVWDKGRDFATVRKVLSMPQVNIVKKTEVQTGGFSKESILPKRNSDKLIARKKDWDPKKYGGFDSPTVAYSVLVVAKVEKGKSKKLKSVKELLGITIMERSSFEKNPIDFLEAKGYKEVKKDLIIKLPKYSLFELENGRKRMLASAGELQKGNELALPSKYVNFLYLASHYEKLKGSPEDNEQKQLFVEQHKHYLDEIIEQISEFSKRVILADANLDKVLSAYNKHRDKPIREQAENIIHLFTLTNLGAPAAFKYFDTTIDRKRYTSTKEVLDATLIHQSITGLYETRIDLSQLGGDGGEAAAKGGGPAPGGTLGDQGSRGSDPLPEPRVTLTVEGIPTEFLVNTGAEHSVLTKPMGKMGSKRTVVAGATGSKVYPWTTKRLLKIGQKQVTHSFLVIPECPAPLLGRDLLTKLKAQIQFSTEGPQVTWEDRPAMCLVLNLEEEYRLHEKPVPPSIDPSWLQLFPMVWAEKAGMGLANQVPPVVVELKSDASPVAVRQYPMSKEAREGIRPHIQRFLDLGILVPCQSPWNTPLLPVKKPGTNDYRPVQDLREVNKRVQDIHPTVPNPYNLLSSLPPSHTWYSVLDLKDAFFCLKLHPNSQPLFAFEWRDPEKGNTGQLTWTRLPQGFKNSPTLFDEALHRDLASFRALNPQVVMLQYVDDLLVAAPTYRDCKEGTRRLLQELSKLGYRVSAKKAQLCREEVTYLGYLLKGGKRWLTPARKATVMKIPTPTTPRQVREFLGTAGFCRLWIPGFASLAAPLYPLTREKVPFTWTEAHQEAFGRIKEALLSAPALALPDLTKPFALYVDEKEGVARGVLTQTLGPWRRPVAYLSKKLDPVASGWPTCLKAIAAVALLLKDADKLTLGQNVLVIAPHNLESIVRQPPDRWMTNARMTHYQSLLLNERVSFAPPAILNPATLLPVESDDTPIHICSEILAEETGTRPDLRDQPLPGVPAWYTDGSSFIMDGRRQAGAAIVDNKRTVWASNLPEGTSAQKAELIALTQALRLAEGKSINIYTDSRYAFATAHVHGAIYKQRGLLTSAGKDIKNKEEILALLEAIHLPKRVAIIHCPGHQRGTDPVATGNRKADEAAKQAAQSTRILTETTKNAGKRTADGSEFEKRTADGSEFESPKKKAKVE

SEQ ID NO: 7494 - protein, 2127 aa, synthetic construct
MPAAKRVKLDGGDKKYSIGLDIGTNSVGWAVITDEYKVPSKKFKVLGNTDRHSIKKNLIGALLFDSGETAEATRLKRTARRRYTRRKNRICYLQEIFSNEMAKVDDSFFHRLEESFLVEEDKKHERHPIFGNIVDEVAYHEKYPTIYHLRKKLVDSTDKADLRLIYLALAHMIKFRGHFLIEGDLNPDNSDVDKLFIQLVQTYNQLFEENPINASGVDAKAILSARLSKSRRLENLIAQLPGEKKNGLFGNLIALSLGLTPNFKSNFDLAEDAKLQLSKDTYDDDLDNLLAQIGDQYADLFLAAKNLSDAILLSDILRVNTEITKAPLSASMIKRYDEHHQDLTLLKALVRQQLPEKYKEIFFDQSKNGYAGYIDGGASQEEFYKFIKPILEKMDGTEELLVKLNREDLLRKQRTFDNGSIPHQIHLGELHAILRRQEDFYPFLKDNREKIEKILTFRIPYYVGPLARGNSRFAWMTRKSEETITPWNFEEVVDKGASAQSFIERMTNFDKNLPNEKVLPKHSLLYEYFTVYNELTKVKYVTEGMRKPAFLSGEQKKAIVDLLFKTNRKVTVKQLKEDYFKKIECFDSVEISGVEDRFNASLGTYHDLLKIIKDKDFLDNEENEDILEDIVLTLTLFEDREMIEERLKTYAHLFDDKVMKQLKRRRYTGWGRLSRKLINGIRDKQSGKTILDFLKSDGFANRNFMQLIHDDSLTFKEDIQKAQVSGQGDSLHEHIANLAGSPAIKKGILQTVKVVDELVKVMGRHKPENIVIEMARENQTTQKGQKNSRERMKRIEEGIKELGSQILKEHPVENTQLQNEKLYLYYLQNGRDMYVDQELDINRLSDYDVDHIVPQSFLKDDSIDNKVLTRSDKARGKSDNVPSEEVVKKMKNYWRQLLNAKLITQRKFDNLTKAERGGLSELDKAGFIKRQLVETRQITKHVAQILDSRMNTKYDENDKLIREVKVITLKSKLVSDFRKDFQFYKVREINNYHHAHDAYLNAVVGTALIKKYPKLESEFVYGDYKVYDVRKMIAKSEQEIGKATAKYFFYSNIMNFFKTEITLANGEIRKRPLIETNGETGEIVWDKGRDFATVRKVLSMPQVNIVKKTEVQTGGFSKESILPKRNSDKLIARKKDWDPKKYGGFDSPTVAYSVLVVAKVEKGKSKKLKSVKELLGITIMERSSFEKNPIDFLEAKGYKEVKKDLIIKLPKYSLFELENGRKRMLASAGELQKGNELALPSKYVNFLYLASHYEKLKGSPEDNEQKQLFVEQHKHYLDEIIEQISEFSKRVILADANLDKVLSAYNKHRDKPIREQAENIIHLFTLTNLGAPAAFKYFDTTIDRKRYTSTKEVLDATLIHQSITGLYETRIDLSQLGGDGGEAAAKGGGPAPGGLLGRDLLTKLKAQIQFSTEGPQVTWEDRPAMCLVLNLEEEYRLHEKPVPPSIDPSWLQLFPMVWAEKAGMGLANQVPPVVVELKSDASPVAVRQYPMSKEAREGIRPHIQRFLDLGILVPCQSPWNTPLLPVKKPGTNDYRPVQDLREVNKRVQDIHPTVPNPYNLLSSLPPSHTWYSVLDLKDAFFCLKLHPNSQPLFAFEWRDPEKGNTGQLTWTRLPQGFKNSPTLFNEALHRDLASFRALNPQVVMLQYVDDLLVAAPTYRDCKEGTRRLLQELSKLGYRVSAKKAQLCREEVTYLGYLLKGGKRWLTPARKATVMKIPTPTTPRQVREFLGKAGFCRLFIPGFASLAAPLYPLTRPKVPFTWTEAHQEAFGRIKEALLSAPALALPDLTKPFALYVDEKEGVARGVLTQTLGPWRRPVAYLSKKLDPVASGWPTCLKAIAAVALLLKDADKLTLGQNVLVIAPHNLESIVRQPPDRWMTNARMTHYQSLLLNERVSFAPPAILNPATLLPVESDDTPIHICSEILAEETGTRPDLRDQPLPGVPAWYTDGSSFIMDGRRQAGAAIVDNKRTVWASNLPEGTSAQKAELIALTQALRLAEGKSINIYTDSRYAFATAHVHGAIYKQRGWLTSAGKDIKNKEEILALLEAIHLPKRVAIIHCPGHQRGTDPVATGNRKADEAAKQAAQSTRILTETTKNAGKRTADGSEFEKRTADGSEFESPKKKAKVE

SEQ ID NO: 7495 - protein, 2096 aa, synthetic construct
MPAAKRVKLDGGDKKYSIGLDIGTNSVGWAVITDEYKVPSKKFKVLGNTDRHSIKKNLIGALLFDSGETAEATRLKRTARRRYTRRKNRICYLQEIFSNEMAKVDDSFFHRLEESFLVEEDKKHERHPIFGNIVDEVAYHEKYPTIYHLRKKLVDSTDKADLRLIYLALAHMIKFRGHFLIEGDLNPDNSDVDKLFIQLVQTYNQLFEENPINASGVDAKAILSARLSKSRRLENLIAQLPGEKKNGLFGNLIALSLGLTPNFKSNFDLAEDAKLQLSKDTYDDDLDNLLAQIGDQYADLFLAAKNLSDAILLSDILRVNTEITKAPLSASMIKRYDEHHQDLTLLKALVRQQLPEKYKEIFFDQSKNGYAGYIDGGASQEEFYKFIKPILEKMDGTEELLVKLNREDLLRKQRTFDNGSIPHQIHLGELHAILRRQEDFYPFLKDNREKIEKILTFRIPYYVGPLARGNSRFAWMTRKSEETITPWNFEEVVDKGASAQSFIERMTNFDKNLPNEKVLPKHSLLYEYFTVYNELTKVKYVTEGMRKPAFLSGEQKKAIVDLLFKTNRKVTVKQLKEDYFKKIECFDSVEISGVEDRFNASLGTYHDLLKIIKDKDFLDNEENEDILEDIVLTLTLFEDREMIEERLKTYAHLFDDKVMKQLKRRRYTGWGRLSRKLINGIRDKQSGKTILDFLKSDGFANRNFMQLIHDDSLTFKEDIQKAQVSGQGDSLHEHIANLAGSPAIKKGILQTVKVVDELVKVMGRHKPENIVIEMARENQTTQKGQKNSRERMKRIEEGIKELGSQILKEHPVENTQLQNEKLYLYYLQNGRDMYVDQELDINRLSDYDVDHIVPQSFLKDDSIDNKVLTRSDKARGKSDNVPSEEVVKKMKNYWRQLLNAKLITQRKFDNLTKAERGGLSELDKAGFIKRQLVETRQITKHVAQILDSRMNTKYDENDKLIREVKVITLKSKLVSDFRKDFQFYKVREINNYHHAHDAYLNAVVGTALIKKYPKLESEFVYGDYKVYDVRKMIAKSEQEIGKATAKYFFYSNIMNFFKTEITLANGEIRKRPLIETNGETGEIVWDKGRDFATVRKVLSMPQVNIVKKTEVQTGGFSKESILPKRNSDKLIARKKDWDPKKYGGFDSPTVAYSVLVVAKVEKGKSKKLKSVKELLGITIMERSSFEKNPIDFLEAKGYKEVKKDLIIKLPKYSLFELENGRKRMLASAGELQKGNELALPSKYVNFLYLASHYEKLKGSPEDNEQKQLFVEQHKHYLDEIIEQISEFSKRVILADANLDKVLSAYNKHRDKPIREQAENIIHLFTLTNLGAPAAFKYFDTTIDRKRYTSTKEVLDATLIHQSITGLYETRIDLSQLGGDGGEAAAKGGGPAPGGTLGIEDEYRLHETSTEPDVSLGSTWLSDFPQAWAETGGMGLAVRQAPLIIPLKATSTPVSIQQYPMSHEARLGIKPHIQRLLDQGILVPCQSPWNTPLLPVKKPGTNDYRPVQDLREVNKRVEDIHPTVPNPYNLLSGLPPSHQWYTVLDLKDAFFCLRLHPTSQPLFAFEWRDPGMGISGQLTWTRLPQGFKNSPTLFNEALHRDLADFRIQHPDLILLQYVDDILLAATSELDCQQGTRALLQTLGDLGYRASAKKAQICQKQVKYLGYLLREGQRWLTEARKETVMGQPVPKTPRQLREFLGTAGFCRLWIPGFAEMAAPLYPLTKPGTLFSWGPDQQKAYQEIKQALLTAPALGLPDLTKPFELFVDEKQGYAKGVLTQKLGPWRRPVAYLSKKLDPVAAGWPPCLRMVAAIAVLTKDAGKLTMGQPLVILAPHAVEALVKQPPDRWLSNARMTHYQAMLLDTDRVQFGPVVALNPATLLPLPEEGAPHDCLEILAETHGTRPDLTDQPIPDADHTWYTDGSSFLQEGQRKAGAAVTTETEVIWAGALPAGTSAQRAELIALTQALKMAEGKRLNVYTDSRYAFATAHIHGEIYRRRGWLTSEGREIKNKSEILALLKALFLPKRLSIIHCLGHQKGDSAEARGNRLADQAAREAAIKTPPDTSTLLAGKRTADGSEFEKRTADGSEFESPKKKAKVE

SEQ ID NO: 7496 - protein, 2096 aa, synthetic construct; identical to SEQ ID NO: 4535

SEQ ID NO: 7497 - protein, 2096 aa, synthetic construct; identical to SEQ ID NO: 4535

SEQ ID NO: 7498 - protein, 2176 aa, synthetic construct
MPAAKRVKLDGGDKKYSIGLDIGTNSVGWAVITDEYKVPSKKFKVLGNTDRHSIKKNLIGALLFDSGETAEATRLKRTARRRYTRRKNRICYLQEIFSNEMAKVDDSFFHRLEESFLVEEDKKHERHPIFGNIVDEVAYHEKYPTIYHLRKKLVDSTDKADLRLIYLALAHMIKFRGHFLIEGDLNPDNSDVDKLFIQLVQTYNQLFEENPINASGVDAKAILSARLSKSRRLENLIAQLPGEKKNGLFGNLIALSLGLTPNFKSNFDLAEDAKLQLSKDTYDDDLDNLLAQIGDQYADLFLAAKNLSDAILLSDILRVNTEITKAPLSASMIKRYDEHHQDLTLLKALVRQQLPEKYKEIFFDQSKNGYAGYIDGGASQEEFYKFIKPILEKMDGTEELLVKLNREDLLRKQRTFDNGSIPHQIHLGELHAILRRQEDFYPFLKDNREKIEKILTFRIPYYVGPLARGNSRFAWMTRKSEETITPWNFEEVVDKGASAQSFIERMTNFDKNLPNEKVLPKHSLLYEYFTVYNELTKVKYVTEGMRKPAFLSGEQKKAIVDLLFKTNRKVTVKQLKEDYFKKIECFDSVEISGVEDRFNASLGTYHDLLKIIKDKDFLDNEENEDILEDIVLTLTLFEDREMIEERLKTYAHLFDDKVMKQLKRRRYTGWGRLSRKLINGIRDKQSGKTILDFLKSDGFANRNFMQLIHDDSLTFKEDIQKAQVSGQGDSLHEHIANLAGSPAIKKGILQTVKVVDELVKVMGRHKPENIVIEMARENQTTQKGQKNSRERMKRIEEGIKELGSQILKEHPVENTQLQNEKLYLYYLQNGRDMYVDQELDINRLSDYDVDHIVPQSFLKDDSIDNKVLTRSDKARGKSDNVPSEEVVKKMKNYWRQLLNAKLITQRKFDNLTKAERGGLSELDKAGFIKRQLVETRQITKHVAQILDSRMNTKYDENDKLIREVKVITLKSKLVSDFRKDFQFYKVREINNYHHAHDAYLNAVVGTALIKKYPKLESEFVYGDYKVYDVRKMIAKSEQEIGKATAKYFFYSNIMNFFKTEITLANGEIRKRPLIETNGETGEIVWDKGRDFATVRKVLSMPQVNIVKKTEVQTGGFSKESILPKRNSDKLIARKKDWDPKKYGGFDSPTVAYSVLVVAKVEKGKSKKLKSVKELLGITIMERSSFEKNPIDFLEAKGYKEVKKDLIIKLPKYSLFELENGRKRMLASAGELQKGNELALPSKYVNFLYLASHYEKLKGSPEDNEQKQLFVEQHKHYLDEIIEQISEFSKRVILADANLDKVLSAYNKHRDKPIREQAENIIHLFTLTNLGAPAAFKYFDTTIDRKRYTSTKEVLDATLIHQSITGLYETRIDLSQLGGDGGEAAAKGGGPAPGGMNPLQLLQPLPAEVKGTKLLAHWNSGATITCIPESFLEDEQPIKQTLIKTIHGEKQQNVYYLTFKVKGRKVEAEVIASPYEYILLSPTDVPWLTQQPLQLTILVPLQEYQDRILNKTALPEEQKQQLKALFTKYDNLWQHWENQVGHRKIRPHNIATGDYPPRPQKQYPINPKAKPSIQIVIDDLLKQGVLTPQNSTMNTPVYPVPKPDGRWRMVLDYREVNKTIPLTAAQNQHSAGILATIVRQKYKTTLDLANGFWAHPITPDSYWLTAFTWQGKQYCWTRLPQGFLNSPALFTADAVDLLKEVPNVQVYVDDIYLSHDNPHEHIQQLEKVFQILLQAGYVVSLKKSEIGQRTVEFLGFNITKEGRGLTDTFKTKLLNVTPPKDLKQLQSILGLLNFARNFIPNFAELVQTLYNLIASSKGKYIEWTEDNTKQLNKVIEALNTASNLEERLPDQRLVIKVNTSPSAGYVRYYNESGKKPIMYLNYVFSKAELKFSMLEKLLTTMHKALIKAMDLAMGQEILVYSPIVSMTKIQKTPLPERKALPIRWITWMTYLEDPRIQFHYDKTLPELKHIPDVYTSSIPPLKHPSQYEGVFCTDGSAIKSPDPTKSNNAGMGIVHAIYNPEYKILNQWSIPLGHHTAQMAEIAAVEFACKKALKVPGPVLVITDSFYVAESANKELPYWKSNGFVNNKKEPLKHISKWKSIAECLSIKPDITIQHEKGHQPINTSIHTEGNALADKLATQGSYVVNAGKRTADGSEFEKRTADGSEFESPKKKAKVE

SEQ ID NO: 7499 - protein, 2094 aa, synthetic construct
MPAAKRVKLDGGDKKYSIGLDIGTNSVGWAVITDEYKVPSKKFKVLGNTDRHSIKKNLIGALLFDSGETAEATRLKRTARRRYTRRKNRICYLQEIFSNEMAKVDDSFFHRLEESFLVEEDKKHERHPIFGNIVDEVAYHEKYPTIYHLRKKLVDSTDKADLRLIYLALAHMIKFRGHFLIEGDLNPDNSDVDKLFIQLVQTYNQLFEENPINASGVDAKAILSARLSKSRRLENLIAQLPGEKKNGLFGNLIALSLGLTPNFKSNFDLAEDAKLQLSKDTYDDDLDNLLAQIGDQYADLFLAAKNLSDAILLSDILRVNTEITKAPLSASMIKRYDEHHQDLTLLKALVRQQLPEKYKEIFFDQSKNGYAGYIDGGASQEEFYKFIKPILEKMDGTEELLVKLNREDLLRKQRTFDNGSIPHQIHLGELHAILRRQEDFYPFLKDNREKIEKILTFRIPYYVGPLARGNSRFAWMTRKSEETITPWNFEEVVDKGASAQSFIERMTNFDKNLPNEKVLPKHSLLYEYFTVYNELTKVKYVTEGMRKPAFLSGEQKKAIVDLLFKTNRKVTVKQLKEDYFKKIECFDSVEISGVEDRFNASLGTYHDLLKIIKDKDFLDNEENEDILEDIVLTLTLFEDREMIEERLKTYAHLFDDKVMKQLKRRRYTGWGRLSRKLINGIRDKQSGKTILDFLKSDGFANRNFMQLIHDDSLTFKEDIQKAQVSGQGDSLHEHIANLAGSPAIKKGILQTVKVVDELVKVMGRHKPENIVIEMARENQTTQKGQKNSRERMKRIEEGIKELGSQILKEHPVENTQLQNEKLYLYYLQNGRDMYVDQELDINRLSDYDVDHIVPQSFLKDDSIDNKVLTRSDKARGKSDNVPSEEVVKKMKNYWRQLLNAKLITQRKFDNLTKAERGGLSELDKAGFIKRQLVETRQITKHVAQILDSRMNTKYDENDKLIREVKVITLKSKLVSDFRKDFQFYKVREINNYHHAHDAYLNAVVGTALIKKYPKLESEFVYGDYKVYDVRKMIAKSEQEIGKATAKYFFYSNIMNFFKTEITLANGEIRKRPLIETNGETGEIVWDKGRDFATVRKVLSMPQVNIVKKTEVQTGGFSKESILPKRNSDKLIARKKDWDPKKYGGFDSPTVAYSVLVVAKVEKGKSKKLKSVKELLGITIMERSSFEKNPIDFLEAKGYKEVKKDLIIKLPKYSLFELENGRKRMLASAGELQKGNELALPSKYVNFLYLASHYEKLKGSPEDNEQKQLFVEQHKHYLDEIIEQISEFSKRVILADANLDKVLSAYNKHRDKPIREQAENIIHLFTLTNLGAPAAFKYFDTTIDRKRYTSTKEVLDATLIHQSITGLYETRIDLSQLGGDGGEAAAKGGGPAPGGVLNLEEEYRLHEKPVPSSIDPSWLQLFPTVWAERAGMGLANQVPPVVVELRSGASPVAVRQYPMSKEAREGIRPHIQRFLDLGVLVPCQSPWNTPLLPVKKPGTNDYRPVQDLREINKRVQDIHPTVPNPYNLLSSLPPSHTWYSVLDLKDAFFCLKLHPNSQPLFAFEWRDPEKGNTGQLTWTRLPQGFKNSPTLFNEALHRDLAPFRALNPQVVLLQYVDDLLVAAPTYRDCKEGTQKLLQELSKLGYRVSAKKAQLCQKEVTYLGYLLKEGKRWLTPARKATVMKIPPPTTPRQVREFLGKAGFCRLFIPGFASLAAPLYPLTKPSIPFIWTEEHQKAFDRIKEALLSAPALALPDLTKPFTLYVDERAGVARGVLTQTLGPWRRPVAYLSKKLDPVASGWPTCLKAVAAVALLLKDADKLTLGQNVTVIASHSLESIVRQPPDRWMTNARMTHYQSLLLNERVSFAPPAVLNPATLLPVESEATPVHRCSEILAEETGTRRDLKDQPLPGVPAWYTDGSSFIAEGKRRAGAAIVDGKRTVWASSLPEGTSAQKAELVALTQALRLAEGKDINIYTDSRYAFATAHIHGAIYKQRGWLTSAGKDIKNKEEILALLEAIHLPKRVAIIHCPGHQKGNDPVATGNRRADEAAKQAALSTRVLAETTKPAGKRTADGSEFEKRTADGSEFESPKKKAKVE

SEQ ID NO: 7500 - protein, 2098 aa, synthetic construct
MPAAKRVKLDGGDKKYSIGLDIGTNSVGWAVITDEYKVPSKKFKVLGNTDRHSIKKNLIGALLFDSGETAEATRLKRTARRRYTRRKNRICYLQEIFSNEMAKVDDSFFHRLEESFLVEEDKKHERHPIFGNIVDEVAYHEKYPTIYHLRKKLVDSTDKADLRLIYLALAHMIKFRGHFLIEGDLNPDNSDVDKLFIQLVQTYNQLFEENPINASGVDAKAILSARLSKSRRLENLIAQLPGEKKNGLFGNLIALSLGLTPNFKSNFDLAEDAKLQLSKDTYDDDLDNLLAQIGDQYADLFLAAKNLSDAILLSDILRVNTEITKAPLSASMIKRYDEHHQDLTLLKALVRQQLPEKYKEIFFDQSKNGYAGYIDGGASQEEFYKFIKPILEKMDGTEELLVKLNREDLLRKQRTFDNGSIPHQIHLGELHAILRRQEDFYPFLKDNREKIEKILTFRIPYYVGPLARGNSRFAWMTRKSEETITPWNFEEVVDKGASAQSFIERMTNFDKNLPNEKVLPKHSLLYEYFTVYNELTKVKYVTEGMRKPAFLSGEQKKAIVDLLFKTNRKVTVKQLKEDYFKKIECFDSVEISGVEDRFNASLGTYHDLLKIIKDKDFLDNEENEDILEDIVLTLTLFEDREMIEERLKTYAHLFDDKVMKQLKRRRYTGWGRLSRKLINGIRDKQSGKTILDFLKSDGFANRNFMQLIHDDSLTFKEDIQKAQVSGQGDSLHEHIANLAGSPAIKKGILQTVKVVDELVKVMGRHKPENIVIEMARENQTTQKGQKNSRERMKRIEEGIKELGSQILKEHPVENTQLQNEKLYLYYLQNGRDMYVDQELDINRLSDYDVDHIVPQSFLKDDSIDNKVLTRSDKARGKSDNVPSEEVVKKMKNYWRQLLNAKLITQRKFDNLTKAERGGLSELDKAGFIKRQLVETRQITKHVAQILDSRMNTKYDENDKLIREVKVITLKSKLVSDFRKDFQFYKVREINNYHHAHDAYLNAVVGTALIKKYPKLESEFVYGDYKVYDVRKMIAKSEQEIGKATAKYFFYSNIMNFFKTEITLANGEIRKRPLIETNGETGEIVWDKGRDFATVRKVLSMPQVNIVKKTEVQTGGFSKESILPKRNSDKLIARKKDWDPKKYGGFDSPTVAYSVLVVAKVEKGKSKKLKSVKELLGITIMERSSFEKNPIDFLEAKGYKEVKKDLIIKLPKYSLFELENGRKRMLASAGELQKGNELALPSKYVNFLYLASHYEKLKGSPEDNEQKQLFVEQHKHYLDEIIEQISEFSKRVILADANLDKVLSAYNKHRDKPIREQAENIIHLFTLTNLGAPAAFKYFDTTIDRKRYTSTKEVLDATLIHQSITGLYETRIDLSQLGGDGGEAAAKPAPGGGGGTAPLEEEYRLFLEAPIQNVTLLEQWKREIPKVWAEINPPGLASTQAPIHVQLLSTALPVRVRQYPITLEAKRSLRETIRKFRAAGILRPVHSPWNTPLLPVRKSGTSEYRMVQDLREVNKRVETIHPTVPNPYTLLSLLPPDRIWYSVLDLKDAFFCIPLAPESQLIFAFEWADAEEGESGQLTWTRLPQGFKNSPTLFNEALNRDLQGFRLDHPSVSLLQYVDDLLIAADTQAACLSATRDLLMTLAELGYRVSGKKAQLCQEEVTYLGFKIHKGSRSLSNSRTQAILQIPVPKTKRQVREFLGKIGYCRLFIPGFAELAQPLYAATRPGNDPLVWGEKEEEAFQSLKLALTQPPALALPSLDKPFQLFVEETSGAAKGVLTQALGPWKRPVAYLSKRLDPVAAGWPRCLRAIAAAALLTREASKLTFGQDIEITSSHNLESLLRSPPDKWLTNARITQYQVLLLDPPRVRFKQTAALNPATLLPETDDTLPIHHCLDTLDSLTSTRPDLTDQPLAQAEATLFTDGSSYIRDGKRYAGAAVVTLDSVIWAEPLPIGTSAQKAELIALTKALEWSKDKSVNIYTDSRYAFATLHVHGMIYRERGWLTAGGKAIKNAPEILALLTAVWLPKRVAVMHCKGHQKDDAPTSTGNRRADEVAREVAIRPLSTQATISAGKRTADGSEFEKRTADGSEFESPKKKAKVE

SEQ ID NO: 7501 - protein, 2102 aa, synthetic construct
MPAAKRVKLDGGDKKYSIGLDIGTNSVGWAVITDEYKVPSKKFKVLGNTDRHSIKKNLIGALLFDSGETAEATRLKRTARRRYTRRKNRICYLQEIFSNEMAKVDDSFFHRLEESFLVEEDKKHERHPIFGNIVDEVAYHEKYPTIYHLRKKLVDSTDKADLRLIYLALAHMIKFRGHFLIEGDLNPDNSDVDKLFIQLVQTYNQLFEENPINASGVDAKAILSARLSKSRRLENLIAQLPGEKKNGLFGNLIALSLGLTPNFKSNFDLAEDAKLQLSKDTYDDDLDNLLAQIGDQYADLFLAAKNLSDAILLSDILRVNTEITKAPLSASMIKRYDEHHQDLTLLKALVRQQLPEKYKEIFFDQSKNGYAGYIDGGASQEEFYKFIKPILEKMDGTEELLVKLNREDLLRKQRTFDNGSIPHQIHLGELHAILRRQEDFYPFLKDNREKIEKILTFRIPYYVGPLARGNSRFAWMTRKSEETITPWNFEEVVDKGASAQSFIERMTNFDKNLPNEKVLPKHSLLYEYFTVYNELTKVKYVTEGMRKPAFLSGEQKKAIVDLLFKTNRKVTVKQLKEDYFKKIECFDSVEISGVEDRFNASLGTYHDLLKIIKDKDFLDNEENEDILEDIVLTLTLFEDREMIEERLKTYAHLFDDKVMKQLKRRRYTGWGRLSRKLINGIRDKQSGKTILDFLKSDGFANRNFMQLIHDDSLTFKEDIQKAQVSGQGDSLHEHIANLAGSPAIKKGILQTVKVVDELVKVMGRHKPENIVIEMARENQTTQKGQKNSRERMKRIEEGIKELGSQILKEHPVENTQLQNEKLYLYYLQNGRDMYVDQELDINRLSDYDVDHIVPQSFLKDDSIDNKVLTRSDKARGKSDNVPSEEVVKKMKNYWRQLLNAKLITQRKFDNLTKAERGGLSELDKAGFIKRQLVETRQITKHVAQILDSRMNTKYDENDKLIREVKVITLKSKLVSDFRKDFQFYKVREINNYHHAHDAYLNAVVGTALIKKYPKLESEFVYGDYKVYDVRKMIAKSEQEIGKATAKYFFYSNIMNFFKTEITLANGEIRKRPLIETNGETGEIVWDKGRDFATVRKVLSMPQVNIVKKTEVQTGGFSKESILPKRNSDKLIARKKDWDPKKYGGFDSPTVAYSVLVVAKVEKGKSKKLKSVKELLGITIMERSSFEKNPIDFLEAKGYKEVKKDLIIKLPKYSLFELENGRKRMLASAGELQKGNELALPSKYVNFLYLASHYEKLKGSPEDNEQKQLFVEQHKHYLDEIIEQISEFSKRVILADANLDKVLSAYNKHRDKPIREQAENIIHLFTLTNLGAPAAFKYFDTTIDRKRYTSTKEVLDATLIHQSITGLYETRIDLSQLGGDGGEAAAKPAPGGGGGTVSLQDEHRLFDIPVTTSLPDVWLQDFPQAWAETGGLGRAKCQAPIIIDLKPTAVPVSIKQYPMSLEAHMGIRQHIIKFLELGVLRPCRSPWNTPLLPVKKPGTQDYRPVQDLREINKRTVDIHPTVPNPYNLLSTLKPDYSWYTVLDLKDAFFCLPLAPQSQELFAFEWKDPERGISGQLTWTRLPQGFKNSPTLFNEALHRDLTDFRTQHPEVTLLQYVDDLLLAAPTKKACTQGTRHLLQELGEKGYRASAKKAQICQTKVTYLGYILSEGKRWLTPGRIETVARIPPPRNPREVREFLGKAGFCRLFIPGFAELAAPLYALTKPSTPFTWQTEHQLAFEALKKALLSAPALGLPDTSKPFTLFLDERQGIAKGVLTQKLGPWKRPVAYLSKKLDPVAAGWPPCLRIMAATAMLVKDSAKLTLGQPLTVITPHTLEAIVRQPPDRWITNARLTHYQALLLDTDRVQFGPPVTLNPATLLPVPENQPSPHDCRQVLAETHGTREDLKDQELPDADHTWYTDGSSYLDSGTRRAGAAVVDGHNTIWAQSLPPGTSAQKAELIALTKALELSKGKKANIYTDSRYAFATAHTHGSIYERRGWLTSEGKEIKNKAEIIALLKALFLPQEVAIIHCPGHQKGQDPVAVGNRQADRVARQAAMAEVLTLATEPDNTSHITAGKRTADGSEFEKRTADGSEFESPKKKAKVE

SEQ ID NO: 7502 - protein, 2095 aa, synthetic construct
MPAAKRVKLDGGDKKYSIGLDIGTNSVGWAVITDEYKVPSKKFKVLGNTDRHSIKKNLIGALLFDSGETAEATRLKRTARRRYTRRKNRICYLQEIFSNEMAKVDDSFFHRLEESFLVEEDKKHERHPIFGNIVDEVAYHEKYPTIYHLRKKLVDSTDKADLRLIYLALAHMIKFRGHFLIEGDLNPDNSDVDKLFIQLVQTYNQLFEENPINASGVDAKAILSARLSKSRRLENLIAQLPGEKKNGLFGNLIALSLGLTPNFKSNFDLAEDAKLQLSKDTYDDDLDNLLAQIGDQYADLFLAAKNLSDAILLSDILRVNTEITKAPLSASMIKRYDEHHQDLTLLKALVRQQLPEKYKEIFFDQSKNGYAGYIDGGASQEEFYKFIKPILEKMDGTEELLVKLNREDLLRKQRTFDNGSIPHQIHLGELHAILRRQEDFYPFLKDNREKIEKILTFRIPYYVGPLARGNSRFAWMTRKSEETITPWNFEEVVDKGASAQSFIERMTNFDKNLPNEKVLPKHSLLYEYFTVYNELTKVKYVTEGMRKPAFLSGEQKKAIVDLLFKTNRKVTVKQLKEDYFKKIECFDSVEISGVEDRFNASLGTYHDLLKIIKDKDFLDNEENEDILEDIVLTLTLFEDREMIEERLKTYAHLFDDKVMKQLKRRRYTGWGRLSRKLINGIRDKQSGKTILDFLKSDGFANRNFMQLIHDDSLTFKEDIQKAQVSGQGDSLHEHIANLAGSPAIKKGILQTVKVVDELVKVMGRHKPENIVIEMARENQTTQKGQKNSRERMKRIEEGIKELGSQILKEHPVENTQLQNEKLYLYYLQNGRDMYVDQELDINRLSDYDVDHIVPQSFLKDDSIDNKVLTRSDKARGKSDNVPSEEVVKKMKNYWRQLLNAKLITQRKFDNLTKAERGGLSELDKAGFIKRQLVETRQITKHVAQILDSRMNTKYDENDKLIREVKVITLKSKLVSDFRKDFQFYKVREINNYHHAHDAYLNAVVGTALIKKYPKLESEFVYGDYKVYDVRKMIAKSEQEIGKATAKYFFYSNIMNFFKTEITLANGEIRKRPLIETNGETGEIVWDKGRDFATVRKVLSMPQVNIVKKTEVQTGGFSKESILPKRNSDKLIARKKDWDPKKYGGFDSPTVAYSVLVVAKVEKGKSKKLKSVKELLGITIMERSSFEKNPIDFLEAKGYKEVKKDLIIKLPKYSLFELENGRKRMLASAGELQKGNELALPSKYVNFLYLASHYEKLKGSPEDNEQKQLFVEQHKHYLDEIIEQISEFSKRVILADANLDKVLSAYNKHRDKPIREQAENIIHLFTLTNLGAPAAFKYFDTTIDRKRYTSTKEVLDATLIHQSITGLYETRIDLSQLGGDGGEAAAKPAPGGGGGTLQLEEEYRLFEPESTQKQEMDIWLKNFPQAWAETGGMGTAHCQAPVLIQLKATATPISIRQYPMPHEAYQGIKPHIRRMLDQGILKPCQSPWNTPLLPVKKPGTEDYRPVQDLREVNKRVEDIHPTVPNPYNLLSTLPPSHPWYTVLDLKDAFFCLRLHSESQLLFAFEWRDPEIGLSGQLTWTRLPQGFKNSPTLFNEALHSDLADFRVRYPALVLLQYVDDLLLAAATRTECLEGTKALLETLGNKGYRASAKKAQICLQEVTYLGYSLKDGQRWLTKARKEAILSIPVPKNSRQVREFLGKAGYCRLFIPGFAELAAPLYPLTRPGTLFQWGTEQQLAFEDIKKALLSSPALGLPDITKPFELFIDENSGFAKGVLVQKLGPWKRPVAYLSKKLDTVASGWPPCLRMVAAIAILVKDAGKLTLGQPLTILTSHPVEALVRQPPNKWLSNARMTHYQAMLLDAERVHFGPTVSLNPATLLPLPSGGNHHDCLQILAETHGTRPDLTDQPLPDADLTWYTDGSSFIRNGEREAGAAVTTESEVIWAAPLPPGTSAQRAELIALTQALKMAEGKKLTVYTDSRYAFATTHVHGEIYRRRGWLTSEGKEIKNKNEILALLEALFLPKRLSIIHCPGHQKGDSPQAKGNRLADDTAKKAATETHSSLTVLPAGKRTADGSEFEKRTADGSEFESPKKKAKVE

SEQ ID NO: 7503 - protein, 2176 aa, synthetic construct
MPAAKRVKLDGGDKKYSIGLDIGTNSVGWAVITDEYKVPSKKFKVLGNTDRHSIKKNLIGALLFDSGETAEATRLKRTARRRYTRRKNRICYLQEIFSNEMAKVDDSFFHRLEESFLVEEDKKHERHPIFGNIVDEVAYHEKYPTIYHLRKKLVDSTDKADLRLIYLALAHMIKFRGHFLIEGDLNPDNSDVDKLFIQLVQTYNQLFEENPINASGVDAKAILSARLSKSRRLENLIAQLPGEKKNGLFGNLIALSLGLTPNFKSNFDLAEDAKLQLSKDTYDDDLDNLLAQIGDQYADLFLAAKNLSDAILLSDILRVNTEITKAPLSASMIKRYDEHHQDLTLLKALVRQQLPEKYKEIFFDQSKNGYAGYIDGGASQEEFYKFIKPILEKMDGTEELLVKLNREDLLRKQRTFDNGSIPHQIHLGELHAILRRQEDFYPFLKDNREKIEKILTFRIPYYVGPLARGNSRFAWMTRKSEETITPWNFEEVVDKGASAQSFIERMTNFDKNLPNEKVLPKHSLLYEYFTVYNELTKVKYVTEGMRKPAFLSGEQKKAIVDLLFKTNRKVTVKQLKEDYFKKIECFDSVEISGVEDRFNASLGTYHDLLKIIKDKDFLDNEENEDILEDIVLTLTLFEDREMIEERLKTYAHLFDDKVMKQLKRRRYTGWGRLSRKLINGIRDKQSGKTILDFLKSDGFANRNFMQLIHDDSLTFKEDIQKAQVSGQGDSLHEHIANLAGSPAIKKGILQTVKVVDELVKVMGRHKPENIVIEMARENQTTQKGQKNSRERMKRIEEGIKELGSQILKEHPVENTQLQNEKLYLYYLQNGRDMYVDQELDINRLSDYDVDHIVPQSFLKDDSIDNKVLTRSDKARGKSDNVPSEEVVKKMKNYWRQLLNAKLITQRKFDNLTKAERGGLSELDKAGFIKRQLVETRQITKHVAQILDSRMNTKYDENDKLIREVKVITLKSKLVSDFRKDFQFYKVREINNYHHAHDAYLNAVVGTALIKKYPKLESEFVYGDYKVYDVRKMIAKSEQEIGKATAKYFFYSNIMNFFKTEITLANGEIRKRPLIETNGETGEIVWDKGRDFATVRKVLSMPQVNIVKKTEVQTGGFSKESILPKRNSDKLIARKKDWDPKKYGGFDSPTVAYSVLVVAKVEKGKSKKLKSVKELLGITIMERSSFEKNPIDFLEAKGYKEVKKDLIIKLPKYSLFELENGRKRMLASAGELQKGNELALPSKYVNFLYLASHYEKLKGSPEDNEQKQLFVEQHKHYLDEIIEQISEFSKRVILADANLDKVLSAYNKHRDKPIREQAENIIHLFTLTNLGAPAAFKYFDTTIDRKRYTSTKEVLDATLIHQSITGLYETRIDLSQLGGDGGEAAAKPAPGGGGGMNPLQLLQPLPAEIKGTKLLAHWNSGATITCIPESFLEDEQPIKKTLIKTIHGEKQQNVYYVTFKVKGRKVEAEVIASPYEYILLSPTDVPWLTQQPLQLTILVPLQEYQEKILSKTALPEDQKQQLKTLFVKYDNLWQHWENQVGHRKIRPHNIATGDYPPRPQKQYPINPKAKPSIQIVIDDLLKQGVLTPQNSTMNTPVYPVPKPDGRWRMVLDYREVNKTIPLTAAQNQHSAGILATIVRQKYKTTLDLANGFWAHPITPESYWLTAFTWQGKQYCWTRLPQGFLNSPALFNADVVDLLKEIPNVQVYVDDIYLSHDDPKEHVQQLEKVFQILLQAGYVVSLKKSEIGQKTVEFLGFNITKEGRGLTDTFKTKLLNITPPKDLKQLQSILGLLNFARNFIPNFAELVQPLYNLIAPAKGKYIEWSEENTKQLNMVIEALNTASNLEERLPEQRLVIKVNTSPSAGYVRYYNETGKKPIMYLNYVFSKAELKFSMLEKLLTTMHKALIKAMDLAMGQEILVYSPIVSMTKIQKTPLPERKALPIRWITWMTYLEDPRIQFHYDKTLPELKHIPDVYTSSQSPVKHPSQYEGVFYTDGSAIKSPDPTKSNNAGMGIVHATYKPEYQVLNQWSIPLGNHTAQMAEIAAVEFACKKALKIPGPVLVITDSFYVAESANKELPYWKSNGFVNNKKKPLKHISKWKSIAECLSMKPDITIQHEKGISLQIPVFILKGNALADKLATQGSYVVNAGKRTADGSEFEKRTADGSEFESPKKKAKVE

SEQ ID NO: 7504 - protein, 2094 aa, synthetic construct
MPAAKRVKLDGGDKKYSIGLDIGTNSVGWAVITDEYKVPSKKFKVLGNTDRHSIKKNLIGALLFDSGETAEATRLKRTARRRYTRRKNRICYLQEIFSNEMAKVDDSFFHRLEESFLVEEDKKHERHPIFGNIVDEVAYHEKYPTIYHLRKKLVDSTDKADLRLIYLALAHMIKFRGHFLIEGDLNPDNSDVDKLFIQLVQTYNQLFEENPINASGVDAKAILSARLSKSRRLENLIAQLPGEKKNGLFGNLIALSLGLTPNFKSNFDLAEDAKLQLSKDTYDDDLDNLLAQIGDQYADLFLAAKNLSDAILLSDILRVNTEITKAPLSASMIKRYDEHHQDLTLLKALVRQQLPEKYKEIFFDQSKNGYAGYIDGGASQEEFYKFIKPILEKMDGTEELLVKLNREDLLRKQRTFDNGSIPHQIHLGELHAILRRQEDFYPFLKDNREKIEKILTFRIPYYVGPLARGNSRFAWMTRKSEETITPWNFEEVVDKGASAQSFIERMTNFDKNLPNEKVLPKHSLLYEYFTVYNELTKVKYVTEGMRKPAFLSGEQKKAIVDLLFKTNRKVTVKQLKEDYFKKIECFDSVEISGVEDRFNASLGTYHDLLKIIKDKDFLDNEENEDILEDIVLTLTLFEDREMIEERLKTYAHLFDDKVMKQLKRRRYTGWGRLSRKLINGIRDKQSGKTILDFLKSDGFANRNFMQLIHDDSLTFKEDIQKAQVSGQGDSLHEHIANLAGSPAIKKGILQTVKVVDELVKVMGRHKPENIVIEMARENQTTQKGQKNSRERMKRIEEGIKELGSQILKEHPVENTQLQNEKLYLYYLQNGRDMYVDQELDINRLSDYDVDHIVPQSFLKDDSIDNKVLTRSDKARGKSDNVPSEEVVKKMKNYWRQLLNAKLITQRKFDNLTKAERGGLSELDKAGFIKRQLVETRQITKHVAQILDSRMNTKYDENDKLIREVKVITLKSKLVSDFRKDFQFYKVREINNYHHAHDAYLNAVVGTALIKKYPKLESEFVYGDYKVYDVRKMIAKSEQEIGKATAKYFFYSNIMNFFKTEITLANGEIRKRPLIETNGETGEIVWDKGRDFATVRKVLSMPQVNIVKKTEVQTGGFSKESILPKRNSDKLIARKKDWDPKKYGGFDSPTVAYSVLVVAKVEKGKSKKLKSVKELLGITIMERSSFEKNPIDFLEAKGYKEVKKDLIIKLPKYSLFELENGRKRMLASAGELQKGNELALPSKYVNFLYLASHYEKLKGSPEDNEQKQLFVEQHKHYLDEIIEQISEFSKRVILADANLDKVLSAYNKHRDKPIREQAENIIHLFTLTNLGAPAAFKYFDTTIDRKRYTSTKEVLDATLIHQSITGLYETRIDLSQLGGDGGEAAAKPAPGGGGGVLNLEEEYRLHEKPVPSSIDPSWLQLFPTVWAERAGMGLANQVPPVVVELRSGASPVAVRQYPMSKEAREGIRPHIQKFLDLGVLVPCRSPWNTPLLPVKKPGTNDYRPVQDLREINKRVQDIHPTVPNPYNLLSSLPPSYTWYSVLDLKDAFFCLRLHPNSQPLFAFEWKDPEKGNTGQLTWTRLPQGFKNSPTLFNEALHRDLAPFRALNPQVVLLQYVDDLLVAAPTYEDCKKGTQKLLQELSKLGYRVSAKKAQLCQREVTYLGYLLKEGKRWLTPARKATVMKIPVPTTPRQVREFLGKAGFCRLFIPGFASLAAPLYPLTKPSIPFIWTEEHQQAFDHIKKALLSAPALALPDLTKPFTLYIDERAGVARGVLTQTLGPWRRPVAYLSKKLDPVASGWPTCLKAVAAVALLLKDADKLTLGQNVTVIASHSLESIVRQPPDRWMTNARMTHYQSLLLNERVSFAPPAVLNPATLLPVESEATPVHRCSEILAEETGTRRDLEDQPLPGVPTWYTDGSSFITEGKRRAGAPIVDGKRTVWASSLPEGTSAQKAELVALTQALRLAEGKNINIYTDSRYAFATAHIHGAIYKQRGWLTSAGKDIKNKEEILALLEAIHLPRRVAIIHCPGHQRGSNPVATGNRRADEAAKQAALSTRVLAGTTKPAGKRTADGSEFEKRTADGSEFESPKKKAKVE

SEQ ID NO: 7505 - protein, 2218 aa, synthetic construct
MPAAKRVKLDGGDKKYSIGLDIGTNSVGWAVITDEYKVPSKKFKVLGNTDRHSIKKNLIGALLFDSGETAEATRLKRTARRRYTRRKNRICYLQEIFSNEMAKVDDSFFHRLEESFLVEEDKKHERHPIFGNIVDEVAYHEKYPTIYHLRKKLVDSTDKADLRLIYLALAHMIKFRGHFLIEGDLNPDNSDVDKLFIQLVQTYNQLFEENPINASGVDAKAILSARLSKSRRLENLIAQLPGEKKNGLFGNLIALSLGLTPNFKSNFDLAEDAKLQLSKDTYDDDLDNLLAQIGDQYADLFLAAKNLSDAILLSDILRVNTEITKAPLSASMIKRYDEHHQDLTLLKALVRQQLPEKYKEIFFDQSKNGYAGYIDGGASQEEFYKFIKPILEKMDGTEELLVKLNREDLLRKQRTFDNGSIPHQIHLGELHAILRRQEDFYPFLKDNREKIEKILTFRIPYYVGPLARGNSRFAWMTRKSEETITPWNFEEVVDKGASAQSFIERMTNFDKNLPNEKVLPKHSLLYEYFTVYNELTKVKYVTEGMRKPAFLSGEQKKAIVDLLFKTNRKVTVKQLKEDYFKKIECFDSVEISGVEDRFNASLGTYHDLLKIIKDKDFLDNEENEDILEDIVLTLTLFEDREMIEERLKTYAHLFDDKVMKQLKRRRYTGWGRLSRKLINGIRDKQSGKTILDFLKSDGFANRNFMQLIHDDSLTFKEDIQKAQVSGQGDSLHEHIANLAGSPAIKKGILQTVKVVDELVKVMGRHKPENIVIEMARENQTTQKGQKNSRERMKRIEEGIKELGSQILKEHPVENTQLQNEKLYLYYLQNGRDMYVDQELDINRLSDYDVDHIVPQSFLKDDSIDNKVLTRSDKARGKSDNVPSEEVVKKMKNYWRQLLNAKLITQRKFDNLTKAERGGLSELDKAGFIKRQLVETRQITKHVAQILDSRMNTKYDENDKLIREVKVITLKSKLVSDFRKDFQFYKVREINNYHHAHDAYLNAVVGTALIKKYPKLESEFVYGDYKVYDVRKMIAKSEQEIGKATAKYFFYSNIMNFFKTEITLANGEIRKRPLIETNGETGEIVWDKGRDFATVRKVLSMPQVNIVKKTEVQTGGFSKESILPKRNSDKLIARKKDWDPKKYGGFDSPTVAYSVLVVAKVEKGKSKKLKSVKELLGITIMERSSFEKNPIDFLEAKGYKEVKKDLIIKLPKYSLFELENGRKRMLASAGELQKGNELALPSKYVNFLYLASHYEKLKGSPEDNEQKQLFVEQHKHYLDEIIEQISEFSKRVILADANLDKVLSAYNKHRDKPIREQAENIIHLFTLTNLGAPAAFKYFDTTIDRKRYTSTKEVLDATLIHQSITGLYETRIDLSQLGGDGGEAAAKPAPGGGGGTLGDQGSRGSDPLPEPRVTLTVEGIPTEFLVNTGAEHSVLTKPMGKMGSKRTVVAGATGSKVYPWTTKRLLKIGQKQVTHSFLVIPECPAPLLGRDLLTKLKAQIQFSTEGPQVTWEDRPAMCLVLNLEEEYRLHEKPVPPSIDPSWLQLFPMVWAEKAGMGLANQVPPVVVELKSDASPVAVRQYPMSKEAREGIRPHIQRFLDLGILVPCQSPWNTPLLPVKKPGTNDYRPVQDLREVNKRVQDIHPTVPNPYNLLSSLPPSHTWYSVLDLKDAFFCLKLHPNSQPLFAFEWRDPEKGNTGQLTWTRLPQGFKNSPTLFNEALHRDLASFRALNPQVVMLQYVDDLLVAAPTYRDCKEGTRRLLQELSKLGYRVSAKKAQLCREEVTYLGYLLKGGKRWLTPARKATVMKIPTPTTPRQVREFLGKAGFCRLFIPGFASLAAPLYPLTRPKVPFTWTEAHQEAFGRIKEALLSAPALALPDLTKPFALYVDEKEGVARGVLTQTLGPWRRPVAYLSKKLDPVASGWPTCLKAIAAVALLLKDADKLTLGQNVLVIAPHNLESIVRQPPDRWMTNARMTHYQSLLLNERVSFAPPAILNPATLLPVESDDTPIHICSEILAEETGTRPDLRDQPLPGVPAWYTDGSSFIMDGRRQAGAAIVDNKRTVWASNLPEGTSAQKAELIALTQALRLAEGKSINIYTDSRYAFATAHVHGAIYKQRGWLTSAGKDIKNKEEILALLEAIHLPKRVAIIHCPGHQRGTDPVATGNRKADEAAKQAAQSTRILTETTKNAGKRTADGSEFEKRTADGSEFESPKKKAKVE

SEQ ID NO: 7506 - protein, 2096 aa, synthetic construct
MPAAKRVKLDGGDKKYSIGLDIGTNSVGWAVITDEYKVPSKKFKVLGNTDRHSIKKNLIGALLFDSGETAEATRLKRTARRRYTRRKNRICYLQEIFSNEMAKVDDSFFHRLEESFLVEEDKKHERHPIFGNIVDEVAYHEKYPTIYHLRKKLVDSTDKADLRLIYLALAHMIKFRGHFLIEGDLNPDNSDVDKLFIQLVQTYNQLFEENPINASGVDAKAILSARLSKSRRLENLIAQLPGEKKNGLFGNLIALSLGLTPNFKSNFDLAEDAKLQLSKDTYDDDLDNLLAQIGDQYADLFLAAKNLSDAILLSDILRVNTEITKAPLSASMIKRYDEHHQDLTLLKALVRQQLPEKYKEIFFDQSKNGYAGYIDGGASQEEFYKFIKPILEKMDGTEELLVKLNREDLLRKQRTFDNGSIPHQIHLGELHAILRRQEDFYPFLKDNREKIEKILTFRIPYYVGPLARGNSRFAWMTRKSEETITPWNFEEVVDKGASAQSFIERMTNFDKNLPNEKVLPKHSLLYEYFTVYNELTKVKYVTEGMRKPAFLSGEQKKAIVDLLFKTNRKVTVKQLKEDYFKKIECFDSVEISGVEDRFNASLGTYHDLLKIIKDKDFLDNEENEDILEDIVLTLTLFEDREMIEERLKTYAHLFDDKVMKQLKRRRYTGWGRLSRKLINGIRDKQSGKTILDFLKSDGFANRNFMQLIHDDSLTFKEDIQKAQVSGQGDSLHEHIANLAGSPAIKKGILQTVKVVDELVKVMGRHKPENIVIEMARENQTTQKGQKNSRERMKRIEEGIKELGSQILKEHPVENTQLQNEKLYLYYLQNGRDMYVDQELDINRLSDYDVDHIVPQSFLKDDSIDNKVLTRSDKARGKSDNVPSEEVVKKMKNYWRQLLNAKLITQRKFDNLTKAERGGLSELDKAGFIKRQLVETRQITKHVAQILDSRMNTKYDENDKLIREVKVITLKSKLVSDFRKDFQFYKVREINNYHHAHDAYLNAVVGTALIKKYPKLESEFVYGDYKVYDVRKMIAKSEQEIGKATAKYFFYSNIMNFFKTEITLANGEIRKRPLIETNGETGEIVWDKGRDFATVRKVLSMPQVNIVKKTEVQTGGFSKESILPKRNSDKLIARKKDWDPKKYGGFDSPTVAYSVLVVAKVEKGKSKKLKSVKELLGITIMERSSFEKNPIDFLEAKGYKEVKKDLIIKLPKYSLFELENGRKRMLASAGELQKGNELALPSKYVNFLYLASHYEKLKGSPEDNEQKQLFVEQHKHYLDEIIEQISEFSKRVILADANLDKVLSAYNKHRDKPIREQAENIIHLFTLTNLGAPAAFKYFDTTIDRKRYTSTKEVLDATLIHQSITGLYETRIDLSQLGGDGGEAAAKPAPGGGGGTLNLEDEYRLYETSAEPEVSPGSTWLSDFPQAWAETGGMGLAVRQAPLIIPLKATSTPVSIKQYPMSQEAKLGIKPHIQRLLDQGILVPCQSPWNTPLLPVKKPGTNDYRPVQDLREVNKRVEDIHPTVPNPYNLLSGLPPSHRWYTVLDLKDAFFCLRLHPTSQPLFAFEWRDPGMGISGQLTWTRLPQGFKNSPTLFDEALHRDLADFRIQHPDLILLQYVDDILLAATSELDCQQGTRALLLTLGNLGYRASAKKAQLCQKQVKYLGYLLKEGQRWLTEARKETVMGQPTPKTPRQLREFLGTAGFCRLWIPGFAEMAAPLYPLTKTGTLFNWGPDQQKAYQEIKQALLTAPALGLPDLTKPFELFVDEKQGYAKGVLTQKLGPWRRPVAYLSKKLDPVAAGWPPCLRMVAAIAVLRKDAGKLTMGQPLVILAPHAVEALVKQPPDRWLSNARMTHYQAMLLDTDRVQFGPVVALNPATLLPLPEEGAPHDCLEILAETHGTRPDLTDQPIPDADHTWYTDGSSFLQEGQRKAGAAVTTETEVIWARALPAGTSAQRAELIALTQALKMAEGKRLNVYTDSRYAFATAHIHGEIYRRRGLLTSEGREIKNKSEILALLKALFLPKRLSIIHCLGHQKGDSAEARGNRLADQAAREAAIKTPPDTSTLLAGKRTADGSEFEKRTADGSEFESPKKKAKVE

SEQ ID NO: 7507 - protein, 2096 aa, synthetic construct
MPAAKRVKLDGGDKKYSIGLDIGTNSVGWAVITDEYKVPSKKFKVLGNTDRHSIKKNLIGALLFDSGETAEATRLKRTARRRYTRRKNRICYLQEIFSNEMAKVDDSFFHRLEESFLVEEDKKHERHPIFGNIVDEVAYHEKYPTIYHLRKKLVDSTDKADLRLIYLALAHMIKFRGHFLIEGDLNPDNSDVDKLFIQLVQTYNQLFEENPINASGVDAKAILSARLSKSRRLENLIAQLPGEKKNGLFGNLIALSLGLTPNFKSNFDLAEDAKLQLSKDTYDDDLDNLLAQIGDQYADLFLAAKNLSDAILLSDILRVNTEITKAPLSASMIKRYDEHHQDLTLLKALVRQQLPEKYKEIFFDQSKNGYAGYIDGGASQEEFYKFIKPILEKMDGTEELLVKLNREDLLRKQRTFDNGSIPHQIHLGELHAILRRQEDFYPFLKDNREKIEKILTFRIPYYVGPLARGNSRFAWMTRKSEETITPWNFEEVVDKGASAQSFIERMTNFDKNLPNEKVLPKHSLLYEYFTVYNELTKVKYVTEGMRKPAFLSGEQKKAIVDLLFKTNRKVTVKQLKEDYFKKIECFDSVEISGVEDRFNASLGTYHDLLKIIKDKDFLDNEENEDILEDIVLTLTLFEDREMIEERLKTYAHLFDDKVMKQLKRRRYTGWGRLSRKLINGIRDKQSGKTILDFLKSDGFANRNFMQLIHDDSLTFKEDIQKAQVSGQGDSLHEHIANLAGSPAIKKGILQTVKVVDELVKVMGRHKPENIVIEMARENQTTQKGQKNSRERMKRIEEGIKELGSQILKEHPVENTQLQNEKLYLYYLQNGRDMYVDQELDINRLSDYDVDHIVPQSFLKDDSIDNKVLTRSDKARGKSDNVPSEEVVKKMKNYWRQLLNAKLITQRKFDNLTKAERGGLSELDKAGFIKRQLVETRQITKHVAQILDSRMNTKYDENDKLIREVKVITLKSKLVSDFRKDFQFYKVREINNYHHAHDAYLNAVVGTALIKKYPKLESEFVYGDYKVYDVRKMIAKSEQEIGKATAKYFFYSNIMNFFKTEITLANGEIRKRPLIETNGETGEIVWDKGRDFATVRKVLSMPQVNIVKKTEVQTGGFSKESILPKRNSDKLIARKKDWDPKKYGGFDSPTVAYSVLVVAKVEKGKSKKLKSVKELLGITIMERSSFEKNPIDFLEAKGYKEVKKDLIIKLPKYSLFELENGRKRMLASAGELQKGNELALPSKYVNFLYLASHYEKLKGSPEDNEQKQLFVEQHKHYLDEIIEQISEFSKRVILADANLDKVLSAYNKHRDKPIREQAENIIHLFTLTNLGAPAAFKYFDTTIDRKRYTSTKEVLDATLIHQSITGLYETRIDLSQLGGDGGEAAAKPAPGGGGGTLNLEDEYRLYETSAEPEVSPGSTWLSDFPQAWAETGGMGLAVRQAPLIIPLKATSTPVSIKQYPMSQEAKLGIKPHIQRLLDQGILVPCQSPWNTPLLPVKKPGTNDYRPVQDLREVNKRVEDIHPTVPNPYNLLSGLPPSHRWYTVLDLKDAFFCLRLHPTSQPLFAFEWRDPGMGISGQLTWTRLPQGFKNSPTLFNEALHRDLADFRIQHPDLILLQYVDDILLAATSELDCQQGTRALLLTLGNLGYRASAKKAQLCQKQVKYLGYLLKEGQRWLTEARKETVMGQPTPKTPRQLREFLGTAGFCRLWIPGFAEMAAPLYPLTKPGTLFNWGPDQQKAYQEIKQALLTAPALGLPDLTKPFELFVDEKQGYAKGVLTQKLGPWRRPVAYLSKKLDPVAAGWPPCLRMVAAIAVLRKDAGKLTMGQPLVILAPHAVEALVKQPPDRWLSNARMTHYQAMLLDTDRVQFGPVVALNPATLLPLPEEGAPHDCLEILAETHGTRPDLTDQPIPDADHTWYTDGSSFLQEGQRKAGAAVTTETEVIWARALPAGTSAQRAELIALTQALKMAEGKRLNVYTDSRYAFATAHIHGEIYRRRGWLTSEGREIKNKSEILALLKALFLPKRLSIIHCLGHQKGDSAEARGNRLADQAAREAAIKTPPDTSTLLAGKRTADGSEFEKRTADGSEFESPKKKAKVE

SEQ ID NO: 7508 - protein, 2096 aa, synthetic construct
MPAAKRVKLDGGDKKYSIGLDIGTNSVGWAVITDEYKVPSKKFKVLGNTDRHSIKKNLIGALLFDSGETAEATRLKRTARRRYTRRKNRICYLQEIFSNEMAKVDDSFFHRLEESFLVEEDKKHERHPIFGNIVDEVAYHEKYPTIYHLRKKLVDSTDKADLRLIYLALAHMIKFRGHFLIEGDLNPDNSDVDKLFIQLVQTYNQLFEENPINASGVDAKAILSARLSKSRRLENLIAQLPGEKKNGLFGNLIALSLGLTPNFKSNFDLAEDAKLQLSKDTYDDDLDNLLAQIGDQYADLFLAAKNLSDAILLSDILRVNTEITKAPLSASMIKRYDEHHQDLTLLKALVRQQLPEKYKEIFFDQSKNGYAGYIDGGASQEEFYKFIKPILEKMDGTEELLVKLNREDLLRKQRTFDNGSIPHQIHLGELHAILRRQEDFYPFLKDNREKIEKILTFRIPYYVGPLARGNSRFAWMTRKSEETITPWNFEEVVDKGASAQSFIERMTNFDKNLPNEKVLPKHSLLYEYFTVYNELTKVKYVTEGMRKPAFLSGEQKKAIVDLLFKTNRKVTVKQLKEDYFKKIECFDSVEISGVEDRFNASLGTYHDLLKIIKDKDFLDNEENEDILEDIVLTLTLFEDREMIEERLKTYAHLFDDKVMKQLKRRRYTGWGRLSRKLINGIRDKQSGKTILDFLKSDGFANRNFMQLIHDDSLTFKEDIQKAQVSGQGDSLHEHIANLAGSPAIKKGILQTVKVVDELVKVMGRHKPENIVIEMARENQTTQKGQKNSRERMKRIEEGIKELGSQILKEHPVENTQLQNEKLYLYYLQNGRDMYVDQELDINRLSDYDVDHIVPQSFLKDDSIDNKVLTRSDKARGKSDNVPSEEVVKKMKNYWRQLLNAKLITQRKFDNLTKAERGGLSELDKAGFIKRQLVETRQITKHVAQILDSRMNTKYDENDKLIREVKVITLKSKLVSDFRKDFQFYKVREINNYHHAHDAYLNAVVGTALIKKYPKLESEFVYGDYKVYDVRKMIAKSEQEIGKATAKYFFYSNIMNFFKTEITLANGEIRKRPLIETNGETGEIVWDKGRDFATVRKVLSMPQVNIVKKTEVQTGGFSKESILPKRNSDKLIARKKDWDPKKYGGFDSPTVAYSVLVVAKVEKGKSKKLKSVKELLGITIMERSSFEKNPIDFLEAKGYKEVKKDLIIKLPKYSLFELENGRKRMLASAGELQKGNELALPSKYVNFLYLASHYEKLKGSPEDNEQKQLFVEQHKHYLDEIIEQISEFSKRVILADANLDKVLSAYNKHRDKPIREQAENIIHLFTLTNLGAPAAFKYFDTTIDRKRYTSTKEVLDATLIHQSITGLYETRIDLSQLGGDGGEAAAKPAPGGGGGTLGIEDEYRLHETSTEPDVSLGSTWLSDFPQAWAETGGMGLAVRQAPLIIPLKATSTPVSIQQYPMSHEARLGIKPHIQRLLDQGILVPCQSPWNTPLLPVKKPGTNDYRPVQDLREVNKRVEDIHPTVPNPYNLLSGLPPSHQWYTVLDLKDAFFCLRLHPTSQPLFAFEWRDPGMGISGQLTWTRLPQGFKNSPTLFNEALHRDLADFRIQHPDLILLQYVDDILLAATSELDCQQGTRALLQTLGDLGYRASAKKAQICQKQVKYLGYLLREGQRWLTEARKETVMGQPVPKTPRQLREFLGTAGFCRLWIPGFAEMAAPLYPLTKPGTLFSWGPDQQKAYQEIKQALLTAPALGLPDLTKPFELFVDEKQGYAKGVLTQKLGPWRRPVAYLSKKLDPVAAGWPPCLRMVAAIAVLTKDAGKLTMGQPLVILAPHAVEALVKQPPDRWLSNARMTHYQAMLLDTDRVQFGPVVALNPATLLPLPEEGAPHDCLEILAETHGTRPDLTDQPIPDADHTWYTDGSSFLQEGQRKAGAAVTTETEVIWAGALPAGTSAQRAELIALTQALKMAEGKRLNVYTDSRYAFATAHIHGEIYRRRGWLTSEGREIKNKSEILALLKALFLPKRLSIIHCLGHQKGDSAEARGNRLADQAAREAAIKTPPDTSTLLAGKRTADGSEFEKRTADGSEFESPKKKAKVE

SEQ ID NO: 7509 - protein, 2096 aa, synthetic construct; identical to SEQ ID NO: 4536

SEQ ID NO: 7510 - protein, 2096 aa, synthetic construct
MPAAKRVKLDGGDKKYSIGLDIGTNSVGWAVITDEYKVPSKKFKVLGNTDRHSIKKNLIGALLFDSGETAEATRLKRTARRRYTRRKNRICYLQEIFSNEMAKVDDSFFHRLEESFLVEEDKKHERHPIFGNIVDEVAYHEKYPTIYHLRKKLVDSTDKADLRLIYLALAHMIKFRGHFLIEGDLNPDNSDVDKLFIQLVQTYNQLFEENPINASGVDAKAILSARLSKSRRLENLIAQLPGEKKNGLFGNLIALSLGLTPNFKSNFDLAEDAKLQLSKDTYDDDLDNLLAQIGDQYADLFLAAKNLSDAILLSDILRVNTEITKAPLSASMIKRYDEHHQDLTLLKALVRQQLPEKYKEIFFDQSKNGYAGYIDGGASQEEFYKFIKPILEKMDGTEELLVKLNREDLLRKQRTFDNGSIPHQIHLGELHAILRRQEDFYPFLKDNREKIEKILTFRIPYYVGPLARGNSRFAWMTRKSEETITPWNFEEVVDKGASAQSFIERMTNFDKNLPNEKVLPKHSLLYEYFTVYNELTKVKYVTEGMRKPAFLSGEQKKAIVDLLFKTNRKVTVKQLKEDYFKKIECFDSVEISGVEDRFNASLGTYHDLLKIIKDKDFLDNEENEDILEDIVLTLTLFEDREMIEERLKTYAHLFDDKVMKQLKRRRYTGWGRLSRKLINGIRDKQSGKTILDFLKSDGFANRNFMQLIHDDSLTFKEDIQKAQVSGQGDSLHEHIANLAGSPAIKKGILQTVKVVDELVKVMGRHKPENIVIEMARENQTTQKGQKNSRERMKRIEEGIKELGSQILKEHPVENTQLQNEKLYLYYLQNGRDMYVDQELDINRLSDYDVDHIVPQSFLKDDSIDNKVLTRSDKARGKSDNVPSEEVVKKMKNYWRQLLNAKLITQRKFDNLTKAERGGLSELDKAGFIKRQLVETRQITKHVAQILDSRMNTKYDENDKLIREVKVITLKSKLVSDFRKDFQFYKVREINNYHHAHDAYLNAVVGTALIKKYPKLESEFVYGDYKVYDVRKMIAKSEQEIGKATAKYFFYSNIMNFFKTEITLANGEIRKRPLIETNGETGEIVWDKGRDFATVRKVLSMPQVNIVKKTEVQTGGFSKESILPKRNSDKLIARKKDWDPKKYGGFDSPTVAYSVLVVAKVEKGKSKKLKSVKELLGITIMERSSFEKNPIDFLEAKGYKEVKKDLIIKLPKYSLFELENGRKRMLASAGELQKGNELALPSKYVNFLYLASHYEKLKGSPEDNEQKQLFVEQHKHYLDEIIEQISEFSKRVILADANLDKVLSAYNKHRDKPIREQAENIIHLFTLTNLGAPAAFKYFDTTIDRKRYTSTKEVLDATLIHQSITGLYETRIDLSQLGGDGGEAAAKPAPGGGGGTLNIEDEYRLHETSKGPDVPLGSTWLSDFPQAWAETGGMGLAVRQAPLIIPLKATSTPVSIKQYPMSQEARLGIKPHIQRLLDQGILVPCQSPWNTPLLPVKKPGTNDYRPVQDLREVNKRVEDIHPTVPNPYNLLSGLPPSHQWYTVLDLKDAFFCLRLHPTSQSLFAFEWRDPEMGISGQLTWTRLPQGFKNSPTLFNEALHRDLADFRIQHPDLILLQYVDDLLLAATSELDCQQGTRALLQTLGDLGYRASAKKAQICQKQVKYLGYLLKEGQRWLTEARKETVMGQPTPKTPRQLREFLGTAGFCRLWIPGFAEMAAPLYPLTKPGTLFEWGPDQQKAYQEIKQALLTAPALGLPDLTKPFELFVDEKQGYAKGVLTQKLGPWRRPVAYLSKKLDPVAAGWPPCLRMVAAIAVLTKDAGKLTMGQPLVILAPHAVEALVKQPPDRWLSNARMTHYQALLLDTDRVQFGPIVALNPATLLPLPEEGLQHDCLDILAEAHGTRPDLTDQPLPDADHTWYTDGSSFLQEGQRKAGAAVTTETEVVWAKALPAGTSAQRAELIALTQALKMAEGKKLNVYTDSRYAFATAHIHGEIYRRRGWLTSEGKEIKNKDEILALLKALFLPKRLSIIHCPGHQKGNRAEARGNRMADQAAREVATRETPETSTLLAGKRTADGSEFEKRTADGSEFESPKKKAKVE

SEQ ID NO: 7511 - protein, 2096 aa, synthetic construct
MPAAKRVKLDGGDKKYSIGLDIGTNSVGWAVITDEYKVPSKKFKVLGNTDRHSIKKNLIGALLFDSGETAEATRLKRTARRRYTRRKNRICYLQEIFSNEMAKVDDSFFHRLEESFLVEEDKKHERHPIFGNIVDEVAYHEKYPTIYHLRKKLVDSTDKADLRLIYLALAHMIKFRGHFLIEGDLNPDNSDVDKLFIQLVQTYNQLFEENPINASGVDAKAILSARLSKSRRLENLIAQLPGEKKNGLFGNLIALSLGLTPNFKSNFDLAEDAKLQLSKDTYDDDLDNLLAQIGDQYADLFLAAKNLSDAILLSDILRVNTEITKAPLSASMIKRYDEHHQDLTLLKALVRQQLPEKYKEIFFDQSKNGYAGYIDGGASQEEFYKFIKPILEKMDGTEELLVKLNREDLLRKQRTFDNGSIPHQIHLGELHAILRRQEDFYPFLKDNREKIEKILTFRIPYYVGPLARGNSRFAWMTRKSEETITPWNFEEVVDKGASAQSFIERMTNFDKNLPNEKVLPKHSLLYEYFTVYNELTKVKYVTEGMRKPAFLSGEQKKAIVDLLFKTNRKVTVKQLKEDYFKKIECFDSVEISGVEDRFNASLGTYHDLLKIIKDKDFLDNEENEDILEDIVLTLTLFEDREMIEERLKTYAHLFDDKVMKQLKRRRYTGWGRLSRKLINGIRDKQSGKTILDFLKSDGFANRNFMQLIHDDSLTFKEDIQKAQVSGQGDSLHEHIANLAGSPAIKKGILQTVKVVDELVKVMGRHKPENIVIEMARENQTTQKGQKNSRERMKRIEEGIKELGSQILKEHPVENTQLQNEKLYLYYLQNGRDMYVDQELDINRLSDYDVDHIVPQSFLKDDSIDNKVLTRSDKARGKSDNVPSEEVVKKMKNYWRQLLNAKLITQRKFDNLTKAERGGLSELDKAGFIKRQLVETRQITKHVAQILDSRMNTKYDENDKLIREVKVITLKSKLVSDFRKDFQFYKVREINNYHHAHDAYLNAVVGTALIKKYPKLESEFVYGDYKVYDVRKMIAKSEQEIGKATAKYFFYSNIMNFFKTEITLANGEIRKRPLIETNGETGEIVWDKGRDFATVRKVLSMPQVNIVKKTEVQTGGFSKESILPKRNSDKLIARKKDWDPKKYGGFDSPTVAYSVLVVAKVEKGKSKKLKSVKELLGITIMERSSFEKNPIDFLEAKGYKEVKKDLIIKLPKYSLFELENGRKRMLASAGELQKGNELALPSKYVNFLYLASHYEKLKGSPEDNEQKQLFVEQHKHYLDEIIEQISEFSKRVILADANLDKVLSAYNKHRDKPIREQAENIIHLFTLTNLGAPAAFKYFDTTIDRKRYTSTKEVLDATLIHQSITGLYETRIDLSQLGGDGGEAAAKPAPGGGGGTLNIEDEHRLHETSKEPDVSLGSTWLSDFPQAWAETGGMGLAVRQAPLIIPLKATSTPVSIKQYPMSQEARLGIKPHIQRLLDQGILVPCQSPWNTPLLPVKKPGTNDYRPVQDLREVNKRVEDIHPTVPNPYNLLSGLPPSHQWYTVLDLKDAFFCLRLHPTSQPLFAFEWRDPEMGISGQLTWTRLPQGFKNSPTLFDEALHRDLADFRIQHPDLILLQYVDDLLLAATSELDCQQGTRALLQTLGNLGYRASAKKAQICQKQVKYLGYLLKEGQRWLTEARKETVMGQPTPKTPRQLREFLGTAGFCRLWIPGFAEMAAPLYPLTKTGTLFNWGPDQQKAYQEIKQALLTAPALGLPDLTKPFELFVDEKQGYAKGVLTQKLGPWRRPVAYLSKKLDPVAAGWPPCLRMVAAIAVLTKDAGKLTMGQPLVILAPHAVEALVKQPPDRWLSNARMTHYQALLLDTDRVQFGPVVALNPATLLPLPEEGLQHNCLDILAEAHGTRPDLTDQPLPDADHTWYTDGSSLLQEGQRKAGAAVTTETEVIWAKALPAGTSAQRAELIALTQALKMAEGKKLNVYTDSRYAFATAHIHGEIYRRRGLLTSEGKEIKNKDEILALLKALFLPKRLSIIHCPGHQKGHSAEARGNRMADQAARKAAITETPDTSTLLAGKRTADGSEFEKRTADGSEFESPKKKAKVE

SEQ ID NO: 7512 - protein, 2024 aa, synthetic construct
MPAAKRVKLDGGDKKYSIGLDIGTNSVGWAVITDEYKVPSKKFKVLGNTDRHSIKKNLIGALLFDSGETAEATRLKRTARRRYTRRKNRICYLQEIFSNEMAKVDDSFFHRLEESFLVEEDKKHERHPIFGNIVDEVAYHEKYPTIYHLRKKLVDSTDKADLRLIYLALAHMIKFRGHFLIEGDLNPDNSDVDKLFIQLVQTYNQLFEENPINASGVDAKAILSARLSKSRRLENLIAQLPGEKKNGLFGNLIALSLGLTPNFKSNFDLAEDAKLQLSKDTYDDDLDNLLAQIGDQYADLFLAAKNLSDAILLSDILRVNTEITKAPLSASMIKRYDEHHQDLTLLKALVRQQLPEKYKEIFFDQSKNGYAGYIDGGASQEEFYKFIKPILEKMDGTEELLVKLNREDLLRKQRTFDNGSIPHQIHLGELHAILRRQEDFYPFLKDNREKIEKILTFRIPYYVGPLARGNSRFAWMTRKSEETITPWNFEEVVDKGASAQSFIERMTNFDKNLPNEKVLPKHSLLYEYFTVYNELTKVKYVTEGMRKPAFLSGEQKKAIVDLLFKTNRKVTVKQLKEDYFKKIECFDSVEISGVEDRFNASLGTYHDLLKIIKDKDFLDNEENEDILEDIVLTLTLFEDREMIEERLKTYAHLFDDKVMKQLKRRRYTGWGRLSRKLINGIRDKQSGKTILDFLKSDGFANRNFMQLIHDDSLTFKEDIQKAQVSGQGDSLHEHIANLAGSPAIKKGILQTVKVVDELVKVMGRHKPENIVIEMARENQTTQKGQKNSRERMKRIEEGIKELGSQILKEHPVENTQLQNEKLYLYYLQNGRDMYVDQELDINRLSDYDVDHIVPQSFLKDDSIDNKVLTRSDKARGKSDNVPSEEVVKKMKNYWRQLLNAKLITQRKFDNLTKAERGGLSELDKAGFIKRQLVETRQITKHVAQILDSRMNTKYDENDKLIREVKVITLKSKLVSDFRKDFQFYKVREINNYHHAHDAYLNAVVGTALIKKYPKLESEFVYGDYKVYDVRKMIAKSEQEIGKATAKYFFYSNIMNFFKTEITLANGEIRKRPLIETNGETGEIVWDKGRDFATVRKVLSMPQVNIVKKTEVQTGGFSKESILPKRNSDKLIARKKDWDPKKYGGFDSPTVAYSVLVVAKVEKGKSKKLKSVKELLGITIMERSSFEKNPIDFLEAKGYKEVKKDLIIKLPKYSLFELENGRKRMLASAGELQKGNELALPSKYVNFLYLASHYEKLKGSPEDNEQKQLFVEQHKHYLDEIIEQISEFSKRVILADANLDKVLSAYNKHRDKPIREQAENIIHLFTLTNLGAPAAFKYFDTTIDRKRYTSTKEVLDATLIHQSITGLYETRIDLSQLGGDGGEAAAKPAPGGGGGGRDIMKDIKVRLMTDSPDDSQDLMIGAIESNLFADQISWKSDQPVWLNQWPLKQEKLQALQQLVTEQLQLGHLEESNSPWNTPVFVIKKKSGKWRLLQDLRAVNATMHDMGALQPGLPSPVAVPKGWEIIIIDLQDCFFNIKLHPEDCKRFAFSVPSPNFKRPYQRFQWKVLPQGMKNSPTLCQKFVDKAILTVRDKYQDSYIVHYMDDILLAHPSRSIVDEILTSMIQALNKHGLVVSTEKIQKYDNLKYLGTHIQGDSVSYQKLQIRTDKLRTLNDFQKLLGNINWIRPFLKLTTGELKPLFEILNGDSNPISTRKLTPEACKALQLMNERLSTARVKRLDLSQPWSLCILKTEYTPTACLWQDGVVEWIHLPHISPKVITPYDIFCTQLIIKGRHRSKELFSKDPDYIVVPYTKVQFDLLLQEKEDWPISLLGFLGEVHFHLPKDPLLTFTLQTAIIFPHMTSTTPLEKGIVIFTDGSANGRSVTYIQGREPIIKENTQNTAQQAEIVAVITAFEEVSQPFNLYTDSKYVTGLFPEIETATLSPRTKIYTELKHLQRLIHKRQEKFYIGHIRGHTGLPGPLAQGNAYADSLTRILTAGKRTADGSEFEKRTADGSEFESPKKKAKVE

SEQ ID NO: 7513 - protein, 2088 aa, synthetic construct
MPAAKRVKLDGGDKKYSIGLDIGTNSVGWAVITDEYKVPSKKFKVLGNTDRHSIKKNLIGALLFDSGETAEATRLKRTARRRYTRRKNRICYLQEIFSNEMAKVDDSFFHRLEESFLVEEDKKHERHPIFGNIVDEVAYHEKYPTIYHLRKKLVDSTDKADLRLIYLALAHMIKFRGHFLIEGDLNPDNSDVDKLFIQLVQTYNQLFEENPINASGVDAKAILSARLSKSRRLENLIAQLPGEKKNGLFGNLIALSLGLTPNFKSNFDLAEDAKLQLSKDTYDDDLDNLLAQIGDQYADLFLAAKNLSDAILLSDILRVNTEITKAPLSASMIKRYDEHHQDLTLLKALVRQQLPEKYKEIFFDQSKNGYAGYIDGGASQEEFYKFIKPILEKMDGTEELLVKLNREDLLRKQRTFDNGSIPHQIHLGELHAILRRQEDFYPFLKDNREKIEKILTFRIPYYVGPLARGNSRFAWMTRKSEETITPWNFEEVVDKGASAQSFIERMTNFDKNLPNEKVLPKHSLLYEYFTVYNELTKVKYVTEGMRKPAFLSGEQKKAIVDLLFKTNRKVTVKQLKEDYFKKIECFDSVEISGVEDRFNASLGTYHDLLKIIKDKDFLDNEENEDILEDIVLTLTLFEDREMIEERLKTYAHLFDDKVMKQLKRRRYTGWGRLSRKLINGIRDKQSGKTILDFLKSDGFANRNFMQLIHDDSLTFKEDIQKAQVSGQGDSLHEHIANLAGSPAIKKGILQTVKVVDELVKVMGRHKPENIVIEMARENQTTQKGQKNSRERMKRIEEGIKELGSQILKEHPVENTQLQNEKLYLYYLQNGRDMYVDQELDINRLSDYDVDHIVPQSFLKDDSIDNKVLTRSDKARGKSDNVPSEEVVKKMKNYWRQLLNAKLITQRKFDNLTKAERGGLSELDKAGFIKRQLVETRQITKHVAQILDSRMNTKYDENDKLIREVKVITLKSKLVSDFRKDFQFYKVREINNYHHAHDAYLNAVVGTALIKKYPKLESEFVYGDYKVYDVRKMIAKSEQEIGKATAKYFFYSNIMNFFKTEITLANGEIRKRPLIETNGETGEIVWDKGRDFATVRKVLSMPQVNIVKKTEVQTGGFSKESILPKRNSDKLIARKKDWDPKKYGGFDSPTVAYSVLVVAKVEKGKSKKLKSVKELLGITIMERSSFEKNPIDFLEAKGYKEVKKDLIIKLPKYSLFELENGRKRMLASAGELQKGNELALPSKYVNFLYLASHYEKLKGSPEDNEQKQLFVEQHKHYLDEIIEQISEFSKRVILADANLDKVLSAYNKHRDKPIREQAENIIHLFTLTNLGAPAAFKYFDTTIDRKRYTSTKEVLDATLIHQSITGLYETRIDLSQLGGDGGEAAAKPAPGGGGGLDDEYRLYSPLVKPDQNIQFWLEQFPQAWAETAGMGLAKQVPPQVIQLKASATPVSVRQYPLSKEAQEGIRPHVQRLIQQGILVPVQSPWNTPLLPVRKPGTNDYRPVQDLREVNKRVQDIHPTVPNPYNLLCALPPQRSWYTVLDLKDAFFCLRLHPTSQPLFAFEWRDPGTGRTGQLTWTRLPQGFKNSPTIFNEALHRDLANFRIQHPQVTLLQYVDDLLLAGATKQDCLEGTKALLLELSDLGYRASAKKAQICRREVTYLGYSLRDGQRWLTEARKKTVVQIPAPTTAKQVREFLGKAGFCRLFIPGFATLAAPLYPLTKPKGEFSWAPEHQKAFDAIKKALLSAPALALPDVTKPFTLYVDERKGVARGVLTQTLGPWRRPVAYLSKKLDPVASGWPVCLKAIAAVAILVKDADKLTLGQNITVIAPHALENIVRQPPDRWMTNARMTHYQSLLLTERVTFAPPAALNPATLLPEETDEPVTHDCHQLLIEETGVRKDLTDIPLTGEVLTWFTDGSSYVVEGKRMAGAAVVDGTRTIWASSLPEGTSAQKAELMALTQALRLAEGKSINIYTDSRYAFATAHVHGAIYKQRGWLTSAGREIKNKEEILSLLEALHLPKRLAIIHCPGHQKAKDPISRGNQMADRVAKQAAQGVNLLPAGKRTADGSEFEKRTADGSEFESPKKKAKVE

SEQ ID NO: 7514 - protein, 2090 aa, synthetic construct
MPAAKRVKLDGGDKKYSIGLDIGTNSVGWAVITDEYKVPSKKFKVLGNTDRHSIKKNLIGALLFDSGETAEATRLKRTARRRYTRRKNRICYLQEIFSNEMAKVDDSFFHRLEESFLVEEDKKHERHPIFGNIVDEVAYHEKYPTIYHLRKKLVDSTDKADLRLIYLALAHMIKFRGHFLIEGDLNPDNSDVDKLFIQLVQTYNQLFEENPINASGVDAKAILSARLSKSRRLENLIAQLPGEKKNGLFGNLIALSLGLTPNFKSNFDLAEDAKLQLSKDTYDDDLDNLLAQIGDQYADLFLAAKNLSDAILLSDILRVNTEITKAPLSASMIKRYDEHHQDLTLLKALVRQQLPEKYKEIFFDQSKNGYAGYIDGGASQEEFYKFIKPILEKMDGTEELLVKLNREDLLRKQRTFDNGSIPHQIHLGELHAILRRQEDFYPFLKDNREKIEKILTFRIPYYVGPLARGNSRFAWMTRKSEETITPWNFEEVVDKGASAQSFIERMTNFDKNLPNEKVLPKHSLLYEYFTVYNELTKVKYVTEGMRKPAFLSGEQKKAIVDLLFKTNRKVTVKQLKEDYFKKIECFDSVEISGVEDRFNASLGTYHDLLKIIKDKDFLDNEENEDILEDIVLTLTLFEDREMIEERLKTYAHLFDDKVMKQLKRRRYTGWGRLSRKLINGIRDKQSGKTILDFLKSDGFANRNFMQLIHDDSLTFKEDIQKAQVSGQGDSLHEHIANLAGSPAIKKGILQTVKVVDELVKVMGRHKPENIVIEMARENQTTQKGQKNSRERMKRIEEGIKELGSQILKEHPVENTQLQNEKLYLYYLQNGRDMYVDQELDINRLSDYDVDHIVPQSFLKDDSIDNKVLTRSDKARGKSDNVPSEEVVKKMKNYWRQLLNAKLITQRKFDNLTKAERGGLSELDKAGFIKRQLVETRQITKHVAQILDSRMNTKYDENDKLIREVKVITLKSKLVSDFRKDFQFYKVREINNYHHAHDAYLNAVVGTALIKKYPKLESEFVYGDYKVYDVRKMIAKSEQEIGKATAKYFFYSNIMNFFKTEITLANGEIRKRPLIETNGETGEIVWDKGRDFATVRKVLSMPQVNIVKKTEVQTGGFSKESILPKRNSDKLIARKKDWDPKKYGGFDSPTVAYSVLVVAKVEKGKSKKLKSVKELLGITIMERSSFEKNPIDFLEAKGYKEVKKDLIIKLPKYSLFELENGRKRMLASAGELQKGNELALPSKYVNFLYLASHYEKLKGSPEDNEQKQLFVEQHKHYLDEIIEQISEFSKRVILADANLDKVLSAYNKHRDKPIREQAENIIHLFTLTNLGAPAAFKYFDTTIDRKRYTSTKEVLDATLIHQSITGLYETRIDLSQLGGDGGEAAAKPAPGGGGGTLQLDDEYRLYSPLVKPDQNIQFWLEQFPQAWAETAGMGLAKQVPPQVIQLKASATPVSVRQYPLSKEAQEGIRPHVQRLIQQGILVPVQSPWNTPLLPVRKPGTNDYRPVQDLREVNKRVQDIHPTVPNPYNLLCALPPQRSWYTVLDLKDAFFCLRLHPTSQPLFAFEWRDPGTGRTGQLTWTRLPQGFKNSPTIFDEALHRDLANFRIQHPQVTLLQYVDDLLLAGATKQDCLEGTKALLLELSDLGYRASAKKAQICRREVTYLGYSLRDGQRWLTEARKKTVVQIPAPTTAKQVREFLGTAGFCRLWIPGFATLAAPLYPLTKEKGEFSWAPEHQKAFDAIKKALLSAPALALPDVTKPFTLYVDERKGVARGVLTQTLGPWRRPVAYLSKKLDPVASGWPVCLKAIAAVAILVKDADKLTLGQNITVIAPHALENIVRQPPDRWMTNARMTHYQSLLLTERVTFAPPAALNPATLLPEETDEPVTHDCHQLLIEETGVRKDLTDIPLTGEVLTWFTDGSSYVVEGKRMAGAAVVDGTRTIWASSLPEGTSAQKAELMALTQALRLAEGKSINIYTDSRYAFATAHVHGAIYKQRGLLTSAGREIKNKEEILSLLEALHLPKRLAIIHCPGHQKAKDPISRGNQMADRVAKQAAQGVNLLAGKRTADGSEFEKRTADGSEFESPKKKAKVE

SEQ ID NO: 7515 - protein, 2088 aa, synthetic construct; identical to SEQ ID NO: 7513

SEQ ID NO: 7516 - protein, 2176 aa, synthetic construct
MPAAKRVKLDGGDKKYSIGLDIGTNSVGWAVITDEYKVPSKKFKVLGNTDRHSIKKNLIGALLFDSGETAEATRLKRTARRRYTRRKNRICYLQEIFSNEMAKVDDSFFHRLEESFLVEEDKKHERHPIFGNIVDEVAYHEKYPTIYHLRKKLVDSTDKADLRLIYLALAHMIKFRGHFLIEGDLNPDNSDVDKLFIQLVQTYNQLFEENPINASGVDAKAILSARLSKSRRLENLIAQLPGEKKNGLFGNLIALSLGLTPNFKSNFDLAEDAKLQLSKDTYDDDLDNLLAQIGDQYADLFLAAKNLSDAILLSDILRVNTEITKAPLSASMIKRYDEHHQDLTLLKALVRQQLPEKYKEIFFDQSKNGYAGYIDGGASQEEFYKFIKPILEKMDGTEELLVKLNREDLLRKQRTFDNGSIPHQIHLGELHAILRRQEDFYPFLKDNREKIEKILTFRIPYYVGPLARGNSRFAWMTRKSEETITPWNFEEVVDKGASAQSFIERMTNFDKNLPNEKVLPKHSLLYEYFTVYNELTKVKYVTEGMRKPAFLSGEQKKAIVDLLFKTNRKVTVKQLKEDYFKKIECFDSVEISGVEDRFNASLGTYHDLLKIIKDKDFLDNEENEDILEDIVLTLTLFEDREMIEERLKTYAHLFDDKVMKQLKRRRYTGWGRLSRKLINGIRDKQSGKTILDFLKSDGFANRNFMQLIHDDSLTFKEDIQKAQVSGQGDSLHEHIANLAGSPAIKKGILQTVKVVDELVKVMGRHKPENIVIEMARENQTTQKGQKNSRERMKRIEEGIKELGSQILKEHPVENTQLQNEKLYLYYLQNGRDMYVDQELDINRLSDYDVDHIVPQSFLKDDSIDNKVLTRSDKARGKSDNVPSEEVVKKMKNYWRQLLNAKLITQRKFDNLTKAERGGLSELDKAGFIKRQLVETRQITKHVAQILDSRMNTKYDENDKLIREVKVITLKSKLVSDFRKDFQFYKVREINNYHHAHDAYLNAVVGTALIKKYPKLESEFVYGDYKVYDVRKMIAKSEQEIGKATAKYFFYSNIMNFFKTEITLANGEIRKRPLIETNGETGEIVWDKGRDFATVRKVLSMPQVNIVKKTEVQTGGFSKESILPKRNSDKLIARKKDWDPKKYGGFDSPTVAYSVLVVAKVEKGKSKKLKSVKELLGITIMERSSFEKNPIDFLEAKGYKEVKKDLIIKLPKYSLFELENGRKRMLASAGELQKGNELALPSKYVNFLYLASHYEKLKGSPEDNEQKQLFVEQHKHYLDEIIEQISEFSKRVILADANLDKVLSAYNKHRDKPIREQAENIIHLFTLTNLGAPAAFKYFDTTIDRKRYTSTKEVLDATLIHQSITGLYETRIDLSQLGGDGGEAAAKPAPGGGGGMDPLQLLQPLEAEIKGTKLKAHWNSGATITCVPEAFLEDERPIQTMLIKTIHGEKQQDVYYLTFKVQGRKVEAEVLASPYDYILLNPSDVPWLMKKPLQLTVLVPLHEYQERLLQQTALPKEQKELLQKLFLKYDALWQHWENQVGHRRIKPHNIATGTLAPRPQKQYPINPKAKPSIQIVIDDLLKQGVLIQQNSTMNTPVYPVPKPDGKWRMVLDYREVNKTIPLIAAQNQHSAGILSSIYRGKYKTTLDLTNGFWAHPITPESYWLTAFTWQGKQYCWTRLPQGFLNSPALFNADVVDLLKEIPNVQAYVDDIYISHDDPQEHLEQLEKIFSILLNAGYVVSLKKSEIAQREVEFLGFNITKEGRGLTDTFKQKLLNITPPKDLKQLQSILGKLNFARNFIPNYSELVKPLYTIVAPANGKFISWTEDNSNQLQHIISVLNQADNLEERNPETRLIIKVNSSPSAGYIRYYNEGSKRPIMYVNYIFSKAEAKFTQTEKLLTTMHKGLIKAMDLAMGQEILVYSPIVSMTKIQRTPLPERKALPVRWITWMTYLEDPRIQFHYDKSLPELQQIPNVTEDVIAKTKHPSEFAMVFYTDGSAIKHPDVNKSHSAGMGIAQVQFIPEYKIVHQWSIPLGDHTAQLAEIAAVEFACKKALKISGPVLIVTDSFYVAESANKELPYWKSNGFLNNKKKPLRHVSKWKSIAECLQLKPDIIIMHEKGHQQPMTTLHTEGNNLADKLATQGSYVVHAGKRTADGSEFEKRTADGSEFESPKKKAKVE

SEQ ID NO: 7517 - protein, 2176 aa, synthetic construct
MPAAKRVKLDGGDKKYSIGLDIGTNSVGWAVITDEYKVPSKKFKVLGNTDRHSIKKNLIGALLFDSGETAEATRLKRTARRRYTRRKNRICYLQEIFSNEMAKVDDSFFHRLEESFLVEEDKKHERHPIFGNIVDEVAYHEKYPTIYHLRKKLVDSTDKADLRLIYLALAHMIKFRGHFLIEGDLNPDNSDVDKLFIQLVQTYNQLFEENPINASGVDAKAILSARLSKSRRLENLIAQLPGEKKNGLFGNLIALSLGLTPNFKSNFDLAEDAKLQLSKDTYDDDLDNLLAQIGDQYADLFLAAKNLSDAILLSDILRVNTEITKAPLSASMIKRYDEHHQDLTLLKALVRQQLPEKYKEIFFDQSKNGYAGYIDGGASQEEFYKFIKPILEKMDGTEELLVKLNREDLLRKQRTFDNGSIPHQIHLGELHAILRRQEDFYPFLKDNREKIEKILTFRIPYYVGPLARGNSRFAWMTRKSEETITPWNFEEVVDKGASAQSFIERMTNFDKNLPNEKVLPKHSLLYEYFTVYNELTKVKYVTEGMRKPAFLSGEQKKAIVDLLFKTNRKVTVKQLKEDYFKKIECFDSVEISGVEDRFNASLGTYHDLLKIIKDKDFLDNEENEDILEDIVLTLTLFEDREMIEERLKTYAHLFDDKVMKQLKRRRYTGWGRLSRKLINGIRDKQSGKTILDFLKSDGFANRNFMQLIHDDSLTFKEDIQKAQVSGQGDSLHEHIANLAGSPAIKKGILQTVKVVDELVKVMGRHKPENIVIEMARENQTTQKGQKNSRERMKRIEEGIKELGSQILKEHPVENTQLQNEKLYLYYLQNGRDMYVDQELDINRLSDYDVDHIVPQSFLKDDSIDNKVLTRSDKARGKSDNVPSEEVVKKMKNYWRQLLNAKLITQRKFDNLTKAERGGLSELDKAGFIKRQLVETRQITKHVAQILDSRMNTKYDENDKLIREVKVITLKSKLVSDFRKDFQFYKVREINNYHHAHDAYLNAVVGTALIKKYPKLESEFVYGDYKVYDVRKMIAKSEQEIGKATAKYFFYSNIMNFFKTEITLANGEIRKRPLIETNGETGEIVWDKGRDFATVRKVLSMPQVNIVKKTEVQTGGFSKESILPKRNSDKLIARKKDWDPKKYGGFDSPTVAYSVLVVAKVEKGKSKKLKSVKELLGITIMERSSFEKNPIDFLEAKGYKEVKKDLIIKLPKYSLFELENGRKRMLASAGELQKGNELALPSKYVNFLYLASHYEKLKGSPEDNEQKQLFVEQHKHYLDEIIEQISEFSKRVILADANLDKVLSAYNKHRDKPIREQAENIIHLFTLTNLGAPAAFKYFDTTIDRKRYTSTKEVLDATLIHQSITGLYETRIDLSQLGGDGGEAAAKPAPGGGGGMDPLQLLQPLEAEIKGTKLKAHWNSGATITCVPQAFLEEEVPIKNIWIKTIHGEKEQPVYYLTFKIQGRKVEAEVISSPYDYILVSPSDIPWLMKKPLQLTTLVPLQEYEERLLKQTMLTGSYKEKLQSLFLKYDALWQHWENQVGHRRIKPHHIATGTVNPRPQKQYPINPKAKASIQTVINDLLKQGVLIQQNSIMNTPVYPVPKPDGKWRMVLDYREVNKTIPLIAAQNQHSAGILSSIFRGKYKTTLDLSNGFWAHSITPESYWLTAFTWLGQQYCWTRLPQGFLNSPALFTADVVDLLKEVPNVQVYVDDIYISHDDPREHLEQLEKVFSLLLNAGYVVSLKKSEIAQHEVEFLGFNITKEGRGLTETFKQKLLNITPPRDLKQLQSILGLLNFARNFIPNFSELVKPLYNIIATANGKYITWTTDNSQQLQNIISMLNSAENLEERNPEVRLIMKVNTSPSAGYIRFYNEFAKRPIMYLNYVYTKAEVKFTNTEKLLTTIHKGLIKALDLGMGQEILVYSPIVSMTKIQKTPLPERKALPIRWITWMSYLEDPRIQFHYDKTLPELQQVPTVTDDIIAKIKHPSEFSMVFYTDGSAIKHPNVNKSHNAGMGIAQVQFKPEFTVINTWSIPLGDHTAQLAEVAAVEFACKKALKIDGPVLIVTDSFYVAESVNKELPYWQSNGFFNNKKKPLKHVSKWKSIADCIQLKPDIIIIHEKGHQPTASTFHTEGNNLADKLATQGSYVVNAGKRTADGSEFEKRTADGSEFESPKKKAKVE

SEQ ID NO: 7518 - protein, 2087 aa, synthetic construct
MPAAKRVKLDGGDKKYSIGLDIGTNSVGWAVITDEYKVPSKKFKVLGNTDRHSIKKNLIGALLFDSGETAEATRLKRTARRRYTRRKNRICYLQEIFSNEMAKVDDSFFHRLEESFLVEEDKKHERHPIFGNIVDEVAYHEKYPTIYHLRKKLVDSTDKADLRLIYLALAHMIKFRGHFLIEGDLNPDNSDVDKLFIQLVQTYNQLFEENPINASGVDAKAILSARLSKSRRLENLIAQLPGEKKNGLFGNLIALSLGLTPNFKSNFDLAEDAKLQLSKDTYDDDLDNLLAQIGDQYADLFLAAKNLSDAILLSDILRVNTEITKAPLSASMIKRYDEHHQDLTLLKALVRQQLPEKYKEIFFDQSKNGYAGYIDGGASQEEFYKFIKPILEKMDGTEELLVKLNREDLLRKQRTFDNGSIPHQIHLGELHAILRRQEDFYPFLKDNREKIEKILTFRIPYYVGPLARGNSRFAWMTRKSEETITPWNFEEVVDKGASAQSFIERMTNFDKNLPNEKVLPKHSLLYEYFTVYNELTKVKYVTEGMRKPAFLSGEQKKAIVDLLFKTNRKVTVKQLKEDYFKKIECFDSVEISGVEDRFNASLGTYHDLLKIIKDKDFLDNEENEDILEDIVLTLTLFEDREMIEERLKTYAHLFDDKVMKQLKRRRYTGWGRLSRKLINGIRDKQSGKTILDFLKSDGFANRNFMQLIHDDSLTFKEDIQKAQVSGQGDSLHEHIANLAGSPAIKKGILQTVKVVDELVKVMGRHKPENIVIEMARENQTTQKGQKNSRERMKRIEEGIKELGSQILKEHPVENTQLQNEKLYLYYLQNGRDMYVDQELDINRLSDYDVDHIVPQSFLKDDSIDNKVLTRSDKARGKSDNVPSEEVVKKMKNYWRQLLNAKLITQRKFDNLTKAERGGLSELDKAGFIKRQLVETRQITKHVAQILDSRMNTKYDENDKLIREVKVITLKSKLVSDFRKDFQFYKVREINNYHHAHDAYLNAVVGTALIKKYPKLESEFVYGDYKVYDVRKMIAKSEQEIGKATAKYFFYSNIMNFFKTEITLANGEIRKRPLIETNGETGEIVWDKGRDFATVRKVLSMPQVNIVKKTEVQTGGFSKESILPKRNSDKLIARKKDWDPKKYGGFDSPTVAYSVLVVAKVEKGKSKKLKSVKELLGITIMERSSFEKNPIDFLEAKGYKEVKKDLIIKLPKYSLFELENGRKRMLASAGELQKGNELALPSKYVNFLYLASHYEKLKGSPEDNEQKQLFVEQHKHYLDEIIEQISEFSKRVILADANLDKVLSAYNKHRDKPIREQAENIIHLFTLTNLGAPAAFKYFDTTIDRKRYTSTKEVLDATLIHQSITGLYETRIDLSQLGGDGGEAAAKPAPGGGGGIPWLMKKPLQLTTLVPLQEYEERLLKQTMLTGSYKEKLQSLFLKYDALWQHWENQVGHRRIKPHHIATGTVNPRPQKQYPINPKAKASIQTVINDLLKQGVLIQQNSIMNTPVYPVPKPDGKWRMVLDYREVNKTIPLIAAQNQHSAGILSSIFRGKYKTTLDLSNGFWAHSITPESYWLTAFTWLGQQYCWTRLPQGFLNSPALFNADVVDLLKEVPNVQVYVDDIYISHDDPREHLEQLEKVFSLLLNAGYVVSLKKSEIAQHEVEFLGFNITKEGRGLTETFKQKLLNITPPRDLKQLQSILGLLNFARNFIPNFSELVKPLYNIIATAPGKYITWTTDNSQQLQNIISMLNSAENLEERNPEVRLIMKVNTSPSAGYIRFYNEFAKRPIMYLNYVYTKAEVKFTNTEKLLTTIHKGLIKALDLGMGQEILVYSPIVSMTKIQKTPLPERKALPIRWITWMSYLEDPRIQFHYDKTLPELQQVPTVTDDIIAKIKHPSEFSMVFYTDGSAIKHPNVNKSHNAGMGIAQVQFKPEFTVINTWSIPLGDHTAQLAEVAAVEFACKKALKIDGPVLIVTDSFYVAESVNKELPYWQSNGFFNNKKKPLKHVSKWKSIADCIQLKPDIIIIHEKGHQPTASTFHTEGNNLADKLATQGSYVVNAGKRTADGSEFEKRTADGSEFESPKKKAKVE

SEQ ID NO: 7519 - protein, 2176 aa, synthetic construct
MPAAKRVKLDGGDKKYSIGLDIGTNSVGWAVITDEYKVPSKKFKVLGNTDRHSIKKNLIGALLFDSGETAEATRLKRTARRRYTRRKNRICYLQEIFSNEMAKVDDSFFHRLEESFLVEEDKKHERHPIFGNIVDEVAYHEKYPTIYHLRKKLVDSTDKADLRLIYLALAHMIKFRGHFLIEGDLNPDNSDVDKLFIQLVQTYNQLFEENPINASGVDAKAILSARLSKSRRLENLIAQLPGEKKNGLFGNLIALSLGLTPNFKSNFDLAEDAKLQLSKDTYDDDLDNLLAQIGDQYADLFLAAKNLSDAILLSDILRVNTEITKAPLSASMIKRYDEHHQDLTLLKALVRQQLPEKYKEIFFDQSKNGYAGYIDGGASQEEFYKFIKPILEKMDGTEELLVKLNREDLLRKQRTFDNGSIPHQIHLGELHAILRRQEDFYPFLKDNREKIEKILTFRIPYYVGPLARGNSRFAWMTRKSEETITPWNFEEVVDKGASAQSFIERMTNFDKNLPNEKVLPKHSLLYEYFTVYNELTKVKYVTEGMRKPAFLSGEQKKAIVDLLFKTNRKVTVKQLKEDYFKKIECFDSVEISGVEDRFNASLGTYHDLLKIIKDKDFLDNEENEDILEDIVLTLTLFEDREMIEERLKTYAHLFDDKVMKQLKRRRYTGWGRLSRKLINGIRDKQSGKTILDFLKSDGFANRNFMQLIHDDSLTFKEDIQKAQVSGQGDSLHEHIANLAGSPAIKKGILQTVKVVDELVKVMGRHKPENIVIEMARENQTTQKGQKNSRERMKRIEEGIKELGSQILKEHPVENTQLQNEKLYLYYLQNGRDMYVDQELDINRLSDYDVDHIVPQSFLKDDSIDNKVLTRSDKARGKSDNVPSEEVVKKMKNYWRQLLNAKLITQRKFDNLTKAERGGLSELDKAGFIKRQLVETRQITKHVAQILDSRMNTKYDENDKLIREVKVITLKSKLVSDFRKDFQFYKVREINNYHHAHDAYLNAVVGTALIKKYPKLESEFVYGDYKVYDVRKMIAKSEQEIGKATAKYFFYSNIMNFFKTEITLANGEIRKRPLIETNGETGEIVWDKGRDFATVRKVLSMPQVNIVKKTEVQTGGFSKESILPKRNSDKLIARKKDWDPKKYGGFDSPTVAYSVLVVAKVEKGKSKKLKSVKELLGITIMERSSFEKNPIDFLEAKGYKEVKKDLIIKLPKYSLFELENGRKRMLASAGELQKGNELALPSKYVNFLYLASHYEKLKGSPEDNEQKQLFVEQHKHYLDEIIEQISEFSKRVILADANLDKVLSAYNKHRDKPIREQAENIIHLFTLTNLGAPAAFKYFDTTIDRKRYTSTKEVLDATLIHQSITGLYETRIDLSQLGGDGGEAAAKPAPGGGGGMDPLQLLQPLEAEIKGTKLKAHWNSGATITCVPQAFLEEEVPIKNIWIKTIHGEKEQPVYYLTFKIQGRKVEAEVISSPYDYILVSPSDIPWLMKKPLQLTTLVPLQEYEERLLKQTMLTGSYKEKLQSLFLKYDALWQHWENQVGHRRIKPHHIATGTVNPRPQKQYPINPKAKASIQTVINDLLKQGVLIQQNSIMNTPVYPVPKPDGKWRMVLDYREVNKTIPLIAAQNQHSAGILSSIFRGKYKTTLDLSNGFWAHSITPESYWLTAFTWLGQQYCWTRLPQGFLNSPALFNADVVDLLKEVPNVQVYVDDIYISHDDPREHLEQLEKVFSLLLNAGYVVSLKKSEIAQHEVEFLGFNITKEGRGLTETFKQKLLNITPPRDLKQLQSILGLLNFARNFIPNFSELVKPLYNIIATAPGKYITWTTDNSQQLQNIISMLNSAENLEERNPEVRLIMKVNTSPSAGYIRFYNEFAKRPIMYLNYVYTKAEVKFTNTEKLLTTIHKGLIKALDLGMGQEILVYSPIVSMTKIQKTPLPERKALPIRWITWMSYLEDPRIQFHYDKTLPELQQVPTVTDDIIAKIKHPSEFSMVFYTDGSAIKHPNVNKSHNAGMGIAQVQFKPEFTVINTWSIPLGDHTAQLAEVAAVEFACKKALKIDGPVLIVTDSFYVAESVNKELPYWQSNGFFNNKKKPLKHVSKWKSIADCIQLKPDIIIIHEKGHQPTASTFHTEGNNLADKLATQGSYVVNAGKRTADGSEFEKRTADGSEFESPKKKAKVE

SEQ ID NO: 7520 - protein, 2017 aa, synthetic construct
MPAAKRVKLDGGDKKYSIGLDIGTNSVGWAVITDEYKVPSKKFKVLGNTDRHSIKKNLIGALLFDSGETAEATRLKRTARRRYTRRKNRICYLQEIFSNEMAKVDDSFFHRLEESFLVEEDKKHERHPIFGNIVDEVAYHEKYPTIYHLRKKLVDSTDKADLRLIYLALAHMIKFRGHFLIEGDLNPDNSDVDKLFIQLVQTYNQLFEENPINASGVDAKAILSARLSKSRRLENLIAQLPGEKKNGLFGNLIALSLGLTPNFKSNFDLAEDAKLQLSKDTYDDDLDNLLAQIGDQYADLFLAAKNLSDAILLSDILRVNTEITKAPLSASMIKRYDEHHQDLTLLKALVRQQLPEKYKEIFFDQSKNGYAGYIDGGASQEEFYKFIKPILEKMDGTEELLVKLNREDLLRKQRTFDNGSIPHQIHLGELHAILRRQEDFYPFLKDNREKIEKILTFRIPYYVGPLARGNSRFAWMTRKSEETITPWNFEEVVDKGASAQSFIERMTNFDKNLPNEKVLPKHSLLYEYFTVYNELTKVKYVTEGMRKPAFLSGEQKKAIVDLLFKTNRKVTVKQLKEDYFKKIECFDSVEISGVEDRFNASLGTYHDLLKIIKDKDFLDNEENEDILEDIVLTLTLFEDREMIEERLKTYAHLFDDKVMKQLKRRRYTGWGRLSRKLINGIRDKQSGKTILDFLKSDGFANRNFMQLIHDDSLTFKEDIQKAQVSGQGDSLHEHIANLAGSPAIKKGILQTVKVVDELVKVMGRHKPENIVIEMARENQTTQKGQKNSRERMKRIEEGIKELGSQILKEHPVENTQLQNEKLYLYYLQNGRDMYVDQELDINRLSDYDVDHIVPQSFLKDDSIDNKVLTRSDKARGKSDNVPSEEVVKKMKNYWRQLLNAKLITQRKFDNLTKAERGGLSELDKAGFIKRQLVETRQITKHVAQILDSRMNTKYDENDKLIREVKVITLKSKLVSDFRKDFQFYKVREINNYHHAHDAYLNAVVGTALIKKYPKLESEFVYGDYKVYDVRKMIAKSEQEIGKATAKYFFYSNIMNFFKTEITLANGEIRKRPLIETNGETGEIVWDKGRDFATVRKVLSMPQVNIVKKTEVQTGGFSKESILPKRNSDKLIARKKDWDPKKYGGFDSPTVAYSVLVVAKVEKGKSKKLKSVKELLGITIMERSSFEKNPIDFLEAKGYKEVKKDLIIKLPKYSLFELENGRKRMLASAGELQKGNELALPSKYVNFLYLASHYEKLKGSPEDNEQKQLFVEQHKHYLDEIIEQISEFSKRVILADANLDKVLSAYNKHRDKPIREQAENIIHLFTLTNLGAPAAFKYFDTTIDRKRYTSTKEVLDATLIHQSITGLYETRIDLSQLGGDGGEAAAKPAPGGGGGPRSRAIDIPVPHADKISWKITDPVWVDQWPLTYEKTLAAIALVQEQLAAGHIEPTNSPWNTPIFIIKKKSGSWRLLQDLRAVNKVMVPMGALQPGLPSPVAPPLNYHKIVIDLKDCFFTIPLHPEDRPYFAFSVPQINFQSPMPRYQWKVLPQGMANSPTLCQKFVAAAIAPVRSQWPEAYILHYMDDILLACDSAEAAKACYAHIISCLTSYGLKIAPDKVQVSEPFSYLGFELHHQQVFTPRVCLKTDHLKTLNDFQKLLGDIQWLRPYLKLPTSALVPLNNILKPDPNPLSVRALTPEAKQSLALINKAIQNQSVQQISYNLPLVLLLLPTPHTPTAVFWQPNGTDPTKNGSPLLWLHLPASPSKVLLTYPSLLAMLIIKGRYTGRQLFGRDPHSIIIPYTQDQLTWLLQTSDEWAIALSSFTGDIDNHYPSDPVIQFAKLHQFIFPKITKCAPIPQATLVFTDGSSNGIAAYVIDNQPISIKSPYLSAQLVELYAILQVFTVLAHQPFNLYTDSAYIAQSVPLLETVPFIKSSTNATPLFSKLQQLILNRQHPFFIGHLRAHLNLPGPLAEGNALADAATQIFPIISDAGKRTADGSEFEKRTADGSEFESPKKKAKVE

SEQ ID NO: 7521 - protein, 2094 aa, synthetic construct
MPAAKRVKLDGGDKKYSIGLDIGTNSVGWAVITDEYKVPSKKFKVLGNTDRHSIKKNLIGALLFDSGETAEATRLKRTARRRYTRRKNRICYLQEIFSNEMAKVDDSFFHRLEESFLVEEDKKHERHPIFGNIVDEVAYHEKYPTIYHLRKKLVDSTDKADLRLIYLALAHMIKFRGHFLIEGDLNPDNSDVDKLFIQLVQTYNQLFEENPINASGVDAKAILSARLSKSRRLENLIAQLPGEKKNGLFGNLIALSLGLTPNFKSNFDLAEDAKLQLSKDTYDDDLDNLLAQIGDQYADLFLAAKNLSDAILLSDILRVNTEITKAPLSASMIKRYDEHHQDLTLLKALVRQQLPEKYKEIFFDQSKNGYAGYIDGGASQEEFYKFIKPILEKMDGTEELLVKLNREDLLRKQRTFDNGSIPHQIHLGELHAILRRQEDFYPFLKDNREKIEKILTFRIPYYVGPLARGNSRFAWMTRKSEETITPWNFEEVVDKGASAQSFIERMTNFDKNLPNEKVLPKHSLLYEYFTVYNELTKVKYVTEGMRKPAFLSGEQKKAIVDLLFKTNRKVTVKQLKEDYFKKIECFDSVEISGVEDRFNASLGTYHDLLKIIKDKDFLDNEENEDILEDIVLTLTLFEDREMIEERLKTYAHLFDDKVMKQLKRRRYTGWGRLSRKLINGIRDKQSGKTILDFLKSDGFANRNFMQLIHDDSLTFKEDIQKAQVSGQGDSLHEHIANLAGSPAIKKGILQTVKVVDELVKVMGRHKPENIVIEMARENQTTQKGQKNSRERMKRIEEGIKELGSQILKEHPVENTQLQNEKLYLYYLQNGRDMYVDQELDINRLSDYDVDHIVPQSFLKDDSIDNKVLTRSDKARGKSDNVPSEEVVKKMKNYWRQLLNAKLITQRKFDNLTKAERGGLSELDKAGFIKRQLVETRQITKHVAQILDSRMNTKYDENDKLIREVKVITLKSKLVSDFRKDFQFYKVREINNYHHAHDAYLNAVVGTALIKKYPKLESEFVYGDYKVYDVRKMIAKSEQEIGKATAKYFFYSNIMNFFKTEITLANGEIRKRPLIETNGETGEIVWDKGRDFATVRKVLSMPQVNIVKKTEVQTGGFSKESILPKRNSDKLIARKKDWDPKKYGGFDSPTVAYSVLVVAKVEKGKSKKLKSVKELLGITIMERSSFEKNPIDFLEAKGYKEVKKDLIIKLPKYSLFELENGRKRMLASAGELQKGNELALPSKYVNFLYLASHYEKLKGSPEDNEQKQLFVEQHKHYLDEIIEQISEFSKRVILADANLDKVLSAYNKHRDKPIREQAENIIHLFTLTNLGAPAAFKYFDTTIDRKRYTSTKEVLDATLIHQSITGLYETRIDLSQLGGDGGEAAAKPAPGGGGGVLNLEEEYRLHEKPVPSSIDPSWLQLFPTVWAERAGMGLANQVPPVVVELRSGASPVAVRQYPMSKEAREGIRPHIQRFLDLGVLVPCQSPWNTPLLPVKKPGTNDYRPVQDLREINKRVQDIHPTVPNPYNLLSSLPPSHTWYSVLDLKDAFFCLKLHPNSQPLFAFEWRDPEKGNTGQLTWTRLPQGFKNSPTLFNEALHRDLAPFRALNPQVVLLQYVDDLLVAAPTYRDCKEGTQKLLQELSKLGYRVSAKKAQLCQKEVTYLGYLLKEGKRWLTPARKATVMKIPPPTTPRQVREFLGKAGFCRLFIPGFASLAAPLYPLTKPSIPFIWTEEHQKAFDRIKEALLSAPALALPDLTKPFTLYVDERAGVARGVLTQTLGPWRRPVAYLSKKLDPVASGWPTCLKAVAAVALLLKDADKLTLGQNVTVIASHSLESIVRQPPDRWMTNARMTHYQSLLLNERVSFAPPAVLNPATLLPVESEATPVHRCSEILAEETGTRRDLKDQPLPGVPAWYTDGSSFIAEGKRRAGAAIVDGKRTVWASSLPEGTSAQKAELVALTQALRLAEGKDINIYTDSRYAFATAHIHGAIYKQRGWLTSAGKDIKNKEEILALLEAIHLPKRVAIIHCPGHQKGNDPVATGNRRADEAAKQAALSTRVLAETTKPAGKRTADGSEFEKRTADGSEFESPKKKAKVE

SEQ ID NO: 7522 - protein, 2096 aa, synthetic construct
MPAAKRVKLDGGDKKYSIGLDIGTNSVGWAVITDEYKVPSKKFKVLGNTDRHSIKKNLIGALLFDSGETAEATRLKRTARRRYTRRKNRICYLQEIFSNEMAKVDDSFFHRLEESFLVEEDKKHERHPIFGNIVDEVAYHEKYPTIYHLRKKLVDSTDKADLRLIYLALAHMIKFRGHFLIEGDLNPDNSDVDKLFIQLVQTYNQLFEENPINASGVDAKAILSARLSKSRRLENLIAQLPGEKKNGLFGNLIALSLGLTPNFKSNFDLAEDAKLQLSKDTYDDDLDNLLAQIGDQYADLFLAAKNLSDAILLSDILRVNTEITKAPLSASMIKRYDEHHQDLTLLKALVRQQLPEKYKEIFFDQSKNGYAGYIDGGASQEEFYKFIKPILEKMDGTEELLVKLNREDLLRKQRTFDNGSIPHQIHLGELHAILRRQEDFYPFLKDNREKIEKILTFRIPYYVGPLARGNSRFAWMTRKSEETITPWNFEEVVDKGASAQSFIERMTNFDKNLPNEKVLPKHSLLYEYFTVYNELTKVKYVTEGMRKPAFLSGEQKKAIVDLLFKTNRKVTVKQLKEDYFKKIECFDSVEISGVEDRFNASLGTYHDLLKIIKDKDFLDNEENEDILEDIVLTLTLFEDREMIEERLKTYAHLFDDKVMKQLKRRRYTGWGRLSRKLINGIRDKQSGKTILDFLKSDGFANRNFMQLIHDDSLTFKEDIQKAQVSGQGDSLHEHIANLAGSPAIKKGILQTVKVVDELVKVMGRHKPENIVIEMARENQTTQKGQKNSRERMKRIEEGIKELGSQILKEHPVENTQLQNEKLYLYYLQNGRDMYVDQELDINRLSDYDVDHIVPQSFLKDDSIDNKVLTRSDKARGKSDNVPSEEVVKKMKNYWRQLLNAKLITQRKFDNLTKAERGGLSELDKAGFIKRQLVETRQITKHVAQILDSRMNTKYDENDKLIREVKVITLKSKLVSDFRKDFQFYKVREINNYHHAHDAYLNAVVGTALIKKYPKLESEFVYGDYKVYDVRKMIAKSEQEIGKATAKYFFYSNIMNFFKTEITLANGEIRKRPLIETNGETGEIVWDKGRDFATVRKVLSMPQVNIVKKTEVQTGGFSKESILPKRNSDKLIARKKDWDPKKYGGFDSPTVAYSVLVVAKVEKGKSKKLKSVKELLGITIMERSSFEKNPIDFLEAKGYKEVKKDLIIKLPKYSLFELENGRKRMLASAGELQKGNELALPSKYVNFLYLASHYEKLKGSPEDNEQKQLFVEQHKHYLDEIIEQISEFSKRVILADANLDKVLSAYNKHRDKPIREQAENIIHLFTLTNLGAPAAFKYFDTTIDRKRYTSTKEVLDATLIHQSITGLYETRIDLSQLGGDGGEAAAKPAPGGGGGTLNIEDEYRLHETSKEPDVPLGSTWLSDFPQAWAETGGMGLAVRQAPLIIPLKATSTPVSIKQYPMSQEARLGIKPHIQRLLDQGILVPCQSPWNTPLLPVKKPGTNDYRPVQDLREVNKRVEDIHPTVPNPYNLLSGLPPSHQWYTVLDLKDAFFCLRLHPTSQPLFAFEWRDPEMGISGQLTWTRLPQGFKNSPTLFNEALHRDLADFRIQHPDLILLQYVDDLLLAATSEQDCQRGTRALLQTLGNLGYRASAKKAQICQKQVKYLGYLLKEGQRWLTEARKETVMGQPTPKTPRQLREFLGTAGFCRLWIPGFAEMAAPLYPLTKPGTLFNWGPDQQKAYQEIKQALLTAPALGLPDLTKPFELFVDEKQGYAKGVLTQKLGPWRRPVAYLSKKLDPVAAGWPPCLRMVAAIAVLTKDAGKLTMGQPLVILAPHAVEALVKQPPDRWLSNARMTHYQAMLLDTDRVQFGPVVALNPATLLPLPEKEAPHDCLEILAETHGTRPDLTDQPIPDADYTWYTDGSSFLQEGQRRAGAAVTTETEVIWARALPAGTSAQRAELIALTQALKMAEGKKLNVYTDSRYAFATAHVHGEIYRRRGWLTSEGREIKNKNEILALLKALFLPKRLSIIHCPGHQKGNSAEARGNRMADQAAREAAMKAVLETSTLLAGKRTADGSEFEKRTADGSEFESPKKKAKVE

SEQ ID NO: 7523 - protein, 2096 aa, synthetic construct
MPAAKRVKLDGGDKKYSIGLDIGTNSVGWAVITDEYKVPSKKFKVLGNTDRHSIKKNLIGALLFDSGETAEATRLKRTARRRYTRRKNRICYLQEIFSNEMAKVDDSFFHRLEESFLVEEDKKHERHPIFGNIVDEVAYHEKYPTIYHLRKKLVDSTDKADLRLIYLALAHMIKFRGHFLIEGDLNPDNSDVDKLFIQLVQTYNQLFEENPINASGVDAKAILSARLSKSRRLENLIAQLPGEKKNGLFGNLIALSLGLTPNFKSNFDLAEDAKLQLSKDTYDDDLDNLLAQIGDQYADLFLAAKNLSDAILLSDILRVNTEITKAPLSASMIKRYDEHHQDLTLLKALVRQQLPEKYKEIFFDQSKNGYAGYIDGGASQEEFYKFIKPILEKMDGTEELLVKLNREDLLRKQRTFDNGSIPHQIHLGELHAILRRQEDFYPFLKDNREKIEKILTFRIPYYVGPLARGNSRFAWMTRKSEETITPWNFEEVVDKGASAQSFIERMTNFDKNLPNEKVLPKHSLLYEYFTVYNELTKVKYVTEGMRKPAFLSGEQKKAIVDLLFKTNRKVTVKQLKEDYFKKIECFDSVEISGVEDRFNASLGTYHDLLKIIKDKDFLDNEENEDILEDIVLTLTLFEDREMIEERLKTYAHLFDDKVMKQLKRRRYTGWGRLSRKLINGIRDKQSGKTILDFLKSDGFANRNFMQLIHDDSLTFKEDIQKAQVSGQGDSLHEHIANLAGSPAIKKGILQTVKVVDELVKVMGRHKPENIVIEMARENQTTQKGQKNSRERMKRIEEGIKELGSQILKEHPVENTQLQNEKLYLYYLQNGRDMYVDQELDINRLSDYDVDHIVPQSFLKDDSIDNKVLTRSDKARGKSDNVPSEEVVKKMKNYWRQLLNAKLITQRKFDNLTKAERGGLSELDKAGFIKRQLVETRQITKHVAQILDSRMNTKYDENDKLIREVKVITLKSKLVSDFRKDFQFYKVREINNYHHAHDAYLNAVVGTALIKKYPKLESEFVYGDYKVYDVRKMIAKSEQEIGKATAKYFFYSNIMNFFKTEITLANGEIRKRPLIETNGETGEIVWDKGRDFATVRKVLSMPQVNIVKKTEVQTGGFSKESILPKRNSDKLIARKKDWDPKKYGGFDSPTVAYSVLVVAKVEKGKSKKLKSVKELLGITIMERSSFEKNPIDFLEAKGYKEVKKDLIIKLPKYSLFELENGRKRMLASAGELQKGNELALPSKYVNFLYLASHYEKLKGSPEDNEQKQLFVEQHKHYLDEIIEQISEFSKRVILADANLDKVLSAYNKHRDKPIREQAENIIHLFTLTNLGAPAAFKYFDTTIDRKRYTSTKEVLDATLIHQSITGLYETRIDLSQLGGDGGEAAAKPAPGGGGGTLNIEDEYRLHETSKEPDVPLGSTWLSDFPQAWAETGGMGLAVRQAPLIIPLKATSTPVSIKQYPMSQEARLGIKPHIQRLLDQGILVPCQSPWNTPLLPVKKPGTNDYRPVQDLREVNKRVEDIHPTVPNPYNLLSGLPPSHQWYTVLDLKDAFFCLRLHPTSQPLFAFEWRDPEMGISGQLTWTRLPQGFKNSPTLFNEALHRDLADFRIQHPDLILLQYVDDLLLAATSEQDCQRGTRALLQTLGNLGYRASAKKAQICQKQVKYLGYLLKEGQRWLTEARKETVMGQPTPKTPRQLREFLGKAGFCRLFIPGFAEMAAPLYPLTKPGTLFNWGPDQQKAYQEIKQALLTAPALGLPDLTKPFELFVDEKQGYAKGVLTQKLGPWRRPVAYLSKKLDPVAAGWPPCLRMVAAIAVLTKDAGKLTMGQPLVILAPHAVEALVKQPPDRWLSNARMTHYQAMLLDTDRVQFGPVVALNPATLLPLPEKEAPHDCLEILAETHGTRPDLTDQPIPDADYTWYTDGSSFLQEGQRRAGAAVTTETEVIWARALPAGTSAQRAELIALTQALKMAEGKKLNVYTDSRYAFATAHVHGEIYRRRGWLTSEGREIKNKNEILALLKALFLPKRLSIIHCPGHQKGNSAEARGNRMADQAAREAAMKAVLETSTLLAGKRTADGSEFEKRTADGSEFESPKKKAKVE

SEQ ID NO: 7524 - protein, 2098 aa, synthetic construct
MPAAKRVKLDGGDKKYSIGLDIGTNSVGWAVITDEYKVPSKKFKVLGNTDRHSIKKNLIGALLFDSGETAEATRLKRTARRRYTRRKNRICYLQEIFSNEMAKVDDSFFHRLEESFLVEEDKKHERHPIFGNIVDEVAYHEKYPTIYHLRKKLVDSTDKADLRLIYLALAHMIKFRGHFLIEGDLNPDNSDVDKLFIQLVQTYNQLFEENPINASGVDAKAILSARLSKSRRLENLIAQLPGEKKNGLFGNLIALSLGLTPNFKSNFDLAEDAKLQLSKDTYDDDLDNLLAQIGDQYADLFLAAKNLSDAILLSDILRVNTEITKAPLSASMIKRYDEHHQDLTLLKALVRQQLPEKYKEIFFDQSKNGYAGYIDGGASQEEFYKFIKPILEKMDGTEELLVKLNREDLLRKQRTFDNGSIPHQIHLGELHAILRRQEDFYPFLKDNREKIEKILTFRIPYYVGPLARGNSRFAWMTRKSEETITPWNFEEVVDKGASAQSFIERMTNFDKNLPNEKVLPKHSLLYEYFTVYNELTKVKYVTEGMRKPAFLSGEQKKAIVDLLFKTNRKVTVKQLKEDYFKKIECFDSVEISGVEDRFNASLGTYHDLLKIIKDKDFLDNEENEDILEDIVLTLTLFEDREMIEERLKTYAHLFDDKVMKQLKRRRYTGWGRLSRKLINGIRDKQSGKTILDFLKSDGFANRNFMQLIHDDSLTFKEDIQKAQVSGQGDSLHEHIANLAGSPAIKKGILQTVKVVDELVKVMGRHKPENIVIEMARENQTTQKGQKNSRERMKRIEEGIKELGSQILKEHPVENTQLQNEKLYLYYLQNGRDMYVDQELDINRLSDYDVDHIVPQSFLKDDSIDNKVLTRSDKARGKSDNVPSEEVVKKMKNYWRQLLNAKLITQRKFDNLTKAERGGLSELDKAGFIKRQLVETRQITKHVAQILDSRMNTKYDENDKLIREVKVITLKSKLVSDFRKDFQFYKVREINNYHHAHDAYLNAVVGTALIKKYPKLESEFVYGDYKVYDVRKMIAKSEQEIGKATAKYFFYSNIMNFFKTEITLANGEIRKRPLIETNGETGEIVWDKGRDFATVRKVLSMPQVNIVKKTEVQTGGFSKESILPKRNSDKLIARKKDWDPKKYGGFDSPTVAYSVLVVAKVEKGKSKKLKSVKELLGITIMERSSFEKNPIDFLEAKGYKEVKKDLIIKLPKYSLFELENGRKRMLASAGELQKGNELALPSKYVNFLYLASHYEKLKGSPEDNEQKQLFVEQHKHYLDEIIEQISEFSKRVILADANLDKVLSAYNKHRDKPIREQAENIIHLFTLTNLGAPAAFKYFDTTIDRKRYTSTKEVLDATLIHQSITGLYETRIDLSQLGGDGGPAPGGGEAAAKGGTAPLEEEYRLFLEAPIQNVTLLEQWKREIPKVWAEINPPGLASTQAPIHVQLLSTALPVRVRQYPITLEAKRSLRETIRKFRAAGILRPVHSPWNTPLLPVRKSGTSEYRMVQDLREVNKRVETIHPTVPNPYTLLSLLPPDRIWYSVLDLKDAFFCIPLAPESQLIFAFEWADAEEGESGQLTWTRLPQGFKNSPTLFDEALNRDLQGFRLDHPSVSLLQYVDDLLIAADTQAACLSATRDLLMTLAELGYRVSGKKAQLCQEEVTYLGFKIHKGSRSLSNSRTQAILQIPVPKTKRQVREFLGTIGYCRLWIPGFAELAQPLYAATRGGNDPLVWGEKEEEAFQSLKLALTQPPALALPSLDKPFQLFVEETSGAAKGVLTQALGPWKRPVAYLSKRLDPVAAGWPRCLRAIAAAALLTREASKLTFGQDIEITSSHNLESLLRSPPDKWLTNARITQYQVLLLDPPRVRFKQTAALNPATLLPETDDTLPIHHCLDTLDSLTSTRPDLTDQPLAQAEATLFTDGSSYIRDGKRYAGAAVVTLDSVIWAEPLPIGTSAQKAELIALTKALEWSKDKSVNIYTDSRYAFATLHVHGMIYRERGLLTAGGKAIKNAPEILALLTAVWLPKRVAVMHCKGHQKDDAPTSTGNRRADEVAREVAIRPLSTQATISAGKRTADGSEFEKRTADGSEFESPKKKAKVE

SEQ ID NO: 7525 - protein, 2098 aa, synthetic construct
MPAAKRVKLDGGDKKYSIGLDIGTNSVGWAVITDEYKVPSKKFKVLGNTDRHSIKKNLIGALLFDSGETAEATRLKRTARRRYTRRKNRICYLQEIFSNEMAKVDDSFFHRLEESFLVEEDKKHERHPIFGNIVDEVAYHEKYPTIYHLRKKLVDSTDKADLRLIYLALAHMIKFRGHFLIEGDLNPDNSDVDKLFIQLVQTYNQLFEENPINASGVDAKAILSARLSKSRRLENLIAQLPGEKKNGLFGNLIALSLGLTPNFKSNFDLAEDAKLQLSKDTYDDDLDNLLAQIGDQYADLFLAAKNLSDAILLSDILRVNTEITKAPLSASMIKRYDEHHQDLTLLKALVRQQLPEKYKEIFFDQSKNGYAGYIDGGASQEEFYKFIKPILEKMDGTEELLVKLNREDLLRKQRTFDNGSIPHQIHLGELHAILRRQEDFYPFLKDNREKIEKILTFRIPYYVGPLARGNSRFAWMTRKSEETITPWNFEEVVDKGASAQSFIERMTNFDKNLPNEKVLPKHSLLYEYFTVYNELTKVKYVTEGMRKPAFLSGEQKKAIVDLLFKTNRKVTVKQLKEDYFKKIECFDSVEISGVEDRFNASLGTYHDLLKIIKDKDFLDNEENEDILEDIVLTLTLFEDREMIEERLKTYAHLFDDKVMKQLKRRRYTGWGRLSRKLINGIRDKQSGKTILDFLKSDGFANRNFMQLIHDDSLTFKEDIQKAQVSGQGDSLHEHIANLAGSPAIKKGILQTVKVVDELVKVMGRHKPENIVIEMARENQTTQKGQKNSRERMKRIEEGIKELGSQILKEHPVENTQLQNEKLYLYYLQNGRDMYVDQELDINRLSDYDVDHIVPQSFLKDDSIDNKVLTRSDKARGKSDNVPSEEVVKKMKNYWRQLLNAKLITQRKFDNLTKAERGGLSELDKAGFIKRQLVETRQITKHVAQILDSRMNTKYDENDKLIREVKVITLKSKLVSDFRKDFQFYKVREINNYHHAHDAYLNAVVGTALIKKYPKLESEFVYGDYKVYDVRKMIAKSEQEIGKATAKYFFYSNIMNFFKTEITLANGEIRKRPLIETNGETGEIVWDKGRDFATVRKVLSMPQVNIVKKTEVQTGGFSKESILPKRNSDKLIARKKDWDPKKYGGFDSPTVAYSVLVVAKVEKGKSKKLKSVKELLGITIMERSSFEKNPIDFLEAKGYKEVKKDLIIKLPKYSLFELENGRKRMLASAGELQKGNELALPSKYVNFLYLASHYEKLKGSPEDNEQKQLFVEQHKHYLDEIIEQISEFSKRVILADANLDKVLSAYNKHRDKPIREQAENIIHLFTLTNLGAPAAFKYFDTTIDRKRYTSTKEVLDATLIHQSITGLYETRIDLSQLGGDGGPAPGGGEAAAKGGTAPLEEEYRLFLEAPIQNVTLLEQWKREIPKVWAEINPPGLASTQAPIHVQLLSTALPVRVRQYPITLEAKRSLRETIRKFRAAGILRPVHSPWNTPLLPVRKSGTSEYRMVQDLREVNKRVETIHPTVPNPYTLLSLLPPDRIWYSVLDLKDAFFCIPLAPESQLIFAFEWADAEEGESGQLTWTRLPQGFKNSPTLFNEALNRDLQGFRLDHPSVSLLQYVDDLLIAADTQAACLSATRDLLMTLAELGYRVSGKKAQLCQEEVTYLGFKIHKGSRSLSNSRTQAILQIPVPKTKRQVREFLGTIGYCRLWIPGFAELAQPLYAATRPGNDPLVWGEKEEEAFQSLKLALTQPPALALPSLDKPFQLFVEETSGAAKGVLTQALGPWKRPVAYLSKRLDPVAAGWPRCLRAIAAAALLTREASKLTFGQDIEITSSHNLESLLRSPPDKWLTNARITQYQVLLLDPPRVRFKQTAALNPATLLPETDDTLPIHHCLDTLDSLTSTRPDLTDQPLAQAEATLFTDGSSYIRDGKRYAGAAVVTLDSVIWAEPLPIGTSAQKAELIALTKALEWSKDKSVNIYTDSRYAFATLHVHGMIYRERGWLTAGGKAIKNAPEILALLTAVWLPKRVAVMHCKGHQKDDAPTSTGNRRADEVAREVAIRPLSTQATISAGKRTADGSEFEKRTADGSEFESPKKKAKVE

SEQ ID NO: 7526 - protein, 2098 aa, synthetic construct
MPAAKRVKLDGGDKKYSIGLDIGTNSVGWAVITDEYKVPSKKFKVLGNTDRHSIKKNLIGALLFDSGETAEATRLKRTARRRYTRRKNRICYLQEIFSNEMAKVDDSFFHRLEESFLVEEDKKHERHPIFGNIVDEVAYHEKYPTIYHLRKKLVDSTDKADLRLIYLALAHMIKFRGHFLIEGDLNPDNSDVDKLFIQLVQTYNQLFEENPINASGVDAKAILSARLSKSRRLENLIAQLPGEKKNGLFGNLIALSLGLTPNFKSNFDLAEDAKLQLSKDTYDDDLDNLLAQIGDQYADLFLAAKNLSDAILLSDILRVNTEITKAPLSASMIKRYDEHHQDLTLLKALVRQQLPEKYKEIFFDQSKNGYAGYIDGGASQEEFYKFIKPILEKMDGTEELLVKLNREDLLRKQRTFDNGSIPHQIHLGELHAILRRQEDFYPFLKDNREKIEKILTFRIPYYVGPLARGNSRFAWMTRKSEETITPWNFEEVVDKGASAQSFIERMTNFDKNLPNEKVLPKHSLLYEYFTVYNELTKVKYVTEGMRKPAFLSGEQKKAIVDLLFKTNRKVTVKQLKEDYFKKIECFDSVEISGVEDRFNASLGTYHDLLKIIKDKDFLDNEENEDILEDIVLTLTLFEDREMIEERLKTYAHLFDDKVMKQLKRRRYTGWGRLSRKLINGIRDKQSGKTILDFLKSDGFANRNFMQLIHDDSLTFKEDIQKAQVSGQGDSLHEHIANLAGSPAIKKGILQTVKVVDELVKVMGRHKPENIVIEMARENQTTQKGQKNSRERMKRIEEGIKELGSQILKEHPVENTQLQNEKLYLYYLQNGRDMYVDQELDINRLSDYDVDHIVPQSFLKDDSIDNKVLTRSDKARGKSDNVPSEEVVKKMKNYWRQLLNAKLITQRKFDNLTKAERGGLSELDKAGFIKRQLVETRQITKHVAQILDSRMNTKYDENDKLIREVKVITLKSKLVSDFRKDFQFYKVREINNYHHAHDAYLNAVVGTALIKKYPKLESEFVYGDYKVYDVRKMIAKSEQEIGKATAKYFFYSNIMNFFKTEITLANGEIRKRPLIETNGETGEIVWDKGRDFATVRKVLSMPQVNIVKKTEVQTGGFSKESILPKRNSDKLIARKKDWDPKKYGGFDSPTVAYSVLVVAKVEKGKSKKLKSVKELLGITIMERSSFEKNPIDFLEAKGYKEVKKDLIIKLPKYSLFELENGRKRMLASAGELQKGNELALPSKYVNFLYLASHYEKLKGSPEDNEQKQLFVEQHKHYLDEIIEQISEFSKRVILADANLDKVLSAYNKHRDKPIREQAENIIHLFTLTNLGAPAAFKYFDTTIDRKRYTSTKEVLDATLIHQSITGLYETRIDLSQLGGDGGPAPGGGEAAAKGGTAPLEEEYRLFLEAPIQNVTLLEQWKREIPKVWAEINPPGLASTQAPIHVQLLSTALPVRVRQYPITLEAKRSLRETIRKFRAAGILRPVHSPWNTPLLPVRKSGTSEYRMVQDLREVNKRVETIHPTVPNPYTLLSLLPPDRIWYSVLDLKDAFFCIPLAPESQLIFAFEWADAEEGESGQLTWTRLPQGFKNSPTLFNEALNRDLQGFRLDHPSVSLLQYVDDLLIAADTQAACLSATRDLLMTLAELGYRVSGKKAQLCQEEVTYLGFKIHKGSRSLSNSRTQAILQIPVPKTKRQVREFLGKIGYCRLFIPGFAELAQPLYAATRPGNDPLVWGEKEEEAFQSLKLALTQPPALALPSLDKPFQLFVEETSGAAKGVLTQALGPWKRPVAYLSKRLDPVAAGWPRCLRAIAAAALLTREASKLTFGQDIEITSSHNLESLLRSPPDKWLTNARITQYQVLLLDPPRVRFKQTAALNPATLLPETDDTLPIHHCLDTLDSLTSTRPDLTDQPLAQAEATLFTDGSSYIRDGKRYAGAAVVTLDSVIWAEPLPIGTSAQKAELIALTKALEWSKDKSVNIYTDSRYAFATLHVHGMIYRERGWLTAGGKAIKNAPEILALLTAVWLPKRVAVMHCKGHQKDDAPTSTGNRRADEVAREVAIRPLSTQATISAGKRTADGSEFEKRTADGSEFESPKKKAKVE

SEQ ID NO: 7527 - protein, 2173 aa, synthetic construct
MPAAKRVKLDGGDKKYSIGLDIGTNSVGWAVITDEYKVPSKKFKVLGNTDRHSIKKNLIGALLFDSGETAEATRLKRTARRRYTRRKNRICYLQEIFSNEMAKVDDSFFHRLEESFLVEEDKKHERHPIFGNIVDEVAYHEKYPTIYHLRKKLVDSTDKADLRLIYLALAHMIKFRGHFLIEGDLNPDNSDVDKLFIQLVQTYNQLFEENPINASGVDAKAILSARLSKSRRLENLIAQLPGEKKNGLFGNLIALSLGLTPNFKSNFDLAEDAKLQLSKDTYDDDLDNLLAQIGDQYADLFLAAKNLSDAILLSDILRVNTEITKAPLSASMIKRYDEHHQDLTLLKALVRQQLPEKYKEIFFDQSKNGYAGYIDGGASQEEFYKFIKPILEKMDGTEELLVKLNREDLLRKQRTFDNGSIPHQIHLGELHAILRRQEDFYPFLKDNREKIEKILTFRIPYYVGPLARGNSRFAWMTRKSEETITPWNFEEVVDKGASAQSFIERMTNFDKNLPNEKVLPKHSLLYEYFTVYNELTKVKYVTEGMRKPAFLSGEQKKAIVDLLFKTNRKVTVKQLKEDYFKKIECFDSVEISGVEDRFNASLGTYHDLLKIIKDKDFLDNEENEDILEDIVLTLTLFEDREMIEERLKTYAHLFDDKVMKQLKRRRYTGWGRLSRKLINGIRDKQSGKTILDFLKSDGFANRNFMQLIHDDSLTFKEDIQKAQVSGQGDSLHEHIANLAGSPAIKKGILQTVKVVDELVKVMGRHKPENIVIEMARENQTTQKGQKNSRERMKRIEEGIKELGSQILKEHPVENTQLQNEKLYLYYLQNGRDMYVDQELDINRLSDYDVDHIVPQSFLKDDSIDNKVLTRSDKARGKSDNVPSEEVVKKMKNYWRQLLNAKLITQRKFDNLTKAERGGLSELDKAGFIKRQLVETRQITKHVAQILDSRMNTKYDENDKLIREVKVITLKSKLVSDFRKDFQFYKVREINNYHHAHDAYLNAVVGTALIKKYPKLESEFVYGDYKVYDVRKMIAKSEQEIGKATAKYFFYSNIMNFFKTEITLANGEIRKRPLIETNGETGEIVWDKGRDFATVRKVLSMPQVNIVKKTEVQTGGFSKESILPKRNSDKLIARKKDWDPKKYGGFDSPTVAYSVLVVAKVEKGKSKKLKSVKELLGITIMERSSFEKNPIDFLEAKGYKEVKKDLIIKLPKYSLFELENGRKRMLASAGELQKGNELALPSKYVNFLYLASHYEKLKGSPEDNEQKQLFVEQHKHYLDEIIEQISEFSKRVILADANLDKVLSAYNKHRDKPIREQAENIIHLFTLTNLGAPAAFKYFDTTIDRKRYTSTKEVLDATLIHQSITGLYETRIDLSQLGGDGGPAPGGGEAAAKGGMDLLKPLTVERKGVKIKGYWNSQADITCVPKDLLQGEEPVRQQNVTTIHGTQEGDVYYVNLKIDGRRINTEVIGTTLDYAIITPGDVPWILKKPLELTIKLDLEEQQGTLLNNSILSKKGKEELKQLFEKYSALWQSWENQVGHRRIRPHKIATGTVKPTPQKQYHINPKAKPDIQIVINDLLKQGVLIQKESTMNTPVYPVPKPNGRWRMVLDYRAVNKVTPLIAVQNQHSYGILGSLFKGRYKTTIDLSNGFWAHPIVPEDYWITAFTWQGKQYCWTVLPQGFLNSPGLFTGDVVDLLQGIPNVEVYVDDVYISHDSEKEHLEYLDILFNRLKEAGYIISLKKSNIANSIVDFLGFQITNEGRGLTDTFKEKLENITAPTTLKQLQSILGLLNFARNFIPDFTELIAPLYALIPKSTKNYVPWQIEHSTTLETLITKLNGAEYLQGRKGDKTLIMKVNASYTTGYIRYYNEGEKKPISYVSIVFSKTELKFTELEKLLTTVHKGLLKALDLSMGQNIHVYSPIVSMQNIQKTPQTAKKALASRWLSWLSYLEDPRIRFFYDPQMPALKDLPAVDTGKDNKKHPSNFQHIFYTDGSAITSPTKEGHLNAGMGIVYFINKDGNLQKQQEWSISLGNHTAQFAEIAAFEFALKKCLPLGGNILVVTDSNYVAKAYNEELDVWASNGFVNNRKKPLKHISKWKSVADLKRLRPDVVVTHEPGHQKLDSSPHAYGNNLADQLATQASFKVHAGKRTADGSEFEKRTADGSEFESPKKKAKVE

SEQ ID NO: 7528 - protein, 2095 aa, synthetic construct
MPAAKRVKLDGGDKKYSIGLDIGTNSVGWAVITDEYKVPSKKFKVLGNTDRHSIKKNLIGALLFDSGETAEATRLKRTARRRYTRRKNRICYLQEIFSNEMAKVDDSFFHRLEESFLVEEDKKHERHPIFGNIVDEVAYHEKYPTIYHLRKKLVDSTDKADLRLIYLALAHMIKFRGHFLIEGDLNPDNSDVDKLFIQLVQTYNQLFEENPINASGVDAKAILSARLSKSRRLENLIAQLPGEKKNGLFGNLIALSLGLTPNFKSNFDLAEDAKLQLSKDTYDDDLDNLLAQIGDQYADLFLAAKNLSDAILLSDILRVNTEITKAPLSASMIKRYDEHHQDLTLLKALVRQQLPEKYKEIFFDQSKNGYAGYIDGGASQEEFYKFIKPILEKMDGTEELLVKLNREDLLRKQRTFDNGSIPHQIHLGELHAILRRQEDFYPFLKDNREKIEKILTFRIPYYVGPLARGNSRFAWMTRKSEETITPWNFEEVVDKGASAQSFIERMTNFDKNLPNEKVLPKHSLLYEYFTVYNELTKVKYVTEGMRKPAFLSGEQKKAIVDLLFKTNRKVTVKQLKEDYFKKIECFDSVEISGVEDRFNASLGTYHDLLKIIKDKDFLDNEENEDILEDIVLTLTLFEDREMIEERLKTYAHLFDDKVMKQLKRRRYTGWGRLSRKLINGIRDKQSGKTILDFLKSDGFANRNFMQLIHDDSLTFKEDIQKAQVSGQGDSLHEHIANLAGSPAIKKGILQTVKVVDELVKVMGRHKPENIVIEMARENQTTQKGQKNSRERMKRIEEGIKELGSQILKEHPVENTQLQNEKLYLYYLQNGRDMYVDQELDINRLSDYDVDHIVPQSFLKDDSIDNKVLTRSDKARGKSDNVPSEEVVKKMKNYWRQLLNAKLITQRKFDNLTKAERGGLSELDKAGFIKRQLVETRQITKHVAQILDSRMNTKYDENDKLIREVKVITLKSKLVSDFRKDFQFYKVREINNYHHAHDAYLNAVVGTALIKKYPKLESEFVYGDYKVYDVRKMIAKSEQEIGKATAKYFFYSNIMNFFKTEITLANGEIRKRPLIETNGETGEIVWDKGRDFATVRKVLSMPQVNIVKKTEVQTGGFSKESILPKRNSDKLIARKKDWDPKKYGGFDSPTVAYSVLVVAKVEKGKSKKLKSVKELLGITIMERSSFEKNPIDFLEAKGYKEVKKDLIIKLPKYSLFELENGRKRMLASAGELQKGNELALPSKYVNFLYLASHYEKLKGSPEDNEQKQLFVEQHKHYLDEIIEQISEFSKRVILADANLDKVLSAYNKHRDKPIREQAENIIHLFTLTNLGAPAAFKYFDTTIDRKRYTSTKEVLDATLIHQSITGLYETRIDLSQLGGDGGPAPGGGEAAAKGGTLQLEEEYRLFEPESTQKQEMDIWLKNFPQAWAETGGMGTAHCQAPVLIQLKATATPISIRQYPMPHEAYQGIKPHIRRMLDQGILKPCQSPWNTPLLPVKKPGTEDYRPVQDLREVNKRVEDIHPTVPNPYNLLSTLPPSHPWYTVLDLKDAFFCLRLHSESQLLFAFEWRDPEIGLSGQLTWTRLPQGFKNSPTLFNEALHSDLADFRVRYPALVLLQYVDDLLLAAATRTECLEGTKALLETLGNKGYRASAKKAQICLQEVTYLGYSLKDGQRWLTKARKEAILSIPVPKNSRQVREFLGTAGYCRLWIPGFAELAAPLYPLTRPGTLFQWGTEQQLAFEDIKKALLSSPALGLPDITKPFELFIDENSGFAKGVLVQKLGPWKRPVAYLSKKLDTVASGWPPCLRMVAAIAILVKDAGKLTLGQPLTILTSHPVEALVRQPPNKWLSNARMTHYQAMLLDAERVHFGPTVSLNPATLLPLPSGGNHHDCLQILAETHGTRPDLTDQPLPDADLTWYTDGSSFIRNGEREAGAAVTTESEVIWAAPLPPGTSAQRAELIALTQALKMAEGKKLTVYTDSRYAFATTHVHGEIYRRRGWLTSEGKEIKNKNEILALLEALFLPKRLSIIHCPGHQKGDSPQAKGNRLADDTAKKAATETHSSLTVLPAGKRTADGSEFEKRTADGSEFESPKKKAKVE

SEQ ID NO: 7529 - protein, 2094 aa, synthetic construct
MPAAKRVKLDGGDKKYSIGLDIGTNSVGWAVITDEYKVPSKKFKVLGNTDRHSIKKNLIGALLFDSGETAEATRLKRTARRRYTRRKNRICYLQEIFSNEMAKVDDSFFHRLEESFLVEEDKKHERHPIFGNIVDEVAYHEKYPTIYHLRKKLVDSTDKADLRLIYLALAHMIKFRGHFLIEGDLNPDNSDVDKLFIQLVQTYNQLFEENPINASGVDAKAILSARLSKSRRLENLIAQLPGEKKNGLFGNLIALSLGLTPNFKSNFDLAEDAKLQLSKDTYDDDLDNLLAQIGDQYADLFLAAKNLSDAILLSDILRVNTEITKAPLSASMIKRYDEHHQDLTLLKALVRQQLPEKYKEIFFDQSKNGYAGYIDGGASQEEFYKFIKPILEKMDGTEELLVKLNREDLLRKQRTFDNGSIPHQIHLGELHAILRRQEDFYPFLKDNREKIEKILTFRIPYYVGPLARGNSRFAWMTRKSEETITPWNFEEVVDKGASAQSFIERMTNFDKNLPNEKVLPKHSLLYEYFTVYNELTKVKYVTEGMRKPAFLSGEQKKAIVDLLFKTNRKVTVKQLKEDYFKKIECFDSVEISGVEDRFNASLGTYHDLLKIIKDKDFLDNEENEDILEDIVLTLTLFEDREMIEERLKTYAHLFDDKVMKQLKRRRYTGWGRLSRKLINGIRDKQSGKTILDFLKSDGFANRNFMQLIHDDSLTFKEDIQKAQVSGQGDSLHEHIANLAGSPAIKKGILQTVKVVDELVKVMGRHKPENIVIEMARENQTTQKGQKNSRERMKRIEEGIKELGSQILKEHPVENTQLQNEKLYLYYLQNGRDMYVDQELDINRLSDYDVDHIVPQSFLKDDSIDNKVLTRSDKARGKSDNVPSEEVVKKMKNYWRQLLNAKLITQRKFDNLTKAERGGLSELDKAGFIKRQLVETRQITKHVAQILDSRMNTKYDENDKLIREVKVITLKSKLVSDFRKDFQFYKVREINNYHHAHDAYLNAVVGTALIKKYPKLESEFVYGDYKVYDVRKMIAKSEQEIGKATAKYFFYSNIMNFFKTEITLANGEIRKRPLIETNGETGEIVWDKGRDFATVRKVLSMPQVNIVKKTEVQTGGFSKESILPKRNSDKLIARKKDWDPKKYGGFDSPTVAYSVLVVAKVEKGKSKKLKSVKELLGITIMERSSFEKNPIDFLEAKGYKEVKKDLIIKLPKYSLFELENGRKRMLASAGELQKGNELALPSKYVNFLYLASHYEKLKGSPEDNEQKQLFVEQHKHYLDEIIEQISEFSKRVILADANLDKVLSAYNKHRDKPIREQAENIIHLFTLTNLGAPAAFKYFDTTIDRKRYTSTKEVLDATLIHQSITGLYETRIDLSQLGGDGGPAPGGGEAAAKGGVLNLEEEYRLHEKPVPSSIDPSWLQLFPTVWAERAGMGLANQVPPVVVELRSGASPVAVRQYPMSKEAREGIRPHIQKFLDLGVLVPCRSPWNTPLLPVKKPGTNDYRPVQDLREINKRVQDIHPTVPNPYNLLSSLPPSYTWYSVLDLKDAFFCLRLHPNSQPLFAFEWKDPEKGNTGQLTWTRLPQGFKNSPTLFNEALHRDLAPFRALNPQVVLLQYVDDLLVAAPTYEDCKKGTQKLLQELSKLGYRVSAKKAQLCQREVTYLGYLLKEGKRWLTPARKATVMKIPVPTTPRQVREFLGTAGFCRLWIPGFASLAAPLYPLTKPSIPFIWTEEHQQAFDHIKKALLSAPALALPDLTKPFTLYIDERAGVARGVLTQTLGPWRRPVAYLSKKLDPVASGWPTCLKAVAAVALLLKDADKLTLGQNVTVIASHSLESIVRQPPDRWMTNARMTHYQSLLLNERVSFAPPAVLNPATLLPVESEATPVHRCSEILAEETGTRRDLEDQPLPGVPTWYTDGSSFITEGKRRAGAPIVDGKRTVWASSLPEGTSAQKAELVALTQALRLAEGKNINIYTDSRYAFATAHIHGAIYKQRGWLTSAGKDIKNKEEILALLEAIHLPRRVAIIHCPGHQRGSNPVATGNRRADEAAKQAALSTRVLAGTTKPAGKRTADGSEFEKRTADGSEFESPKKKAKVE

SEQ ID NO: 7530 - protein, 2127 aa, synthetic construct
MPAAKRVKLDGGDKKYSIGLDIGTNSVGWAVITDEYKVPSKKFKVLGNTDRHSIKKNLIGALLFDSGETAEATRLKRTARRRYTRRKNRICYLQEIFSNEMAKVDDSFFHRLEESFLVEEDKKHERHPIFGNIVDEVAYHEKYPTIYHLRKKLVDSTDKADLRLIYLALAHMIKFRGHFLIEGDLNPDNSDVDKLFIQLVQTYNQLFEENPINASGVDAKAILSARLSKSRRLENLIAQLPGEKKNGLFGNLIALSLGLTPNFKSNFDLAEDAKLQLSKDTYDDDLDNLLAQIGDQYADLFLAAKNLSDAILLSDILRVNTEITKAPLSASMIKRYDEHHQDLTLLKALVRQQLPEKYKEIFFDQSKNGYAGYIDGGASQEEFYKFIKPILEKMDGTEELLVKLNREDLLRKQRTFDNGSIPHQIHLGELHAILRRQEDFYPFLKDNREKIEKILTFRIPYYVGPLARGNSRFAWMTRKSEETITPWNFEEVVDKGASAQSFIERMTNFDKNLPNEKVLPKHSLLYEYFTVYNELTKVKYVTEGMRKPAFLSGEQKKAIVDLLFKTNRKVTVKQLKEDYFKKIECFDSVEISGVEDRFNASLGTYHDLLKIIKDKDFLDNEENEDILEDIVLTLTLFEDREMIEERLKTYAHLFDDKVMKQLKRRRYTGWGRLSRKLINGIRDKQSGKTILDFLKSDGFANRNFMQLIHDDSLTFKEDIQKAQVSGQGDSLHEHIANLAGSPAIKKGILQTVKVVDELVKVMGRHKPENIVIEMARENQTTQKGQKNSRERMKRIEEGIKELGSQILKEHPVENTQLQNEKLYLYYLQNGRDMYVDQELDINRLSDYDVDHIVPQSFLKDDSIDNKVLTRSDKARGKSDNVPSEEVVKKMKNYWRQLLNAKLITQRKFDNLTKAERGGLSELDKAGFIKRQLVETRQITKHVAQILDSRMNTKYDENDKLIREVKVITLKSKLVSDFRKDFQFYKVREINNYHHAHDAYLNAVVGTALIKKYPKLESEFVYGDYKVYDVRKMIAKSEQEIGKATAKYFFYSNIMNFFKTEITLANGEIRKRPLIETNGETGEIVWDKGRDFATVRKVLSMPQVNIVKKTEVQTGGFSKESILPKRNSDKLIARKKDWDPKKYGGFDSPTVAYSVLVVAKVEKGKSKKLKSVKELLGITIMERSSFEKNPIDFLEAKGYKEVKKDLIIKLPKYSLFELENGRKRMLASAGELQKGNELALPSKYVNFLYLASHYEKLKGSPEDNEQKQLFVEQHKHYLDEIIEQISEFSKRVILADANLDKVLSAYNKHRDKPIREQAENIIHLFTLTNLGAPAAFKYFDTTIDRKRYTSTKEVLDATLIHQSITGLYETRIDLSQLGGDGGPAPGGGEAAAKGGLLGRDLLTKLKAQIQFSTEGPQVTWEDRPAMCLVLNLEEEYRLHEKPVPPSIDPSWLQLFPMVWAEKAGMGLANQVPPVVVELKSDASPVAVRQYPMSKEAREGIRPHIQRFLDLGILVPCQSPWNTPLLPVKKPGTNDYRPVQDLREVNKRVQDIHPTVPNPYNLLSSLPPSHTWYSVLDLKDAFFCLKLHPNSQPLFAFEWRDPEKGNTGQLTWTRLPQGFKNSPTLFNEALHRDLASFRALNPQVVMLQYVDDLLVAAPTYRDCKEGTRRLLQELSKLGYRVSAKKAQLCREEVTYLGYLLKGGKRWLTPARKATVMKIPTPTTPRQVREFLGTAGFCRLWIPGFASLAAPLYPLTRPKVPFTWTEAHQEAFGRIKEALLSAPALALPDLTKPFALYVDEKEGVARGVLTQTLGPWRRPVAYLSKKLDPVASGWPTCLKAIAAVALLLKDADKLTLGQNVLVIAPHNLESIVRQPPDRWMTNARMTHYQSLLLNERVSFAPPAILNPATLLPVESDDTPIHICSEILAEETGTRPDLRDQPLPGVPAWYTDGSSFIMDGRRQAGAAIVDNKRTVWASNLPEGTSAQKAELIALTQALRLAEGKSINIYTDSRYAFATAHVHGAIYKQRGWLTSAGKDIKNKEEILALLEAIHLPKRVAIIHCPGHQRGTDPVATGNRKADEAAKQAAQSTRILTETTKNAGKRTADGSEFEKRTADGSEFESPKKKAKVE

SEQ ID NO: 7531 - protein, 2127 aa, synthetic construct
MPAAKRVKLDGGDKKYSIGLDIGTNSVGWAVITDEYKVPSKKFKVLGNTDRHSIKKNLIGALLFDSGETAEATRLKRTARRRYTRRKNRICYLQEIFSNEMAKVDDSFFHRLEESFLVEEDKKHERHPIFGNIVDEVAYHEKYPTIYHLRKKLVDSTDKADLRLIYLALAHMIKFRGHFLIEGDLNPDNSDVDKLFIQLVQTYNQLFEENPINASGVDAKAILSARLSKSRRLENLIAQLPGEKKNGLFGNLIALSLGLTPNFKSNFDLAEDAKLQLSKDTYDDDLDNLLAQIGDQYADLFLAAKNLSDAILLSDILRVNTEITKAPLSASMIKRYDEHHQDLTLLKALVRQQLPEKYKEIFFDQSKNGYAGYIDGGASQEEFYKFIKPILEKMDGTEELLVKLNREDLLRKQRTFDNGSIPHQIHLGELHAILRRQEDFYPFLKDNREKIEKILTFRIPYYVGPLARGNSRFAWMTRKSEETITPWNFEEVVDKGASAQSFIERMTNFDKNLPNEKVLPKHSLLYEYFTVYNELTKVKYVTEGMRKPAFLSGEQKKAIVDLLFKTNRKVTVKQLKEDYFKKIECFDSVEISGVEDRFNASLGTYHDLLKIIKDKDFLDNEENEDILEDIVLTLTLFEDREMIEERLKTYAHLFDDKVMKQLKRRRYTGWGRLSRKLINGIRDKQSGKTILDFLKSDGFANRNFMQLIHDDSLTFKEDIQKAQVSGQGDSLHEHIANLAGSPAIKKGILQTVKVVDELVKVMGRHKPENIVIEMARENQTTQKGQKNSRERMKRIEEGIKELGSQILKEHPVENTQLQNEKLYLYYLQNGRDMYVDQELDINRLSDYDVDHIVPQSFLKDDSIDNKVLTRSDKARGKSDNVPSEEVVKKMKNYWRQLLNAKLITQRKFDNLTKAERGGLSELDKAGFIKRQLVETRQITKHVAQILDSRMNTKYDENDKLIREVKVITLKSKLVSDFRKDFQFYKVREINNYHHAHDAYLNAVVGTALIKKYPKLESEFVYGDYKVYDVRKMIAKSEQEIGKATAKYFFYSNIMNFFKTEITLANGEIRKRPLIETNGETGEIVWDKGRDFATVRKVLSMPQVNIVKKTEVQTGGFSKESILPKRNSDKLIARKKDWDPKKYGGFDSPTVAYSVLVVAKVEKGKSKKLKSVKELLGITIMERSSFEKNPIDFLEAKGYKEVKKDLIIKLPKYSLFELENGRKRMLASAGELQKGNELALPSKYVNFLYLASHYEKLKGSPEDNEQKQLFVEQHKHYLDEIIEQISEFSKRVILADANLDKVLSAYNKHRDKPIREQAENIIHLFTLTNLGAPAAFKYFDTTIDRKRYTSTKEVLDATLIHQSITGLYETRIDLSQLGGDGGPAPGGGEAAAKGGLLGRDLLTKLKAQIQFSTEGPQVTWEDRPAMCLVLNLEEEYRLHEKPVPPSIDPSWLQLFPMVWAEKAGMGLANQVPPVVVELKSDASPVAVRQYPMSKEAREGIRPHIQRFLDLGILVPCQSPWNTPLLPVKKPGTNDYRPVQDLREVNKRVQDIHPTVPNPYNLLSSLPPSHTWYSVLDLKDAFFCLKLHPNSQPLFAFEWRDPEKGNTGQLTWTRLPQGFKNSPTLFNEALHRDLASFRALNPQVVMLQYVDDLLVAAPTYRDCKEGTRRLLQELSKLGYRVSAKKAQLCREEVTYLGYLLKGGKRWLTPARKATVMKIPTPTTPRQVREFLGKAGFCRLFIPGFASLAAPLYPLTRPKVPFTWTEAHQEAFGRIKEALLSAPALALPDLTKPFALYVDEKEGVARGVLTQTLGPWRRPVAYLSKKLDPVASGWPTCLKAIAAVALLLKDADKLTLGQNVLVIAPHNLESIVRQPPDRWMTNARMTHYQSLLLNERVSFAPPAILNPATLLPVESDDTPIHICSEILAEETGTRPDLRDQPLPGVPAWYTDGSSFIMDGRRQAGAAIVDNKRTVWASNLPEGTSAQKAELIALTQALRLAEGKSINIYTDSRYAFATAHVHGAIYKQRGWLTSAGKDIKNKEEILALLEAIHLPKRVAIIHCPGHQRGTDPVATGNRKADEAAKQAAQSTRILTETTKNAGKRTADGSEFEKRTADGSEFESPKKKAKVE

SEQ ID NO: 7532 - protein, 2218 aa, synthetic construct
MPAAKRVKLDGGDKKYSIGLDIGTNSVGWAVITDEYKVPSKKFKVLGNTDRHSIKKNLIGALLFDSGETAEATRLKRTARRRYTRRKNRICYLQEIFSNEMAKVDDSFFHRLEESFLVEEDKKHERHPIFGNIVDEVAYHEKYPTIYHLRKKLVDSTDKADLRLIYLALAHMIKFRGHFLIEGDLNPDNSDVDKLFIQLVQTYNQLFEENPINASGVDAKAILSARLSKSRRLENLIAQLPGEKKNGLFGNLIALSLGLTPNFKSNFDLAEDAKLQLSKDTYDDDLDNLLAQIGDQYADLFLAAKNLSDAILLSDILRVNTEITKAPLSASMIKRYDEHHQDLTLLKALVRQQLPEKYKEIFFDQSKNGYAGYIDGGASQEEFYKFIKPILEKMDGTEELLVKLNREDLLRKQRTFDNGSIPHQIHLGELHAILRRQEDFYPFLKDNREKIEKILTFRIPYYVGPLARGNSRFAWMTRKSEETITPWNFEEVVDKGASAQSFIERMTNFDKNLPNEKVLPKHSLLYEYFTVYNELTKVKYVTEGMRKPAFLSGEQKKAIVDLLFKTNRKVTVKQLKEDYFKKIECFDSVEISGVEDRFNASLGTYHDLLKIIKDKDFLDNEENEDILEDIVLTLTLFEDREMIEERLKTYAHLFDDKVMKQLKRRRYTGWGRLSRKLINGIRDKQSGKTILDFLKSDGFANRNFMQLIHDDSLTFKEDIQKAQVSGQGDSLHEHIANLAGSPAIKKGILQTVKVVDELVKVMGRHKPENIVIEMARENQTTQKGQKNSRERMKRIEEGIKELGSQILKEHPVENTQLQNEKLYLYYLQNGRDMYVDQELDINRLSDYDVDHIVPQSFLKDDSIDNKVLTRSDKARGKSDNVPSEEVVKKMKNYWRQLLNAKLITQRKFDNLTKAERGGLSELDKAGFIKRQLVETRQITKHVAQILDSRMNTKYDENDKLIREVKVITLKSKLVSDFRKDFQFYKVREINNYHHAHDAYLNAVVGTALIKKYPKLESEFVYGDYKVYDVRKMIAKSEQEIGKATAKYFFYSNIMNFFKTEITLANGEIRKRPLIETNGETGEIVWDKGRDFATVRKVLSMPQVNIVKKTEVQTGGFSKESILPKRNSDKLIARKKDWDPKKYGGFDSPTVAYSVLVVAKVEKGKSKKLKSVKELLGITIMERSSFEKNPIDFLEAKGYKEVKKDLIIKLPKYSLFELENGRKRMLASAGELQKGNELALPSKYVNFLYLASHYEKLKGSPEDNEQKQLFVEQHKHYLDEIIEQISEFSKRVILADANLDKVLSAYNKHRDKPIREQAENIIHLFTLTNLGAPAAFKYFDTTIDRKRYTSTKEVLDATLIHQSITGLYETRIDLSQLGGDGGPAPGGGEAAAKGGTLGDQGSRGSDPLPEPRVTLTVEGIPTEFLVNTGAEHSVLTKPMGKMGSKRTVVAGATGSKVYPWTTKRLLKIGQKQVTHSFLVIPECPAPLLGRDLLTKLKAQIQFSTEGPQVTWEDRPAMCLVLNLEEEYRLHEKPVPPSIDPSWLQLFPMVWAEKAGMGLANQVPPVVVELKSDASPVAVRQYPMSKEAREGIRPHIQRFLDLGILVPCQSPWNTPLLPVKKPGTNDYRPVQDLREVNKRVQDIHPTVPNPYNLLSSLPPSHTWYSVLDLKDAFFCLKLHPNSQPLFAFEWRDPEKGNTGQLTWTRLPQGFKNSPTLFNEALHRDLASFRALNPQVVMLQYVDDLLVAAPTYRDCKEGTRRLLQELSKLGYRVSAKKAQLCREEVTYLGYLLKGGKRWLTPARKATVMKIPTPTTPRQVREFLGTAGFCRLWIPGFASLAAPLYPLTRPKVPFTWTEAHQEAFGRIKEALLSAPALALPDLTKPFALYVDEKEGVARGVLTQTLGPWRRPVAYLSKKLDPVASGWPTCLKAIAAVALLLKDADKLTLGQNVLVIAPHNLESIVRQPPDRWMTNARMTHYQSLLLNERVSFAPPAILNPATLLPVESDDTPIHICSEILAEETGTRPDLRDQPLPGVPAWYTDGSSFIMDGRRQAGAAIVDNKRTVWASNLPEGTSAQKAELIALTQALRLAEGKSINIYTDSRYAFATAHVHGAIYKQRGWLTSAGKDIKNKEEILALLEAIHLPKRVAIIHCPGHQRGTDPVATGNRKADEAAKQAAQSTRILTETTKNAGKRTADGSEFEKRTADGSEFESPKKKAKVE

SEQ ID NO: 7533 - protein, 2218 aa, synthetic construct
MPAAKRVKLDGGDKKYSIGLDIGTNSVGWAVITDEYKVPSKKFKVLGNTDRHSIKKNLIGALLFDSGETAEATRLKRTARRRYTRRKNRICYLQEIFSNEMAKVDDSFFHRLEESFLVEEDKKHERHPIFGNIVDEVAYHEKYPTIYHLRKKLVDSTDKADLRLIYLALAHMIKFRGHFLIEGDLNPDNSDVDKLFIQLVQTYNQLFEENPINASGVDAKAILSARLSKSRRLENLIAQLPGEKKNGLFGNLIALSLGLTPNFKSNFDLAEDAKLQLSKDTYDDDLDNLLAQIGDQYADLFLAAKNLSDAILLSDILRVNTEITKAPLSASMIKRYDEHHQDLTLLKALVRQQLPEKYKEIFFDQSKNGYAGYIDGGASQEEFYKFIKPILEKMDGTEELLVKLNREDLLRKQRTFDNGSIPHQIHLGELHAILRRQEDFYPFLKDNREKIEKILTFRIPYYVGPLARGNSRFAWMTRKSEETITPWNFEEVVDKGASAQSFIERMTNFDKNLPNEKVLPKHSLLYEYFTVYNELTKVKYVTEGMRKPAFLSGEQKKAIVDLLFKTNRKVTVKQLKEDYFKKIECFDSVEISGVEDRFNASLGTYHDLLKIIKDKDFLDNEENEDILEDIVLTLTLFEDREMIEERLKTYAHLFDDKVMKQLKRRRYTGWGRLSRKLINGIRDKQSGKTILDFLKSDGFANRNFMQLIHDDSLTFKEDIQKAQVSGQGDSLHEHIANLAGSPAIKKGILQTVKVVDELVKVMGRHKPENIVIEMARENQTTQKGQKNSRERMKRIEEGIKELGSQILKEHPVENTQLQNEKLYLYYLQNGRDMYVDQELDINRLSDYDVDHIVPQSFLKDDSIDNKVLTRSDKARGKSDNVPSEEVVKKMKNYWRQLLNAKLITQRKFDNLTKAERGGLSELDKAGFIKRQLVETRQITKHVAQILDSRMNTKYDENDKLIREVKVITLKSKLVSDFRKDFQFYKVREINNYHHAHDAYLNAVVGTALIKKYPKLESEFVYGDYKVYDVRKMIAKSEQEIGKATAKYFFYSNIMNFFKTEITLANGEIRKRPLIETNGETGEIVWDKGRDFATVRKVLSMPQVNIVKKTEVQTGGFSKESILPKRNSDKLIARKKDWDPKKYGGFDSPTVAYSVLVVAKVEKGKSKKLKSVKELLGITIMERSSFEKNPIDFLEAKGYKEVKKDLIIKLPKYSLFELENGRKRMLASAGELQKGNELALPSKYVNFLYLASHYEKLKGSPEDNEQKQLFVEQHKHYLDEIIEQISEFSKRVILADANLDKVLSAYNKHRDKPIREQAENIIHLFTLTNLGAPAAFKYFDTTIDRKRYTSTKEVLDATLIHQSITGLYETRIDLSQLGGDGGPAPGGGEAAAKGGTLGDQGSRGSDPLPEPRVTLTVEGIPTEFLVNTGAEHSVLTKPMGKMGSKRTVVAGATGSKVYPWTTKRLLKIGQKQVTHSFLVIPECPAPLLGRDLLTKLKAQIQFSTEGPQVTWEDRPAMCLVLNLEEEYRLHEKPVPPSIDPSWLQLFPMVWAEKAGMGLANQVPPVVVELKSDASPVAVRQYPMSKEAREGIRPHIQRFLDLGILVPCQSPWNTPLLPVKKPGTNDYRPVQDLREVNKRVQDIHPTVPNPYNLLSSLPPSHTWYSVLDLKDAFFCLKLHPNSQPLFAFEWRDPEKGNTGQLTWTRLPQGFKNSPTLFNEALHRDLASFRALNPQVVMLQYVDDLLVAAPTYRDCKEGTRRLLQELSKLGYRVSAKKAQLCREEVTYLGYLLKGGKRWLTPARKATVMKIPTPTTPRQVREFLGKAGFCRLFIPGFASLAAPLYPLTRPKVPFTWTEAHQEAFGRIKEALLSAPALALPDLTKPFALYVDEKEGVARGVLTQTLGPWRRPVAYLSKKLDPVASGWPTCLKAIAAVALLLKDADKLTLGQNVLVIAPHNLESIVRQPPDRWMTNARMTHYQSLLLNERVSFAPPAILNPATLLPVESDDTPIHICSEILAEETGTRPDLRDQPLPGVPAWYTDGSSFIMDGRRQAGAAIVDNKRTVWASNLPEGTSAQKAELIALTQALRLAEGKSINIYTDSRYAFATAHVHGAIYKQRGWLTSAGKDIKNKEEILALLEAIHLPKRVAIIHCPGHQRGTDPVATGNRKADEAAKQAAQSTRILTETTKNAGKRTADGSEFEKRTADGSEFESPKKKAKVE

SEQ ID NO: 7534 - protein, 2096 aa, synthetic construct
MPAAKRVKLDGGDKKYSIGLDIGTNSVGWAVITDEYKVPSKKFKVLGNTDRHSIKKNLIGALLFDSGETAEATRLKRTARRRYTRRKNRICYLQEIFSNEMAKVDDSFFHRLEESFLVEEDKKHERHPIFGNIVDEVAYHEKYPTIYHLRKKLVDSTDKADLRLIYLALAHMIKFRGHFLIEGDLNPDNSDVDKLFIQLVQTYNQLFEENPINASGVDAKAILSARLSKSRRLENLIAQLPGEKKNGLFGNLIALSLGLTPNFKSNFDLAEDAKLQLSKDTYDDDLDNLLAQIGDQYADLFLAAKNLSDAILLSDILRVNTEITKAPLSASMIKRYDEHHQDLTLLKALVRQQLPEKYKEIFFDQSKNGYAGYIDGGASQEEFYKFIKPILEKMDGTEELLVKLNREDLLRKQRTFDNGSIPHQIHLGELHAILRRQEDFYPFLKDNREKIEKILTFRIPYYVGPLARGNSRFAWMTRKSEETITPWNFEEVVDKGASAQSFIERMTNFDKNLPNEKVLPKHSLLYEYFTVYNELTKVKYVTEGMRKPAFLSGEQKKAIVDLLFKTNRKVTVKQLKEDYFKKIECFDSVEISGVEDRFNASLGTYHDLLKIIKDKDFLDNEENEDILEDIVLTLTLFEDREMIEERLKTYAHLFDDKVMKQLKRRRYTGWGRLSRKLINGIRDKQSGKTILDFLKSDGFANRNFMQLIHDDSLTFKEDIQKAQVSGQGDSLHEHIANLAGSPAIKKGILQTVKVVDELVKVMGRHKPENIVIEMARENQTTQKGQKNSRERMKRIEEGIKELGSQILKEHPVENTQLQNEKLYLYYLQNGRDMYVDQELDINRLSDYDVDHIVPQSFLKDDSIDNKVLTRSDKARGKSDNVPSEEVVKKMKNYWRQLLNAKLITQRKFDNLTKAERGGLSELDKAGFIKRQLVETRQITKHVAQILDSRMNTKYDENDKLIREVKVITLKSKLVSDFRKDFQFYKVREINNYHHAHDAYLNAVVGTALIKKYPKLESEFVYGDYKVYDVRKMIAKSEQEIGKATAKYFFYSNIMNFFKTEITLANGEIRKRPLIETNGETGEIVWDKGRDFATVRKVLSMPQVNIVKKTEVQTGGFSKESILPKRNSDKLIARKKDWDPKKYGGFDSPTVAYSVLVVAKVEKGKSKKLKSVKELLGITIMERSSFEKNPIDFLEAKGYKEVKKDLIIKLPKYSLFELENGRKRMLASAGELQKGNELALPSKYVNFLYLASHYEKLKGSPEDNEQKQLFVEQHKHYLDEIIEQISEFSKRVILADANLDKVLSAYNKHRDKPIREQAENIIHLFTLTNLGAPAAFKYFDTTIDRKRYTSTKEVLDATLIHQSITGLYETRIDLSQLGGDGGPAPGGGEAAAKGGTLNLEDEYRLYETSAEPEVSPGSTWLSDFPQAWAETGGMGLAVRQAPLIIPLKATSTPVSIKQYPMSQEAKLGIKPHIQRLLDQGILVPCQSPWNTPLLPVKKPGTNDYRPVQDLREVNKRVEDIHPTVPNPYNLLSGLPPSHRWYTVLDLKDAFFCLRLHPTSQPLFAFEWRDPGMGISGQLTWTRLPQGFKNSPTLFNEALHRDLADFRIQHPDLILLQYVDDILLAATSELDCQQGTRALLLTLGNLGYRASAKKAQLCQKQVKYLGYLLKEGQRWLTEARKETVMGQPTPKTPRQLREFLGTAGFCRLWIPGFAEMAAPLYPLTKPGTLFNWGPDQQKAYQEIKQALLTAPALGLPDLTKPFELFVDEKQGYAKGVLTQKLGPWRRPVAYLSKKLDPVAAGWPPCLRMVAAIAVLRKDAGKLTMGQPLVILAPHAVEALVKQPPDRWLSNARMTHYQAMLLDTDRVQFGPVVALNPATLLPLPEEGAPHDCLEILAETHGTRPDLTDQPIPDADHTWYTDGSSFLQEGQRKAGAAVTTETEVIWARALPAGTSAQRAELIALTQALKMAEGKRLNVYTDSRYAFATAHIHGEIYRRRGWLTSEGREIKNKSEILALLKALFLPKRLSIIHCLGHQKGDSAEARGNRLADQAAREAAIKTPPDTSTLLAGKRTADGSEFEKRTADGSEFESPKKKAKVE

SEQ ID NO: 7535 - protein, 2096 aa, synthetic construct
MPAAKRVKLDGGDKKYSIGLDIGTNSVGWAVITDEYKVPSKKFKVLGNTDRHSIKKNLIGALLFDSGETAEATRLKRTARRRYTRRKNRICYLQEIFSNEMAKVDDSFFHRLEESFLVEEDKKHERHPIFGNIVDEVAYHEKYPTIYHLRKKLVDSTDKADLRLIYLALAHMIKFRGHFLIEGDLNPDNSDVDKLFIQLVQTYNQLFEENPINASGVDAKAILSARLSKSRRLENLIAQLPGEKKNGLFGNLIALSLGLTPNFKSNFDLAEDAKLQLSKDTYDDDLDNLLAQIGDQYADLFLAAKNLSDAILLSDILRVNTEITKAPLSASMIKRYDEHHQDLTLLKALVRQQLPEKYKEIFFDQSKNGYAGYIDGGASQEEFYKFIKPILEKMDGTEELLVKLNREDLLRKQRTFDNGSIPHQIHLGELHAILRRQEDFYPFLKDNREKIEKILTFRIPYYVGPLARGNSRFAWMTRKSEETITPWNFEEVVDKGASAQSFIERMTNFDKNLPNEKVLPKHSLLYEYFTVYNELTKVKYVTEGMRKPAFLSGEQKKAIVDLLFKTNRKVTVKQLKEDYFKKIECFDSVEISGVEDRFNASLGTYHDLLKIIKDKDFLDNEENEDILEDIVLTLTLFEDREMIEERLKTYAHLFDDKVMKQLKRRRYTGWGRLSRKLINGIRDKQSGKTILDFLKSDGFANRNFMQLIHDDSLTFKEDIQKAQVSGQGDSLHEHIANLAGSPAIKKGILQTVKVVDELVKVMGRHKPENIVIEMARENQTTQKGQKNSRERMKRIEEGIKELGSQILKEHPVENTQLQNEKLYLYYLQNGRDMYVDQELDINRLSDYDVDHIVPQSFLKDDSIDNKVLTRSDKARGKSDNVPSEEVVKKMKNYWRQLLNAKLITQRKFDNLTKAERGGLSELDKAGFIKRQLVETRQITKHVAQILDSRMNTKYDENDKLIREVKVITLKSKLVSDFRKDFQFYKVREINNYHHAHDAYLNAVVGTALIKKYPKLESEFVYGDYKVYDVRKMIAKSEQEIGKATAKYFFYSNIMNFFKTEITLANGEIRKRPLIETNGETGEIVWDKGRDFATVRKVLSMPQVNIVKKTEVQTGGFSKESILPKRNSDKLIARKKDWDPKKYGGFDSPTVAYSVLVVAKVEKGKSKKLKSVKELLGITIMERSSFEKNPIDFLEAKGYKEVKKDLIIKLPKYSLFELENGRKRMLASAGELQKGNELALPSKYVNFLYLASHYEKLKGSPEDNEQKQLFVEQHKHYLDEIIEQISEFSKRVILADANLDKVLSAYNKHRDKPIREQAENIIHLFTLTNLGAPAAFKYFDTTIDRKRYTSTKEVLDATLIHQSITGLYETRIDLSQLGGDGGPAPGGGEAAAKGGTLGIEDEYRLHETSTEPDVSLGSTWLSDFPQAWAETGGMGLAVRQAPLIIPLKATSTPVSIQQYPMSHEARLGIKPHIQRLLDQGILVPCQSPWNTPLLPVKKPGTNDYRPVQDLREVNKRVEDIHPTVPNPYNLLSGLPPSHQWYTVLDLKDAFFCLRLHPTSQPLFAFEWRDPGMGISGQLTWTRLPQGFKNSPTLFNEALHRDLADFRIQHPDLILLQYVDDILLAATSELDCQQGTRALLQTLGDLGYRASAKKAQICQKQVKYLGYLLREGQRWLTEARKETVMGQPVPKTPRQLREFLGTAGFCRLWIPGFAEMAAPLYPLTKPGTLFSWGPDQQKAYQEIKQALLTAPALGLPDLTKPFELFVDEKQGYAKGVLTQKLGPWRRPVAYLSKKLDPVAAGWPPCLRMVAAIAVLTKDAGKLTMGQPLVILAPHAVEALVKQPPDRWLSNARMTHYQAMLLDTDRVQFGPVVALNPATLLPLPEEGAPHDCLEILAETHGTRPDLTDQPIPDADHTWYTDGSSFLQEGQRKAGAAVTTETEVIWAGALPAGTSAQRAELIALTQALKMAEGKRLNVYTDSRYAFATAHIHGEIYRRRGWLTSEGREIKNKSEILALLKALFLPKRLSIIHCLGHQKGDSAEARGNRLADQAAREAAIKTPPDTSTLLAGKRTADGSEFEKRTADGSEFESPKKKAKVE

SEQ ID NO: 7536 - protein, 2096 aa, synthetic construct
MPAAKRVKLDGGDKKYSIGLDIGTNSVGWAVITDEYKVPSKKFKVLGNTDRHSIKKNLIGALLFDSGETAEATRLKRTARRRYTRRKNRICYLQEIFSNEMAKVDDSFFHRLEESFLVEEDKKHERHPIFGNIVDEVAYHEKYPTIYHLRKKLVDSTDKADLRLIYLALAHMIKFRGHFLIEGDLNPDNSDVDKLFIQLVQTYNQLFEENPINASGVDAKAILSARLSKSRRLENLIAQLPGEKKNGLFGNLIALSLGLTPNFKSNFDLAEDAKLQLSKDTYDDDLDNLLAQIGDQYADLFLAAKNLSDAILLSDILRVNTEITKAPLSASMIKRYDEHHQDLTLLKALVRQQLPEKYKEIFFDQSKNGYAGYIDGGASQEEFYKFIKPILEKMDGTEELLVKLNREDLLRKQRTFDNGSIPHQIHLGELHAILRRQEDFYPFLKDNREKIEKILTFRIPYYVGPLARGNSRFAWMTRKSEETITPWNFEEVVDKGASAQSFIERMTNFDKNLPNEKVLPKHSLLYEYFTVYNELTKVKYVTEGMRKPAFLSGEQKKAIVDLLFKTNRKVTVKQLKEDYFKKIECFDSVEISGVEDRFNASLGTYHDLLKIIKDKDFLDNEENEDILEDIVLTLTLFEDREMIEERLKTYAHLFDDKVMKQLKRRRYTGWGRLSRKLINGIRDKQSGKTILDFLKSDGFANRNFMQLIHDDSLTFKEDIQKAQVSGQGDSLHEHIANLAGSPAIKKGILQTVKVVDELVKVMGRHKPENIVIEMARENQTTQKGQKNSRERMKRIEEGIKELGSQILKEHPVENTQLQNEKLYLYYLQNGRDMYVDQELDINRLSDYDVDHIVPQSFLKDDSIDNKVLTRSDKARGKSDNVPSEEVVKKMKNYWRQLLNAKLITQRKFDNLTKAERGGLSELDKAGFIKRQLVETRQITKHVAQILDSRMNTKYDENDKLIREVKVITLKSKLVSDFRKDFQFYKVREINNYHHAHDAYLNAVVGTALIKKYPKLESEFVYGDYKVYDVRKMIAKSEQEIGKATAKYFFYSNIMNFFKTEITLANGEIRKRPLIETNGETGEIVWDKGRDFATVRKVLSMPQVNIVKKTEVQTGGFSKESILPKRNSDKLIARKKDWDPKKYGGFDSPTVAYSVLVVAKVEKGKSKKLKSVKELLGITIMERSSFEKNPIDFLEAKGYKEVKKDLIIKLPKYSLFELENGRKRMLASAGELQKGNELALPSKYVNFLYLASHYEKLKGSPEDNEQKQLFVEQHKHYLDEIIEQISEFSKRVILADANLDKVLSAYNKHRDKPIREQAENIIHLFTLTNLGAPAAFKYFDTTIDRKRYTSTKEVLDATLIHQSITGLYETRIDLSQLGGDGGPAPGGGEAAAKGGTLNIEDEYRLHETSKEPDVSLGSTWLSDFPQAWAETGGMGLAVRQAPLIIPLKATSTPVSIKQYPMSQEARLGIKPHIQRLLDQGILVPCQSPWNTPLLPVKKPGTNDYRPVQDLREVNKRVEDIHPTVPNPYNLLSGLPPSHQWYTVLDLKDAFFCLRLHPTSQPLFAFEWRDPEMGISGQLTWTRLPQGFKNSPTLFNEALHRDLAGFRIQHPDLILLQYVDDLLLAATSELDCQQGTRALLQTLGDLGYRASAKKAQICQKQVKYLGYLLKEGQRWLTEARKETVMGQPIPKTPRQLREFLGTAGFCRLWIPGFAEMAAPLYPLTKPGTLFNWGPDQQKAFQEIKQALLTAPALGLPDLTKPFELFVDEKQGYAKGVLTQKLGPWRRPVAYLSKKLDPVAAGWPPCLRMVAAIAVLTKDAGKLTMGQPLVILAPHAVEALVKQPPDRWLSNARMTHYQALLLDTDRVQFGPVVALNPATLLPLPEEGLQHDCLDILAEAHGTRSDLMDQPLPDADHTWYTDGSSFLQEGQRKAGAAVTTETEVIWARALPAGTSAQRAELIALTQALKMAEGKKLNVYTDSRYAFATAHIHGEIYRRRGWLTSEGKEIKNKDEILALLKALFLPKRLSIIHCPGHQKGNSAEARGNRMADQAAREVATRETPETSTLLAGKRTADGSEFEKRTADGSEFESPKKKAKVE

SEQ ID NO: 7537 - protein, 2096 aa, synthetic construct
MPAAKRVKLDGGDKKYSIGLDIGTNSVGWAVITDEYKVPSKKFKVLGNTDRHSIKKNLIGALLFDSGETAEATRLKRTARRRYTRRKNRICYLQEIFSNEMAKVDDSFFHRLEESFLVEEDKKHERHPIFGNIVDEVAYHEKYPTIYHLRKKLVDSTDKADLRLIYLALAHMIKFRGHFLIEGDLNPDNSDVDKLFIQLVQTYNQLFEENPINASGVDAKAILSARLSKSRRLENLIAQLPGEKKNGLFGNLIALSLGLTPNFKSNFDLAEDAKLQLSKDTYDDDLDNLLAQIGDQYADLFLAAKNLSDAILLSDILRVNTEITKAPLSASMIKRYDEHHQDLTLLKALVRQQLPEKYKEIFFDQSKNGYAGYIDGGASQEEFYKFIKPILEKMDGTEELLVKLNREDLLRKQRTFDNGSIPHQIHLGELHAILRRQEDFYPFLKDNREKIEKILTFRIPYYVGPLARGNSRFAWMTRKSEETITPWNFEEVVDKGASAQSFIERMTNFDKNLPNEKVLPKHSLLYEYFTVYNELTKVKYVTEGMRKPAFLSGEQKKAIVDLLFKTNRKVTVKQLKEDYFKKIECFDSVEISGVEDRFNASLGTYHDLLKIIKDKDFLDNEENEDILEDIVLTLTLFEDREMIEERLKTYAHLFDDKVMKQLKRRRYTGWGRLSRKLINGIRDKQSGKTILDFLKSDGFANRNFMQLIHDDSLTFKEDIQKAQVSGQGDSLHEHIANLAGSPAIKKGILQTVKVVDELVKVMGRHKPENIVIEMARENQTTQKGQKNSRERMKRIEEGIKELGSQILKEHPVENTQLQNEKLYLYYLQNGRDMYVDQELDINRLSDYDVDHIVPQSFLKDDSIDNKVLTRSDKARGKSDNVPSEEVVKKMKNYWRQLLNAKLITQRKFDNLTKAERGGLSELDKAGFIKRQLVETRQITKHVAQILDSRMNTKYDENDKLIREVKVITLKSKLVSDFRKDFQFYKVREINNYHHAHDAYLNAVVGTALIKKYPKLESEFVYGDYKVYDVRKMIAKSEQEIGKATAKYFFYSNIMNFFKTEITLANGEIRKRPLIETNGETGEIVWDKGRDFATVRKVLSMPQVNIVKKTEVQTGGFSKESILPKRNSDKLIARKKDWDPKKYGGFDSPTVAYSVLVVAKVEKGKSKKLKSVKELLGITIMERSSFEKNPIDFLEAKGYKEVKKDLIIKLPKYSLFELENGRKRMLASAGELQKGNELALPSKYVNFLYLASHYEKLKGSPEDNEQKQLFVEQHKHYLDEIIEQISEFSKRVILADANLDKVLSAYNKHRDKPIREQAENIIHLFTLTNLGAPAAFKYFDTTIDRKRYTSTKEVLDATLIHQSITGLYETRIDLSQLGGDGGPAPGGGEAAAKGGTLNIEDEHRLHETSKEPDVSLGSTWLSDFPQAWAETGGMGLAVRQAPLIIPLKATSTPVSIKQYPMSQEARLGIKPHIQRLLDQGILVPCQSPWNTPLLPVKKPGTNDYRPVQDLREVNKRVEDIHPTVPNPYNLLSGLPPSHQWYTVLDLKDAFFCLRLHPTSQPLFAFEWRDPEMGISGQLTWTRLPQGFKNSPTLFNEALHRDLADFRIQHPDLILLQYVDDLLLAATSELDCQQGTRALLQTLGNLGYRASAKKAQICQKQVKYLGYLLKEGQRWLTEARKETVMGQPTPKTPRQLREFLGTAGFCRLWIPGFAEMAAPLYPLTKPGTLFNWGPDQQKAYQEIKQALLTAPALGLPDLTKPFELFVDEKQGYAKGVLTQKLGPWRRPVAYLSKKLDPVAAGWPPCLRMVAAIAVLTKDAGKLTMGQPLVILAPHAVEALVKQPPDRWLSNARMTHYQALLLDTDRVQFGPVVALNPATLLPLPEEGLQHNCLDILAEAHGTRPDLTDQPLPDADHTWYTDGSSLLQEGQRKAGAAVTTETEVIWAKALPAGTSAQRAELIALTQALKMAEGKKLNVYTDSRYAFATAHIHGEIYRRRGWLTSEGKEIKNKDEILALLKALFLPKRLSIIHCPGHQKGHSAEARGNRMADQAARKAAITETPDTSTLLAGKRTADGSEFEKRTADGSEFESPKKKAKVE

SEQ ID NO: 7538 - protein, 2096 aa, synthetic construct
MPAAKRVKLDGGDKKYSIGLDIGTNSVGWAVITDEYKVPSKKFKVLGNTDRHSIKKNLIGALLFDSGETAEATRLKRTARRRYTRRKNRICYLQEIFSNEMAKVDDSFFHRLEESFLVEEDKKHERHPIFGNIVDEVAYHEKYPTIYHLRKKLVDSTDKADLRLIYLALAHMIKFRGHFLIEGDLNPDNSDVDKLFIQLVQTYNQLFEENPINASGVDAKAILSARLSKSRRLENLIAQLPGEKKNGLFGNLIALSLGLTPNFKSNFDLAEDAKLQLSKDTYDDDLDNLLAQIGDQYADLFLAAKNLSDAILLSDILRVNTEITKAPLSASMIKRYDEHHQDLTLLKALVRQQLPEKYKEIFFDQSKNGYAGYIDGGASQEEFYKFIKPILEKMDGTEELLVKLNREDLLRKQRTFDNGSIPHQIHLGELHAILRRQEDFYPFLKDNREKIEKILTFRIPYYVGPLARGNSRFAWMTRKSEETITPWNFEEVVDKGASAQSFIERMTNFDKNLPNEKVLPKHSLLYEYFTVYNELTKVKYVTEGMRKPAFLSGEQKKAIVDLLFKTNRKVTVKQLKEDYFKKIECFDSVEISGVEDRFNASLGTYHDLLKIIKDKDFLDNEENEDILEDIVLTLTLFEDREMIEERLKTYAHLFDDKVMKQLKRRRYTGWGRLSRKLINGIRDKQSGKTILDFLKSDGFANRNFMQLIHDDSLTFKEDIQKAQVSGQGDSLHEHIANLAGSPAIKKGILQTVKVVDELVKVMGRHKPENIVIEMARENQTTQKGQKNSRERMKRIEEGIKELGSQILKEHPVENTQLQNEKLYLYYLQNGRDMYVDQELDINRLSDYDVDHIVPQSFLKDDSIDNKVLTRSDKARGKSDNVPSEEVVKKMKNYWRQLLNAKLITQRKFDNLTKAERGGLSELDKAGFIKRQLVETRQITKHVAQILDSRMNTKYDENDKLIREVKVITLKSKLVSDFRKDFQFYKVREINNYHHAHDAYLNAVVGTALIKKYPKLESEFVYGDYKVYDVRKMIAKSEQEIGKATAKYFFYSNIMNFFKTEITLANGEIRKRPLIETNGETGEIVWDKGRDFATVRKVLSMPQVNIVKKTEVQTGGFSKESILPKRNSDKLIARKKDWDPKKYGGFDSPTVAYSVLVVAKVEKGKSKKLKSVKELLGITIMERSSFEKNPIDFLEAKGYKEVKKDLIIKLPKYSLFELENGRKRMLASAGELQKGNELALPSKYVNFLYLASHYEKLKGSPEDNEQKQLFVEQHKHYLDEIIEQISEFSKRVILADANLDKVLSAYNKHRDKPIREQAENIIHLFTLTNLGAPAAFKYFDTTIDRKRYTSTKEVLDATLIHQSITGLYETRIDLSQLGGDGGPAPGGGEAAAKGGTLNIEDEHRLHETSKEPDVSLGSTWLSDFPQAWAETGGMGLAVRQAPLIIPLKATSTPVSIKQYPMSQEARLGIKPHIQRLLDQGILVPCQSPWNTPLLPVKKPGTNDYRPVQDLREVNKRVEDIHPTVPNPYNLLSGLPPSHQWYTVLDLKDAFFCLRLHPTSQPLFAFEWRDPEMGISGQLTWTRLPQGFKNSPTLFDEALHRDLADFRIQHPDLILLQYVDDLLLAATSELDCQQGTRALLQTLGNLGYRASAKKAQICQKQVKYLGYLLKEGQRWLTEARKETVMGQPTPKTPRQLREFLGTAGFCRLWIPGFAEMAAPLYPLTKTGTLFNWGPDQQKAYQEIKQALLTAPALGLPDLTKPFELFVDEKQGYAKGVLTQKLGPWRRPVAYLSKKLDPVAAGWPPCLRMVAAIAVLTKDAGKLTMGQPLVILAPHAVEALVKQPPDRWLSNARMTHYQALLLDTDRVQFGPVVALNPATLLPLPEEGLQHNCLDILAEAHGTRPDLTDQPLPDADHTWYTDGSSLLQEGQRKAGAAVTTETEVIWAKALPAGTSAQRAELIALTQALKMAEGKKLNVYTDSRYAFATAHIHGEIYRRRGLLTSEGKEIKNKDEILALLKALFLPKRLSIIHCPGHQKGHSAEARGNRMADQAARKAAITETPDTSTLLAGKRTADGSEFEKRTADGSEFESPKKKAKVE

SEQ ID NO: 7539 - protein, 2096 aa, synthetic construct; identical to SEQ ID NO: 7537

SEQ ID NO: 7540 - protein, 2090 aa, synthetic construct
MPAAKRVKLDGGDKKYSIGLDIGTNSVGWAVITDEYKVPSKKFKVLGNTDRHSIKKNLIGALLFDSGETAEATRLKRTARRRYTRRKNRICYLQEIFSNEMAKVDDSFFHRLEESFLVEEDKKHERHPIFGNIVDEVAYHEKYPTIYHLRKKLVDSTDKADLRLIYLALAHMIKFRGHFLIEGDLNPDNSDVDKLFIQLVQTYNQLFEENPINASGVDAKAILSARLSKSRRLENLIAQLPGEKKNGLFGNLIALSLGLTPNFKSNFDLAEDAKLQLSKDTYDDDLDNLLAQIGDQYADLFLAAKNLSDAILLSDILRVNTEITKAPLSASMIKRYDEHHQDLTLLKALVRQQLPEKYKEIFFDQSKNGYAGYIDGGASQEEFYKFIKPILEKMDGTEELLVKLNREDLLRKQRTFDNGSIPHQIHLGELHAILRRQEDFYPFLKDNREKIEKILTFRIPYYVGPLARGNSRFAWMTRKSEETITPWNFEEVVDKGASAQSFIERMTNFDKNLPNEKVLPKHSLLYEYFTVYNELTKVKYVTEGMRKPAFLSGEQKKAIVDLLFKTNRKVTVKQLKEDYFKKIECFDSVEISGVEDRFNASLGTYHDLLKIIKDKDFLDNEENEDILEDIVLTLTLFEDREMIEERLKTYAHLFDDKVMKQLKRRRYTGWGRLSRKLINGIRDKQSGKTILDFLKSDGFANRNFMQLIHDDSLTFKEDIQKAQVSGQGDSLHEHIANLAGSPAIKKGILQTVKVVDELVKVMGRHKPENIVIEMARENQTTQKGQKNSRERMKRIEEGIKELGSQILKEHPVENTQLQNEKLYLYYLQNGRDMYVDQELDINRLSDYDVDHIVPQSFLKDDSIDNKVLTRSDKARGKSDNVPSEEVVKKMKNYWRQLLNAKLITQRKFDNLTKAERGGLSELDKAGFIKRQLVETRQITKHVAQILDSRMNTKYDENDKLIREVKVITLKSKLVSDFRKDFQFYKVREINNYHHAHDAYLNAVVGTALIKKYPKLESEFVYGDYKVYDVRKMIAKSEQEIGKATAKYFFYSNIMNFFKTEITLANGEIRKRPLIETNGETGEIVWDKGRDFATVRKVLSMPQVNIVKKTEVQTGGFSKESILPKRNSDKLIARKKDWDPKKYGGFDSPTVAYSVLVVAKVEKGKSKKLKSVKELLGITIMERSSFEKNPIDFLEAKGYKEVKKDLIIKLPKYSLFELENGRKRMLASAGELQKGNELALPSKYVNFLYLASHYEKLKGSPEDNEQKQLFVEQHKHYLDEIIEQISEFSKRVILADANLDKVLSAYNKHRDKPIREQAENIIHLFTLTNLGAPAAFKYFDTTIDRKRYTSTKEVLDATLIHQSITGLYETRIDLSQLGGDGGPAPGGGEAAAKGGTLQLDDEYRLYSPLVKPDQNIQFWLEQFPQAWAETAGMGLAKQVPPQVIQLKASATPVSVRQYPLSKEAQEGIRPHVQRLIQQGILVPVQSPWNTPLLPVRKPGTNDYRPVQDLREVNKRVQDIHPTVPNPYNLLCALPPQRSWYTVLDLKDAFFCLRLHPTSQPLFAFEWRDPGTGRTGQLTWTRLPQGFKNSPTIFDEALHRDLANFRIQHPQVTLLQYVDDLLLAGATKQDCLEGTKALLLELSDLGYRASAKKAQICRREVTYLGYSLRDGQRWLTEARKKTVVQIPAPTTAKQVREFLGTAGFCRLWIPGFATLAAPLYPLTKEKGEFSWAPEHQKAFDAIKKALLSAPALALPDVTKPFTLYVDERKGVARGVLTQTLGPWRRPVAYLSKKLDPVASGWPVCLKAIAAVAILVKDADKLTLGQNITVIAPHALENIVRQPPDRWMTNARMTHYQSLLLTERVTFAPPAALNPATLLPEETDEPVTHDCHQLLIEETGVRKDLTDIPLTGEVLTWFTDGSSYVVEGKRMAGAAVVDGTRTIWASSLPEGTSAQKAELMALTQALRLAEGKSINIYTDSRYAFATAHVHGAIYKQRGLLTSAGREIKNKEEILSLLEALHLPKRLAIIHCPGHQKAKDPISRGNQMADRVAKQAAQGVNLLAGKRTADGSEFEKRTADGSEFESPKKKAKVE

SEQ ID NO: 7541 - protein, 2090 aa, synthetic construct; identical to SEQ ID NO: 7540

SEQ ID NO: 7542 - protein, 2176 aa, synthetic construct
MPAAKRVKLDGGDKKYSIGLDIGTNSVGWAVITDEYKVPSKKFKVLGNTDRHSIKKNLIGALLFDSGETAEATRLKRTARRRYTRRKNRICYLQEIFSNEMAKVDDSFFHRLEESFLVEEDKKHERHPIFGNIVDEVAYHEKYPTIYHLRKKLVDSTDKADLRLIYLALAHMIKFRGHFLIEGDLNPDNSDVDKLFIQLVQTYNQLFEENPINASGVDAKAILSARLSKSRRLENLIAQLPGEKKNGLFGNLIALSLGLTPNFKSNFDLAEDAKLQLSKDTYDDDLDNLLAQIGDQYADLFLAAKNLSDAILLSDILRVNTEITKAPLSASMIKRYDEHHQDLTLLKALVRQQLPEKYKEIFFDQSKNGYAGYIDGGASQEEFYKFIKPILEKMDGTEELLVKLNREDLLRKQRTFDNGSIPHQIHLGELHAILRRQEDFYPFLKDNREKIEKILTFRIPYYVGPLARGNSRFAWMTRKSEETITPWNFEEVVDKGASAQSFIERMTNFDKNLPNEKVLPKHSLLYEYFTVYNELTKVKYVTEGMRKPAFLSGEQKKAIVDLLFKTNRKVTVKQLKEDYFKKIECFDSVEISGVEDRFNASLGTYHDLLKIIKDKDFLDNEENEDILEDIVLTLTLFEDREMIEERLKTYAHLFDDKVMKQLKRRRYTGWGRLSRKLINGIRDKQSGKTILDFLKSDGFANRNFMQLIHDDSLTFKEDIQKAQVSGQGDSLHEHIANLAGSPAIKKGILQTVKVVDELVKVMGRHKPENIVIEMARENQTTQKGQKNSRERMKRIEEGIKELGSQILKEHPVENTQLQNEKLYLYYLQNGRDMYVDQELDINRLSDYDVDHIVPQSFLKDDSIDNKVLTRSDKARGKSDNVPSEEVVKKMKNYWRQLLNAKLITQRKFDNLTKAERGGLSELDKAGFIKRQLVETRQITKHVAQILDSRMNTKYDENDKLIREVKVITLKSKLVSDFRKDFQFYKVREINNYHHAHDAYLNAVVGTALIKKYPKLESEFVYGDYKVYDVRKMIAKSEQEIGKATAKYFFYSNIMNFFKTEITLANGEIRKRPLIETNGETGEIVWDKGRDFATVRKVLSMPQVNIVKKTEVQTGGFSKESILPKRNSDKLIARKKDWDPKKYGGFDSPTVAYSVLVVAKVEKGKSKKLKSVKELLGITIMERSSFEKNPIDFLEAKGYKEVKKDLIIKLPKYSLFELENGRKRMLASAGELQKGNELALPSKYVNFLYLASHYEKLKGSPEDNEQKQLFVEQHKHYLDEIIEQISEFSKRVILADANLDKVLSAYNKHRDKPIREQAENIIHLFTLTNLGAPAAFKYFDTTIDRKRYTSTKEVLDATLIHQSITGLYETRIDLSQLGGDGGPAPGGGEAAAKGGMDPLQLLQPLEAEIKGTKLKAHWNSGATITCVPEAFLEDERPIQTMLIKTIHGEKQQDVYYLTFKVQGRKVEAEVLASPYDYILLNPSDVPWLMKKPLQLTVLVPLHEYQERLLQQTALPKEQKELLQKLFLKYDALWQHWENQVGHRRIKPHNIATGTLAPRPQKQYPINPKAKPSIQIVIDDLLKQGVLIQQNSTMNTPVYPVPKPDGKWRMVLDYREVNKTIPLIAAQNQHSAGILSSIYRGKYKTTLDLTNGFWAHPITPESYWLTAFTWQGKQYCWTRLPQGFLNSPALFNADVVDLLKEIPNVQAYVDDIYISHDDPQEHLEQLEKIFSILLNAGYVVSLKKSEIAQREVEFLGFNITKEGRGLTDTFKQKLLNITPPKDLKQLQSILGLLNFARNFIPNYSELVKPLYTIVAPANGKFISWTEDNSNQLQHIISVLNQADNLEERNPETRLIIKVNSSPSAGYIRYYNEGSKRPIMYVNYIFSKAEAKFTQTEKLLTTMHKGLIKAMDLAMGQEILVYSPIVSMTKIQRTPLPERKALPVRWITWMTYLEDPRIQFHYDKSLPELQQIPNVTEDVIAKTKHPSEFAMVFYTDGSAIKHPDVNKSHSAGMGIAQVQFIPEYKIVHQWSIPLGDHTAQLAEIAAVEFACKKALKISGPVLIVTDSFYVAESANKELPYWKSNGFLNNKKKPLRHVSKWKSIAECLQLKPDIIIMHEKGHQQPMTTLHTEGNNLADKLATQGSYVVHAGKRTADGSEFEKRTADGSEFESPKKKAKVE

SEQ ID NO: 7543 - protein, 2087 aa, synthetic construct
MPAAKRVKLDGGDKKYSIGLDIGTNSVGWAVITDEYKVPSKKFKVLGNTDRHSIKKNLIGALLFDSGETAEATRLKRTARRRYTRRKNRICYLQEIFSNEMAKVDDSFFHRLEESFLVEEDKKHERHPIFGNIVDEVAYHEKYPTIYHLRKKLVDSTDKADLRLIYLALAHMIKFRGHFLIEGDLNPDNSDVDKLFIQLVQTYNQLFEENPINASGVDAKAILSARLSKSRRLENLIAQLPGEKKNGLFGNLIALSLGLTPNFKSNFDLAEDAKLQLSKDTYDDDLDNLLAQIGDQYADLFLAAKNLSDAILLSDILRVNTEITKAPLSASMIKRYDEHHQDLTLLKALVRQQLPEKYKEIFFDQSKNGYAGYIDGGASQEEFYKFIKPILEKMDGTEELLVKLNREDLLRKQRTFDNGSIPHQIHLGELHAILRRQEDFYPFLKDNREKIEKILTFRIPYYVGPLARGNSRFAWMTRKSEETITPWNFEEVVDKGASAQSFIERMTNFDKNLPNEKVLPKHSLLYEYFTVYNELTKVKYVTEGMRKPAFLSGEQKKAIVDLLFKTNRKVTVKQLKEDYFKKIECFDSVEISGVEDRFNASLGTYHDLLKIIKDKDFLDNEENEDILEDIVLTLTLFEDREMIEERLKTYAHLFDDKVMKQLKRRRYTGWGRLSRKLINGIRDKQSGKTILDFLKSDGFANRNFMQLIHDDSLTFKEDIQKAQVSGQGDSLHEHIANLAGSPAIKKGILQTVKVVDELVKVMGRHKPENIVIEMARENQTTQKGQKNSRERMKRIEEGIKELGSQILKEHPVENTQLQNEKLYLYYLQNGRDMYVDQELDINRLSDYDVDHIVPQSFLKDDSIDNKVLTRSDKARGKSDNVPSEEVVKKMKNYWRQLLNAKLITQRKFDNLTKAERGGLSELDKAGFIKRQLVETRQITKHVAQILDSRMNTKYDENDKLIREVKVITLKSKLVSDFRKDFQFYKVREINNYHHAHDAYLNAVVGTALIKKYPKLESEFVYGDYKVYDVRKMIAKSEQEIGKATAKYFFYSNIMNFFKTEITLANGEIRKRPLIETNGETGEIVWDKGRDFATVRKVLSMPQVNIVKKTEVQTGGFSKESILPKRNSDKLIARKKDWDPKKYGGFDSPTVAYSVLVVAKVEKGKSKKLKSVKELLGITIMERSSFEKNPIDFLEAKGYKEVKKDLIIKLPKYSLFELENGRKRMLASAGELQKGNELALPSKYVNFLYLASHYEKLKGSPEDNEQKQLFVEQHKHYLDEIIEQISEFSKRVILADANLDKVLSAYNKHRDKPIREQAENIIHLFTLTNLGAPAAFKYFDTTIDRKRYTSTKEVLDATLIHQSITGLYETRIDLSQLGGDGGPAPGGGEAAAKGGIPWLMKKPLQLTTLVPLQEYEERLLKQTMLTGSYKEKLQSLFLKYDALWQHWENQVGHRRIKPHHIATGTVNPRPQKQYPINPKAKASIQTVINDLLKQGVLIQQNSIMNTPVYPVPKPDGKWRMVLDYREVNKTIPLIAAQNQHSAGILSSIFRGKYKTTLDLSNGFWAHSITPESYWLTAFTWLGQQYCWTRLPQGFLNSPALFNADVVDLLKEVPNVQVYVDDIYISHDDPREHLEQLEKVFSLLLNAGYVVSLKKSEIAQHEVEFLGFNITKEGRGLTETFKQKLLNITPPRDLKQLQSILGKLNFARNFIPNFSELVKPLYNIIATAPGKYITWTTDNSQQLQNIISMLNSAENLEERNPEVRLIMKVNTSPSAGYIRFYNEFAKRPIMYLNYVYTKAEVKFTNTEKLLTTIHKGLIKALDLGMGQEILVYSPIVSMTKIQKTPLPERKALPIRWITWMSYLEDPRIQFHYDKTLPELQQVPTVTDDIIAKIKHPSEFSMVFYTDGSAIKHPNVNKSHNAGMGIAQVQFKPEFTVINTWSIPLGDHTAQLAEVAAVEFACKKALKIDGPVLIVTDSFYVAESVNKELPYWQSNGFFNNKKKPLKHVSKWKSIADCIQLKPDIIIIHEKGHQPTASTFHTEGNNLADKLATQGSYVVNAGKRTADGSEFEKRTADGSEFESPKKKAKVE

SEQ ID NO: 7544 - protein, 2094 aa, synthetic construct
MPAAKRVKLDGGDKKYSIGLDIGTNSVGWAVITDEYKVPSKKFKVLGNTDRHSIKKNLIGALLFDSGETAEATRLKRTARRRYTRRKNRICYLQEIFSNEMAKVDDSFFHRLEESFLVEEDKKHERHPIFGNIVDEVAYHEKYPTIYHLRKKLVDSTDKADLRLIYLALAHMIKFRGHFLIEGDLNPDNSDVDKLFIQLVQTYNQLFEENPINASGVDAKAILSARLSKSRRLENLIAQLPGEKKNGLFGNLIALSLGLTPNFKSNFDLAEDAKLQLSKDTYDDDLDNLLAQIGDQYADLFLAAKNLSDAILLSDILRVNTEITKAPLSASMIKRYDEHHQDLTLLKALVRQQLPEKYKEIFFDQSKNGYAGYIDGGASQEEFYKFIKPILEKMDGTEELLVKLNREDLLRKQRTFDNGSIPHQIHLGELHAILRRQEDFYPFLKDNREKIEKILTFRIPYYVGPLARGNSRFAWMTRKSEETITPWNFEEVVDKGASAQSFIERMTNFDKNLPNEKVLPKHSLLYEYFTVYNELTKVKYVTEGMRKPAFLSGEQKKAIVDLLFKTNRKVTVKQLKEDYFKKIECFDSVEISGVEDRFNASLGTYHDLLKIIKDKDFLDNEENEDILEDIVLTLTLFEDREMIEERLKTYAHLFDDKVMKQLKRRRYTGWGRLSRKLINGIRDKQSGKTILDFLKSDGFANRNFMQLIHDDSLTFKEDIQKAQVSGQGDSLHEHIANLAGSPAIKKGILQTVKVVDELVKVMGRHKPENIVIEMARENQTTQKGQKNSRERMKRIEEGIKELGSQILKEHPVENTQLQNEKLYLYYLQNGRDMYVDQELDINRLSDYDVDHIVPQSFLKDDSIDNKVLTRSDKARGKSDNVPSEEVVKKMKNYWRQLLNAKLITQRKFDNLTKAERGGLSELDKAGFIKRQLVETRQITKHVAQILDSRMNTKYDENDKLIREVKVITLKSKLVSDFRKDFQFYKVREINNYHHAHDAYLNAVVGTALIKKYPKLESEFVYGDYKVYDVRKMIAKSEQEIGKATAKYFFYSNIMNFFKTEITLANGEIRKRPLIETNGETGEIVWDKGRDFATVRKVLSMPQVNIVKKTEVQTGGFSKESILPKRNSDKLIARKKDWDPKKYGGFDSPTVAYSVLVVAKVEKGKSKKLKSVKELLGITIMERSSFEKNPIDFLEAKGYKEVKKDLIIKLPKYSLFELENGRKRMLASAGELQKGNELALPSKYVNFLYLASHYEKLKGSPEDNEQKQLFVEQHKHYLDEIIEQISEFSKRVILADANLDKVLSAYNKHRDKPIREQAENIIHLFTLTNLGAPAAFKYFDTTIDRKRYTSTKEVLDATLIHQSITGLYETRIDLSQLGGDGGPAPGGGEAAAKGGVLNLEEEYRLHEKPVPSSIDPSWLQLFPTVWAERAGMGLANQVPPVVVELRSGASPVAVRQYPMSKEAREGIRPHIQRFLDLGVLVPCQSPWNTPLLPVKKPGTNDYRPVQDLREINKRVQDIHPTVPNPYNLLSSLPPSHTWYSVLDLKDAFFCLKLHPNSQPLFAFEWRDPEKGNTGQLTWTRLPQGFKNSPTLFNEALHRDLAPFRALNPQVVLLQYVDDLLVAAPTYRDCKEGTQKLLQELSKLGYRVSAKKAQLCQKEVTYLGYLLKEGKRWLTPARKATVMKIPPPTTPRQVREFLGTAGFCRLWIPGFASLAAPLYPLTKPSIPFIWTEEHQKAFDRIKEALLSAPALALPDLTKPFTLYVDERAGVARGVLTQTLGPWRRPVAYLSKKLDPVASGWPTCLKAVAAVALLLKDADKLTLGQNVTVIASHSLESIVRQPPDRWMTNARMTHYQSLLLNERVSFAPPAVLNPATLLPVESEATPVHRCSEILAEETGTRRDLKDQPLPGVPAWYTDGSSFIAEGKRRAGAAIVDGKRTVWASSLPEGTSAQKAELVALTQALRLAEGKDINIYTDSRYAFATAHIHGAIYKQRGWLTSAGKDIKNKEEILALLEAIHLPKRVAIIHCPGHQKGNDPVATGNRRADEAAKQAALSTRVLAETTKPAGKRTADGSEFEKRTADGSEFESPKKKAKVE

SEQ ID NO: 7545 - protein, 2094 aa, synthetic construct
MPAAKRVKLDGGDKKYSIGLDIGTNSVGWAVITDEYKVPSKKFKVLGNTDRHSIKKNLIGALLFDSGETAEATRLKRTARRRYTRRKNRICYLQEIFSNEMAKVDDSFFHRLEESFLVEEDKKHERHPIFGNIVDEVAYHEKYPTIYHLRKKLVDSTDKADLRLIYLALAHMIKFRGHFLIEGDLNPDNSDVDKLFIQLVQTYNQLFEENPINASGVDAKAILSARLSKSRRLENLIAQLPGEKKNGLFGNLIALSLGLTPNFKSNFDLAEDAKLQLSKDTYDDDLDNLLAQIGDQYADLFLAAKNLSDAILLSDILRVNTEITKAPLSASMIKRYDEHHQDLTLLKALVRQQLPEKYKEIFFDQSKNGYAGYIDGGASQEEFYKFIKPILEKMDGTEELLVKLNREDLLRKQRTFDNGSIPHQIHLGELHAILRRQEDFYPFLKDNREKIEKILTFRIPYYVGPLARGNSRFAWMTRKSEETITPWNFEEVVDKGASAQSFIERMTNFDKNLPNEKVLPKHSLLYEYFTVYNELTKVKYVTEGMRKPAFLSGEQKKAIVDLLFKTNRKVTVKQLKEDYFKKIECFDSVEISGVEDRFNASLGTYHDLLKIIKDKDFLDNEENEDILEDIVLTLTLFEDREMIEERLKTYAHLFDDKVMKQLKRRRYTGWGRLSRKLINGIRDKQSGKTILDFLKSDGFANRNFMQLIHDDSLTFKEDIQKAQVSGQGDSLHEHIANLAGSPAIKKGILQTVKVVDELVKVMGRHKPENIVIEMARENQTTQKGQKNSRERMKRIEEGIKELGSQILKEHPVENTQLQNEKLYLYYLQNGRDMYVDQELDINRLSDYDVDHIVPQSFLKDDSIDNKVLTRSDKARGKSDNVPSEEVVKKMKNYWRQLLNAKLITQRKFDNLTKAERGGLSELDKAGFIKRQLVETRQITKHVAQILDSRMNTKYDENDKLIREVKVITLKSKLVSDFRKDFQFYKVREINNYHHAHDAYLNAVVGTALIKKYPKLESEFVYGDYKVYDVRKMIAKSEQEIGKATAKYFFYSNIMNFFKTEITLANGEIRKRPLIETNGETGEIVWDKGRDFATVRKVLSMPQVNIVKKTEVQTGGFSKESILPKRNSDKLIARKKDWDPKKYGGFDSPTVAYSVLVVAKVEKGKSKKLKSVKELLGITIMERSSFEKNPIDFLEAKGYKEVKKDLIIKLPKYSLFELENGRKRMLASAGELQKGNELALPSKYVNFLYLASHYEKLKGSPEDNEQKQLFVEQHKHYLDEIIEQISEFSKRVILADANLDKVLSAYNKHRDKPIREQAENIIHLFTLTNLGAPAAFKYFDTTIDRKRYTSTKEVLDATLIHQSITGLYETRIDLSQLGGDGGPAPGGGEAAAKGGVLNLEEEYRLHEKPVPSSIDPSWLQLFPTVWAERAGMGLANQVPPVVVELRSGASPVAVRQYPMSKEAREGIRPHIQRFLDLGVLVPCQSPWNTPLLPVKKPGTNDYRPVQDLREINKRVQDIHPTVPNPYNLLSSLPPSHTWYSVLDLKDAFFCLKLHPNSQPLFAFEWRDPEKGNTGQLTWTRLPQGFKNSPTLFNEALHRDLAPFRALNPQVVLLQYVDDLLVAAPTYRDCKEGTQKLLQELSKLGYRVSAKKAQLCQKEVTYLGYLLKEGKRWLTPARKATVMKIPPPTTPRQVREFLGKAGFCRLFIPGFASLAAPLYPLTKPSIPFIWTEEHQKAFDRIKEALLSAPALALPDLTKPFTLYVDERAGVARGVLTQTLGPWRRPVAYLSKKLDPVASGWPTCLKAVAAVALLLKDADKLTLGQNVTVIASHSLESIVRQPPDRWMTNARMTHYQSLLLNERVSFAPPAVLNPATLLPVESEATPVHRCSEILAEETGTRRDLKDQPLPGVPAWYTDGSSFIAEGKRRAGAAIVDGKRTVWASSLPEGTSAQKAELVALTQALRLAEGKDINIYTDSRYAFATAHIHGAIYKQRGWLTSAGKDIKNKEEILALLEAIHLPKRVAIIHCPGHQKGNDPVATGNRRADEAAKQAALSTRVLAETTKPAGKRTADGSEFEKRTADGSEFESPKKKAKVE

SEQ ID NO: 7546 - protein, 2096 aa, synthetic construct
MPAAKRVKLDGGDKKYSIGLDIGTNSVGWAVITDEYKVPSKKFKVLGNTDRHSIKKNLIGALLFDSGETAEATRLKRTARRRYTRRKNRICYLQEIFSNEMAKVDDSFFHRLEESFLVEEDKKHERHPIFGNIVDEVAYHEKYPTIYHLRKKLVDSTDKADLRLIYLALAHMIKFRGHFLIEGDLNPDNSDVDKLFIQLVQTYNQLFEENPINASGVDAKAILSARLSKSRRLENLIAQLPGEKKNGLFGNLIALSLGLTPNFKSNFDLAEDAKLQLSKDTYDDDLDNLLAQIGDQYADLFLAAKNLSDAILLSDILRVNTEITKAPLSASMIKRYDEHHQDLTLLKALVRQQLPEKYKEIFFDQSKNGYAGYIDGGASQEEFYKFIKPILEKMDGTEELLVKLNREDLLRKQRTFDNGSIPHQIHLGELHAILRRQEDFYPFLKDNREKIEKILTFRIPYYVGPLARGNSRFAWMTRKSEETITPWNFEEVVDKGASAQSFIERMTNFDKNLPNEKVLPKHSLLYEYFTVYNELTKVKYVTEGMRKPAFLSGEQKKAIVDLLFKTNRKVTVKQLKEDYFKKIECFDSVEISGVEDRFNASLGTYHDLLKIIKDKDFLDNEENEDILEDIVLTLTLFEDREMIEERLKTYAHLFDDKVMKQLKRRRYTGWGRLSRKLINGIRDKQSGKTILDFLKSDGFANRNFMQLIHDDSLTFKEDIQKAQVSGQGDSLHEHIANLAGSPAIKKGILQTVKVVDELVKVMGRHKPENIVIEMARENQTTQKGQKNSRERMKRIEEGIKELGSQILKEHPVENTQLQNEKLYLYYLQNGRDMYVDQELDINRLSDYDVDHIVPQSFLKDDSIDNKVLTRSDKARGKSDNVPSEEVVKKMKNYWRQLLNAKLITQRKFDNLTKAERGGLSELDKAGFIKRQLVETRQITKHVAQILDSRMNTKYDENDKLIREVKVITLKSKLVSDFRKDFQFYKVREINNYHHAHDAYLNAVVGTALIKKYPKLESEFVYGDYKVYDVRKMIAKSEQEIGKATAKYFFYSNIMNFFKTEITLANGEIRKRPLIETNGETGEIVWDKGRDFATVRKVLSMPQVNIVKKTEVQTGGFSKESILPKRNSDKLIARKKDWDPKKYGGFDSPTVAYSVLVVAKVEKGKSKKLKSVKELLGITIMERSSFEKNPIDFLEAKGYKEVKKDLIIKLPKYSLFELENGRKRMLASAGELQKGNELALPSKYVNFLYLASHYEKLKGSPEDNEQKQLFVEQHKHYLDEIIEQISEFSKRVILADANLDKVLSAYNKHRDKPIREQAENIIHLFTLTNLGAPAAFKYFDTTIDRKRYTSTKEVLDATLIHQSITGLYETRIDLSQLGGDGGPAPGGGEAAAKGGTLNIEDEYRLHETSKEPDVPLGSTWLSDFPQAWAETGGMGLAVRQAPLIIPLKATSTPVSIKQYPMSQEARLGIKPHIQRLLDQGILVPCQSPWNTPLLPVKKPGTNDYRPVQDLREVNKRVEDIHPTVPNPYNLLSGLPPSHQWYTVLDLKDAFFCLRLHPTSQPLFAFEWRDPEMGISGQLTWTRLPQGFKNSPTLFNEALHRDLADFRIQHPDLILLQYVDDLLLAATSEQDCQRGTRALLQTLGNLGYRASAKKAQICQKQVKYLGYLLKEGQRWLTEARKETVMGQPTPKTPRQLREFLGTAGFCRLWIPGFAEMAAPLYPLTKPGTLFNWGPDQQKAYQEIKQALLTAPALGLPDLTKPFELFVDEKQGYAKGVLTQKLGPWRRPVAYLSKKLDPVAAGWPPCLRMVAAIAVLTKDAGKLTMGQPLVILAPHAVEALVKQPPDRWLSNARMTHYQAMLLDTDRVQFGPVVALNPATLLPLPEKEAPHDCLEILAETHGTRPDLTDQPIPDADYTWYTDGSSFLQEGQRRAGAAVTTETEVIWARALPAGTSAQRAELIALTQALKMAEGKKLNVYTDSRYAFATAHVHGEIYRRRGWLTSEGREIKNKNEILALLKALFLPKRLSIIHCPGHQKGNSAEARGNRMADQAAREAAMKAVLETSTLLAGKRTADGSEFEKRTADGSEFESPKKKAKVE

SEQ ID NO: 7547 - protein, 2096 aa, synthetic construct
MPAAKRVKLDGGDKKYSIGLDIGTNSVGWAVITDEYKVPSKKFKVLGNTDRHSIKKNLIGALLFDSGETAEATRLKRTARRRYTRRKNRICYLQEIFSNEMAKVDDSFFHRLEESFLVEEDKKHERHPIFGNIVDEVAYHEKYPTIYHLRKKLVDSTDKADLRLIYLALAHMIKFRGHFLIEGDLNPDNSDVDKLFIQLVQTYNQLFEENPINASGVDAKAILSARLSKSRRLENLIAQLPGEKKNGLFGNLIALSLGLTPNFKSNFDLAEDAKLQLSKDTYDDDLDNLLAQIGDQYADLFLAAKNLSDAILLSDILRVNTEITKAPLSASMIKRYDEHHQDLTLLKALVRQQLPEKYKEIFFDQSKNGYAGYIDGGASQEEFYKFIKPILEKMDGTEELLVKLNREDLLRKQRTFDNGSIPHQIHLGELHAILRRQEDFYPFLKDNREKIEKILTFRIPYYVGPLARGNSRFAWMTRKSEETITPWNFEEVVDKGASAQSFIERMTNFDKNLPNEKVLPKHSLLYEYFTVYNELTKVKYVTEGMRKPAFLSGEQKKAIVDLLFKTNRKVTVKQLKEDYFKKIECFDSVEISGVEDRFNASLGTYHDLLKIIKDKDFLDNEENEDILEDIVLTLTLFEDREMIEERLKTYAHLFDDKVMKQLKRRRYTGWGRLSRKLINGIRDKQSGKTILDFLKSDGFANRNFMQLIHDDSLTFKEDIQKAQVSGQGDSLHEHIANLAGSPAIKKGILQTVKVVDELVKVMGRHKPENIVIEMARENQTTQKGQKNSRERMKRIEEGIKELGSQILKEHPVENTQLQNEKLYLYYLQNGRDMYVDQELDINRLSDYDVDHIVPQSFLKDDSIDNKVLTRSDKARGKSDNVPSEEVVKKMKNYWRQLLNAKLITQRKFDNLTKAERGGLSELDKAGFIKRQLVETRQITKHVAQILDSRMNTKYDENDKLIREVKVITLKSKLVSDFRKDFQFYKVREINNYHHAHDAYLNAVVGTALIKKYPKLESEFVYGDYKVYDVRKMIAKSEQEIGKATAKYFFYSNIMNFFKTEITLANGEIRKRPLIETNGETGEIVWDKGRDFATVRKVLSMPQVNIVKKTEVQTGGFSKESILPKRNSDKLIARKKDWDPKKYGGFDSPTVAYSVLVVAKVEKGKSKKLKSVKELLGITIMERSSFEKNPIDFLEAKGYKEVKKDLIIKLPKYSLFELENGRKRMLASAGELQKGNELALPSKYVNFLYLASHYEKLKGSPEDNEQKQLFVEQHKHYLDEIIEQISEFSKRVILADANLDKVLSAYNKHRDKPIREQAENIIHLFTLTNLGAPAAFKYFDTTIDRKRYTSTKEVLDATLIHQSITGLYETRIDLSQLGGDGGPAPGGGEAAAKGGTLNIEDEYRLHETSKEPDVPLGSTWLSDFPQAWAETGGMGLAVRQAPLIIPLKATSTPVSIKQYPMSQEARLGIKPHIQRLLDQGILVPCQSPWNTPLLPVKKPGTNDYRPVQDLREVNKRVEDIHPTVPNPYNLLSGLPPSHQWYTVLDLKDAFFCLRLHPTSQPLFAFEWRDPEMGISGQLTWTRLPQGFKNSPTLFNEALHRDLADFRIQHPDLILLQYVDDLLLAATSEQDCQRGTRALLQTLGNLGYRASAKKAQICQKQVKYLGYLLKEGQRWLTEARKETVMGQPTPKTPRQLREFLGKAGFCRLFIPGFAEMAAPLYPLTKPGTLFNWGPDQQKAYQEIKQALLTAPALGLPDLTKPFELFVDEKQGYAKGVLTQKLGPWRRPVAYLSKKLDPVAAGWPPCLRMVAAIAVLTKDAGKLTMGQPLVILAPHAVEALVKQPPDRWLSNARMTHYQAMLLDTDRVQFGPVVALNPATLLPLPEKEAPHDCLEILAETHGTRPDLTDQPIPDADYTWYTDGSSFLQEGQRRAGAAVTTETEVIWARALPAGTSAQRAELIALTQALKMAEGKKLNVYTDSRYAFATAHVHGEIYRRRGWLTSEGREIKNKNEILALLKALFLPKRLSIIHCPGHQKGNSAEARGNRMADQAAREAAMKAVLETSTLLAGKRTADGSEFEKRTADGSEFESPKKKAKVE

SEQ ID NO: 7548 - protein, 2173 aa, synthetic construct
MPAAKRVKLDGGDKKYSIGLDIGTNSVGWAVITDEYKVPSKKFKVLGNTDRHSIKKNLIGALLFDSGETAEATRLKRTARRRYTRRKNRICYLQEIFSNEMAKVDDSFFHRLEESFLVEEDKKHERHPIFGNIVDEVAYHEKYPTIYHLRKKLVDSTDKADLRLIYLALAHMIKFRGHFLIEGDLNPDNSDVDKLFIQLVQTYNQLFEENPINASGVDAKAILSARLSKSRRLENLIAQLPGEKKNGLFGNLIALSLGLTPNFKSNFDLAEDAKLQLSKDTYDDDLDNLLAQIGDQYADLFLAAKNLSDAILLSDILRVNTEITKAPLSASMIKRYDEHHQDLTLLKALVRQQLPEKYKEIFFDQSKNGYAGYIDGGASQEEFYKFIKPILEKMDGTEELLVKLNREDLLRKQRTFDNGSIPHQIHLGELHAILRRQEDFYPFLKDNREKIEKILTFRIPYYVGPLARGNSRFAWMTRKSEETITPWNFEEVVDKGASAQSFIERMTNFDKNLPNEKVLPKHSLLYEYFTVYNELTKVKYVTEGMRKPAFLSGEQKKAIVDLLFKTNRKVTVKQLKEDYFKKIECFDSVEISGVEDRFNASLGTYHDLLKIIKDKDFLDNEENEDILEDIVLTLTLFEDREMIEERLKTYAHLFDDKVMKQLKRRRYTGWGRLSRKLINGIRDKQSGKTILDFLKSDGFANRNFMQLIHDDSLTFKEDIQKAQVSGQGDSLHEHIANLAGSPAIKKGILQTVKVVDELVKVMGRHKPENIVIEMARENQTTQKGQKNSRERMKRIEEGIKELGSQILKEHPVENTQLQNEKLYLYYLQNGRDMYVDQELDINRLSDYDVDHIVPQSFLKDDSIDNKVLTRSDKARGKSDNVPSEEVVKKMKNYWRQLLNAKLITQRKFDNLTKAERGGLSELDKAGFIKRQLVETRQITKHVAQILDSRMNTKYDENDKLIREVKVITLKSKLVSDFRKDFQFYKVREINNYHHAHDAYLNAVVGTALIKKYPKLESEFVYGDYKVYDVRKMIAKSEQEIGKATAKYFFYSNIMNFFKTEITLANGEIRKRPLIETNGETGEIVWDKGRDFATVRKVLSMPQVNIVKKTEVQTGGFSKESILPKRNSDKLIARKKDWDPKKYGGFDSPTVAYSVLVVAKVEKGKSKKLKSVKELLGITIMERSSFEKNPIDFLEAKGYKEVKKDLIIKLPKYSLFELENGRKRMLASAGELQKGNELALPSKYVNFLYLASHYEKLKGSPEDNEQKQLFVEQHKHYLDEIIEQISEFSKRVILADANLDKVLSAYNKHRDKPIREQAENIIHLFTLTNLGAPAAFKYFDTTIDRKRYTSTKEVLDATLIHQSITGLYETRIDLSQLGGDGGPAPEAAAKGGGGGMDLLKPLTVERKGVKIKGYWNSQADITCVPKDLLQGEEPVRQQNVTTIHGTQEGDVYYVNLKIDGRRINTEVIGTTLDYAIITPGDVPWILKKPLELTIKLDLEEQQGTLLNNSILSKKGKEELKQLFEKYSALWQSWENQVGHRRIRPHKIATGTVKPTPQKQYHINPKAKPDIQIVINDLLKQGVLIQKESTMNTPVYPVPKPNGRWRMVLDYRAVNKVTPLIAVQNQHSYGILGSLFKGRYKTTIDLSNGFWAHPIVPEDYWITAFTWQGKQYCWTVLPQGFLNSPGLFTGDVVDLLQGIPNVEVYVDDVYISHDSEKEHLEYLDILFNRLKEAGYIISLKKSNIANSIVDFLGFQITNEGRGLTDTFKEKLENITAPTTLKQLQSILGLLNFARNFIPDFTELIAPLYALIPKSTKNYVPWQIEHSTTLETLITKLNGAEYLQGRKGDKTLIMKVNASYTTGYIRYYNEGEKKPISYVSIVFSKTELKFTELEKLLTTVHKGLLKALDLSMGQNIHVYSPIVSMQNIQKTPQTAKKALASRWLSWLSYLEDPRIRFFYDPQMPALKDLPAVDTGKDNKKHPSNFQHIFYTDGSAITSPTKEGHLNAGMGIVYFINKDGNLQKQQEWSISLGNHTAQFAEIAAFEFALKKCLPLGGNILVVTDSNYVAKAYNEELDVWASNGFVNNRKKPLKHISKWKSVADLKRLRPDVVVTHEPGHQKLDSSPHAYGNNLADQLATQASFKVHAGKRTADGSEFEKRTADGSEFESPKKKAKVE

SEQ ID NO: 7549 - protein, 2087 aa, synthetic construct
MPAAKRVKLDGGDKKYSIGLDIGTNSVGWAVITDEYKVPSKKFKVLGNTDRHSIKKNLIGALLFDSGETAEATRLKRTARRRYTRRKNRICYLQEIFSNEMAKVDDSFFHRLEESFLVEEDKKHERHPIFGNIVDEVAYHEKYPTIYHLRKKLVDSTDKADLRLIYLALAHMIKFRGHFLIEGDLNPDNSDVDKLFIQLVQTYNQLFEENPINASGVDAKAILSARLSKSRRLENLIAQLPGEKKNGLFGNLIALSLGLTPNFKSNFDLAEDAKLQLSKDTYDDDLDNLLAQIGDQYADLFLAAKNLSDAILLSDILRVNTEITKAPLSASMIKRYDEHHQDLTLLKALVRQQLPEKYKEIFFDQSKNGYAGYIDGGASQEEFYKFIKPILEKMDGTEELLVKLNREDLLRKQRTFDNGSIPHQIHLGELHAILRRQEDFYPFLKDNREKIEKILTFRIPYYVGPLARGNSRFAWMTRKSEETITPWNFEEVVDKGASAQSFIERMTNFDKNLPNEKVLPKHSLLYEYFTVYNELTKVKYVTEGMRKPAFLSGEQKKAIVDLLFKTNRKVTVKQLKEDYFKKIECFDSVEISGVEDRFNASLGTYHDLLKIIKDKDFLDNEENEDILEDIVLTLTLFEDREMIEERLKTYAHLFDDKVMKQLKRRRYTGWGRLSRKLINGIRDKQSGKTILDFLKSDGFANRNFMQLIHDDSLTFKEDIQKAQVSGQGDSLHEHIANLAGSPAIKKGILQTVKVVDELVKVMGRHKPENIVIEMARENQTTQKGQKNSRERMKRIEEGIKELGSQILKEHPVENTQLQNEKLYLYYLQNGRDMYVDQELDINRLSDYDVDHIVPQSFLKDDSIDNKVLTRSDKARGKSDNVPSEEVVKKMKNYWRQLLNAKLITQRKFDNLTKAERGGLSELDKAGFIKRQLVETRQITKHVAQILDSRMNTKYDENDKLIREVKVITLKSKLVSDFRKDFQFYKVREINNYHHAHDAYLNAVVGTALIKKYPKLESEFVYGDYKVYDVRKMIAKSEQEIGKATAKYFFYSNIMNFFKTEITLANGEIRKRPLIETNGETGEIVWDKGRDFATVRKVLSMPQVNIVKKTEVQTGGFSKESILPKRNSDKLIARKKDWDPKKYGGFDSPTVAYSVLVVAKVEKGKSKKLKSVKELLGITIMERSSFEKNPIDFLEAKGYKEVKKDLIIKLPKYSLFELENGRKRMLASAGELQKGNELALPSKYVNFLYLASHYEKLKGSPEDNEQKQLFVEQHKHYLDEIIEQISEFSKRVILADANLDKVLSAYNKHRDKPIREQAENIIHLFTLTNLGAPAAFKYFDTTIDRKRYTSTKEVLDATLIHQSITGLYETRIDLSQLGGDGGPAPEAAAKGGGGGVPWILKKPLELTIKLDLEEQQGTLLNNSILSKKGKEELKQLFEKYSALWQSWENQVGHRRIRPHKIATGTVKPTPQKQYHINPKAKPDIQIVINDLLKQGVLIQKESTMNTPVYPVPKPNGRWRMVLDYRAVNKVTPLIAVQNQHSYGILGSLFKGRYKTTIDLSNGFWAHPIVPEDYWITAFTWQGKQYCWTVLPQGFLNSPGLFTGDVVDLLQGIPNVEVYVDDVYISHDSEKEHLEYLDILFNRLKEAGYIISLKKSNIANSIVDFLGFQITNEGRGLTDTFKEKLENITAPTTLKQLQSILGLLNFARNFIPDFTELIAPLYALIPKSTKNYVPWQIEHSTTLETLITKLNGAEYLQGRKGDKTLIMKVNASYTTGYIRYYNEGEKKPISYVSIVFSKTELKFTELEKLLTTVHKGLLKALDLSMGQNIHVYSPIVSMQNIQKTPQTAKKALASRWLSWLSYLEDPRIRFFYDPQMPALKDLPAVDTGKDNKKHPSNFQHIFYTDGSAITSPTKEGHLNAGMGIVYFINKDGNLQKQQEWSISLGNHTAQFAEIAAFEFALKKCLPLGGNILVVTDSNYVAKAYNEELDVWASNGFVNNRKKPLKHISKWKSVADLKRLRPDVVVTHEPGHQKLDSSPHAYGNNLADQLATQASFKVHAGKRTADGSEFEKRTADGSEFESPKKKAKVE

SEQ ID NO: 7550 - protein, 2095 aa, synthetic construct
MPAAKRVKLDGGDKKYSIGLDIGTNSVGWAVITDEYKVPSKKFKVLGNTDRHSIKKNLIGALLFDSGETAEATRLKRTARRRYTRRKNRICYLQEIFSNEMAKVDDSFFHRLEESFLVEEDKKHERHPIFGNIVDEVAYHEKYPTIYHLRKKLVDSTDKADLRLIYLALAHMIKFRGHFLIEGDLNPDNSDVDKLFIQLVQTYNQLFEENPINASGVDAKAILSARLSKSRRLENLIAQLPGEKKNGLFGNLIALSLGLTPNFKSNFDLAEDAKLQLSKDTYDDDLDNLLAQIGDQYADLFLAAKNLSDAILLSDILRVNTEITKAPLSASMIKRYDEHHQDLTLLKALVRQQLPEKYKEIFFDQSKNGYAGYIDGGASQEEFYKFIKPILEKMDGTEELLVKLNREDLLRKQRTFDNGSIPHQIHLGELHAILRRQEDFYPFLKDNREKIEKILTFRIPYYVGPLARGNSRFAWMTRKSEETITPWNFEEVVDKGASAQSFIERMTNFDKNLPNEKVLPKHSLLYEYFTVYNELTKVKYVTEGMRKPAFLSGEQKKAIVDLLFKTNRKVTVKQLKEDYFKKIECFDSVEISGVEDRFNASLGTYHDLLKIIKDKDFLDNEENEDILEDIVLTLTLFEDREMIEERLKTYAHLFDDKVMKQLKRRRYTGWGRLSRKLINGIRDKQSGKTILDFLKSDGFANRNFMQLIHDDSLTFKEDIQKAQVSGQGDSLHEHIANLAGSPAIKKGILQTVKVVDELVKVMGRHKPENIVIEMARENQTTQKGQKNSRERMKRIEEGIKELGSQILKEHPVENTQLQNEKLYLYYLQNGRDMYVDQELDINRLSDYDVDHIVPQSFLKDDSIDNKVLTRSDKARGKSDNVPSEEVVKKMKNYWRQLLNAKLITQRKFDNLTKAERGGLSELDKAGFIKRQLVETRQITKHVAQILDSRMNTKYDENDKLIREVKVITLKSKLVSDFRKDFQFYKVREINNYHHAHDAYLNAVVGTALIKKYPKLESEFVYGDYKVYDVRKMIAKSEQEIGKATAKYFFYSNIMNFFKTEITLANGEIRKRPLIETNGETGEIVWDKGRDFATVRKVLSMPQVNIVKKTEVQTGGFSKESILPKRNSDKLIARKKDWDPKKYGGFDSPTVAYSVLVVAKVEKGKSKKLKSVKELLGITIMERSSFEKNPIDFLEAKGYKEVKKDLIIKLPKYSLFELENGRKRMLASAGELQKGNELALPSKYVNFLYLASHYEKLKGSPEDNEQKQLFVEQHKHYLDEIIEQISEFSKRVILADANLDKVLSAYNKHRDKPIREQAENIIHLFTLTNLGAPAAFKYFDTTIDRKRYTSTKEVLDATLIHQSITGLYETRIDLSQLGGDGGPAPEAAAKGGGGGTLQLEEEYRLFEPESTQKQEMDIWLKNFPQAWAETGGMGTAHCQAPVLIQLKATATPISIRQYPMPHEAYQGIKPHIRRMLDQGILKPCQSPWNTPLLPVKKPGTEDYRPVQDLREVNKRVEDIHPTVPNPYNLLSTLPPSHPWYTVLDLKDAFFCLRLHSESQLLFAFEWRDPEIGLSGQLTWTRLPQGFKNSPTLFNEALHSDLADFRVRYPALVLLQYVDDLLLAAATRTECLEGTKALLETLGNKGYRASAKKAQICLQEVTYLGYSLKDGQRWLTKARKEAILSIPVPKNSRQVREFLGTAGYCRLWIPGFAELAAPLYPLTRPGTLFQWGTEQQLAFEDIKKALLSSPALGLPDITKPFELFIDENSGFAKGVLVQKLGPWKRPVAYLSKKLDTVASGWPPCLRMVAAIAILVKDAGKLTLGQPLTILTSHPVEALVRQPPNKWLSNARMTHYQAMLLDAERVHFGPTVSLNPATLLPLPSGGNHHDCLQILAETHGTRPDLTDQPLPDADLTWYTDGSSFIRNGEREAGAAVTTESEVIWAAPLPPGTSAQRAELIALTQALKMAEGKKLTVYTDSRYAFATTHVHGEIYRRRGWLTSEGKEIKNKNEILALLEALFLPKRLSIIHCPGHQKGDSPQAKGNRLADDTAKKAATETHSSLTVLPAGKRTADGSEFEKRTADGSEFESPKKKAKVE

SEQ ID NO: 7551 - protein, 2087 aa, synthetic construct
MPAAKRVKLDGGDKKYSIGLDIGTNSVGWAVITDEYKVPSKKFKVLGNTDRHSIKKNLIGALLFDSGETAEATRLKRTARRRYTRRKNRICYLQEIFSNEMAKVDDSFFHRLEESFLVEEDKKHERHPIFGNIVDEVAYHEKYPTIYHLRKKLVDSTDKADLRLIYLALAHMIKFRGHFLIEGDLNPDNSDVDKLFIQLVQTYNQLFEENPINASGVDAKAILSARLSKSRRLENLIAQLPGEKKNGLFGNLIALSLGLTPNFKSNFDLAEDAKLQLSKDTYDDDLDNLLAQIGDQYADLFLAAKNLSDAILLSDILRVNTEITKAPLSASMIKRYDEHHQDLTLLKALVRQQLPEKYKEIFFDQSKNGYAGYIDGGASQEEFYKFIKPILEKMDGTEELLVKLNREDLLRKQRTFDNGSIPHQIHLGELHAILRRQEDFYPFLKDNREKIEKILTFRIPYYVGPLARGNSRFAWMTRKSEETITPWNFEEVVDKGASAQSFIERMTNFDKNLPNEKVLPKHSLLYEYFTVYNELTKVKYVTEGMRKPAFLSGEQKKAIVDLLFKTNRKVTVKQLKEDYFKKIECFDSVEISGVEDRFNASLGTYHDLLKIIKDKDFLDNEENEDILEDIVLTLTLFEDREMIEERLKTYAHLFDDKVMKQLKRRRYTGWGRLSRKLINGIRDKQSGKTILDFLKSDGFANRNFMQLIHDDSLTFKEDIQKAQVSGQGDSLHEHIANLAGSPAIKKGILQTVKVVDELVKVMGRHKPENIVIEMARENQTTQKGQKNSRERMKRIEEGIKELGSQILKEHPVENTQLQNEKLYLYYLQNGRDMYVDQELDINRLSDYDVDHIVPQSFLKDDSIDNKVLTRSDKARGKSDNVPSEEVVKKMKNYWRQLLNAKLITQRKFDNLTKAERGGLSELDKAGFIKRQLVETRQITKHVAQILDSRMNTKYDENDKLIREVKVITLKSKLVSDFRKDFQFYKVREINNYHHAHDAYLNAVVGTALIKKYPKLESEFVYGDYKVYDVRKMIAKSEQEIGKATAKYFFYSNIMNFFKTEITLANGEIRKRPLIETNGETGEIVWDKGRDFATVRKVLSMPQVNIVKKTEVQTGGFSKESILPKRNSDKLIARKKDWDPKKYGGFDSPTVAYSVLVVAKVEKGKSKKLKSVKELLGITIMERSSFEKNPIDFLEAKGYKEVKKDLIIKLPKYSLFELENGRKRMLASAGELQKGNELALPSKYVNFLYLASHYEKLKGSPEDNEQKQLFVEQHKHYLDEIIEQISEFSKRVILADANLDKVLSAYNKHRDKPIREQAENIIHLFTLTNLGAPAAFKYFDTTIDRKRYTSTKEVLDATLIHQSITGLYETRIDLSQLGGDGGPAPEAAAKGGGGGVPWLTQQPLQLTILVPLQEYQEKILSKTALPEDQKQQLKTLFVKYDNLWQHWENQVGHRKIRPHNIATGDYPPRPQKQYPINPKAKPSIQIVIDDLLKQGVLTPQNSTMNTPVYPVPKPDGRWRMVLDYREVNKTIPLTAAQNQHSAGILATIVRQKYKTTLDLANGFWAHPITPESYWLTAFTWQGKQYCWTRLPQGFLNSPALFNADVVDLLKEIPNVQVYVDDIYLSHDDPKEHVQQLEKVFQILLQAGYVVSLKKSEIGQKTVEFLGFNITKEGRGLTDTFKTKLLNITPPKDLKQLQSILGKLNFARNFIPNFAELVQPLYNLIAPAKGKYIEWSEENTKQLNMVIEALNTASNLEERLPEQRLVIKVNTSPSAGYVRYYNETGKKPIMYLNYVFSKAELKFSMLEKLLTTMHKALIKAMDLAMGQEILVYSPIVSMTKIQKTPLPERKALPIRWITWMTYLEDPRIQFHYDKTLPELKHIPDVYTSSQSPVKHPSQYEGVFYTDGSAIKSPDPTKSNNAGMGIVHATYKPEYQVLNQWSIPLGNHTAQMAEIAAVEFACKKALKIPGPVLVITDSFYVAESANKELPYWKSNGFVNNKKKPLKHISKWKSIAECLSMKPDITIQHEKGISLQIPVFILKGNALADKLATQGSYVVNAGKRTADGSEFEKRTADGSEFESPKKKAKVE

SEQ ID NO: 7552 - protein, 2176 aa, synthetic construct
MPAAKRVKLDGGDKKYSIGLDIGTNSVGWAVITDEYKVPSKKFKVLGNTDRHSIKKNLIGALLFDSGETAEATRLKRTARRRYTRRKNRICYLQEIFSNEMAKVDDSFFHRLEESFLVEEDKKHERHPIFGNIVDEVAYHEKYPTIYHLRKKLVDSTDKADLRLIYLALAHMIKFRGHFLIEGDLNPDNSDVDKLFIQLVQTYNQLFEENPINASGVDAKAILSARLSKSRRLENLIAQLPGEKKNGLFGNLIALSLGLTPNFKSNFDLAEDAKLQLSKDTYDDDLDNLLAQIGDQYADLFLAAKNLSDAILLSDILRVNTEITKAPLSASMIKRYDEHHQDLTLLKALVRQQLPEKYKEIFFDQSKNGYAGYIDGGASQEEFYKFIKPILEKMDGTEELLVKLNREDLLRKQRTFDNGSIPHQIHLGELHAILRRQEDFYPFLKDNREKIEKILTFRIPYYVGPLARGNSRFAWMTRKSEETITPWNFEEVVDKGASAQSFIERMTNFDKNLPNEKVLPKHSLLYEYFTVYNELTKVKYVTEGMRKPAFLSGEQKKAIVDLLFKTNRKVTVKQLKEDYFKKIECFDSVEISGVEDRFNASLGTYHDLLKIIKDKDFLDNEENEDILEDIVLTLTLFEDREMIEERLKTYAHLFDDKVMKQLKRRRYTGWGRLSRKLINGIRDKQSGKTILDFLKSDGFANRNFMQLIHDDSLTFKEDIQKAQVSGQGDSLHEHIANLAGSPAIKKGILQTVKVVDELVKVMGRHKPENIVIEMARENQTTQKGQKNSRERMKRIEEGIKELGSQILKEHPVENTQLQNEKLYLYYLQNGRDMYVDQELDINRLSDYDVDHIVPQSFLKDDSIDNKVLTRSDKARGKSDNVPSEEVVKKMKNYWRQLLNAKLITQRKFDNLTKAERGGLSELDKAGFIKRQLVETRQITKHVAQILDSRMNTKYDENDKLIREVKVITLKSKLVSDFRKDFQFYKVREINNYHHAHDAYLNAVVGTALIKKYPKLESEFVYGDYKVYDVRKMIAKSEQEIGKATAKYFFYSNIMNFFKTEITLANGEIRKRPLIETNGETGEIVWDKGRDFATVRKVLSMPQVNIVKKTEVQTGGFSKESILPKRNSDKLIARKKDWDPKKYGGFDSPTVAYSVLVVAKVEKGKSKKLKSVKELLGITIMERSSFEKNPIDFLEAKGYKEVKKDLIIKLPKYSLFELENGRKRMLASAGELQKGNELALPSKYVNFLYLASHYEKLKGSPEDNEQKQLFVEQHKHYLDEIIEQISEFSKRVILADANLDKVLSAYNKHRDKPIREQAENIIHLFTLTNLGAPAAFKYFDTTIDRKRYTSTKEVLDATLIHQSITGLYETRIDLSQLGGDGGPAPEAAAKGGGGGMNPLQLLQPLPAEIKGTKLLAHWNSGATITCIPESFLEDEQPIKKTLIKTIHGEKQQNVYYVTFKVKGRKVEAEVIASPYEYILLSPTDVPWLTQQPLQLTILVPLQEYQEKILSKTALPEDQKQQLKTLFVKYDNLWQHWENQVGHRKIRPHNIATGDYPPRPQKQYPINPKAKPSIQIVIDDLLKQGVLTPQNSTMNTPVYPVPKPDGRWRMVLDYREVNKTIPLTAAQNQHSAGILATIVRQKYKTTLDLANGFWAHPITPESYWLTAFTWQGKQYCWTRLPQGFLNSPALFNADVVDLLKEIPNVQVYVDDIYLSHDDPKEHVQQLEKVFQILLQAGYVVSLKKSEIGQKTVEFLGFNITKEGRGLTDTFKTKLLNITPPKDLKQLQSILGLLNFARNFIPNFAELVQPLYNLIAPAKGKYIEWSEENTKQLNMVIEALNTASNLEERLPEQRLVIKVNTSPSAGYVRYYNETGKKPIMYLNYVFSKAELKFSMLEKLLTTMHKALIKAMDLAMGQEILVYSPIVSMTKIQKTPLPERKALPIRWITWMTYLEDPRIQFHYDKTLPELKHIPDVYTSSQSPVKHPSQYEGVFYTDGSAIKSPDPTKSNNAGMGIVHATYKPEYQVLNQWSIPLGNHTAQMAEIAAVEFACKKALKIPGPVLVITDSFYVAESANKELPYWKSNGFVNNKKKPLKHISKWKSIAECLSMKPDITIQHEKGISLQIPVFILKGNALADKLATQGSYVVNAGKRTADGSEFEKRTADGSEFESPKKKAKVE

SEQ ID NO: 7553 - protein, 2176 aa, synthetic construct
MPAAKRVKLDGGDKKYSIGLDIGTNSVGWAVITDEYKVPSKKFKVLGNTDRHSIKKNLIGALLFDSGETAEATRLKRTARRRYTRRKNRICYLQEIFSNEMAKVDDSFFHRLEESFLVEEDKKHERHPIFGNIVDEVAYHEKYPTIYHLRKKLVDSTDKADLRLIYLALAHMIKFRGHFLIEGDLNPDNSDVDKLFIQLVQTYNQLFEENPINASGVDAKAILSARLSKSRRLENLIAQLPGEKKNGLFGNLIALSLGLTPNFKSNFDLAEDAKLQLSKDTYDDDLDNLLAQIGDQYADLFLAAKNLSDAILLSDILRVNTEITKAPLSASMIKRYDEHHQDLTLLKALVRQQLPEKYKEIFFDQSKNGYAGYIDGGASQEEFYKFIKPILEKMDGTEELLVKLNREDLLRKQRTFDNGSIPHQIHLGELHAILRRQEDFYPFLKDNREKIEKILTFRIPYYVGPLARGNSRFAWMTRKSEETITPWNFEEVVDKGASAQSFIERMTNFDKNLPNEKVLPKHSLLYEYFTVYNELTKVKYVTEGMRKPAFLSGEQKKAIVDLLFKTNRKVTVKQLKEDYFKKIECFDSVEISGVEDRFNASLGTYHDLLKIIKDKDFLDNEENEDILEDIVLTLTLFEDREMIEERLKTYAHLFDDKVMKQLKRRRYTGWGRLSRKLINGIRDKQSGKTILDFLKSDGFANRNFMQLIHDDSLTFKEDIQKAQVSGQGDSLHEHIANLAGSPAIKKGILQTVKVVDELVKVMGRHKPENIVIEMARENQTTQKGQKNSRERMKRIEEGIKELGSQILKEHPVENTQLQNEKLYLYYLQNGRDMYVDQELDINRLSDYDVDHIVPQSFLKDDSIDNKVLTRSDKARGKSDNVPSEEVVKKMKNYWRQLLNAKLITQRKFDNLTKAERGGLSELDKAGFIKRQLVETRQITKHVAQILDSRMNTKYDENDKLIREVKVITLKSKLVSDFRKDFQFYKVREINNYHHAHDAYLNAVVGTALIKKYPKLESEFVYGDYKVYDVRKMIAKSEQEIGKATAKYFFYSNIMNFFKTEITLANGEIRKRPLIETNGETGEIVWDKGRDFATVRKVLSMPQVNIVKKTEVQTGGFSKESILPKRNSDKLIARKKDWDPKKYGGFDSPTVAYSVLVVAKVEKGKSKKLKSVKELLGITIMERSSFEKNPIDFLEAKGYKEVKKDLIIKLPKYSLFELENGRKRMLASAGELQKGNELALPSKYVNFLYLASHYEKLKGSPEDNEQKQLFVEQHKHYLDEIIEQISEFSKRVILADANLDKVLSAYNKHRDKPIREQAENIIHLFTLTNLGAPAAFKYFDTTIDRKRYTSTKEVLDATLIHQSITGLYETRIDLSQLGGDGGPAPEAAAKGGGGGMNPLQLLQPLPAEIKGTKLLAHWNSGATITCIPESFLEDEQPIKKTLIKTIHGEKQQNVYYVTFKVKGRKVEAEVIASPYEYILLSPTDVPWLTQQPLQLTILVPLQEYQEKILSKTALPEDQKQQLKTLFVKYDNLWQHWENQVGHRKIRPHNIATGDYPPRPQKQYPINPKAKPSIQIVIDDLLKQGVLTPQNSTMNTPVYPVPKPDGRWRMVLDYREVNKTIPLTAAQNQHSAGILATIVRQKYKTTLDLANGFWAHPITPESYWLTAFTWQGKQYCWTRLPQGFLNSPALFNADVVDLLKEIPNVQVYVDDIYLSHDDPKEHVQQLEKVFQILLQAGYVVSLKKSEIGQKTVEFLGFNITKEGRGLTDTFKTKLLNITPPKDLKQLQSILGKLNFARNFIPNFAELVQPLYNLIAPAKGKYIEWSEENTKQLNMVIEALNTASNLEERLPEQRLVIKVNTSPSAGYVRYYNETGKKPIMYLNYVFSKAELKFSMLEKLLTTMHKALIKAMDLAMGQEILVYSPIVSMTKIQKTPLPERKALPIRWITWMTYLEDPRIQFHYDKTLPELKHIPDVYTSSQSPVKHPSQYEGVFYTDGSAIKSPDPTKSNNAGMGIVHATYKPEYQVLNQWSIPLGNHTAQMAEIAAVEFACKKALKIPGPVLVITDSFYVAESANKELPYWKSNGFVNNKKKPLKHISKWKSIAECLSMKPDITIQHEKGISLQIPVFILKGNALADKLATQGSYVVNAGKRTADGSEFEKRTADGSEFESPKKKAKVE

SEQ ID NO: 7554 - protein, 2094 aa, synthetic construct
MPAAKRVKLDGGDKKYSIGLDIGTNSVGWAVITDEYKVPSKKFKVLGNTDRHSIKKNLIGALLFDSGETAEATRLKRTARRRYTRRKNRICYLQEIFSNEMAKVDDSFFHRLEESFLVEEDKKHERHPIFGNIVDEVAYHEKYPTIYHLRKKLVDSTDKADLRLIYLALAHMIKFRGHFLIEGDLNPDNSDVDKLFIQLVQTYNQLFEENPINASGVDAKAILSARLSKSRRLENLIAQLPGEKKNGLFGNLIALSLGLTPNFKSNFDLAEDAKLQLSKDTYDDDLDNLLAQIGDQYADLFLAAKNLSDAILLSDILRVNTEITKAPLSASMIKRYDEHHQDLTLLKALVRQQLPEKYKEIFFDQSKNGYAGYIDGGASQEEFYKFIKPILEKMDGTEELLVKLNREDLLRKQRTFDNGSIPHQIHLGELHAILRRQEDFYPFLKDNREKIEKILTFRIPYYVGPLARGNSRFAWMTRKSEETITPWNFEEVVDKGASAQSFIERMTNFDKNLPNEKVLPKHSLLYEYFTVYNELTKVKYVTEGMRKPAFLSGEQKKAIVDLLFKTNRKVTVKQLKEDYFKKIECFDSVEISGVEDRFNASLGTYHDLLKIIKDKDFLDNEENEDILEDIVLTLTLFEDREMIEERLKTYAHLFDDKVMKQLKRRRYTGWGRLSRKLINGIRDKQSGKTILDFLKSDGFANRNFMQLIHDDSLTFKEDIQKAQVSGQGDSLHEHIANLAGSPAIKKGILQTVKVVDELVKVMGRHKPENIVIEMARENQTTQKGQKNSRERMKRIEEGIKELGSQILKEHPVENTQLQNEKLYLYYLQNGRDMYVDQELDINRLSDYDVDHIVPQSFLKDDSIDNKVLTRSDKARGKSDNVPSEEVVKKMKNYWRQLLNAKLITQRKFDNLTKAERGGLSELDKAGFIKRQLVETRQITKHVAQILDSRMNTKYDENDKLIREVKVITLKSKLVSDFRKDFQFYKVREINNYHHAHDAYLNAVVGTALIKKYPKLESEFVYGDYKVYDVRKMIAKSEQEIGKATAKYFFYSNIMNFFKTEITLANGEIRKRPLIETNGETGEIVWDKGRDFATVRKVLSMPQVNIVKKTEVQTGGFSKESILPKRNSDKLIARKKDWDPKKYGGFDSPTVAYSVLVVAKVEKGKSKKLKSVKELLGITIMERSSFEKNPIDFLEAKGYKEVKKDLIIKLPKYSLFELENGRKRMLASAGELQKGNELALPSKYVNFLYLASHYEKLKGSPEDNEQKQLFVEQHKHYLDEIIEQISEFSKRVILADANLDKVLSAYNKHRDKPIREQAENIIHLFTLTNLGAPAAFKYFDTTIDRKRYTSTKEVLDATLIHQSITGLYETRIDLSQLGGDGGPAPEAAAKGGGGGVLNLEEEYRLHEKPVPSSIDPSWLQLFPTVWAERAGMGLANQVPPVVVELRSGASPVAVRQYPMSKEAREGIRPHIQKFLDLGVLVPCRSPWNTPLLPVKKPGTNDYRPVQDLREINKRVQDIHPTVPNPYNLLSSLPPSYTWYSVLDLKDAFFCLRLHPNSQPLFAFEWKDPEKGNTGQLTWTRLPQGFKNSPTLFNEALHRDLAPFRALNPQVVLLQYVDDLLVAAPTYEDCKKGTQKLLQELSKLGYRVSAKKAQLCQREVTYLGYLLKEGKRWLTPARKATVMKIPVPTTPRQVREFLGKAGFCRLFIPGFASLAAPLYPLTKPSIPFIWTEEHQQAFDHIKKALLSAPALALPDLTKPFTLYIDERAGVARGVLTQTLGPWRRPVAYLSKKLDPVASGWPTCLKAVAAVALLLKDADKLTLGQNVTVIASHSLESIVRQPPDRWMTNARMTHYQSLLLNERVSFAPPAVLNPATLLPVESEATPVHRCSEILAEETGTRRDLEDQPLPGVPTWYTDGSSFITEGKRRAGAPIVDGKRTVWASSLPEGTSAQKAELVALTQALRLAEGKNINIYTDSRYAFATAHIHGAIYKQRGWLTSAGKDIKNKEEILALLEAIHLPRRVAIIHCPGHQRGSNPVATGNRRADEAAKQAALSTRVLAGTTKPAGKRTADGSEFEKRTADGSEFESPKKKAKVE

SEQ ID NO: 7555 - protein, 2127 aa, synthetic construct; identical to SEQ ID NO: 4537

SEQ ID NO: 7556 - protein, 2218 aa, synthetic construct
MPAAKRVKLDGGDKKYSIGLDIGTNSVGWAVITDEYKVPSKKFKVLGNTDRHSIKKNLIGALLFDSGETAEATRLKRTARRRYTRRKNRICYLQEIFSNEMAKVDDSFFHRLEESFLVEEDKKHERHPIFGNIVDEVAYHEKYPTIYHLRKKLVDSTDKADLRLIYLALAHMIKFRGHFLIEGDLNPDNSDVDKLFIQLVQTYNQLFEENPINASGVDAKAILSARLSKSRRLENLIAQLPGEKKNGLFGNLIALSLGLTPNFKSNFDLAEDAKLQLSKDTYDDDLDNLLAQIGDQYADLFLAAKNLSDAILLSDILRVNTEITKAPLSASMIKRYDEHHQDLTLLKALVRQQLPEKYKEIFFDQSKNGYAGYIDGGASQEEFYKFIKPILEKMDGTEELLVKLNREDLLRKQRTFDNGSIPHQIHLGELHAILRRQEDFYPFLKDNREKIEKILTFRIPYYVGPLARGNSRFAWMTRKSEETITPWNFEEVVDKGASAQSFIERMTNFDKNLPNEKVLPKHSLLYEYFTVYNELTKVKYVTEGMRKPAFLSGEQKKAIVDLLFKTNRKVTVKQLKEDYFKKIECFDSVEISGVEDRFNASLGTYHDLLKIIKDKDFLDNEENEDILEDIVLTLTLFEDREMIEERLKTYAHLFDDKVMKQLKRRRYTGWGRLSRKLINGIRDKQSGKTILDFLKSDGFANRNFMQLIHDDSLTFKEDIQKAQVSGQGDSLHEHIANLAGSPAIKKGILQTVKVVDELVKVMGRHKPENIVIEMARENQTTQKGQKNSRERMKRIEEGIKELGSQILKEHPVENTQLQNEKLYLYYLQNGRDMYVDQELDINRLSDYDVDHIVPQSFLKDDSIDNKVLTRSDKARGKSDNVPSEEVVKKMKNYWRQLLNAKLITQRKFDNLTKAERGGLSELDKAGFIKRQLVETRQITKHVAQILDSRMNTKYDENDKLIREVKVITLKSKLVSDFRKDFQFYKVREINNYHHAHDAYLNAVVGTALIKKYPKLESEFVYGDYKVYDVRKMIAKSEQEIGKATAKYFFYSNIMNFFKTEITLANGEIRKRPLIETNGETGEIVWDKGRDFATVRKVLSMPQVNIVKKTEVQTGGFSKESILPKRNSDKLIARKKDWDPKKYGGFDSPTVAYSVLVVAKVEKGKSKKLKSVKELLGITIMERSSFEKNPIDFLEAKGYKEVKKDLIIKLPKYSLFELENGRKRMLASAGELQKGNELALPSKYVNFLYLASHYEKLKGSPEDNEQKQLFVEQHKHYLDEIIEQISEFSKRVILADANLDKVLSAYNKHRDKPIREQAENIIHLFTLTNLGAPAAFKYFDTTIDRKRYTSTKEVLDATLIHQSITGLYETRIDLSQLGGDGGPAPEAAAKGGGGGTLGDQGSRGSDPLPEPRVTLTVEGIPTEFLVNTGAEHSVLTKPMGKMGSKRTVVAGATGSKVYPWTTKRLLKIGQKQVTHSFLVIPECPAPLLGRDLLTKLKAQIQFSTEGPQVTWEDRPAMCLVLNLEEEYRLHEKPVPPSIDPSWLQLFPMVWAEKAGMGLANQVPPVVVELKSDASPVAVRQYPMSKEAREGIRPHIQRFLDLGILVPCQSPWNTPLLPVKKPGTNDYRPVQDLREVNKRVQDIHPTVPNPYNLLSSLPPSHTWYSVLDLKDAFFCLKLHPNSQPLFAFEWRDPEKGNTGQLTWTRLPQGFKNSPTLFNEALHRDLASFRALNPQVVMLQYVDDLLVAAPTYRDCKEGTRRLLQELSKLGYRVSAKKAQLCREEVTYLGYLLKGGKRWLTPARKATVMKIPTPTTPRQVREFLGTAGFCRLWIPGFASLAAPLYPLTRPKVPFTWTEAHQEAFGRIKEALLSAPALALPDLTKPFALYVDEKEGVARGVLTQTLGPWRRPVAYLSKKLDPVASGWPTCLKAIAAVALLLKDADKLTLGQNVLVIAPHNLESIVRQPPDRWMTNARMTHYQSLLLNERVSFAPPAILNPATLLPVESDDTPIHICSEILAEETGTRPDLRDQPLPGVPAWYTDGSSFIMDGRRQAGAAIVDNKRTVWASNLPEGTSAQKAELIALTQALRLAEGKSINIYTDSRYAFATAHVHGAIYKQRGWLTSAGKDIKNKEEILALLEAIHLPKRVAIIHCPGHQRGTDPVATGNRKADEAAKQAAQSTRILTETTKNAGKRTADGSEFEKRTADGSEFESPKKKAKVE

SEQ ID NO: 7557 - protein, 2218 aa, synthetic construct
MPAAKRVKLDGGDKKYSIGLDIGTNSVGWAVITDEYKVPSKKFKVLGNTDRHSIKKNLIGALLFDSGETAEATRLKRTARRRYTRRKNRICYLQEIFSNEMAKVDDSFFHRLEESFLVEEDKKHERHPIFGNIVDEVAYHEKYPTIYHLRKKLVDSTDKADLRLIYLALAHMIKFRGHFLIEGDLNPDNSDVDKLFIQLVQTYNQLFEENPINASGVDAKAILSARLSKSRRLENLIAQLPGEKKNGLFGNLIALSLGLTPNFKSNFDLAEDAKLQLSKDTYDDDLDNLLAQIGDQYADLFLAAKNLSDAILLSDILRVNTEITKAPLSASMIKRYDEHHQDLTLLKALVRQQLPEKYKEIFFDQSKNGYAGYIDGGASQEEFYKFIKPILEKMDGTEELLVKLNREDLLRKQRTFDNGSIPHQIHLGELHAILRRQEDFYPFLKDNREKIEKILTFRIPYYVGPLARGNSRFAWMTRKSEETITPWNFEEVVDKGASAQSFIERMTNFDKNLPNEKVLPKHSLLYEYFTVYNELTKVKYVTEGMRKPAFLSGEQKKAIVDLLFKTNRKVTVKQLKEDYFKKIECFDSVEISGVEDRFNASLGTYHDLLKIIKDKDFLDNEENEDILEDIVLTLTLFEDREMIEERLKTYAHLFDDKVMKQLKRRRYTGWGRLSRKLINGIRDKQSGKTILDFLKSDGFANRNFMQLIHDDSLTFKEDIQKAQVSGQGDSLHEHIANLAGSPAIKKGILQTVKVVDELVKVMGRHKPENIVIEMARENQTTQKGQKNSRERMKRIEEGIKELGSQILKEHPVENTQLQNEKLYLYYLQNGRDMYVDQELDINRLSDYDVDHIVPQSFLKDDSIDNKVLTRSDKARGKSDNVPSEEVVKKMKNYWRQLLNAKLITQRKFDNLTKAERGGLSELDKAGFIKRQLVETRQITKHVAQILDSRMNTKYDENDKLIREVKVITLKSKLVSDFRKDFQFYKVREINNYHHAHDAYLNAVVGTALIKKYPKLESEFVYGDYKVYDVRKMIAKSEQEIGKATAKYFFYSNIMNFFKTEITLANGEIRKRPLIETNGETGEIVWDKGRDFATVRKVLSMPQVNIVKKTEVQTGGFSKESILPKRNSDKLIARKKDWDPKKYGGFDSPTVAYSVLVVAKVEKGKSKKLKSVKELLGITIMERSSFEKNPIDFLEAKGYKEVKKDLIIKLPKYSLFELENGRKRMLASAGELQKGNELALPSKYVNFLYLASHYEKLKGSPEDNEQKQLFVEQHKHYLDEIIEQISEFSKRVILADANLDKVLSAYNKHRDKPIREQAENIIHLFTLTNLGAPAAFKYFDTTIDRKRYTSTKEVLDATLIHQSITGLYETRIDLSQLGGDGGPAPEAAAKGGGGGTLGDQGSRGSDPLPEPRVTLTVEGIPTEFLVNTGAEHSVLTKPMGKMGSKRTVVAGATGSKVYPWTTKRLLKIGQKQVTHSFLVIPECPAPLLGRDLLTKLKAQIQFSTEGPQVTWEDRPAMCLVLNLEEEYRLHEKPVPPSIDPSWLQLFPMVWAEKAGMGLANQVPPVVVELKSDASPVAVRQYPMSKEAREGIRPHIQRFLDLGILVPCQSPWNTPLLPVKKPGTNDYRPVQDLREVNKRVQDIHPTVPNPYNLLSSLPPSHTWYSVLDLKDAFFCLKLHPNSQPLFAFEWRDPEKGNTGQLTWTRLPQGFKNSPTLFNEALHRDLASFRALNPQVVMLQYVDDLLVAAPTYRDCKEGTRRLLQELSKLGYRVSAKKAQLCREEVTYLGYLLKGGKRWLTPARKATVMKIPTPTTPRQVREFLGKAGFCRLFIPGFASLAAPLYPLTRPKVPFTWTEAHQEAFGRIKEALLSAPALALPDLTKPFALYVDEKEGVARGVLTQTLGPWRRPVAYLSKKLDPVASGWPTCLKAIAAVALLLKDADKLTLGQNVLVIAPHNLESIVRQPPDRWMTNARMTHYQSLLLNERVSFAPPAILNPATLLPVESDDTPIHICSEILAEETGTRPDLRDQPLPGVPAWYTDGSSFIMDGRRQAGAAIVDNKRTVWASNLPEGTSAQKAELIALTQALRLAEGKSINIYTDSRYAFATAHVHGAIYKQRGWLTSAGKDIKNKEEILALLEAIHLPKRVAIIHCPGHQRGTDPVATGNRKADEAAKQAAQSTRILTETTKNAGKRTADGSEFEKRTADGSEFESPKKKAKVE

SEQ ID NO: 7558 - protein, 2096 aa, synthetic construct
MPAAKRVKLDGGDKKYSIGLDIGTNSVGWAVITDEYKVPSKKFKVLGNTDRHSIKKNLIGALLFDSGETAEATRLKRTARRRYTRRKNRICYLQEIFSNEMAKVDDSFFHRLEESFLVEEDKKHERHPIFGNIVDEVAYHEKYPTIYHLRKKLVDSTDKADLRLIYLALAHMIKFRGHFLIEGDLNPDNSDVDKLFIQLVQTYNQLFEENPINASGVDAKAILSARLSKSRRLENLIAQLPGEKKNGLFGNLIALSLGLTPNFKSNFDLAEDAKLQLSKDTYDDDLDNLLAQIGDQYADLFLAAKNLSDAILLSDILRVNTEITKAPLSASMIKRYDEHHQDLTLLKALVRQQLPEKYKEIFFDQSKNGYAGYIDGGASQEEFYKFIKPILEKMDGTEELLVKLNREDLLRKQRTFDNGSIPHQIHLGELHAILRRQEDFYPFLKDNREKIEKILTFRIPYYVGPLARGNSRFAWMTRKSEETITPWNFEEVVDKGASAQSFIERMTNFDKNLPNEKVLPKHSLLYEYFTVYNELTKVKYVTEGMRKPAFLSGEQKKAIVDLLFKTNRKVTVKQLKEDYFKKIECFDSVEISGVEDRFNASLGTYHDLLKIIKDKDFLDNEENEDILEDIVLTLTLFEDREMIEERLKTYAHLFDDKVMKQLKRRRYTGWGRLSRKLINGIRDKQSGKTILDFLKSDGFANRNFMQLIHDDSLTFKEDIQKAQVSGQGDSLHEHIANLAGSPAIKKGILQTVKVVDELVKVMGRHKPENIVIEMARENQTTQKGQKNSRERMKRIEEGIKELGSQILKEHPVENTQLQNEKLYLYYLQNGRDMYVDQELDINRLSDYDVDHIVPQSFLKDDSIDNKVLTRSDKARGKSDNVPSEEVVKKMKNYWRQLLNAKLITQRKFDNLTKAERGGLSELDKAGFIKRQLVETRQITKHVAQILDSRMNTKYDENDKLIREVKVITLKSKLVSDFRKDFQFYKVREINNYHHAHDAYLNAVVGTALIKKYPKLESEFVYGDYKVYDVRKMIAKSEQEIGKATAKYFFYSNIMNFFKTEITLANGEIRKRPLIETNGETGEIVWDKGRDFATVRKVLSMPQVNIVKKTEVQTGGFSKESILPKRNSDKLIARKKDWDPKKYGGFDSPTVAYSVLVVAKVEKGKSKKLKSVKELLGITIMERSSFEKNPIDFLEAKGYKEVKKDLIIKLPKYSLFELENGRKRMLASAGELQKGNELALPSKYVNFLYLASHYEKLKGSPEDNEQKQLFVEQHKHYLDEIIEQISEFSKRVILADANLDKVLSAYNKHRDKPIREQAENIIHLFTLTNLGAPAAFKYFDTTIDRKRYTSTKEVLDATLIHQSITGLYETRIDLSQLGGDGGPAPEAAAKGGGGGTLNIEDEYRLHETSKGPDVPLGSTWLSDFPQAWAETGGMGLAVRQAPLIIPLKATSTPVSIKQYPMSQEARLGIKPHIQRLLDQGILVPCQSPWNTPLLPVKKPGTNDYRPVQDLREVNKRVEDIHPTVPNPYNLLSGLPPSHQWYTVLDLKDAFFCLRLHPTSQSLFAFEWRDPEMGISGQLTWTRLPQGFKNSPTLFNEALHRDLADFRIQHPDLILLQYVDDLLLAATSELDCQQGTRALLQTLGDLGYRASAKKAQICQKQVKYLGYLLKEGQRWLTEARKETVMGQPTPKTPRQLREFLGKAGFCRLFIPGFAEMAAPLYPLTKPGTLFEWGPDQQKAYQEIKQALLTAPALGLPDLTKPFELFVDEKQGYAKGVLTQKLGPWRRPVAYLSKKLDPVAAGWPPCLRMVAAIAVLTKDAGKLTMGQPLVILAPHAVEALVKQPPDRWLSNARMTHYQALLLDTDRVQFGPIVALNPATLLPLPEEGLQHDCLDILAEAHGTRPDLTDQPLPDADHTWYTDGSSFLQEGQRKAGAAVTTETEVVWAKALPAGTSAQRAELIALTQALKMAEGKKLNVYTDSRYAFATAHIHGEIYRRRGWLTSEGKEIKNKDEILALLKALFLPKRLSIIHCPGHQKGNRAEARGNRMADQAAREVATRETPETSTLLAGKRTADGSEFEKRTADGSEFESPKKKAKVE

SEQ ID NO: 7559 - protein, 2096 aa, synthetic construct
MPAAKRVKLDGGDKKYSIGLDIGTNSVGWAVITDEYKVPSKKFKVLGNTDRHSIKKNLIGALLFDSGETAEATRLKRTARRRYTRRKNRICYLQEIFSNEMAKVDDSFFHRLEESFLVEEDKKHERHPIFGNIVDEVAYHEKYPTIYHLRKKLVDSTDKADLRLIYLALAHMIKFRGHFLIEGDLNPDNSDVDKLFIQLVQTYNQLFEENPINASGVDAKAILSARLSKSRRLENLIAQLPGEKKNGLFGNLIALSLGLTPNFKSNFDLAEDAKLQLSKDTYDDDLDNLLAQIGDQYADLFLAAKNLSDAILLSDILRVNTEITKAPLSASMIKRYDEHHQDLTLLKALVRQQLPEKYKEIFFDQSKNGYAGYIDGGASQEEFYKFIKPILEKMDGTEELLVKLNREDLLRKQRTFDNGSIPHQIHLGELHAILRRQEDFYPFLKDNREKIEKILTFRIPYYVGPLARGNSRFAWMTRKSEETITPWNFEEVVDKGASAQSFIERMTNFDKNLPNEKVLPKHSLLYEYFTVYNELTKVKYVTEGMRKPAFLSGEQKKAIVDLLFKTNRKVTVKQLKEDYFKKIECFDSVEISGVEDRFNASLGTYHDLLKIIKDKDFLDNEENEDILEDIVLTLTLFEDREMIEERLKTYAHLFDDKVMKQLKRRRYTGWGRLSRKLINGIRDKQSGKTILDFLKSDGFANRNFMQLIHDDSLTFKEDIQKAQVSGQGDSLHEHIANLAGSPAIKKGILQTVKVVDELVKVMGRHKPENIVIEMARENQTTQKGQKNSRERMKRIEEGIKELGSQILKEHPVENTQLQNEKLYLYYLQNGRDMYVDQELDINRLSDYDVDHIVPQSFLKDDSIDNKVLTRSDKARGKSDNVPSEEVVKKMKNYWRQLLNAKLITQRKFDNLTKAERGGLSELDKAGFIKRQLVETRQITKHVAQILDSRMNTKYDENDKLIREVKVITLKSKLVSDFRKDFQFYKVREINNYHHAHDAYLNAVVGTALIKKYPKLESEFVYGDYKVYDVRKMIAKSEQEIGKATAKYFFYSNIMNFFKTEITLANGEIRKRPLIETNGETGEIVWDKGRDFATVRKVLSMPQVNIVKKTEVQTGGFSKESILPKRNSDKLIARKKDWDPKKYGGFDSPTVAYSVLVVAKVEKGKSKKLKSVKELLGITIMERSSFEKNPIDFLEAKGYKEVKKDLIIKLPKYSLFELENGRKRMLASAGELQKGNELALPSKYVNFLYLASHYEKLKGSPEDNEQKQLFVEQHKHYLDEIIEQISEFSKRVILADANLDKVLSAYNKHRDKPIREQAENIIHLFTLTNLGAPAAFKYFDTTIDRKRYTSTKEVLDATLIHQSITGLYETRIDLSQLGGDGGPAPEAAAKGGGGGTLNIEDEHRLHETSKEPDVSLGSTWLSDFPQAWAETGGMGLAVRQAPLIIPLKATSTPVSIKQYPMSQEARLGIKPHIQRLLDQGILVPCQSPWNTPLLPVKKPGTNDYRPVQDLREVNKRVEDIHPTVPNPYNLLSGLPPSHQWYTVLDLKDAFFCLRLHPTSQPLFAFEWRDPEMGISGQLTWTRLPQGFKNSPTLFDEALHRDLADFRIQHPDLILLQYVDDLLLAATSELDCQQGTRALLQTLGNLGYRASAKKAQICQKQVKYLGYLLKEGQRWLTEARKETVMGQPTPKTPRQLREFLGTAGFCRLWIPGFAEMAAPLYPLTKTGTLFNWGPDQQKAYQEIKQALLTAPALGLPDLTKPFELFVDEKQGYAKGVLTQKLGPWRRPVAYLSKKLDPVAAGWPPCLRMVAAIAVLTKDAGKLTMGQPLVILAPHAVEALVKQPPDRWLSNARMTHYQALLLDTDRVQFGPVVALNPATLLPLPEEGLQHNCLDILAEAHGTRPDLTDQPLPDADHTWYTDGSSLLQEGQRKAGAAVTTETEVIWAKALPAGTSAQRAELIALTQALKMAEGKKLNVYTDSRYAFATAHIHGEIYRRRGLLTSEGKEIKNKDEILALLKALFLPKRLSIIHCPGHQKGHSAEARGNRMADQAARKAAITETPDTSTLLAGKRTADGSEFEKRTADGSEFESPKKKAKVE

SEQ ID NO: 7560 - protein, 2096 aa, synthetic construct; identical to SEQ ID NO: 7559

SEQ ID NO: 7561 - protein, 2116 aa, synthetic construct
MPAAKRVKLDGGDKKYSIGLDIGTNSVGWAVITDEYKVPSKKFKVLGNTDRHSIKKNLIGALLFDSGETAEATRLKRTARRRYTRRKNRICYLQEIFSNEMAKVDDSFFHRLEESFLVEEDKKHERHPIFGNIVDEVAYHEKYPTIYHLRKKLVDSTDKADLRLIYLALAHMIKFRGHFLIEGDLNPDNSDVDKLFIQLVQTYNQLFEENPINASGVDAKAILSARLSKSRRLENLIAQLPGEKKNGLFGNLIALSLGLTPNFKSNFDLAEDAKLQLSKDTYDDDLDNLLAQIGDQYADLFLAAKNLSDAILLSDILRVNTEITKAPLSASMIKRYDEHHQDLTLLKALVRQQLPEKYKEIFFDQSKNGYAGYIDGGASQEEFYKFIKPILEKMDGTEELLVKLNREDLLRKQRTFDNGSIPHQIHLGELHAILRRQEDFYPFLKDNREKIEKILTFRIPYYVGPLARGNSRFAWMTRKSEETITPWNFEEVVDKGASAQSFIERMTNFDKNLPNEKVLPKHSLLYEYFTVYNELTKVKYVTEGMRKPAFLSGEQKKAIVDLLFKTNRKVTVKQLKEDYFKKIECFDSVEISGVEDRFNASLGTYHDLLKIIKDKDFLDNEENEDILEDIVLTLTLFEDREMIEERLKTYAHLFDDKVMKQLKRRRYTGWGRLSRKLINGIRDKQSGKTILDFLKSDGFANRNFMQLIHDDSLTFKEDIQKAQVSGQGDSLHEHIANLAGSPAIKKGILQTVKVVDELVKVMGRHKPENIVIEMARENQTTQKGQKNSRERMKRIEEGIKELGSQILKEHPVENTQLQNEKLYLYYLQNGRDMYVDQELDINRLSDYDVDHIVPQSFLKDDSIDNKVLTRSDKARGKSDNVPSEEVVKKMKNYWRQLLNAKLITQRKFDNLTKAERGGLSELDKAGFIKRQLVETRQITKHVAQILDSRMNTKYDENDKLIREVKVITLKSKLVSDFRKDFQFYKVREINNYHHAHDAYLNAVVGTALIKKYPKLESEFVYGDYKVYDVRKMIAKSEQEIGKATAKYFFYSNIMNFFKTEITLANGEIRKRPLIETNGETGEIVWDKGRDFATVRKVLSMPQVNIVKKTEVQTGGFSKESILPKRNSDKLIARKKDWDPKKYGGFDSPTVAYSVLVVAKVEKGKSKKLKSVKELLGITIMERSSFEKNPIDFLEAKGYKEVKKDLIIKLPKYSLFELENGRKRMLASAGELQKGNELALPSKYVNFLYLASHYEKLKGSPEDNEQKQLFVEQHKHYLDEIIEQISEFSKRVILADANLDKVLSAYNKHRDKPIREQAENIIHLFTLTNLGAPAAFKYFDTTIDRKRYTSTKEVLDATLIHQSITGLYETRIDLSQLGGDGGPAPEAAAKGGGGGVQEISDSRPMLHIYLNGRRFLGLLDTGADKTCIAGRDWPANWPIHQTESSLQGLGMACGVARSSQPLRWQHEDKSGIIHPFVIPTLPFTLWGRDIMKDIKVRLMTDSPDDSQDLMIGAIESNLFADQISWKSDQPVWLNQWPLKQEKLQALQQLVTEQLQLGHLEESNSPWNTPVFVIKKKSGKWRLLQDLRAVNATMHDMGALQPGLPSPVAVPKGWEIIIIDLQDCFFNIKLHPEDCKRFAFSVPSPNFKRPYQRFQWKVLPQGMKNSPTLCQKFVDKAILTVRDKYQDSYIVHYMDDILLAHPSRSIVDEILTSMIQALNKHGLVVSTEKIQKYDNLKYLGTHIQGDSVSYQKLQIRTDKLRTLNDFQKLLGNINWIRPFLKLTTGELKPLFEILNGDSNPISTRKLTPEACKALQLMNERLSTARVKRLDLSQPWSLCILKTEYTPTACLWQDGVVEWIHLPHISPKVITPYDIFCTQLIIKGRHRSKELFSKDPDYIVVPYTKVQFDLLLQEKEDWPISLLGFLGEVHFHLPKDPLLTFTLQTAIIFPHMTSTTPLEKGIVIFTDGSANGRSVTYIQGREPIIKENTQNTAQQAEIVAVITAFEEVSQPFNLYTDSKYVTGLFPEIETATLSPRTKIYTELKHLQRLIHKRQEKFYIGHIRGHTGLPGPLAQGNAYADSLTRILTAAGKRTADGSEFEKRTADGSEFESPKKKAKVE

SEQ ID NO: 7562 - protein, 2090 aa, synthetic construct
MPAAKRVKLDGGDKKYSIGLDIGTNSVGWAVITDEYKVPSKKFKVLGNTDRHSIKKNLIGALLFDSGETAEATRLKRTARRRYTRRKNRICYLQEIFSNEMAKVDDSFFHRLEESFLVEEDKKHERHPIFGNIVDEVAYHEKYPTIYHLRKKLVDSTDKADLRLIYLALAHMIKFRGHFLIEGDLNPDNSDVDKLFIQLVQTYNQLFEENPINASGVDAKAILSARLSKSRRLENLIAQLPGEKKNGLFGNLIALSLGLTPNFKSNFDLAEDAKLQLSKDTYDDDLDNLLAQIGDQYADLFLAAKNLSDAILLSDILRVNTEITKAPLSASMIKRYDEHHQDLTLLKALVRQQLPEKYKEIFFDQSKNGYAGYIDGGASQEEFYKFIKPILEKMDGTEELLVKLNREDLLRKQRTFDNGSIPHQIHLGELHAILRRQEDFYPFLKDNREKIEKILTFRIPYYVGPLARGNSRFAWMTRKSEETITPWNFEEVVDKGASAQSFIERMTNFDKNLPNEKVLPKHSLLYEYFTVYNELTKVKYVTEGMRKPAFLSGEQKKAIVDLLFKTNRKVTVKQLKEDYFKKIECFDSVEISGVEDRFNASLGTYHDLLKIIKDKDFLDNEENEDILEDIVLTLTLFEDREMIEERLKTYAHLFDDKVMKQLKRRRYTGWGRLSRKLINGIRDKQSGKTILDFLKSDGFANRNFMQLIHDDSLTFKEDIQKAQVSGQGDSLHEHIANLAGSPAIKKGILQTVKVVDELVKVMGRHKPENIVIEMARENQTTQKGQKNSRERMKRIEEGIKELGSQILKEHPVENTQLQNEKLYLYYLQNGRDMYVDQELDINRLSDYDVDHIVPQSFLKDDSIDNKVLTRSDKARGKSDNVPSEEVVKKMKNYWRQLLNAKLITQRKFDNLTKAERGGLSELDKAGFIKRQLVETRQITKHVAQILDSRMNTKYDENDKLIREVKVITLKSKLVSDFRKDFQFYKVREINNYHHAHDAYLNAVVGTALIKKYPKLESEFVYGDYKVYDVRKMIAKSEQEIGKATAKYFFYSNIMNFFKTEITLANGEIRKRPLIETNGETGEIVWDKGRDFATVRKVLSMPQVNIVKKTEVQTGGFSKESILPKRNSDKLIARKKDWDPKKYGGFDSPTVAYSVLVVAKVEKGKSKKLKSVKELLGITIMERSSFEKNPIDFLEAKGYKEVKKDLIIKLPKYSLFELENGRKRMLASAGELQKGNELALPSKYVNFLYLASHYEKLKGSPEDNEQKQLFVEQHKHYLDEIIEQISEFSKRVILADANLDKVLSAYNKHRDKPIREQAENIIHLFTLTNLGAPAAFKYFDTTIDRKRYTSTKEVLDATLIHQSITGLYETRIDLSQLGGDGGPAPEAAAKGGGGGTLQLDDEYRLYSPLVKPDQNIQFWLEQFPQAWAETAGMGLAKQVPPQVIQLKASATPVSVRQYPLSKEAQEGIRPHVQRLIQQGILVPVQSPWNTPLLPVRKPGTNDYRPVQDLREVNKRVQDIHPTVPNPYNLLCALPPQRSWYTVLDLKDAFFCLRLHPTSQPLFAFEWRDPGTGRTGQLTWTRLPQGFKNSPTIFDEALHRDLANFRIQHPQVTLLQYVDDLLLAGATKQDCLEGTKALLLELSDLGYRASAKKAQICRREVTYLGYSLRDGQRWLTEARKKTVVQIPAPTTAKQVREFLGTAGFCRLWIPGFATLAAPLYPLTKEKGEFSWAPEHQKAFDAIKKALLSAPALALPDVTKPFTLYVDERKGVARGVLTQTLGPWRRPVAYLSKKLDPVASGWPVCLKAIAAVAILVKDADKLTLGQNITVIAPHALENIVRQPPDRWMTNARMTHYQSLLLTERVTFAPPAALNPATLLPEETDEPVTHDCHQLLIEETGVRKDLTDIPLTGEVLTWFTDGSSYVVEGKRMAGAAVVDGTRTIWASSLPEGTSAQKAELMALTQALRLAEGKSINIYTDSRYAFATAHVHGAIYKQRGLLTSAGREIKNKEEILSLLEALHLPKRLAIIHCPGHQKAKDPISRGNQMADRVAKQAAQGVNLLAGKRTADGSEFEKRTADGSEFESPKKKAKVE

SEQ ID NO: 7563 - protein, 2176 aa, synthetic construct
MPAAKRVKLDGGDKKYSIGLDIGTNSVGWAVITDEYKVPSKKFKVLGNTDRHSIKKNLIGALLFDSGETAEATRLKRTARRRYTRRKNRICYLQEIFSNEMAKVDDSFFHRLEESFLVEEDKKHERHPIFGNIVDEVAYHEKYPTIYHLRKKLVDSTDKADLRLIYLALAHMIKFRGHFLIEGDLNPDNSDVDKLFIQLVQTYNQLFEENPINASGVDAKAILSARLSKSRRLENLIAQLPGEKKNGLFGNLIALSLGLTPNFKSNFDLAEDAKLQLSKDTYDDDLDNLLAQIGDQYADLFLAAKNLSDAILLSDILRVNTEITKAPLSASMIKRYDEHHQDLTLLKALVRQQLPEKYKEIFFDQSKNGYAGYIDGGASQEEFYKFIKPILEKMDGTEELLVKLNREDLLRKQRTFDNGSIPHQIHLGELHAILRRQEDFYPFLKDNREKIEKILTFRIPYYVGPLARGNSRFAWMTRKSEETITPWNFEEVVDKGASAQSFIERMTNFDKNLPNEKVLPKHSLLYEYFTVYNELTKVKYVTEGMRKPAFLSGEQKKAIVDLLFKTNRKVTVKQLKEDYFKKIECFDSVEISGVEDRFNASLGTYHDLLKIIKDKDFLDNEENEDILEDIVLTLTLFEDREMIEERLKTYAHLFDDKVMKQLKRRRYTGWGRLSRKLINGIRDKQSGKTILDFLKSDGFANRNFMQLIHDDSLTFKEDIQKAQVSGQGDSLHEHIANLAGSPAIKKGILQTVKVVDELVKVMGRHKPENIVIEMARENQTTQKGQKNSRERMKRIEEGIKELGSQILKEHPVENTQLQNEKLYLYYLQNGRDMYVDQELDINRLSDYDVDHIVPQSFLKDDSIDNKVLTRSDKARGKSDNVPSEEVVKKMKNYWRQLLNAKLITQRKFDNLTKAERGGLSELDKAGFIKRQLVETRQITKHVAQILDSRMNTKYDENDKLIREVKVITLKSKLVSDFRKDFQFYKVREINNYHHAHDAYLNAVVGTALIKKYPKLESEFVYGDYKVYDVRKMIAKSEQEIGKATAKYFFYSNIMNFFKTEITLANGEIRKRPLIETNGETGEIVWDKGRDFATVRKVLSMPQVNIVKKTEVQTGGFSKESILPKRNSDKLIARKKDWDPKKYGGFDSPTVAYSVLVVAKVEKGKSKKLKSVKELLGITIMERSSFEKNPIDFLEAKGYKEVKKDLIIKLPKYSLFELENGRKRMLASAGELQKGNELALPSKYVNFLYLASHYEKLKGSPEDNEQKQLFVEQHKHYLDEIIEQISEFSKRVILADANLDKVLSAYNKHRDKPIREQAENIIHLFTLTNLGAPAAFKYFDTTIDRKRYTSTKEVLDATLIHQSITGLYETRIDLSQLGGDGGPAPEAAAKGGGGGMDPLQLLQPLEAEIKGTKLKAHWNSGATITCVPEAFLEDERPIQTMLIKTIHGEKQQDVYYLTFKVQGRKVEAEVLASPYDYILLNPSDVPWLMKKPLQLTVLVPLHEYQERLLQQTALPKEQKELLQKLFLKYDALWQHWENQVGHRRIKPHNIATGTLAPRPQKQYPINPKAKPSIQIVIDDLLKQGVLIQQNSTMNTPVYPVPKPDGKWRMVLDYREVNKTIPLIAAQNQHSAGILSSIYRGKYKTTLDLTNGFWAHPITPESYWLTAFTWQGKQYCWTRLPQGFLNSPALFTADVVDLLKEIPNVQAYVDDIYISHDDPQEHLEQLEKIFSILLNAGYVVSLKKSEIAQREVEFLGFNITKEGRGLTDTFKQKLLNITPPKDLKQLQSILGLLNFARNFIPNYSELVKPLYTIVANANGKFISWTEDNSNQLQHIISVLNQADNLEERNPETRLIIKVNSSPSAGYIRYYNEGSKRPIMYVNYIFSKAEAKFTQTEKLLTTMHKGLIKAMDLAMGQEILVYSPIVSMTKIQRTPLPERKALPVRWITWMTYLEDPRIQFHYDKSLPELQQIPNVTEDVIAKTKHPSEFAMVFYTDGSAIKHPDVNKSHSAGMGIAQVQFIPEYKIVHQWSIPLGDHTAQLAEIAAVEFACKKALKISGPVLIVTDSFYVAESANKELPYWKSNGFLNNKKKPLRHVSKWKSIAECLQLKPDIIIMHEKGHQQPMTTLHTEGNNLADKLATQGSYVVHAGKRTADGSEFEKRTADGSEFESPKKKAKVE

SEQ ID NO: 7564 - protein, 2176 aa, synthetic construct
MPAAKRVKLDGGDKKYSIGLDIGTNSVGWAVITDEYKVPSKKFKVLGNTDRHSIKKNLIGALLFDSGETAEATRLKRTARRRYTRRKNRICYLQEIFSNEMAKVDDSFFHRLEESFLVEEDKKHERHPIFGNIVDEVAYHEKYPTIYHLRKKLVDSTDKADLRLIYLALAHMIKFRGHFLIEGDLNPDNSDVDKLFIQLVQTYNQLFEENPINASGVDAKAILSARLSKSRRLENLIAQLPGEKKNGLFGNLIALSLGLTPNFKSNFDLAEDAKLQLSKDTYDDDLDNLLAQIGDQYADLFLAAKNLSDAILLSDILRVNTEITKAPLSASMIKRYDEHHQDLTLLKALVRQQLPEKYKEIFFDQSKNGYAGYIDGGASQEEFYKFIKPILEKMDGTEELLVKLNREDLLRKQRTFDNGSIPHQIHLGELHAILRRQEDFYPFLKDNREKIEKILTFRIPYYVGPLARGNSRFAWMTRKSEETITPWNFEEVVDKGASAQSFIERMTNFDKNLPNEKVLPKHSLLYEYFTVYNELTKVKYVTEGMRKPAFLSGEQKKAIVDLLFKTNRKVTVKQLKEDYFKKIECFDSVEISGVEDRFNASLGTYHDLLKIIKDKDFLDNEENEDILEDIVLTLTLFEDREMIEERLKTYAHLFDDKVMKQLKRRRYTGWGRLSRKLINGIRDKQSGKTILDFLKSDGFANRNFMQLIHDDSLTFKEDIQKAQVSGQGDSLHEHIANLAGSPAIKKGILQTVKVVDELVKVMGRHKPENIVIEMARENQTTQKGQKNSRERMKRIEEGIKELGSQILKEHPVENTQLQNEKLYLYYLQNGRDMYVDQELDINRLSDYDVDHIVPQSFLKDDSIDNKVLTRSDKARGKSDNVPSEEVVKKMKNYWRQLLNAKLITQRKFDNLTKAERGGLSELDKAGFIKRQLVETRQITKHVAQILDSRMNTKYDENDKLIREVKVITLKSKLVSDFRKDFQFYKVREINNYHHAHDAYLNAVVGTALIKKYPKLESEFVYGDYKVYDVRKMIAKSEQEIGKATAKYFFYSNIMNFFKTEITLANGEIRKRPLIETNGETGEIVWDKGRDFATVRKVLSMPQVNIVKKTEVQTGGFSKESILPKRNSDKLIARKKDWDPKKYGGFDSPTVAYSVLVVAKVEKGKSKKLKSVKELLGITIMERSSFEKNPIDFLEAKGYKEVKKDLIIKLPKYSLFELENGRKRMLASAGELQKGNELALPSKYVNFLYLASHYEKLKGSPEDNEQKQLFVEQHKHYLDEIIEQISEFSKRVILADANLDKVLSAYNKHRDKPIREQAENIIHLFTLTNLGAPAAFKYFDTTIDRKRYTSTKEVLDATLIHQSITGLYETRIDLSQLGGDGGPAPEAAAKGGGGGMDPLQLLQPLEAEIKGTKLKAHWNSGATITCVPEAFLEDERPIQTMLIKTIHGEKQQDVYYLTFKVQGRKVEAEVLASPYDYILLNPSDVPWLMKKPLQLTVLVPLHEYQERLLQQTALPKEQKELLQKLFLKYDALWQHWENQVGHRRIKPHNIATGTLAPRPQKQYPINPKAKPSIQIVIDDLLKQGVLIQQNSTMNTPVYPVPKPDGKWRMVLDYREVNKTIPLIAAQNQHSAGILSSIYRGKYKTTLDLTNGFWAHPITPESYWLTAFTWQGKQYCWTRLPQGFLNSPALFNADVVDLLKEIPNVQAYVDDIYISHDDPQEHLEQLEKIFSILLNAGYVVSLKKSEIAQREVEFLGFNITKEGRGLTDTFKQKLLNITPPKDLKQLQSILGLLNFARNFIPNYSELVKPLYTIVAPANGKFISWTEDNSNQLQHIISVLNQADNLEERNPETRLIIKVNSSPSAGYIRYYNEGSKRPIMYVNYIFSKAEAKFTQTEKLLTTMHKGLIKAMDLAMGQEILVYSPIVSMTKIQRTPLPERKALPVRWITWMTYLEDPRIQFHYDKSLPELQQIPNVTEDVIAKTKHPSEFAMVFYTDGSAIKHPDVNKSHSAGMGIAQVQFIPEYKIVHQWSIPLGDHTAQLAEIAAVEFACKKALKISGPVLIVTDSFYVAESANKELPYWKSNGFLNNKKKPLRHVSKWKSIAECLQLKPDIIIMHEKGHQQPMTTLHTEGNNLADKLATQGSYVVHAGKRTADGSEFEKRTADGSEFESPKKKAKVE

SEQ ID NO: 7565 - protein, 2087 aa, synthetic construct
MPAAKRVKLDGGDKKYSIGLDIGTNSVGWAVITDEYKVPSKKFKVLGNTDRHSIKKNLIGALLFDSGETAEATRLKRTARRRYTRRKNRICYLQEIFSNEMAKVDDSFFHRLEESFLVEEDKKHERHPIFGNIVDEVAYHEKYPTIYHLRKKLVDSTDKADLRLIYLALAHMIKFRGHFLIEGDLNPDNSDVDKLFIQLVQTYNQLFEENPINASGVDAKAILSARLSKSRRLENLIAQLPGEKKNGLFGNLIALSLGLTPNFKSNFDLAEDAKLQLSKDTYDDDLDNLLAQIGDQYADLFLAAKNLSDAILLSDILRVNTEITKAPLSASMIKRYDEHHQDLTLLKALVRQQLPEKYKEIFFDQSKNGYAGYIDGGASQEEFYKFIKPILEKMDGTEELLVKLNREDLLRKQRTFDNGSIPHQIHLGELHAILRRQEDFYPFLKDNREKIEKILTFRIPYYVGPLARGNSRFAWMTRKSEETITPWNFEEVVDKGASAQSFIERMTNFDKNLPNEKVLPKHSLLYEYFTVYNELTKVKYVTEGMRKPAFLSGEQKKAIVDLLFKTNRKVTVKQLKEDYFKKIECFDSVEISGVEDRFNASLGTYHDLLKIIKDKDFLDNEENEDILEDIVLTLTLFEDREMIEERLKTYAHLFDDKVMKQLKRRRYTGWGRLSRKLINGIRDKQSGKTILDFLKSDGFANRNFMQLIHDDSLTFKEDIQKAQVSGQGDSLHEHIANLAGSPAIKKGILQTVKVVDELVKVMGRHKPENIVIEMARENQTTQKGQKNSRERMKRIEEGIKELGSQILKEHPVENTQLQNEKLYLYYLQNGRDMYVDQELDINRLSDYDVDHIVPQSFLKDDSIDNKVLTRSDKARGKSDNVPSEEVVKKMKNYWRQLLNAKLITQRKFDNLTKAERGGLSELDKAGFIKRQLVETRQITKHVAQILDSRMNTKYDENDKLIREVKVITLKSKLVSDFRKDFQFYKVREINNYHHAHDAYLNAVVGTALIKKYPKLESEFVYGDYKVYDVRKMIAKSEQEIGKATAKYFFYSNIMNFFKTEITLANGEIRKRPLIETNGETGEIVWDKGRDFATVRKVLSMPQVNIVKKTEVQTGGFSKESILPKRNSDKLIARKKDWDPKKYGGFDSPTVAYSVLVVAKVEKGKSKKLKSVKELLGITIMERSSFEKNPIDFLEAKGYKEVKKDLIIKLPKYSLFELENGRKRMLASAGELQKGNELALPSKYVNFLYLASHYEKLKGSPEDNEQKQLFVEQHKHYLDEIIEQISEFSKRVILADANLDKVLSAYNKHRDKPIREQAENIIHLFTLTNLGAPAAFKYFDTTIDRKRYTSTKEVLDATLIHQSITGLYETRIDLSQLGGDGGPAPEAAAKGGGGGIPWLMKKPLQLTTLVPLQEYEERLLKQTMLTGSYKEKLQSLFLKYDALWQHWENQVGHRRIKPHHIATGTVNPRPQKQYPINPKAKASIQTVINDLLKQGVLIQQNSIMNTPVYPVPKPDGKWRMVLDYREVNKTIPLIAAQNQHSAGILSSIFRGKYKTTLDLSNGFWAHSITPESYWLTAFTWLGQQYCWTRLPQGFLNSPALFTADVVDLLKEVPNVQVYVDDIYISHDDPREHLEQLEKVFSLLLNAGYVVSLKKSEIAQHEVEFLGFNITKEGRGLTETFKQKLLNITPPRDLKQLQSILGLLNFARNFIPNFSELVKPLYNIIATANGKYITWTTDNSQQLQNIISMLNSAENLEERNPEVRLIMKVNTSPSAGYIRFYNEFAKRPIMYLNYVYTKAEVKFTNTEKLLTTIHKGLIKALDLGMGQEILVYSPIVSMTKIQKTPLPERKALPIRWITWMSYLEDPRIQFHYDKTLPELQQVPTVTDDIIAKIKHPSEFSMVFYTDGSAIKHPNVNKSHNAGMGIAQVQFKPEFTVINTWSIPLGDHTAQLAEVAAVEFACKKALKIDGPVLIVTDSFYVAESVNKELPYWQSNGFFNNKKKPLKHVSKWKSIADCIQLKPDIIIIHEKGHQPTASTFHTEGNNLADKLATQGSYVVNAGKRTADGSEFEKRTADGSEFESPKKKAKVE

SEQ ID NO: 7566 - protein, 2096 aa, synthetic construct
MPAAKRVKLDGGDKKYSIGLDIGTNSVGWAVITDEYKVPSKKFKVLGNTDRHSIKKNLIGALLFDSGETAEATRLKRTARRRYTRRKNRICYLQEIFSNEMAKVDDSFFHRLEESFLVEEDKKHERHPIFGNIVDEVAYHEKYPTIYHLRKKLVDSTDKADLRLIYLALAHMIKFRGHFLIEGDLNPDNSDVDKLFIQLVQTYNQLFEENPINASGVDAKAILSARLSKSRRLENLIAQLPGEKKNGLFGNLIALSLGLTPNFKSNFDLAEDAKLQLSKDTYDDDLDNLLAQIGDQYADLFLAAKNLSDAILLSDILRVNTEITKAPLSASMIKRYDEHHQDLTLLKALVRQQLPEKYKEIFFDQSKNGYAGYIDGGASQEEFYKFIKPILEKMDGTEELLVKLNREDLLRKQRTFDNGSIPHQIHLGELHAILRRQEDFYPFLKDNREKIEKILTFRIPYYVGPLARGNSRFAWMTRKSEETITPWNFEEVVDKGASAQSFIERMTNFDKNLPNEKVLPKHSLLYEYFTVYNELTKVKYVTEGMRKPAFLSGEQKKAIVDLLFKTNRKVTVKQLKEDYFKKIECFDSVEISGVEDRFNASLGTYHDLLKIIKDKDFLDNEENEDILEDIVLTLTLFEDREMIEERLKTYAHLFDDKVMKQLKRRRYTGWGRLSRKLINGIRDKQSGKTILDFLKSDGFANRNFMQLIHDDSLTFKEDIQKAQVSGQGDSLHEHIANLAGSPAIKKGILQTVKVVDELVKVMGRHKPENIVIEMARENQTTQKGQKNSRERMKRIEEGIKELGSQILKEHPVENTQLQNEKLYLYYLQNGRDMYVDQELDINRLSDYDVDHIVPQSFLKDDSIDNKVLTRSDKARGKSDNVPSEEVVKKMKNYWRQLLNAKLITQRKFDNLTKAERGGLSELDKAGFIKRQLVETRQITKHVAQILDSRMNTKYDENDKLIREVKVITLKSKLVSDFRKDFQFYKVREINNYHHAHDAYLNAVVGTALIKKYPKLESEFVYGDYKVYDVRKMIAKSEQEIGKATAKYFFYSNIMNFFKTEITLANGEIRKRPLIETNGETGEIVWDKGRDFATVRKVLSMPQVNIVKKTEVQTGGFSKESILPKRNSDKLIARKKDWDPKKYGGFDSPTVAYSVLVVAKVEKGKSKKLKSVKELLGITIMERSSFEKNPIDFLEAKGYKEVKKDLIIKLPKYSLFELENGRKRMLASAGELQKGNELALPSKYVNFLYLASHYEKLKGSPEDNEQKQLFVEQHKHYLDEIIEQISEFSKRVILADANLDKVLSAYNKHRDKPIREQAENIIHLFTLTNLGAPAAFKYFDTTIDRKRYTSTKEVLDATLIHQSITGLYETRIDLSQLGGDGGPAPEAAAKGGGGGTLNIEDEYRLHETSKEPDVPLGSTWLSDFPQAWAETGGMGLAVRQAPLIIPLKATSTPVSIKQYPMSQEARLGIKPHIQRLLDQGILVPCQSPWNTPLLPVKKPGTNDYRPVQDLREVNKRVEDIHPTVPNPYNLLSGLPPSHQWYTVLDLKDAFFCLRLHPTSQPLFAFEWRDPEMGISGQLTWTRLPQGFKNSPTLFDEALHRDLADFRIQHPDLILLQYVDDLLLAATSEQDCQRGTRALLQTLGNLGYRASAKKAQICQKQVKYLGYLLKEGQRWLTEARKETVMGQPTPKTPRQLREFLGTAGFCRLWIPGFAEMAAPLYPLTKTGTLFNWGPDQQKAYQEIKQALLTAPALGLPDLTKPFELFVDEKQGYAKGVLTQKLGPWRRPVAYLSKKLDPVAAGWPPCLRMVAAIAVLTKDAGKLTMGQPLVILAPHAVEALVKQPPDRWLSNARMTHYQAMLLDTDRVQFGPVVALNPATLLPLPEKEAPHDCLEILAETHGTRPDLTDQPIPDADYTWYTDGSSFLQEGQRRAGAAVTTETEVIWARALPAGTSAQRAELIALTQALKMAEGKKLNVYTDSRYAFATAHVHGEIYRRRGLLTSEGREIKNKNEILALLKALFLPKRLSIIHCPGHQKGNSAEARGNRMADQAAREAAMKAVLETSTLLAGKRTADGSEFEKRTADGSEFESPKKKAKVE

SEQ ID NO: 7567 - protein, 2096 aa, synthetic construct
MPAAKRVKLDGGDKKYSIGLDIGTNSVGWAVITDEYKVPSKKFKVLGNTDRHSIKKNLIGALLFDSGETAEATRLKRTARRRYTRRKNRICYLQEIFSNEMAKVDDSFFHRLEESFLVEEDKKHERHPIFGNIVDEVAYHEKYPTIYHLRKKLVDSTDKADLRLIYLALAHMIKFRGHFLIEGDLNPDNSDVDKLFIQLVQTYNQLFEENPINASGVDAKAILSARLSKSRRLENLIAQLPGEKKNGLFGNLIALSLGLTPNFKSNFDLAEDAKLQLSKDTYDDDLDNLLAQIGDQYADLFLAAKNLSDAILLSDILRVNTEITKAPLSASMIKRYDEHHQDLTLLKALVRQQLPEKYKEIFFDQSKNGYAGYIDGGASQEEFYKFIKPILEKMDGTEELLVKLNREDLLRKQRTFDNGSIPHQIHLGELHAILRRQEDFYPFLKDNREKIEKILTFRIPYYVGPLARGNSRFAWMTRKSEETITPWNFEEVVDKGASAQSFIERMTNFDKNLPNEKVLPKHSLLYEYFTVYNELTKVKYVTEGMRKPAFLSGEQKKAIVDLLFKTNRKVTVKQLKEDYFKKIECFDSVEISGVEDRFNASLGTYHDLLKIIKDKDFLDNEENEDILEDIVLTLTLFEDREMIEERLKTYAHLFDDKVMKQLKRRRYTGWGRLSRKLINGIRDKQSGKTILDFLKSDGFANRNFMQLIHDDSLTFKEDIQKAQVSGQGDSLHEHIANLAGSPAIKKGILQTVKVVDELVKVMGRHKPENIVIEMARENQTTQKGQKNSRERMKRIEEGIKELGSQILKEHPVENTQLQNEKLYLYYLQNGRDMYVDQELDINRLSDYDVDHIVPQSFLKDDSIDNKVLTRSDKARGKSDNVPSEEVVKKMKNYWRQLLNAKLITQRKFDNLTKAERGGLSELDKAGFIKRQLVETRQITKHVAQILDSRMNTKYDENDKLIREVKVITLKSKLVSDFRKDFQFYKVREINNYHHAHDAYLNAVVGTALIKKYPKLESEFVYGDYKVYDVRKMIAKSEQEIGKATAKYFFYSNIMNFFKTEITLANGEIRKRPLIETNGETGEIVWDKGRDFATVRKVLSMPQVNIVKKTEVQTGGFSKESILPKRNSDKLIARKKDWDPKKYGGFDSPTVAYSVLVVAKVEKGKSKKLKSVKELLGITIMERSSFEKNPIDFLEAKGYKEVKKDLIIKLPKYSLFELENGRKRMLASAGELQKGNELALPSKYVNFLYLASHYEKLKGSPEDNEQKQLFVEQHKHYLDEIIEQISEFSKRVILADANLDKVLSAYNKHRDKPIREQAENIIHLFTLTNLGAPAAFKYFDTTIDRKRYTSTKEVLDATLIHQSITGLYETRIDLSQLGGDGGPAPEAAAKGGGGGTLNIEDEYRLHETSKEPDVPLGSTWLSDFPQAWAETGGMGLAVRQAPLIIPLKATSTPVSIKQYPMSQEARLGIKPHIQRLLDQGILVPCQSPWNTPLLPVKKPGTNDYRPVQDLREVNKRVEDIHPTVPNPYNLLSGLPPSHQWYTVLDLKDAFFCLRLHPTSQPLFAFEWRDPEMGISGQLTWTRLPQGFKNSPTLFNEALHRDLADFRIQHPDLILLQYVDDLLLAATSEQDCQRGTRALLQTLGNLGYRASAKKAQICQKQVKYLGYLLKEGQRWLTEARKETVMGQPTPKTPRQLREFLGTAGFCRLWIPGFAEMAAPLYPLTKPGTLFNWGPDQQKAYQEIKQALLTAPALGLPDLTKPFELFVDEKQGYAKGVLTQKLGPWRRPVAYLSKKLDPVAAGWPPCLRMVAAIAVLTKDAGKLTMGQPLVILAPHAVEALVKQPPDRWLSNARMTHYQAMLLDTDRVQFGPVVALNPATLLPLPEKEAPHDCLEILAETHGTRPDLTDQPIPDADYTWYTDGSSFLQEGQRRAGAAVTTETEVIWARALPAGTSAQRAELIALTQALKMAEGKKLNVYTDSRYAFATAHVHGEIYRRRGWLTSEGREIKNKNEILALLKALFLPKRLSIIHCPGHQKGNSAEARGNRMADQAAREAAMKAVLETSTLLAGKRTADGSEFEKRTADGSEFESPKKKAKVE

SEQ ID NO: 7568 - protein, 2096 aa, synthetic construct
MPAAKRVKLDGGDKKYSIGLDIGTNSVGWAVITDEYKVPSKKFKVLGNTDRHSIKKNLIGALLFDSGETAEATRLKRTARRRYTRRKNRICYLQEIFSNEMAKVDDSFFHRLEESFLVEEDKKHERHPIFGNIVDEVAYHEKYPTIYHLRKKLVDSTDKADLRLIYLALAHMIKFRGHFLIEGDLNPDNSDVDKLFIQLVQTYNQLFEENPINASGVDAKAILSARLSKSRRLENLIAQLPGEKKNGLFGNLIALSLGLTPNFKSNFDLAEDAKLQLSKDTYDDDLDNLLAQIGDQYADLFLAAKNLSDAILLSDILRVNTEITKAPLSASMIKRYDEHHQDLTLLKALVRQQLPEKYKEIFFDQSKNGYAGYIDGGASQEEFYKFIKPILEKMDGTEELLVKLNREDLLRKQRTFDNGSIPHQIHLGELHAILRRQEDFYPFLKDNREKIEKILTFRIPYYVGPLARGNSRFAWMTRKSEETITPWNFEEVVDKGASAQSFIERMTNFDKNLPNEKVLPKHSLLYEYFTVYNELTKVKYVTEGMRKPAFLSGEQKKAIVDLLFKTNRKVTVKQLKEDYFKKIECFDSVEISGVEDRFNASLGTYHDLLKIIKDKDFLDNEENEDILEDIVLTLTLFEDREMIEERLKTYAHLFDDKVMKQLKRRRYTGWGRLSRKLINGIRDKQSGKTILDFLKSDGFANRNFMQLIHDDSLTFKEDIQKAQVSGQGDSLHEHIANLAGSPAIKKGILQTVKVVDELVKVMGRHKPENIVIEMARENQTTQKGQKNSRERMKRIEEGIKELGSQILKEHPVENTQLQNEKLYLYYLQNGRDMYVDQELDINRLSDYDVDHIVPQSFLKDDSIDNKVLTRSDKARGKSDNVPSEEVVKKMKNYWRQLLNAKLITQRKFDNLTKAERGGLSELDKAGFIKRQLVETRQITKHVAQILDSRMNTKYDENDKLIREVKVITLKSKLVSDFRKDFQFYKVREINNYHHAHDAYLNAVVGTALIKKYPKLESEFVYGDYKVYDVRKMIAKSEQEIGKATAKYFFYSNIMNFFKTEITLANGEIRKRPLIETNGETGEIVWDKGRDFATVRKVLSMPQVNIVKKTEVQTGGFSKESILPKRNSDKLIARKKDWDPKKYGGFDSPTVAYSVLVVAKVEKGKSKKLKSVKELLGITIMERSSFEKNPIDFLEAKGYKEVKKDLIIKLPKYSLFELENGRKRMLASAGELQKGNELALPSKYVNFLYLASHYEKLKGSPEDNEQKQLFVEQHKHYLDEIIEQISEFSKRVILADANLDKVLSAYNKHRDKPIREQAENIIHLFTLTNLGAPAAFKYFDTTIDRKRYTSTKEVLDATLIHQSITGLYETRIDLSQLGGDGGPAPEAAAKGGGGGTLNIEDEYRLHETSKEPDVPLGSTWLSDFPQAWAETGGMGLAVRQAPLIIPLKATSTPVSIKQYPMSQEARLGIKPHIQRLLDQGILVPCQSPWNTPLLPVKKPGTNDYRPVQDLREVNKRVEDIHPTVPNPYNLLSGLPPSHQWYTVLDLKDAFFCLRLHPTSQPLFAFEWRDPEMGISGQLTWTRLPQGFKNSPTLFNEALHRDLADFRIQHPDLILLQYVDDLLLAATSEQDCQRGTRALLQTLGNLGYRASAKKAQICQKQVKYLGYLLKEGQRWLTEARKETVMGQPTPKTPRQLREFLGKAGFCRLFIPGFAEMAAPLYPLTKPGTLFNWGPDQQKAYQEIKQALLTAPALGLPDLTKPFELFVDEKQGYAKGVLTQKLGPWRRPVAYLSKKLDPVAAGWPPCLRMVAAIAVLTKDAGKLTMGQPLVILAPHAVEALVKQPPDRWLSNARMTHYQAMLLDTDRVQFGPVVALNPATLLPLPEKEAPHDCLEILAETHGTRPDLTDQPIPDADYTWYTDGSSFLQEGQRRAGAAVTTETEVIWARALPAGTSAQRAELIALTQALKMAEGKKLNVYTDSRYAFATAHVHGEIYRRRGWLTSEGREIKNKNEILALLKALFLPKRLSIIHCPGHQKGNSAEARGNRMADQAAREAAMKAVLETSTLLAGKRTADGSEFEKRTADGSEFESPKKKAKVE

SEQ ID NO: 7569 - protein, 2098 aa, synthetic construct
MPAAKRVKLDGGDKKYSIGLDIGTNSVGWAVITDEYKVPSKKFKVLGNTDRHSIKKNLIGALLFDSGETAEATRLKRTARRRYTRRKNRICYLQEIFSNEMAKVDDSFFHRLEESFLVEEDKKHERHPIFGNIVDEVAYHEKYPTIYHLRKKLVDSTDKADLRLIYLALAHMIKFRGHFLIEGDLNPDNSDVDKLFIQLVQTYNQLFEENPINASGVDAKAILSARLSKSRRLENLIAQLPGEKKNGLFGNLIALSLGLTPNFKSNFDLAEDAKLQLSKDTYDDDLDNLLAQIGDQYADLFLAAKNLSDAILLSDILRVNTEITKAPLSASMIKRYDEHHQDLTLLKALVRQQLPEKYKEIFFDQSKNGYAGYIDGGASQEEFYKFIKPILEKMDGTEELLVKLNREDLLRKQRTFDNGSIPHQIHLGELHAILRRQEDFYPFLKDNREKIEKILTFRIPYYVGPLARGNSRFAWMTRKSEETITPWNFEEVVDKGASAQSFIERMTNFDKNLPNEKVLPKHSLLYEYFTVYNELTKVKYVTEGMRKPAFLSGEQKKAIVDLLFKTNRKVTVKQLKEDYFKKIECFDSVEISGVEDRFNASLGTYHDLLKIIKDKDFLDNEENEDILEDIVLTLTLFEDREMIEERLKTYAHLFDDKVMKQLKRRRYTGWGRLSRKLINGIRDKQSGKTILDFLKSDGFANRNFMQLIHDDSLTFKEDIQKAQVSGQGDSLHEHIANLAGSPAIKKGILQTVKVVDELVKVMGRHKPENIVIEMARENQTTQKGQKNSRERMKRIEEGIKELGSQILKEHPVENTQLQNEKLYLYYLQNGRDMYVDQELDINRLSDYDVDHIVPQSFLKDDSIDNKVLTRSDKARGKSDNVPSEEVVKKMKNYWRQLLNAKLITQRKFDNLTKAERGGLSELDKAGFIKRQLVETRQITKHVAQILDSRMNTKYDENDKLIREVKVITLKSKLVSDFRKDFQFYKVREINNYHHAHDAYLNAVVGTALIKKYPKLESEFVYGDYKVYDVRKMIAKSEQEIGKATAKYFFYSNIMNFFKTEITLANGEIRKRPLIETNGETGEIVWDKGRDFATVRKVLSMPQVNIVKKTEVQTGGFSKESILPKRNSDKLIARKKDWDPKKYGGFDSPTVAYSVLVVAKVEKGKSKKLKSVKELLGITIMERSSFEKNPIDFLEAKGYKEVKKDLIIKLPKYSLFELENGRKRMLASAGELQKGNELALPSKYVNFLYLASHYEKLKGSPEDNEQKQLFVEQHKHYLDEIIEQISEFSKRVILADANLDKVLSAYNKHRDKPIREQAENIIHLFTLTNLGAPAAFKYFDTTIDRKRYTSTKEVLDATLIHQSITGLYETRIDLSQLGGDGGGSSEAAAKPAPGGTAPLEEEYRLFLEAPIQNVTLLEQWKREIPKVWAEINPPGLASTQAPIHVQLLSTALPVRVRQYPITLEAKRSLRETIRKFRAAGILRPVHSPWNTPLLPVRKSGTSEYRMVQDLREVNKRVETIHPTVPNPYTLLSLLPPDRIWYSVLDLKDAFFCIPLAPESQLIFAFEWADAEEGESGQLTWTRLPQGFKNSPTLFNEALNRDLQGFRLDHPSVSLLQYVDDLLIAADTQAACLSATRDLLMTLAELGYRVSGKKAQLCQEEVTYLGFKIHKGSRSLSNSRTQAILQIPVPKTKRQVREFLGTIGYCRLWIPGFAELAQPLYAATRPGNDPLVWGEKEEEAFQSLKLALTQPPALALPSLDKPFQLFVEETSGAAKGVLTQALGPWKRPVAYLSKRLDPVAAGWPRCLRAIAAAALLTREASKLTFGQDIEITSSHNLESLLRSPPDKWLTNARITQYQVLLLDPPRVRFKQTAALNPATLLPETDDTLPIHHCLDTLDSLTSTRPDLTDQPLAQAEATLFTDGSSYIRDGKRYAGAAVVTLDSVIWAEPLPIGTSAQKAELIALTKALEWSKDKSVNIYTDSRYAFATLHVHGMIYRERGWLTAGGKAIKNAPEILALLTAVWLPKRVAVMHCKGHQKDDAPTSTGNRRADEVAREVAIRPLSTQATISAGKRTADGSEFEKRTADGSEFESPKKKAKVE

SEQ ID NO: 7570 - protein, 2102 aa, synthetic construct
MPAAKRVKLDGGDKKYSIGLDIGTNSVGWAVITDEYKVPSKKFKVLGNTDRHSIKKNLIGALLFDSGETAEATRLKRTARRRYTRRKNRICYLQEIFSNEMAKVDDSFFHRLEESFLVEEDKKHERHPIFGNIVDEVAYHEKYPTIYHLRKKLVDSTDKADLRLIYLALAHMIKFRGHFLIEGDLNPDNSDVDKLFIQLVQTYNQLFEENPINASGVDAKAILSARLSKSRRLENLIAQLPGEKKNGLFGNLIALSLGLTPNFKSNFDLAEDAKLQLSKDTYDDDLDNLLAQIGDQYADLFLAAKNLSDAILLSDILRVNTEITKAPLSASMIKRYDEHHQDLTLLKALVRQQLPEKYKEIFFDQSKNGYAGYIDGGASQEEFYKFIKPILEKMDGTEELLVKLNREDLLRKQRTFDNGSIPHQIHLGELHAILRRQEDFYPFLKDNREKIEKILTFRIPYYVGPLARGNSRFAWMTRKSEETITPWNFEEVVDKGASAQSFIERMTNFDKNLPNEKVLPKHSLLYEYFTVYNELTKVKYVTEGMRKPAFLSGEQKKAIVDLLFKTNRKVTVKQLKEDYFKKIECFDSVEISGVEDRFNASLGTYHDLLKIIKDKDFLDNEENEDILEDIVLTLTLFEDREMIEERLKTYAHLFDDKVMKQLKRRRYTGWGRLSRKLINGIRDKQSGKTILDFLKSDGFANRNFMQLIHDDSLTFKEDIQKAQVSGQGDSLHEHIANLAGSPAIKKGILQTVKVVDELVKVMGRHKPENIVIEMARENQTTQKGQKNSRERMKRIEEGIKELGSQILKEHPVENTQLQNEKLYLYYLQNGRDMYVDQELDINRLSDYDVDHIVPQSFLKDDSIDNKVLTRSDKARGKSDNVPSEEVVKKMKNYWRQLLNAKLITQRKFDNLTKAERGGLSELDKAGFIKRQLVETRQITKHVAQILDSRMNTKYDENDKLIREVKVITLKSKLVSDFRKDFQFYKVREINNYHHAHDAYLNAVVGTALIKKYPKLESEFVYGDYKVYDVRKMIAKSEQEIGKATAKYFFYSNIMNFFKTEITLANGEIRKRPLIETNGETGEIVWDKGRDFATVRKVLSMPQVNIVKKTEVQTGGFSKESILPKRNSDKLIARKKDWDPKKYGGFDSPTVAYSVLVVAKVEKGKSKKLKSVKELLGITIMERSSFEKNPIDFLEAKGYKEVKKDLIIKLPKYSLFELENGRKRMLASAGELQKGNELALPSKYVNFLYLASHYEKLKGSPEDNEQKQLFVEQHKHYLDEIIEQISEFSKRVILADANLDKVLSAYNKHRDKPIREQAENIIHLFTLTNLGAPAAFKYFDTTIDRKRYTSTKEVLDATLIHQSITGLYETRIDLSQLGGDGGGSSEAAAKPAPGGTVSLQDEHRLFDIPVTTSLPDVWLQDFPQAWAETGGLGRAKCQAPIIIDLKPTAVPVSIKQYPMSLEAHMGIRQHIIKFLELGVLRPCRSPWNTPLLPVKKPGTQDYRPVQDLREINKRTVDIHPTVPNPYNLLSTLKPDYSWYTVLDLKDAFFCLPLAPQSQELFAFEWKDPERGISGQLTWTRLPQGFKNSPTLFNEALHRDLTDFRTQHPEVTLLQYVDDLLLAAPTKKACTQGTRHLLQELGEKGYRASAKKAQICQTKVTYLGYILSEGKRWLTPGRIETVARIPPPRNPREVREFLGTAGFCRLWIPGFAELAAPLYALTKPSTPFTWQTEHQLAFEALKKALLSAPALGLPDTSKPFTLFLDERQGIAKGVLTQKLGPWKRPVAYLSKKLDPVAAGWPPCLRIMAATAMLVKDSAKLTLGQPLTVITPHTLEAIVRQPPDRWITNARLTHYQALLLDTDRVQFGPPVTLNPATLLPVPENQPSPHDCRQVLAETHGTREDLKDQELPDADHTWYTDGSSYLDSGTRRAGAAVVDGHNTIWAQSLPPGTSAQKAELIALTKALELSKGKKANIYTDSRYAFATAHTHGSIYERRGWLTSEGKEIKNKAEIIALLKALFLPQEVAIIHCPGHQKGQDPVAVGNRQADRVARQAAMAEVLTLATEPDNTSHITAGKRTADGSEFEKRTADGSEFESPKKKAKVE

SEQ ID NO: 7571 - protein, 2173 aa, synthetic construct
MPAAKRVKLDGGDKKYSIGLDIGTNSVGWAVITDEYKVPSKKFKVLGNTDRHSIKKNLIGALLFDSGETAEATRLKRTARRRYTRRKNRICYLQEIFSNEMAKVDDSFFHRLEESFLVEEDKKHERHPIFGNIVDEVAYHEKYPTIYHLRKKLVDSTDKADLRLIYLALAHMIKFRGHFLIEGDLNPDNSDVDKLFIQLVQTYNQLFEENPINASGVDAKAILSARLSKSRRLENLIAQLPGEKKNGLFGNLIALSLGLTPNFKSNFDLAEDAKLQLSKDTYDDDLDNLLAQIGDQYADLFLAAKNLSDAILLSDILRVNTEITKAPLSASMIKRYDEHHQDLTLLKALVRQQLPEKYKEIFFDQSKNGYAGYIDGGASQEEFYKFIKPILEKMDGTEELLVKLNREDLLRKQRTFDNGSIPHQIHLGELHAILRRQEDFYPFLKDNREKIEKILTFRIPYYVGPLARGNSRFAWMTRKSEETITPWNFEEVVDKGASAQSFIERMTNFDKNLPNEKVLPKHSLLYEYFTVYNELTKVKYVTEGMRKPAFLSGEQKKAIVDLLFKTNRKVTVKQLKEDYFKKIECFDSVEISGVEDRFNASLGTYHDLLKIIKDKDFLDNEENEDILEDIVLTLTLFEDREMIEERLKTYAHLFDDKVMKQLKRRRYTGWGRLSRKLINGIRDKQSGKTILDFLKSDGFANRNFMQLIHDDSLTFKEDIQKAQVSGQGDSLHEHIANLAGSPAIKKGILQTVKVVDELVKVMGRHKPENIVIEMARENQTTQKGQKNSRERMKRIEEGIKELGSQILKEHPVENTQLQNEKLYLYYLQNGRDMYVDQELDINRLSDYDVDHIVPQSFLKDDSIDNKVLTRSDKARGKSDNVPSEEVVKKMKNYWRQLLNAKLITQRKFDNLTKAERGGLSELDKAGFIKRQLVETRQITKHVAQILDSRMNTKYDENDKLIREVKVITLKSKLVSDFRKDFQFYKVREINNYHHAHDAYLNAVVGTALIKKYPKLESEFVYGDYKVYDVRKMIAKSEQEIGKATAKYFFYSNIMNFFKTEITLANGEIRKRPLIETNGETGEIVWDKGRDFATVRKVLSMPQVNIVKKTEVQTGGFSKESILPKRNSDKLIARKKDWDPKKYGGFDSPTVAYSVLVVAKVEKGKSKKLKSVKELLGITIMERSSFEKNPIDFLEAKGYKEVKKDLIIKLPKYSLFELENGRKRMLASAGELQKGNELALPSKYVNFLYLASHYEKLKGSPEDNEQKQLFVEQHKHYLDEIIEQISEFSKRVILADANLDKVLSAYNKHRDKPIREQAENIIHLFTLTNLGAPAAFKYFDTTIDRKRYTSTKEVLDATLIHQSITGLYETRIDLSQLGGDGGGSSEAAAKPAPGGMDLLKPLTVERKGVKIKGYWNSQADITCVPKDLLQGEEPVRQQNVTTIHGTQEGDVYYVNLKIDGRRINTEVIGTTLDYAIITPGDVPWILKKPLELTIKLDLEEQQGTLLNNSILSKKGKEELKQLFEKYSALWQSWENQVGHRRIRPHKIATGTVKPTPQKQYHINPKAKPDIQIVINDLLKQGVLIQKESTMNTPVYPVPKPNGRWRMVLDYRAVNKVTPLIAVQNQHSYGILGSLFKGRYKTTIDLSNGFWAHPIVPEDYWITAFTWQGKQYCWTVLPQGFLNSPGLFNGDVVDLLQGIPNVEVYVDDVYISHDSEKEHLEYLDILFNRLKEAGYIISLKKSNIANSIVDFLGFQITNEGRGLTDTFKEKLENITAPTTLKQLQSILGLLNFARNFIPDFTELIAPLYALIPKSPKNYVPWQIEHSTTLETLITKLNGAEYLQGRKGDKTLIMKVNASYTTGYIRYYNEGEKKPISYVSIVFSKTELKFTELEKLLTTVHKGLLKALDLSMGQNIHVYSPIVSMQNIQKTPQTAKKALASRWLSWLSYLEDPRIRFFYDPQMPALKDLPAVDTGKDNKKHPSNFQHIFYTDGSAITSPTKEGHLNAGMGIVYFINKDGNLQKQQEWSISLGNHTAQFAEIAAFEFALKKCLPLGGNILVVTDSNYVAKAYNEELDVWASNGFVNNRKKPLKHISKWKSVADLKRLRPDVVVTHEPGHQKLDSSPHAYGNNLADQLATQASFKVHAGKRTADGSEFEKRTADGSEFESPKKKAKVE

SEQ ID NO: 7572 - protein, 2095 aa, synthetic construct
MPAAKRVKLDGGDKKYSIGLDIGTNSVGWAVITDEYKVPSKKFKVLGNTDRHSIKKNLIGALLFDSGETAEATRLKRTARRRYTRRKNRICYLQEIFSNEMAKVDDSFFHRLEESFLVEEDKKHERHPIFGNIVDEVAYHEKYPTIYHLRKKLVDSTDKADLRLIYLALAHMIKFRGHFLIEGDLNPDNSDVDKLFIQLVQTYNQLFEENPINASGVDAKAILSARLSKSRRLENLIAQLPGEKKNGLFGNLIALSLGLTPNFKSNFDLAEDAKLQLSKDTYDDDLDNLLAQIGDQYADLFLAAKNLSDAILLSDILRVNTEITKAPLSASMIKRYDEHHQDLTLLKALVRQQLPEKYKEIFFDQSKNGYAGYIDGGASQEEFYKFIKPILEKMDGTEELLVKLNREDLLRKQRTFDNGSIPHQIHLGELHAILRRQEDFYPFLKDNREKIEKILTFRIPYYVGPLARGNSRFAWMTRKSEETITPWNFEEVVDKGASAQSFIERMTNFDKNLPNEKVLPKHSLLYEYFTVYNELTKVKYVTEGMRKPAFLSGEQKKAIVDLLFKTNRKVTVKQLKEDYFKKIECFDSVEISGVEDRFNASLGTYHDLLKIIKDKDFLDNEENEDILEDIVLTLTLFEDREMIEERLKTYAHLFDDKVMKQLKRRRYTGWGRLSRKLINGIRDKQSGKTILDFLKSDGFANRNFMQLIHDDSLTFKEDIQKAQVSGQGDSLHEHIANLAGSPAIKKGILQTVKVVDELVKVMGRHKPENIVIEMARENQTTQKGQKNSRERMKRIEEGIKELGSQILKEHPVENTQLQNEKLYLYYLQNGRDMYVDQELDINRLSDYDVDHIVPQSFLKDDSIDNKVLTRSDKARGKSDNVPSEEVVKKMKNYWRQLLNAKLITQRKFDNLTKAERGGLSELDKAGFIKRQLVETRQITKHVAQILDSRMNTKYDENDKLIREVKVITLKSKLVSDFRKDFQFYKVREINNYHHAHDAYLNAVVGTALIKKYPKLESEFVYGDYKVYDVRKMIAKSEQEIGKATAKYFFYSNIMNFFKTEITLANGEIRKRPLIETNGETGEIVWDKGRDFATVRKVLSMPQVNIVKKTEVQTGGFSKESILPKRNSDKLIARKKDWDPKKYGGFDSPTVAYSVLVVAKVEKGKSKKLKSVKELLGITIMERSSFEKNPIDFLEAKGYKEVKKDLIIKLPKYSLFELENGRKRMLASAGELQKGNELALPSKYVNFLYLASHYEKLKGSPEDNEQKQLFVEQHKHYLDEIIEQISEFSKRVILADANLDKVLSAYNKHRDKPIREQAENIIHLFTLTNLGAPAAFKYFDTTIDRKRYTSTKEVLDATLIHQSITGLYETRIDLSQLGGDGGGSSEAAAKPAPGGTLQLEEEYRLFEPESTQKQEMDIWLKNFPQAWAETGGMGTAHCQAPVLIQLKATATPISIRQYPMPHEAYQGIKPHIRRMLDQGILKPCQSPWNTPLLPVKKPGTEDYRPVQDLREVNKRVEDIHPTVPNPYNLLSTLPPSHPWYTVLDLKDAFFCLRLHSESQLLFAFEWRDPEIGLSGQLTWTRLPQGFKNSPTLFNEALHSDLADFRVRYPALVLLQYVDDLLLAAATRTECLEGTKALLETLGNKGYRASAKKAQICLQEVTYLGYSLKDGQRWLTKARKEAILSIPVPKNSRQVREFLGTAGYCRLWIPGFAELAAPLYPLTRPGTLFQWGTEQQLAFEDIKKALLSSPALGLPDITKPFELFIDENSGFAKGVLVQKLGPWKRPVAYLSKKLDTVASGWPPCLRMVAAIAILVKDAGKLTLGQPLTILTSHPVEALVRQPPNKWLSNARMTHYQAMLLDAERVHFGPTVSLNPATLLPLPSGGNHHDCLQILAETHGTRPDLTDQPLPDADLTWYTDGSSFIRNGEREAGAAVTTESEVIWAAPLPPGTSAQRAELIALTQALKMAEGKKLTVYTDSRYAFATTHVHGEIYRRRGWLTSEGKEIKNKNEILALLEALFLPKRLSIIHCPGHQKGDSPQAKGNRLADDTAKKAATETHSSLTVLPAGKRTADGSEFEKRTADGSEFESPKKKAKVE

SEQ ID NO: 7573 - protein, 2087 aa, synthetic construct
MPAAKRVKLDGGDKKYSIGLDIGTNSVGWAVITDEYKVPSKKFKVLGNTDRHSIKKNLIGALLFDSGETAEATRLKRTARRRYTRRKNRICYLQEIFSNEMAKVDDSFFHRLEESFLVEEDKKHERHPIFGNIVDEVAYHEKYPTIYHLRKKLVDSTDKADLRLIYLALAHMIKFRGHFLIEGDLNPDNSDVDKLFIQLVQTYNQLFEENPINASGVDAKAILSARLSKSRRLENLIAQLPGEKKNGLFGNLIALSLGLTPNFKSNFDLAEDAKLQLSKDTYDDDLDNLLAQIGDQYADLFLAAKNLSDAILLSDILRVNTEITKAPLSASMIKRYDEHHQDLTLLKALVRQQLPEKYKEIFFDQSKNGYAGYIDGGASQEEFYKFIKPILEKMDGTEELLVKLNREDLLRKQRTFDNGSIPHQIHLGELHAILRRQEDFYPFLKDNREKIEKILTFRIPYYVGPLARGNSRFAWMTRKSEETITPWNFEEVVDKGASAQSFIERMTNFDKNLPNEKVLPKHSLLYEYFTVYNELTKVKYVTEGMRKPAFLSGEQKKAIVDLLFKTNRKVTVKQLKEDYFKKIECFDSVEISGVEDRFNASLGTYHDLLKIIKDKDFLDNEENEDILEDIVLTLTLFEDREMIEERLKTYAHLFDDKVMKQLKRRRYTGWGRLSRKLINGIRDKQSGKTILDFLKSDGFANRNFMQLIHDDSLTFKEDIQKAQVSGQGDSLHEHIANLAGSPAIKKGILQTVKVVDELVKVMGRHKPENIVIEMARENQTTQKGQKNSRERMKRIEEGIKELGSQILKEHPVENTQLQNEKLYLYYLQNGRDMYVDQELDINRLSDYDVDHIVPQSFLKDDSIDNKVLTRSDKARGKSDNVPSEEVVKKMKNYWRQLLNAKLITQRKFDNLTKAERGGLSELDKAGFIKRQLVETRQITKHVAQILDSRMNTKYDENDKLIREVKVITLKSKLVSDFRKDFQFYKVREINNYHHAHDAYLNAVVGTALIKKYPKLESEFVYGDYKVYDVRKMIAKSEQEIGKATAKYFFYSNIMNFFKTEITLANGEIRKRPLIETNGETGEIVWDKGRDFATVRKVLSMPQVNIVKKTEVQTGGFSKESILPKRNSDKLIARKKDWDPKKYGGFDSPTVAYSVLVVAKVEKGKSKKLKSVKELLGITIMERSSFEKNPIDFLEAKGYKEVKKDLIIKLPKYSLFELENGRKRMLASAGELQKGNELALPSKYVNFLYLASHYEKLKGSPEDNEQKQLFVEQHKHYLDEIIEQISEFSKRVILADANLDKVLSAYNKHRDKPIREQAENIIHLFTLTNLGAPAAFKYFDTTIDRKRYTSTKEVLDATLIHQSITGLYETRIDLSQLGGDGGGSSEAAAKPAPGGVPWLTQQPLQLTILVPLQEYQEKILSKTALPEDQKQQLKTLFVKYDNLWQHWENQVGHRKIRPHNIATGDYPPRPQKQYPINPKAKPSIQIVIDDLLKQGVLTPQNSTMNTPVYPVPKPDGRWRMVLDYREVNKTIPLTAAQNQHSAGILATIVRQKYKTTLDLANGFWAHPITPESYWLTAFTWQGKQYCWTRLPQGFLNSPALFNADVVDLLKEIPNVQVYVDDIYLSHDDPKEHVQQLEKVFQILLQAGYVVSLKKSEIGQKTVEFLGFNITKEGRGLTDTFKTKLLNITPPKDLKQLQSILGKLNFARNFIPNFAELVQPLYNLIAPAKGKYIEWSEENTKQLNMVIEALNTASNLEERLPEQRLVIKVNTSPSAGYVRYYNETGKKPIMYLNYVFSKAELKFSMLEKLLTTMHKALIKAMDLAMGQEILVYSPIVSMTKIQKTPLPERKALPIRWITWMTYLEDPRIQFHYDKTLPELKHIPDVYTSSQSPVKHPSQYEGVFYTDGSAIKSPDPTKSNNAGMGIVHATYKPEYQVLNQWSIPLGNHTAQMAEIAAVEFACKKALKIPGPVLVITDSFYVAESANKELPYWKSNGFVNNKKKPLKHISKWKSIAECLSMKPDITIQHEKGISLQIPVFILKGNALADKLATQGSYVVNAGKRTADGSEFEKRTADGSEFESPKKKAKVE

SEQ ID NO: 7574 - protein, 2127 aa, synthetic construct
MPAAKRVKLDGGDKKYSIGLDIGTNSVGWAVITDEYKVPSKKFKVLGNTDRHSIKKNLIGALLFDSGETAEATRLKRTARRRYTRRKNRICYLQEIFSNEMAKVDDSFFHRLEESFLVEEDKKHERHPIFGNIVDEVAYHEKYPTIYHLRKKLVDSTDKADLRLIYLALAHMIKFRGHFLIEGDLNPDNSDVDKLFIQLVQTYNQLFEENPINASGVDAKAILSARLSKSRRLENLIAQLPGEKKNGLFGNLIALSLGLTPNFKSNFDLAEDAKLQLSKDTYDDDLDNLLAQIGDQYADLFLAAKNLSDAILLSDILRVNTEITKAPLSASMIKRYDEHHQDLTLLKALVRQQLPEKYKEIFFDQSKNGYAGYIDGGASQEEFYKFIKPILEKMDGTEELLVKLNREDLLRKQRTFDNGSIPHQIHLGELHAILRRQEDFYPFLKDNREKIEKILTFRIPYYVGPLARGNSRFAWMTRKSEETITPWNFEEVVDKGASAQSFIERMTNFDKNLPNEKVLPKHSLLYEYFTVYNELTKVKYVTEGMRKPAFLSGEQKKAIVDLLFKTNRKVTVKQLKEDYFKKIECFDSVEISGVEDRFNASLGTYHDLLKIIKDKDFLDNEENEDILEDIVLTLTLFEDREMIEERLKTYAHLFDDKVMKQLKRRRYTGWGRLSRKLINGIRDKQSGKTILDFLKSDGFANRNFMQLIHDDSLTFKEDIQKAQVSGQGDSLHEHIANLAGSPAIKKGILQTVKVVDELVKVMGRHKPENIVIEMARENQTTQKGQKNSRERMKRIEEGIKELGSQILKEHPVENTQLQNEKLYLYYLQNGRDMYVDQELDINRLSDYDVDHIVPQSFLKDDSIDNKVLTRSDKARGKSDNVPSEEVVKKMKNYWRQLLNAKLITQRKFDNLTKAERGGLSELDKAGFIKRQLVETRQITKHVAQILDSRMNTKYDENDKLIREVKVITLKSKLVSDFRKDFQFYKVREINNYHHAHDAYLNAVVGTALIKKYPKLESEFVYGDYKVYDVRKMIAKSEQEIGKATAKYFFYSNIMNFFKTEITLANGEIRKRPLIETNGETGEIVWDKGRDFATVRKVLSMPQVNIVKKTEVQTGGFSKESILPKRNSDKLIARKKDWDPKKYGGFDSPTVAYSVLVVAKVEKGKSKKLKSVKELLGITIMERSSFEKNPIDFLEAKGYKEVKKDLIIKLPKYSLFELENGRKRMLASAGELQKGNELALPSKYVNFLYLASHYEKLKGSPEDNEQKQLFVEQHKHYLDEIIEQISEFSKRVILADANLDKVLSAYNKHRDKPIREQAENIIHLFTLTNLGAPAAFKYFDTTIDRKRYTSTKEVLDATLIHQSITGLYETRIDLSQLGGDGGGSSEAAAKPAPGGLLGRDLLTKLKAQIQFSTEGPQVTWEDRPAMCLVLNLEEEYRLHEKPVPPSIDPSWLQLFPMVWAEKAGMGLANQVPPVVVELKSDASPVAVRQYPMSKEAREGIRPHIQRFLDLGILVPCQSPWNTPLLPVKKPGTNDYRPVQDLREVNKRVQDIHPTVPNPYNLLSSLPPSHTWYSVLDLKDAFFCLKLHPNSQPLFAFEWRDPEKGNTGQLTWTRLPQGFKNSPTLFNEALHRDLASFRALNPQVVMLQYVDDLLVAAPTYRDCKEGTRRLLQELSKLGYRVSAKKAQLCREEVTYLGYLLKGGKRWLTPARKATVMKIPTPTTPRQVREFLGTAGFCRLWIPGFASLAAPLYPLTRPKVPFTWTEAHQEAFGRIKEALLSAPALALPDLTKPFALYVDEKEGVARGVLTQTLGPWRRPVAYLSKKLDPVASGWPTCLKAIAAVALLLKDADKLTLGQNVLVIAPHNLESIVRQPPDRWMTNARMTHYQSLLLNERVSFAPPAILNPATLLPVESDDTPIHICSEILAEETGTRPDLRDQPLPGVPAWYTDGSSFIMDGRRQAGAAIVDNKRTVWASNLPEGTSAQKAELIALTQALRLAEGKSINIYTDSRYAFATAHVHGAIYKQRGWLTSAGKDIKNKEEILALLEAIHLPKRVAIIHCPGHQRGTDPVATGNRKADEAAKQAAQSTRILTETTKNAGKRTADGSEFEKRTADGSEFESPKKKAKVE

SEQ ID NO: 7575 - protein, 2218 aa, synthetic construct
MPAAKRVKLDGGDKKYSIGLDIGTNSVGWAVITDEYKVPSKKFKVLGNTDRHSIKKNLIGALLFDSGETAEATRLKRTARRRYTRRKNRICYLQEIFSNEMAKVDDSFFHRLEESFLVEEDKKHERHPIFGNIVDEVAYHEKYPTIYHLRKKLVDSTDKADLRLIYLALAHMIKFRGHFLIEGDLNPDNSDVDKLFIQLVQTYNQLFEENPINASGVDAKAILSARLSKSRRLENLIAQLPGEKKNGLFGNLIALSLGLTPNFKSNFDLAEDAKLQLSKDTYDDDLDNLLAQIGDQYADLFLAAKNLSDAILLSDILRVNTEITKAPLSASMIKRYDEHHQDLTLLKALVRQQLPEKYKEIFFDQSKNGYAGYIDGGASQEEFYKFIKPILEKMDGTEELLVKLNREDLLRKQRTFDNGSIPHQIHLGELHAILRRQEDFYPFLKDNREKIEKILTFRIPYYVGPLARGNSRFAWMTRKSEETITPWNFEEVVDKGASAQSFIERMTNFDKNLPNEKVLPKHSLLYEYFTVYNELTKVKYVTEGMRKPAFLSGEQKKAIVDLLFKTNRKVTVKQLKEDYFKKIECFDSVEISGVEDRFNASLGTYHDLLKIIKDKDFLDNEENEDILEDIVLTLTLFEDREMIEERLKTYAHLFDDKVMKQLKRRRYTGWGRLSRKLINGIRDKQSGKTILDFLKSDGFANRNFMQLIHDDSLTFKEDIQKAQVSGQGDSLHEHIANLAGSPAIKKGILQTVKVVDELVKVMGRHKPENIVIEMARENQTTQKGQKNSRERMKRIEEGIKELGSQILKEHPVENTQLQNEKLYLYYLQNGRDMYVDQELDINRLSDYDVDHIVPQSFLKDDSIDNKVLTRSDKARGKSDNVPSEEVVKKMKNYWRQLLNAKLITQRKFDNLTKAERGGLSELDKAGFIKRQLVETRQITKHVAQILDSRMNTKYDENDKLIREVKVITLKSKLVSDFRKDFQFYKVREINNYHHAHDAYLNAVVGTALIKKYPKLESEFVYGDYKVYDVRKMIAKSEQEIGKATAKYFFYSNIMNFFKTEITLANGEIRKRPLIETNGETGEIVWDKGRDFATVRKVLSMPQVNIVKKTEVQTGGFSKESILPKRNSDKLIARKKDWDPKKYGGFDSPTVAYSVLVVAKVEKGKSKKLKSVKELLGITIMERSSFEKNPIDFLEAKGYKEVKKDLIIKLPKYSLFELENGRKRMLASAGELQKGNELALPSKYVNFLYLASHYEKLKGSPEDNEQKQLFVEQHKHYLDEIIEQISEFSKRVILADANLDKVLSAYNKHRDKPIREQAENIIHLFTLTNLGAPAAFKYFDTTIDRKRYTSTKEVLDATLIHQSITGLYETRIDLSQLGGDGGGSSEAAAKPAPGGTLGDQGSRGSDPLPEPRVTLTVEGIPTEFLVNTGAEHSVLTKPMGKMGSKRTVVAGATGSKVYPWTTKRLLKIGQKQVTHSFLVIPECPAPLLGRDLLTKLKAQIQFSTEGPQVTWEDRPAMCLVLNLEEEYRLHEKPVPPSIDPSWLQLFPMVWAEKAGMGLANQVPPVVVELKSDASPVAVRQYPMSKEAREGIRPHIQRFLDLGILVPCQSPWNTPLLPVKKPGTNDYRPVQDLREVNKRVQDIHPTVPNPYNLLSSLPPSHTWYSVLDLKDAFFCLKLHPNSQPLFAFEWRDPEKGNTGQLTWTRLPQGFKNSPTLFNEALHRDLASFRALNPQVVMLQYVDDLLVAAPTYRDCKEGTRRLLQELSKLGYRVSAKKAQLCREEVTYLGYLLKGGKRWLTPARKATVMKIPTPTTPRQVREFLGTAGFCRLWIPGFASLAAPLYPLTRPKVPFTWTEAHQEAFGRIKEALLSAPALALPDLTKPFALYVDEKEGVARGVLTQTLGPWRRPVAYLSKKLDPVASGWPTCLKAIAAVALLLKDADKLTLGQNVLVIAPHNLESIVRQPPDRWMTNARMTHYQSLLLNERVSFAPPAILNPATLLPVESDDTPIHICSEILAEETGTRPDLRDQPLPGVPAWYTDGSSFIMDGRRQAGAAIVDNKRTVWASNLPEGTSAQKAELIALTQALRLAEGKSINIYTDSRYAFATAHVHGAIYKQRGWLTSAGKDIKNKEEILALLEAIHLPKRVAIIHCPGHQRGTDPVATGNRKADEAAKQAAQSTRILTETTKNAGKRTADGSEFEKRTADGSEFESPKKKAKVE

SEQ ID NO: 7576 - protein, 2218 aa, synthetic construct
MPAAKRVKLDGGDKKYSIGLDIGTNSVGWAVITDEYKVPSKKFKVLGNTDRHSIKKNLIGALLFDSGETAEATRLKRTARRRYTRRKNRICYLQEIFSNEMAKVDDSFFHRLEESFLVEEDKKHERHPIFGNIVDEVAYHEKYPTIYHLRKKLVDSTDKADLRLIYLALAHMIKFRGHFLIEGDLNPDNSDVDKLFIQLVQTYNQLFEENPINASGVDAKAILSARLSKSRRLENLIAQLPGEKKNGLFGNLIALSLGLTPNFKSNFDLAEDAKLQLSKDTYDDDLDNLLAQIGDQYADLFLAAKNLSDAILLSDILRVNTEITKAPLSASMIKRYDEHHQDLTLLKALVRQQLPEKYKEIFFDQSKNGYAGYIDGGASQEEFYKFIKPILEKMDGTEELLVKLNREDLLRKQRTFDNGSIPHQIHLGELHAILRRQEDFYPFLKDNREKIEKILTFRIPYYVGPLARGNSRFAWMTRKSEETITPWNFEEVVDKGASAQSFIERMTNFDKNLPNEKVLPKHSLLYEYFTVYNELTKVKYVTEGMRKPAFLSGEQKKAIVDLLFKTNRKVTVKQLKEDYFKKIECFDSVEISGVEDRFNASLGTYHDLLKIIKDKDFLDNEENEDILEDIVLTLTLFEDREMIEERLKTYAHLFDDKVMKQLKRRRYTGWGRLSRKLINGIRDKQSGKTILDFLKSDGFANRNFMQLIHDDSLTFKEDIQKAQVSGQGDSLHEHIANLAGSPAIKKGILQTVKVVDELVKVMGRHKPENIVIEMARENQTTQKGQKNSRERMKRIEEGIKELGSQILKEHPVENTQLQNEKLYLYYLQNGRDMYVDQELDINRLSDYDVDHIVPQSFLKDDSIDNKVLTRSDKARGKSDNVPSEEVVKKMKNYWRQLLNAKLITQRKFDNLTKAERGGLSELDKAGFIKRQLVETRQITKHVAQILDSRMNTKYDENDKLIREVKVITLKSKLVSDFRKDFQFYKVREINNYHHAHDAYLNAVVGTALIKKYPKLESEFVYGDYKVYDVRKMIAKSEQEIGKATAKYFFYSNIMNFFKTEITLANGEIRKRPLIETNGETGEIVWDKGRDFATVRKVLSMPQVNIVKKTEVQTGGFSKESILPKRNSDKLIARKKDWDPKKYGGFDSPTVAYSVLVVAKVEKGKSKKLKSVKELLGITIMERSSFEKNPIDFLEAKGYKEVKKDLIIKLPKYSLFELENGRKRMLASAGELQKGNELALPSKYVNFLYLASHYEKLKGSPEDNEQKQLFVEQHKHYLDEIIEQISEFSKRVILADANLDKVLSAYNKHRDKPIREQAENIIHLFTLTNLGAPAAFKYFDTTIDRKRYTSTKEVLDATLIHQSITGLYETRIDLSQLGGDGGGSSEAAAKPAPGGTLGDQGSRGSDPLPEPRVTLTVEGIPTEFLVNTGAEHSVLTKPMGKMGSKRTVVAGATGSKVYPWTTKRLLKIGQKQVTHSFLVIPECPAPLLGRDLLTKLKAQIQFSTEGPQVTWEDRPAMCLVLNLEEEYRLHEKPVPPSIDPSWLQLFPMVWAEKAGMGLANQVPPVVVELKSDASPVAVRQYPMSKEAREGIRPHIQRFLDLGILVPCQSPWNTPLLPVKKPGTNDYRPVQDLREVNKRVQDIHPTVPNPYNLLSSLPPSHTWYSVLDLKDAFFCLKLHPNSQPLFAFEWRDPEKGNTGQLTWTRLPQGFKNSPTLFNEALHRDLASFRALNPQVVMLQYVDDLLVAAPTYRDCKEGTRRLLQELSKLGYRVSAKKAQLCREEVTYLGYLLKGGKRWLTPARKATVMKIPTPTTPRQVREFLGKAGFCRLFIPGFASLAAPLYPLTRPKVPFTWTEAHQEAFGRIKEALLSAPALALPDLTKPFALYVDEKEGVARGVLTQTLGPWRRPVAYLSKKLDPVASGWPTCLKAIAAVALLLKDADKLTLGQNVLVIAPHNLESIVRQPPDRWMTNARMTHYQSLLLNERVSFAPPAILNPATLLPVESDDTPIHICSEILAEETGTRPDLRDQPLPGVPAWYTDGSSFIMDGRRQAGAAIVDNKRTVWASNLPEGTSAQKAELIALTQALRLAEGKSINIYTDSRYAFATAHVHGAIYKQRGWLTSAGKDIKNKEEILALLEAIHLPKRVAIIHCPGHQRGTDPVATGNRKADEAAKQAAQSTRILTETTKNAGKRTADGSEFEKRTADGSEFESPKKKAKVE

SEQ ID NO: 7577 - protein, 2096 aa, synthetic construct
MPAAKRVKLDGGDKKYSIGLDIGTNSVGWAVITDEYKVPSKKFKVLGNTDRHSIKKNLIGALLFDSGETAEATRLKRTARRRYTRRKNRICYLQEIFSNEMAKVDDSFFHRLEESFLVEEDKKHERHPIFGNIVDEVAYHEKYPTIYHLRKKLVDSTDKADLRLIYLALAHMIKFRGHFLIEGDLNPDNSDVDKLFIQLVQTYNQLFEENPINASGVDAKAILSARLSKSRRLENLIAQLPGEKKNGLFGNLIALSLGLTPNFKSNFDLAEDAKLQLSKDTYDDDLDNLLAQIGDQYADLFLAAKNLSDAILLSDILRVNTEITKAPLSASMIKRYDEHHQDLTLLKALVRQQLPEKYKEIFFDQSKNGYAGYIDGGASQEEFYKFIKPILEKMDGTEELLVKLNREDLLRKQRTFDNGSIPHQIHLGELHAILRRQEDFYPFLKDNREKIEKILTFRIPYYVGPLARGNSRFAWMTRKSEETITPWNFEEVVDKGASAQSFIERMTNFDKNLPNEKVLPKHSLLYEYFTVYNELTKVKYVTEGMRKPAFLSGEQKKAIVDLLFKTNRKVTVKQLKEDYFKKIECFDSVEISGVEDRFNASLGTYHDLLKIIKDKDFLDNEENEDILEDIVLTLTLFEDREMIEERLKTYAHLFDDKVMKQLKRRRYTGWGRLSRKLINGIRDKQSGKTILDFLKSDGFANRNFMQLIHDDSLTFKEDIQKAQVSGQGDSLHEHIANLAGSPAIKKGILQTVKVVDELVKVMGRHKPENIVIEMARENQTTQKGQKNSRERMKRIEEGIKELGSQILKEHPVENTQLQNEKLYLYYLQNGRDMYVDQELDINRLSDYDVDHIVPQSFLKDDSIDNKVLTRSDKARGKSDNVPSEEVVKKMKNYWRQLLNAKLITQRKFDNLTKAERGGLSELDKAGFIKRQLVETRQITKHVAQILDSRMNTKYDENDKLIREVKVITLKSKLVSDFRKDFQFYKVREINNYHHAHDAYLNAVVGTALIKKYPKLESEFVYGDYKVYDVRKMIAKSEQEIGKATAKYFFYSNIMNFFKTEITLANGEIRKRPLIETNGETGEIVWDKGRDFATVRKVLSMPQVNIVKKTEVQTGGFSKESILPKRNSDKLIARKKDWDPKKYGGFDSPTVAYSVLVVAKVEKGKSKKLKSVKELLGITIMERSSFEKNPIDFLEAKGYKEVKKDLIIKLPKYSLFELENGRKRMLASAGELQKGNELALPSKYVNFLYLASHYEKLKGSPEDNEQKQLFVEQHKHYLDEIIEQISEFSKRVILADANLDKVLSAYNKHRDKPIREQAENIIHLFTLTNLGAPAAFKYFDTTIDRKRYTSTKEVLDATLIHQSITGLYETRIDLSQLGGDGGGSSEAAAKPAPGGTLNLEDEYRLYETSAEPEVSPGSTWLSDFPQAWAETGGMGLAVRQAPLIIPLKATSTPVSIKQYPMSQEAKLGIKPHIQRLLDQGILVPCQSPWNTPLLPVKKPGTNDYRPVQDLREVNKRVEDIHPTVPNPYNLLSGLPPSHRWYTVLDLKDAFFCLRLHPTSQPLFAFEWRDPGMGISGQLTWTRLPQGFKNSPTLFNEALHRDLADFRIQHPDLILLQYVDDILLAATSELDCQQGTRALLLTLGNLGYRASAKKAQLCQKQVKYLGYLLKEGQRWLTEARKETVMGQPTPKTPRQLREFLGTAGFCRLWIPGFAEMAAPLYPLTKPGTLFNWGPDQQKAYQEIKQALLTAPALGLPDLTKPFELFVDEKQGYAKGVLTQKLGPWRRPVAYLSKKLDPVAAGWPPCLRMVAAIAVLRKDAGKLTMGQPLVILAPHAVEALVKQPPDRWLSNARMTHYQAMLLDTDRVQFGPVVALNPATLLPLPEEGAPHDCLEILAETHGTRPDLTDQPIPDADHTWYTDGSSFLQEGQRKAGAAVTTETEVIWARALPAGTSAQRAELIALTQALKMAEGKRLNVYTDSRYAFATAHIHGEIYRRRGWLTSEGREIKNKSEILALLKALFLPKRLSIIHCLGHQKGDSAEARGNRLADQAAREAAIKTPPDTSTLLAGKRTADGSEFEKRTADGSEFESPKKKAKVE

SEQ ID NO: 7578 - protein, 2096 aa, synthetic construct
MPAAKRVKLDGGDKKYSIGLDIGTNSVGWAVITDEYKVPSKKFKVLGNTDRHSIKKNLIGALLFDSGETAEATRLKRTARRRYTRRKNRICYLQEIFSNEMAKVDDSFFHRLEESFLVEEDKKHERHPIFGNIVDEVAYHEKYPTIYHLRKKLVDSTDKADLRLIYLALAHMIKFRGHFLIEGDLNPDNSDVDKLFIQLVQTYNQLFEENPINASGVDAKAILSARLSKSRRLENLIAQLPGEKKNGLFGNLIALSLGLTPNFKSNFDLAEDAKLQLSKDTYDDDLDNLLAQIGDQYADLFLAAKNLSDAILLSDILRVNTEITKAPLSASMIKRYDEHHQDLTLLKALVRQQLPEKYKEIFFDQSKNGYAGYIDGGASQEEFYKFIKPILEKMDGTEELLVKLNREDLLRKQRTFDNGSIPHQIHLGELHAILRRQEDFYPFLKDNREKIEKILTFRIPYYVGPLARGNSRFAWMTRKSEETITPWNFEEVVDKGASAQSFIERMTNFDKNLPNEKVLPKHSLLYEYFTVYNELTKVKYVTEGMRKPAFLSGEQKKAIVDLLFKTNRKVTVKQLKEDYFKKIECFDSVEISGVEDRFNASLGTYHDLLKIIKDKDFLDNEENEDILEDIVLTLTLFEDREMIEERLKTYAHLFDDKVMKQLKRRRYTGWGRLSRKLINGIRDKQSGKTILDFLKSDGFANRNFMQLIHDDSLTFKEDIQKAQVSGQGDSLHEHIANLAGSPAIKKGILQTVKVVDELVKVMGRHKPENIVIEMARENQTTQKGQKNSRERMKRIEEGIKELGSQILKEHPVENTQLQNEKLYLYYLQNGRDMYVDQELDINRLSDYDVDHIVPQSFLKDDSIDNKVLTRSDKARGKSDNVPSEEVVKKMKNYWRQLLNAKLITQRKFDNLTKAERGGLSELDKAGFIKRQLVETRQITKHVAQILDSRMNTKYDENDKLIREVKVITLKSKLVSDFRKDFQFYKVREINNYHHAHDAYLNAVVGTALIKKYPKLESEFVYGDYKVYDVRKMIAKSEQEIGKATAKYFFYSNIMNFFKTEITLANGEIRKRPLIETNGETGEIVWDKGRDFATVRKVLSMPQVNIVKKTEVQTGGFSKESILPKRNSDKLIARKKDWDPKKYGGFDSPTVAYSVLVVAKVEKGKSKKLKSVKELLGITIMERSSFEKNPIDFLEAKGYKEVKKDLIIKLPKYSLFELENGRKRMLASAGELQKGNELALPSKYVNFLYLASHYEKLKGSPEDNEQKQLFVEQHKHYLDEIIEQISEFSKRVILADANLDKVLSAYNKHRDKPIREQAENIIHLFTLTNLGAPAAFKYFDTTIDRKRYTSTKEVLDATLIHQSITGLYETRIDLSQLGGDGGGSSEAAAKPAPGGTLNLEDEYRLYETSAEPEVSPGSTWLSDFPQAWAETGGMGLAVRQAPLIIPLKATSTPVSIKQYPMSQEAKLGIKPHIQRLLDQGILVPCQSPWNTPLLPVKKPGTNDYRPVQDLREVNKRVEDIHPTVPNPYNLLSGLPPSHRWYTVLDLKDAFFCLRLHPTSQPLFAFEWRDPGMGISGQLTWTRLPQGFKNSPTLFNEALHRDLADFRIQHPDLILLQYVDDILLAATSELDCQQGTRALLLTLGNLGYRASAKKAQLCQKQVKYLGYLLKEGQRWLTEARKETVMGQPTPKTPRQLREFLGKAGFCRLFIPGFAEMAAPLYPLTKPGTLFNWGPDQQKAYQEIKQALLTAPALGLPDLTKPFELFVDEKQGYAKGVLTQKLGPWRRPVAYLSKKLDPVAAGWPPCLRMVAAIAVLRKDAGKLTMGQPLVILAPHAVEALVKQPPDRWLSNARMTHYQAMLLDTDRVQFGPVVALNPATLLPLPEEGAPHDCLEILAETHGTRPDLTDQPIPDADHTWYTDGSSFLQEGQRKAGAAVTTETEVIWARALPAGTSAQRAELIALTQALKMAEGKRLNVYTDSRYAFATAHIHGEIYRRRGWLTSEGREIKNKSEILALLKALFLPKRLSIIHCLGHQKGDSAEARGNRLADQAAREAAIKTPPDTSTLLAGKRTADGSEFEKRTADGSEFESPKKKAKVE

SEQ ID NO: 7579 - protein, 2096 aa, synthetic construct
MPAAKRVKLDGGDKKYSIGLDIGTNSVGWAVITDEYKVPSKKFKVLGNTDRHSIKKNLIGALLFDSGETAEATRLKRTARRRYTRRKNRICYLQEIFSNEMAKVDDSFFHRLEESFLVEEDKKHERHPIFGNIVDEVAYHEKYPTIYHLRKKLVDSTDKADLRLIYLALAHMIKFRGHFLIEGDLNPDNSDVDKLFIQLVQTYNQLFEENPINASGVDAKAILSARLSKSRRLENLIAQLPGEKKNGLFGNLIALSLGLTPNFKSNFDLAEDAKLQLSKDTYDDDLDNLLAQIGDQYADLFLAAKNLSDAILLSDILRVNTEITKAPLSASMIKRYDEHHQDLTLLKALVRQQLPEKYKEIFFDQSKNGYAGYIDGGASQEEFYKFIKPILEKMDGTEELLVKLNREDLLRKQRTFDNGSIPHQIHLGELHAILRRQEDFYPFLKDNREKIEKILTFRIPYYVGPLARGNSRFAWMTRKSEETITPWNFEEVVDKGASAQSFIERMTNFDKNLPNEKVLPKHSLLYEYFTVYNELTKVKYVTEGMRKPAFLSGEQKKAIVDLLFKTNRKVTVKQLKEDYFKKIECFDSVEISGVEDRFNASLGTYHDLLKIIKDKDFLDNEENEDILEDIVLTLTLFEDREMIEERLKTYAHLFDDKVMKQLKRRRYTGWGRLSRKLINGIRDKQSGKTILDFLKSDGFANRNFMQLIHDDSLTFKEDIQKAQVSGQGDSLHEHIANLAGSPAIKKGILQTVKVVDELVKVMGRHKPENIVIEMARENQTTQKGQKNSRERMKRIEEGIKELGSQILKEHPVENTQLQNEKLYLYYLQNGRDMYVDQELDINRLSDYDVDHIVPQSFLKDDSIDNKVLTRSDKARGKSDNVPSEEVVKKMKNYWRQLLNAKLITQRKFDNLTKAERGGLSELDKAGFIKRQLVETRQITKHVAQILDSRMNTKYDENDKLIREVKVITLKSKLVSDFRKDFQFYKVREINNYHHAHDAYLNAVVGTALIKKYPKLESEFVYGDYKVYDVRKMIAKSEQEIGKATAKYFFYSNIMNFFKTEITLANGEIRKRPLIETNGETGEIVWDKGRDFATVRKVLSMPQVNIVKKTEVQTGGFSKESILPKRNSDKLIARKKDWDPKKYGGFDSPTVAYSVLVVAKVEKGKSKKLKSVKELLGITIMERSSFEKNPIDFLEAKGYKEVKKDLIIKLPKYSLFELENGRKRMLASAGELQKGNELALPSKYVNFLYLASHYEKLKGSPEDNEQKQLFVEQHKHYLDEIIEQISEFSKRVILADANLDKVLSAYNKHRDKPIREQAENIIHLFTLTNLGAPAAFKYFDTTIDRKRYTSTKEVLDATLIHQSITGLYETRIDLSQLGGDGGGSSEAAAKPAPGGTLGIEDEYRLHETSTEPDVSLGSTWLSDFPQAWAETGGMGLAVRQAPLIIPLKATSTPVSIQQYPMSHEARLGIKPHIQRLLDQGILVPCQSPWNTPLLPVKKPGTNDYRPVQDLREVNKRVEDIHPTVPNPYNLLSGLPPSHQWYTVLDLKDAFFCLRLHPTSQPLFAFEWRDPGMGISGQLTWTRLPQGFKNSPTLFDEALHRDLADFRIQHPDLILLQYVDDILLAATSELDCQQGTRALLQTLGDLGYRASAKKAQICQKQVKYLGYLLREGQRWLTEARKETVMGQPVPKTPRQLREFLGTAGFCRLWIPGFAEMAAPLYPLTKTGTLFSWGPDQQKAYQEIKQALLTAPALGLPDLTKPFELFVDEKQGYAKGVLTQKLGPWRRPVAYLSKKLDPVAAGWPPCLRMVAAIAVLTKDAGKLTMGQPLVILAPHAVEALVKQPPDRWLSNARMTHYQAMLLDTDRVQFGPVVALNPATLLPLPEEGAPHDCLEILAETHGTRPDLTDQPIPDADHTWYTDGSSFLQEGQRKAGAAVTTETEVIWAGALPAGTSAQRAELIALTQALKMAEGKRLNVYTDSRYAFATAHIHGEIYRRRGLLTSEGREIKNKSEILALLKALFLPKRLSIIHCLGHQKGDSAEARGNRLADQAAREAAIKTPPDTSTLLAGKRTADGSEFEKRTADGSEFESPKKKAKVE

SEQ ID NO: 7580 - protein, 2096 aa, synthetic construct
MPAAKRVKLDGGDKKYSIGLDIGTNSVGWAVITDEYKVPSKKFKVLGNTDRHSIKKNLIGALLFDSGETAEATRLKRTARRRYTRRKNRICYLQEIFSNEMAKVDDSFFHRLEESFLVEEDKKHERHPIFGNIVDEVAYHEKYPTIYHLRKKLVDSTDKADLRLIYLALAHMIKFRGHFLIEGDLNPDNSDVDKLFIQLVQTYNQLFEENPINASGVDAKAILSARLSKSRRLENLIAQLPGEKKNGLFGNLIALSLGLTPNFKSNFDLAEDAKLQLSKDTYDDDLDNLLAQIGDQYADLFLAAKNLSDAILLSDILRVNTEITKAPLSASMIKRYDEHHQDLTLLKALVRQQLPEKYKEIFFDQSKNGYAGYIDGGASQEEFYKFIKPILEKMDGTEELLVKLNREDLLRKQRTFDNGSIPHQIHLGELHAILRRQEDFYPFLKDNREKIEKILTFRIPYYVGPLARGNSRFAWMTRKSEETITPWNFEEVVDKGASAQSFIERMTNFDKNLPNEKVLPKHSLLYEYFTVYNELTKVKYVTEGMRKPAFLSGEQKKAIVDLLFKTNRKVTVKQLKEDYFKKIECFDSVEISGVEDRFNASLGTYHDLLKIIKDKDFLDNEENEDILEDIVLTLTLFEDREMIEERLKTYAHLFDDKVMKQLKRRRYTGWGRLSRKLINGIRDKQSGKTILDFLKSDGFANRNFMQLIHDDSLTFKEDIQKAQVSGQGDSLHEHIANLAGSPAIKKGILQTVKVVDELVKVMGRHKPENIVIEMARENQTTQKGQKNSRERMKRIEEGIKELGSQILKEHPVENTQLQNEKLYLYYLQNGRDMYVDQELDINRLSDYDVDHIVPQSFLKDDSIDNKVLTRSDKARGKSDNVPSEEVVKKMKNYWRQLLNAKLITQRKFDNLTKAERGGLSELDKAGFIKRQLVETRQITKHVAQILDSRMNTKYDENDKLIREVKVITLKSKLVSDFRKDFQFYKVREINNYHHAHDAYLNAVVGTALIKKYPKLESEFVYGDYKVYDVRKMIAKSEQEIGKATAKYFFYSNIMNFFKTEITLANGEIRKRPLIETNGETGEIVWDKGRDFATVRKVLSMPQVNIVKKTEVQTGGFSKESILPKRNSDKLIARKKDWDPKKYGGFDSPTVAYSVLVVAKVEKGKSKKLKSVKELLGITIMERSSFEKNPIDFLEAKGYKEVKKDLIIKLPKYSLFELENGRKRMLASAGELQKGNELALPSKYVNFLYLASHYEKLKGSPEDNEQKQLFVEQHKHYLDEIIEQISEFSKRVILADANLDKVLSAYNKHRDKPIREQAENIIHLFTLTNLGAPAAFKYFDTTIDRKRYTSTKEVLDATLIHQSITGLYETRIDLSQLGGDGGGSSEAAAKPAPGGTLNIEDEYRLHETSKEPDVSLGSTWLSDFPQAWAETGGMGLAVRQAPLIIPLKATSTPVSIKQYPMSQEARLGIKPHIQRLLDQGILVPCQSPWNTPLLPVKKPGTNDYRPVQDLREVNKRVEDIHPTVPNPYNLLSGLPPSHQWYTVLDLKDAFFCLRLHPTSQPLFAFEWRDPEMGISGQLTWTRLPQGFKNSPTLFNEALHRDLAGFRIQHPDLILLQYVDDLLLAATSELDCQQGTRALLQTLGDLGYRASAKKAQICQKQVKYLGYLLKEGQRWLTEARKETVMGQPIPKTPRQLREFLGTAGFCRLWIPGFAEMAAPLYPLTKPGTLFNWGPDQQKAFQEIKQALLTAPALGLPDLTKPFELFVDEKQGYAKGVLTQKLGPWRRPVAYLSKKLDPVAAGWPPCLRMVAAIAVLTKDAGKLTMGQPLVILAPHAVEALVKQPPDRWLSNARMTHYQALLLDTDRVQFGPVVALNPATLLPLPEEGLQHDCLDILAEAHGTRSDLMDQPLPDADHTWYTDGSSFLQEGQRKAGAAVTTETEVIWARALPAGTSAQRAELIALTQALKMAEGKKLNVYTDSRYAFATAHIHGEIYRRRGWLTSEGKEIKNKDEILALLKALFLPKRLSIIHCPGHQKGNSAEARGNRMADQAAREVATRETPETSTLLAGKRTADGSEFEKRTADGSEFESPKKKAKVE

SEQ ID NO: 7581 - protein, 2096 aa, synthetic construct
MPAAKRVKLDGGDKKYSIGLDIGTNSVGWAVITDEYKVPSKKFKVLGNTDRHSIKKNLIGALLFDSGETAEATRLKRTARRRYTRRKNRICYLQEIFSNEMAKVDDSFFHRLEESFLVEEDKKHERHPIFGNIVDEVAYHEKYPTIYHLRKKLVDSTDKADLRLIYLALAHMIKFRGHFLIEGDLNPDNSDVDKLFIQLVQTYNQLFEENPINASGVDAKAILSARLSKSRRLENLIAQLPGEKKNGLFGNLIALSLGLTPNFKSNFDLAEDAKLQLSKDTYDDDLDNLLAQIGDQYADLFLAAKNLSDAILLSDILRVNTEITKAPLSASMIKRYDEHHQDLTLLKALVRQQLPEKYKEIFFDQSKNGYAGYIDGGASQEEFYKFIKPILEKMDGTEELLVKLNREDLLRKQRTFDNGSIPHQIHLGELHAILRRQEDFYPFLKDNREKIEKILTFRIPYYVGPLARGNSRFAWMTRKSEETITPWNFEEVVDKGASAQSFIERMTNFDKNLPNEKVLPKHSLLYEYFTVYNELTKVKYVTEGMRKPAFLSGEQKKAIVDLLFKTNRKVTVKQLKEDYFKKIECFDSVEISGVEDRFNASLGTYHDLLKIIKDKDFLDNEENEDILEDIVLTLTLFEDREMIEERLKTYAHLFDDKVMKQLKRRRYTGWGRLSRKLINGIRDKQSGKTILDFLKSDGFANRNFMQLIHDDSLTFKEDIQKAQVSGQGDSLHEHIANLAGSPAIKKGILQTVKVVDELVKVMGRHKPENIVIEMARENQTTQKGQKNSRERMKRIEEGIKELGSQILKEHPVENTQLQNEKLYLYYLQNGRDMYVDQELDINRLSDYDVDHIVPQSFLKDDSIDNKVLTRSDKARGKSDNVPSEEVVKKMKNYWRQLLNAKLITQRKFDNLTKAERGGLSELDKAGFIKRQLVETRQITKHVAQILDSRMNTKYDENDKLIREVKVITLKSKLVSDFRKDFQFYKVREINNYHHAHDAYLNAVVGTALIKKYPKLESEFVYGDYKVYDVRKMIAKSEQEIGKATAKYFFYSNIMNFFKTEITLANGEIRKRPLIETNGETGEIVWDKGRDFATVRKVLSMPQVNIVKKTEVQTGGFSKESILPKRNSDKLIARKKDWDPKKYGGFDSPTVAYSVLVVAKVEKGKSKKLKSVKELLGITIMERSSFEKNPIDFLEAKGYKEVKKDLIIKLPKYSLFELENGRKRMLASAGELQKGNELALPSKYVNFLYLASHYEKLKGSPEDNEQKQLFVEQHKHYLDEIIEQISEFSKRVILADANLDKVLSAYNKHRDKPIREQAENIIHLFTLTNLGAPAAFKYFDTTIDRKRYTSTKEVLDATLIHQSITGLYETRIDLSQLGGDGGGSSEAAAKPAPGGTLNIEDEYRLHEISTEPDVSPGSTWLSDFPQAWAETGGMGLAVRQAPLIIPLKATSTPVSIKQYPMSQEAKLGIKPHIQRLLDQGILVPCQSPWNTPLLPVKKPGTNDYRPVQGLREVNKRVEDIHPTVPNPYNLLSGLPTSHRWYTVLDLKDAFFCLRLHPTSQPLFASEWRDPGMGISGQLTWTRLPQGFKNSPTLFNEALHRGLADFRIQHPDLILLQYVDDLLLAATSELDCQQGTRALLKTLGNLGYRASAKKAQICQKQVKYLGYLLREGQRWLTEARKETVMGQPTPKTPRQLREFLGKAGFCRLFIPRFAEMAAPLYPLTKPGTLFNWGPDQQKAYHEIKQALLTAPALGLPDLTKPFELFVDEKQGYAKGVLTQKLGPWRRPVAYLSKKLDPVAAGWPPCLRMVAAIAVLTKDAGKLTMGQPLVILAPHAVEALVKQPPDRWLSNARMTHYQAMLLDTDRVQFGPVVALNPATLLPLPEEGAPHDCLEILAETHGTEPDLTDQPIPDADHTWYTDGSSFLQEGQRKAGAAVTTETEVIWARALPAGTSAQRAELIALTQALKMAEGKRLNVYTDSRYAFATAHIHGEIYKRRGWLTSEGREIKNKSEILALLKALFLPKRLSIIHCLGHQKGDSAEARGNRLADQAAREAAIKTPPDTSTLLAGKRTADGSEFEKRTADGSEFESPKKKAKVE

SEQ ID NO: 7582 - protein, 2090 aa, synthetic construct
MPAAKRVKLDGGDKKYSIGLDIGTNSVGWAVITDEYKVPSKKFKVLGNTDRHSIKKNLIGALLFDSGETAEATRLKRTARRRYTRRKNRICYLQEIFSNEMAKVDDSFFHRLEESFLVEEDKKHERHPIFGNIVDEVAYHEKYPTIYHLRKKLVDSTDKADLRLIYLALAHMIKFRGHFLIEGDLNPDNSDVDKLFIQLVQTYNQLFEENPINASGVDAKAILSARLSKSRRLENLIAQLPGEKKNGLFGNLIALSLGLTPNFKSNFDLAEDAKLQLSKDTYDDDLDNLLAQIGDQYADLFLAAKNLSDAILLSDILRVNTEITKAPLSASMIKRYDEHHQDLTLLKALVRQQLPEKYKEIFFDQSKNGYAGYIDGGASQEEFYKFIKPILEKMDGTEELLVKLNREDLLRKQRTFDNGSIPHQIHLGELHAILRRQEDFYPFLKDNREKIEKILTFRIPYYVGPLARGNSRFAWMTRKSEETITPWNFEEVVDKGASAQSFIERMTNFDKNLPNEKVLPKHSLLYEYFTVYNELTKVKYVTEGMRKPAFLSGEQKKAIVDLLFKTNRKVTVKQLKEDYFKKIECFDSVEISGVEDRFNASLGTYHDLLKIIKDKDFLDNEENEDILEDIVLTLTLFEDREMIEERLKTYAHLFDDKVMKQLKRRRYTGWGRLSRKLINGIRDKQSGKTILDFLKSDGFANRNFMQLIHDDSLTFKEDIQKAQVSGQGDSLHEHIANLAGSPAIKKGILQTVKVVDELVKVMGRHKPENIVIEMARENQTTQKGQKNSRERMKRIEEGIKELGSQILKEHPVENTQLQNEKLYLYYLQNGRDMYVDQELDINRLSDYDVDHIVPQSFLKDDSIDNKVLTRSDKARGKSDNVPSEEVVKKMKNYWRQLLNAKLITQRKFDNLTKAERGGLSELDKAGFIKRQLVETRQITKHVAQILDSRMNTKYDENDKLIREVKVITLKSKLVSDFRKDFQFYKVREINNYHHAHDAYLNAVVGTALIKKYPKLESEFVYGDYKVYDVRKMIAKSEQEIGKATAKYFFYSNIMNFFKTEITLANGEIRKRPLIETNGETGEIVWDKGRDFATVRKVLSMPQVNIVKKTEVQTGGFSKESILPKRNSDKLIARKKDWDPKKYGGFDSPTVAYSVLVVAKVEKGKSKKLKSVKELLGITIMERSSFEKNPIDFLEAKGYKEVKKDLIIKLPKYSLFELENGRKRMLASAGELQKGNELALPSKYVNFLYLASHYEKLKGSPEDNEQKQLFVEQHKHYLDEIIEQISEFSKRVILADANLDKVLSAYNKHRDKPIREQAENIIHLFTLTNLGAPAAFKYFDTTIDRKRYTSTKEVLDATLIHQSITGLYETRIDLSQLGGDGGGSSEAAAKPAPGGTLQLDDEYRLYSPLVKPDQNIQFWLEQFPQAWAETAGMGLAKQVPPQVIQLKASATPVSVRQYPLSKEAQEGIRPHVQRLIQQGILVPVQSPWNTPLLPVRKPGTNDYRPVQDLREVNKRVQDIHPTVPNPYNLLCALPPQRSWYTVLDLKDAFFCLRLHPTSQPLFAFEWRDPGTGRTGQLTWTRLPQGFKNSPTIFDEALHRDLANFRIQHPQVTLLQYVDDLLLAGATKQDCLEGTKALLLELSDLGYRASAKKAQICRREVTYLGYSLRDGQRWLTEARKKTVVQIPAPTTAKQVREFLGTAGFCRLWIPGFATLAAPLYPLTKEKGEFSWAPEHQKAFDAIKKALLSAPALALPDVTKPFTLYVDERKGVARGVLTQTLGPWRRPVAYLSKKLDPVASGWPVCLKAIAAVAILVKDADKLTLGQNITVIAPHALENIVRQPPDRWMTNARMTHYQSLLLTERVTFAPPAALNPATLLPEETDEPVTHDCHQLLIEETGVRKDLTDIPLTGEVLTWFTDGSSYVVEGKRMAGAAVVDGTRTIWASSLPEGTSAQKAELMALTQALRLAEGKSINIYTDSRYAFATAHVHGAIYKQRGLLTSAGREIKNKEEILSLLEALHLPKRLAIIHCPGHQKAKDPISRGNQMADRVAKQAAQGVNLLAGKRTADGSEFEKRTADGSEFESPKKKAKVE

SEQ ID NO: 7583 - protein, 2176 aa, synthetic construct
MPAAKRVKLDGGDKKYSIGLDIGTNSVGWAVITDEYKVPSKKFKVLGNTDRHSIKKNLIGALLFDSGETAEATRLKRTARRRYTRRKNRICYLQEIFSNEMAKVDDSFFHRLEESFLVEEDKKHERHPIFGNIVDEVAYHEKYPTIYHLRKKLVDSTDKADLRLIYLALAHMIKFRGHFLIEGDLNPDNSDVDKLFIQLVQTYNQLFEENPINASGVDAKAILSARLSKSRRLENLIAQLPGEKKNGLFGNLIALSLGLTPNFKSNFDLAEDAKLQLSKDTYDDDLDNLLAQIGDQYADLFLAAKNLSDAILLSDILRVNTEITKAPLSASMIKRYDEHHQDLTLLKALVRQQLPEKYKEIFFDQSKNGYAGYIDGGASQEEFYKFIKPILEKMDGTEELLVKLNREDLLRKQRTFDNGSIPHQIHLGELHAILRRQEDFYPFLKDNREKIEKILTFRIPYYVGPLARGNSRFAWMTRKSEETITPWNFEEVVDKGASAQSFIERMTNFDKNLPNEKVLPKHSLLYEYFTVYNELTKVKYVTEGMRKPAFLSGEQKKAIVDLLFKTNRKVTVKQLKEDYFKKIECFDSVEISGVEDRFNASLGTYHDLLKIIKDKDFLDNEENEDILEDIVLTLTLFEDREMIEERLKTYAHLFDDKVMKQLKRRRYTGWGRLSRKLINGIRDKQSGKTILDFLKSDGFANRNFMQLIHDDSLTFKEDIQKAQVSGQGDSLHEHIANLAGSPAIKKGILQTVKVVDELVKVMGRHKPENIVIEMARENQTTQKGQKNSRERMKRIEEGIKELGSQILKEHPVENTQLQNEKLYLYYLQNGRDMYVDQELDINRLSDYDVDHIVPQSFLKDDSIDNKVLTRSDKARGKSDNVPSEEVVKKMKNYWRQLLNAKLITQRKFDNLTKAERGGLSELDKAGFIKRQLVETRQITKHVAQILDSRMNTKYDENDKLIREVKVITLKSKLVSDFRKDFQFYKVREINNYHHAHDAYLNAVVGTALIKKYPKLESEFVYGDYKVYDVRKMIAKSEQEIGKATAKYFFYSNIMNFFKTEITLANGEIRKRPLIETNGETGEIVWDKGRDFATVRKVLSMPQVNIVKKTEVQTGGFSKESILPKRNSDKLIARKKDWDPKKYGGFDSPTVAYSVLVVAKVEKGKSKKLKSVKELLGITIMERSSFEKNPIDFLEAKGYKEVKKDLIIKLPKYSLFELENGRKRMLASAGELQKGNELALPSKYVNFLYLASHYEKLKGSPEDNEQKQLFVEQHKHYLDEIIEQISEFSKRVILADANLDKVLSAYNKHRDKPIREQAENIIHLFTLTNLGAPAAFKYFDTTIDRKRYTSTKEVLDATLIHQSITGLYETRIDLSQLGGDGGGSSEAAAKPAPGGMDPLQLLQPLEAEIKGTKLKAHWNSGATITCVPQAFLEEEVPIKNIWIKTIHGEKEQPVYYLTFKIQGRKVEAEVISSPYDYILVSPSDIPWLMKKPLQLTTLVPLQEYEERLLKQTMLTGSYKEKLQSLFLKYDALWQHWENQVGHRRIKPHHIATGTVNPRPQKQYPINPKAKASIQTVINDLLKQGVLIQQNSIMNTPVYPVPKPDGKWRMVLDYREVNKTIPLIAAQNQHSAGILSSIFRGKYKTTLDLSNGFWAHSITPESYWLTAFTWLGQQYCWTRLPQGFLNSPALFNADVVDLLKEVPNVQVYVDDIYISHDDPREHLEQLEKVFSLLLNAGYVVSLKKSEIAQHEVEFLGFNITKEGRGLTETFKQKLLNITPPRDLKQLQSILGKLNFARNFIPNFSELVKPLYNIIATAPGKYITWTTDNSQQLQNIISMLNSAENLEERNPEVRLIMKVNTSPSAGYIRFYNEFAKRPIMYLNYVYTKAEVKFTNTEKLLTTIHKGLIKALDLGMGQEILVYSPIVSMTKIQKTPLPERKALPIRWITWMSYLEDPRIQFHYDKTLPELQQVPTVTDDIIAKIKHPSEFSMVFYTDGSAIKHPNVNKSHNAGMGIAQVQFKPEFTVINTWSIPLGDHTAQLAEVAAVEFACKKALKIDGPVLIVTDSFYVAESVNKELPYWQSNGFFNNKKKPLKHVSKWKSIADCIQLKPDIIIIHEKGHQPTASTFHTEGNNLADKLATQGSYVVNAGKRTADGSEFEKRTADGSEFESPKKKAKVE

SEQ ID NO: 7584 - protein, 2094 aa, synthetic construct
MPAAKRVKLDGGDKKYSIGLDIGTNSVGWAVITDEYKVPSKKFKVLGNTDRHSIKKNLIGALLFDSGETAEATRLKRTARRRYTRRKNRICYLQEIFSNEMAKVDDSFFHRLEESFLVEEDKKHERHPIFGNIVDEVAYHEKYPTIYHLRKKLVDSTDKADLRLIYLALAHMIKFRGHFLIEGDLNPDNSDVDKLFIQLVQTYNQLFEENPINASGVDAKAILSARLSKSRRLENLIAQLPGEKKNGLFGNLIALSLGLTPNFKSNFDLAEDAKLQLSKDTYDDDLDNLLAQIGDQYADLFLAAKNLSDAILLSDILRVNTEITKAPLSASMIKRYDEHHQDLTLLKALVRQQLPEKYKEIFFDQSKNGYAGYIDGGASQEEFYKFIKPILEKMDGTEELLVKLNREDLLRKQRTFDNGSIPHQIHLGELHAILRRQEDFYPFLKDNREKIEKILTFRIPYYVGPLARGNSRFAWMTRKSEETITPWNFEEVVDKGASAQSFIERMTNFDKNLPNEKVLPKHSLLYEYFTVYNELTKVKYVTEGMRKPAFLSGEQKKAIVDLLFKTNRKVTVKQLKEDYFKKIECFDSVEISGVEDRFNASLGTYHDLLKIIKDKDFLDNEENEDILEDIVLTLTLFEDREMIEERLKTYAHLFDDKVMKQLKRRRYTGWGRLSRKLINGIRDKQSGKTILDFLKSDGFANRNFMQLIHDDSLTFKEDIQKAQVSGQGDSLHEHIANLAGSPAIKKGILQTVKVVDELVKVMGRHKPENIVIEMARENQTTQKGQKNSRERMKRIEEGIKELGSQILKEHPVENTQLQNEKLYLYYLQNGRDMYVDQELDINRLSDYDVDHIVPQSFLKDDSIDNKVLTRSDKARGKSDNVPSEEVVKKMKNYWRQLLNAKLITQRKFDNLTKAERGGLSELDKAGFIKRQLVETRQITKHVAQILDSRMNTKYDENDKLIREVKVITLKSKLVSDFRKDFQFYKVREINNYHHAHDAYLNAVVGTALIKKYPKLESEFVYGDYKVYDVRKMIAKSEQEIGKATAKYFFYSNIMNFFKTEITLANGEIRKRPLIETNGETGEIVWDKGRDFATVRKVLSMPQVNIVKKTEVQTGGFSKESILPKRNSDKLIARKKDWDPKKYGGFDSPTVAYSVLVVAKVEKGKSKKLKSVKELLGITIMERSSFEKNPIDFLEAKGYKEVKKDLIIKLPKYSLFELENGRKRMLASAGELQKGNELALPSKYVNFLYLASHYEKLKGSPEDNEQKQLFVEQHKHYLDEIIEQISEFSKRVILADANLDKVLSAYNKHRDKPIREQAENIIHLFTLTNLGAPAAFKYFDTTIDRKRYTSTKEVLDATLIHQSITGLYETRIDLSQLGGDGGGSSEAAAKPAPGGVLNLEEEYRLHEKPVPSSIDPSWLQLFPTVWAERAGMGLANQVPPVVVELRSGASPVAVRQYPMSKEAREGIRPHIQRFLDLGVLVPCQSPWNTPLLPVKKPGTNDYRPVQDLREINKRVQDIHPTVPNPYNLLSSLPPSHTWYSVLDLKDAFFCLKLHPNSQPLFAFEWRDPEKGNTGQLTWTRLPQGFKNSPTLFDEALHRDLAPFRALNPQVVLLQYVDDLLVAAPTYRDCKEGTQKLLQELSKLGYRVSAKKAQLCQKEVTYLGYLLKEGKRWLTPARKATVMKIPPPTTPRQVREFLGTAGFCRLWIPGFASLAAPLYPLTKESIPFIWTEEHQKAFDRIKEALLSAPALALPDLTKPFTLYVDERAGVARGVLTQTLGPWRRPVAYLSKKLDPVASGWPTCLKAVAAVALLLKDADKLTLGQNVTVIASHSLESIVRQPPDRWMTNARMTHYQSLLLNERVSFAPPAVLNPATLLPVESEATPVHRCSEILAEETGTRRDLKDQPLPGVPAWYTDGSSFIAEGKRRAGAAIVDGKRTVWASSLPEGTSAQKAELVALTQALRLAEGKDINIYTDSRYAFATAHIHGAIYKQRGLLTSAGKDIKNKEEILALLEAIHLPKRVAIIHCPGHQKGNDPVATGNRRADEAAKQAALSTRVLAETTKPAGKRTADGSEFEKRTADGSEFESPKKKAKVE

SEQ ID NO: 7585 - protein, 2094 aa, synthetic construct
MPAAKRVKLDGGDKKYSIGLDIGTNSVGWAVITDEYKVPSKKFKVLGNTDRHSIKKNLIGALLFDSGETAEATRLKRTARRRYTRRKNRICYLQEIFSNEMAKVDDSFFHRLEESFLVEEDKKHERHPIFGNIVDEVAYHEKYPTIYHLRKKLVDSTDKADLRLIYLALAHMIKFRGHFLIEGDLNPDNSDVDKLFIQLVQTYNQLFEENPINASGVDAKAILSARLSKSRRLENLIAQLPGEKKNGLFGNLIALSLGLTPNFKSNFDLAEDAKLQLSKDTYDDDLDNLLAQIGDQYADLFLAAKNLSDAILLSDILRVNTEITKAPLSASMIKRYDEHHQDLTLLKALVRQQLPEKYKEIFFDQSKNGYAGYIDGGASQEEFYKFIKPILEKMDGTEELLVKLNREDLLRKQRTFDNGSIPHQIHLGELHAILRRQEDFYPFLKDNREKIEKILTFRIPYYVGPLARGNSRFAWMTRKSEETITPWNFEEVVDKGASAQSFIERMTNFDKNLPNEKVLPKHSLLYEYFTVYNELTKVKYVTEGMRKPAFLSGEQKKAIVDLLFKTNRKVTVKQLKEDYFKKIECFDSVEISGVEDRFNASLGTYHDLLKIIKDKDFLDNEENEDILEDIVLTLTLFEDREMIEERLKTYAHLFDDKVMKQLKRRRYTGWGRLSRKLINGIRDKQSGKTILDFLKSDGFANRNFMQLIHDDSLTFKEDIQKAQVSGQGDSLHEHIANLAGSPAIKKGILQTVKVVDELVKVMGRHKPENIVIEMARENQTTQKGQKNSRERMKRIEEGIKELGSQILKEHPVENTQLQNEKLYLYYLQNGRDMYVDQELDINRLSDYDVDHIVPQSFLKDDSIDNKVLTRSDKARGKSDNVPSEEVVKKMKNYWRQLLNAKLITQRKFDNLTKAERGGLSELDKAGFIKRQLVETRQITKHVAQILDSRMNTKYDENDKLIREVKVITLKSKLVSDFRKDFQFYKVREINNYHHAHDAYLNAVVGTALIKKYPKLESEFVYGDYKVYDVRKMIAKSEQEIGKATAKYFFYSNIMNFFKTEITLANGEIRKRPLIETNGETGEIVWDKGRDFATVRKVLSMPQVNIVKKTEVQTGGFSKESILPKRNSDKLIARKKDWDPKKYGGFDSPTVAYSVLVVAKVEKGKSKKLKSVKELLGITIMERSSFEKNPIDFLEAKGYKEVKKDLIIKLPKYSLFELENGRKRMLASAGELQKGNELALPSKYVNFLYLASHYEKLKGSPEDNEQKQLFVEQHKHYLDEIIEQISEFSKRVILADANLDKVLSAYNKHRDKPIREQAENIIHLFTLTNLGAPAAFKYFDTTIDRKRYTSTKEVLDATLIHQSITGLYETRIDLSQLGGDGGGSSEAAAKPAPGGVLNLEEEYRLHEKPVPSSIDPSWLQLFPTVWAERAGMGLANQVPPVVVELRSGASPVAVRQYPMSKEAREGIRPHIQRFLDLGVLVPCQSPWNTPLLPVKKPGTNDYRPVQDLREINKRVQDIHPTVPNPYNLLSSLPPSHTWYSVLDLKDAFFCLKLHPNSQPLFAFEWRDPEKGNTGQLTWTRLPQGFKNSPTLFNEALHRDLAPFRALNPQVVLLQYVDDLLVAAPTYRDCKEGTQKLLQELSKLGYRVSAKKAQLCQKEVTYLGYLLKEGKRWLTPARKATVMKIPPPTTPRQVREFLGTAGFCRLWIPGFASLAAPLYPLTKPSIPFIWTEEHQKAFDRIKEALLSAPALALPDLTKPFTLYVDERAGVARGVLTQTLGPWRRPVAYLSKKLDPVASGWPTCLKAVAAVALLLKDADKLTLGQNVTVIASHSLESIVRQPPDRWMTNARMTHYQSLLLNERVSFAPPAVLNPATLLPVESEATPVHRCSEILAEETGTRRDLKDQPLPGVPAWYTDGSSFIAEGKRRAGAAIVDGKRTVWASSLPEGTSAQKAELVALTQALRLAEGKDINIYTDSRYAFATAHIHGAIYKQRGWLTSAGKDIKNKEEILALLEAIHLPKRVAIIHCPGHQKGNDPVATGNRRADEAAKQAALSTRVLAETTKPAGKRTADGSEFEKRTADGSEFESPKKKAKVE

SEQ ID NO: 7586 - protein, 2094 aa, synthetic construct
MPAAKRVKLDGGDKKYSIGLDIGTNSVGWAVITDEYKVPSKKFKVLGNTDRHSIKKNLIGALLFDSGETAEATRLKRTARRRYTRRKNRICYLQEIFSNEMAKVDDSFFHRLEESFLVEEDKKHERHPIFGNIVDEVAYHEKYPTIYHLRKKLVDSTDKADLRLIYLALAHMIKFRGHFLIEGDLNPDNSDVDKLFIQLVQTYNQLFEENPINASGVDAKAILSARLSKSRRLENLIAQLPGEKKNGLFGNLIALSLGLTPNFKSNFDLAEDAKLQLSKDTYDDDLDNLLAQIGDQYADLFLAAKNLSDAILLSDILRVNTEITKAPLSASMIKRYDEHHQDLTLLKALVRQQLPEKYKEIFFDQSKNGYAGYIDGGASQEEFYKFIKPILEKMDGTEELLVKLNREDLLRKQRTFDNGSIPHQIHLGELHAILRRQEDFYPFLKDNREKIEKILTFRIPYYVGPLARGNSRFAWMTRKSEETITPWNFEEVVDKGASAQSFIERMTNFDKNLPNEKVLPKHSLLYEYFTVYNELTKVKYVTEGMRKPAFLSGEQKKAIVDLLFKTNRKVTVKQLKEDYFKKIECFDSVEISGVEDRFNASLGTYHDLLKIIKDKDFLDNEENEDILEDIVLTLTLFEDREMIEERLKTYAHLFDDKVMKQLKRRRYTGWGRLSRKLINGIRDKQSGKTILDFLKSDGFANRNFMQLIHDDSLTFKEDIQKAQVSGQGDSLHEHIANLAGSPAIKKGILQTVKVVDELVKVMGRHKPENIVIEMARENQTTQKGQKNSRERMKRIEEGIKELGSQILKEHPVENTQLQNEKLYLYYLQNGRDMYVDQELDINRLSDYDVDHIVPQSFLKDDSIDNKVLTRSDKARGKSDNVPSEEVVKKMKNYWRQLLNAKLITQRKFDNLTKAERGGLSELDKAGFIKRQLVETRQITKHVAQILDSRMNTKYDENDKLIREVKVITLKSKLVSDFRKDFQFYKVREINNYHHAHDAYLNAVVGTALIKKYPKLESEFVYGDYKVYDVRKMIAKSEQEIGKATAKYFFYSNIMNFFKTEITLANGEIRKRPLIETNGETGEIVWDKGRDFATVRKVLSMPQVNIVKKTEVQTGGFSKESILPKRNSDKLIARKKDWDPKKYGGFDSPTVAYSVLVVAKVEKGKSKKLKSVKELLGITIMERSSFEKNPIDFLEAKGYKEVKKDLIIKLPKYSLFELENGRKRMLASAGELQKGNELALPSKYVNFLYLASHYEKLKGSPEDNEQKQLFVEQHKHYLDEIIEQISEFSKRVILADANLDKVLSAYNKHRDKPIREQAENIIHLFTLTNLGAPAAFKYFDTTIDRKRYTSTKEVLDATLIHQSITGLYETRIDLSQLGGDGGGSSEAAAKPAPGGVLNLEEEYRLHEKPVPSSIDPSWLQLFPTVWAERAGMGLANQVPPVVVELRSGASPVAVRQYPMSKEAREGIRPHIQRFLDLGVLVPCQSPWNTPLLPVKKPGTNDYRPVQDLREINKRVQDIHPTVPNPYNLLSSLPPSHTWYSVLDLKDAFFCLKLHPNSQPLFAFEWRDPEKGNTGQLTWTRLPQGFKNSPTLFNEALHRDLAPFRALNPQVVLLQYVDDLLVAAPTYRDCKEGTQKLLQELSKLGYRVSAKKAQLCQKEVTYLGYLLKEGKRWLTPARKATVMKIPPPTTPRQVREFLGKAGFCRLFIPGFASLAAPLYPLTKPSIPFIWTEEHQKAFDRIKEALLSAPALALPDLTKPFTLYVDERAGVARGVLTQTLGPWRRPVAYLSKKLDPVASGWPTCLKAVAAVALLLKDADKLTLGQNVTVIASHSLESIVRQPPDRWMTNARMTHYQSLLLNERVSFAPPAVLNPATLLPVESEATPVHRCSEILAEETGTRRDLKDQPLPGVPAWYTDGSSFIAEGKRRAGAAIVDGKRTVWASSLPEGTSAQKAELVALTQALRLAEGKDINIYTDSRYAFATAHIHGAIYKQRGWLTSAGKDIKNKEEILALLEAIHLPKRVAIIHCPGHQKGNDPVATGNRRADEAAKQAALSTRVLAETTKPAGKRTADGSEFEKRTADGSEFESPKKKAKVE

SEQ ID NO: 7587 - protein, 2096 aa, synthetic construct; identical to SEQ ID NO: 4538

SEQ ID NO: 7588 - protein, 2098 aa, synthetic construct; identical to SEQ ID NO: 4539

SEQ ID NO: 7589 - protein, 2173 aa, synthetic construct
MPAAKRVKLDGGDKKYSIGLDIGTNSVGWAVITDEYKVPSKKFKVLGNTDRHSIKKNLIGALLFDSGETAEATRLKRTARRRYTRRKNRICYLQEIFSNEMAKVDDSFFHRLEESFLVEEDKKHERHPIFGNIVDEVAYHEKYPTIYHLRKKLVDSTDKADLRLIYLALAHMIKFRGHFLIEGDLNPDNSDVDKLFIQLVQTYNQLFEENPINASGVDAKAILSARLSKSRRLENLIAQLPGEKKNGLFGNLIALSLGLTPNFKSNFDLAEDAKLQLSKDTYDDDLDNLLAQIGDQYADLFLAAKNLSDAILLSDILRVNTEITKAPLSASMIKRYDEHHQDLTLLKALVRQQLPEKYKEIFFDQSKNGYAGYIDGGASQEEFYKFIKPILEKMDGTEELLVKLNREDLLRKQRTFDNGSIPHQIHLGELHAILRRQEDFYPFLKDNREKIEKILTFRIPYYVGPLARGNSRFAWMTRKSEETITPWNFEEVVDKGASAQSFIERMTNFDKNLPNEKVLPKHSLLYEYFTVYNELTKVKYVTEGMRKPAFLSGEQKKAIVDLLFKTNRKVTVKQLKEDYFKKIECFDSVEISGVEDRFNASLGTYHDLLKIIKDKDFLDNEENEDILEDIVLTLTLFEDREMIEERLKTYAHLFDDKVMKQLKRRRYTGWGRLSRKLINGIRDKQSGKTILDFLKSDGFANRNFMQLIHDDSLTFKEDIQKAQVSGQGDSLHEHIANLAGSPAIKKGILQTVKVVDELVKVMGRHKPENIVIEMARENQTTQKGQKNSRERMKRIEEGIKELGSQILKEHPVENTQLQNEKLYLYYLQNGRDMYVDQELDINRLSDYDVDHIVPQSFLKDDSIDNKVLTRSDKARGKSDNVPSEEVVKKMKNYWRQLLNAKLITQRKFDNLTKAERGGLSELDKAGFIKRQLVETRQITKHVAQILDSRMNTKYDENDKLIREVKVITLKSKLVSDFRKDFQFYKVREINNYHHAHDAYLNAVVGTALIKKYPKLESEFVYGDYKVYDVRKMIAKSEQEIGKATAKYFFYSNIMNFFKTEITLANGEIRKRPLIETNGETGEIVWDKGRDFATVRKVLSMPQVNIVKKTEVQTGGFSKESILPKRNSDKLIARKKDWDPKKYGGFDSPTVAYSVLVVAKVEKGKSKKLKSVKELLGITIMERSSFEKNPIDFLEAKGYKEVKKDLIIKLPKYSLFELENGRKRMLASAGELQKGNELALPSKYVNFLYLASHYEKLKGSPEDNEQKQLFVEQHKHYLDEIIEQISEFSKRVILADANLDKVLSAYNKHRDKPIREQAENIIHLFTLTNLGAPAAFKYFDTTIDRKRYTSTKEVLDATLIHQSITGLYETRIDLSQLGGDGGGSSPAPEAAAKGGMDLLKPLTVERKGVKIKGYWNSQADITCVPKDLLQGEEPVRQQNVTTIHGTQEGDVYYVNLKIDGRRINTEVIGTTLDYAIITPGDVPWILKKPLELTIKLDLEEQQGTLLNNSILSKKGKEELKQLFEKYSALWQSWENQVGHRRIRPHKIATGTVKPTPQKQYHINPKAKPDIQIVINDLLKQGVLIQKESTMNTPVYPVPKPNGRWRMVLDYRAVNKVTPLIAVQNQHSYGILGSLFKGRYKTTIDLSNGFWAHPIVPEDYWITAFTWQGKQYCWTVLPQGFLNSPGLFTGDVVDLLQGIPNVEVYVDDVYISHDSEKEHLEYLDILFNRLKEAGYIISLKKSNIANSIVDFLGFQITNEGRGLTDTFKEKLENITAPTTLKQLQSILGLLNFARNFIPDFTELIAPLYALIPKSTKNYVPWQIEHSTTLETLITKLNGAEYLQGRKGDKTLIMKVNASYTTGYIRYYNEGEKKPISYVSIVFSKTELKFTELEKLLTTVHKGLLKALDLSMGQNIHVYSPIVSMQNIQKTPQTAKKALASRWLSWLSYLEDPRIRFFYDPQMPALKDLPAVDTGKDNKKHPSNFQHIFYTDGSAITSPTKEGHLNAGMGIVYFINKDGNLQKQQEWSISLGNHTAQFAEIAAFEFALKKCLPLGGNILVVTDSNYVAKAYNEELDVWASNGFVNNRKKPLKHISKWKSVADLKRLRPDVVVTHEPGHQKLDSSPHAYGNNLADQLATQASFKVHAGKRTADGSEFEKRTADGSEFESPKKKAKVE

SEQ ID NO: 7590 - protein, 2127 aa, synthetic construct
MPAAKRVKLDGGDKKYSIGLDIGTNSVGWAVITDEYKVPSKKFKVLGNTDRHSIKKNLIGALLFDSGETAEATRLKRTARRRYTRRKNRICYLQEIFSNEMAKVDDSFFHRLEESFLVEEDKKHERHPIFGNIVDEVAYHEKYPTIYHLRKKLVDSTDKADLRLIYLALAHMIKFRGHFLIEGDLNPDNSDVDKLFIQLVQTYNQLFEENPINASGVDAKAILSARLSKSRRLENLIAQLPGEKKNGLFGNLIALSLGLTPNFKSNFDLAEDAKLQLSKDTYDDDLDNLLAQIGDQYADLFLAAKNLSDAILLSDILRVNTEITKAPLSASMIKRYDEHHQDLTLLKALVRQQLPEKYKEIFFDQSKNGYAGYIDGGASQEEFYKFIKPILEKMDGTEELLVKLNREDLLRKQRTFDNGSIPHQIHLGELHAILRRQEDFYPFLKDNREKIEKILTFRIPYYVGPLARGNSRFAWMTRKSEETITPWNFEEVVDKGASAQSFIERMTNFDKNLPNEKVLPKHSLLYEYFTVYNELTKVKYVTEGMRKPAFLSGEQKKAIVDLLFKTNRKVTVKQLKEDYFKKIECFDSVEISGVEDRFNASLGTYHDLLKIIKDKDFLDNEENEDILEDIVLTLTLFEDREMIEERLKTYAHLFDDKVMKQLKRRRYTGWGRLSRKLINGIRDKQSGKTILDFLKSDGFANRNFMQLIHDDSLTFKEDIQKAQVSGQGDSLHEHIANLAGSPAIKKGILQTVKVVDELVKVMGRHKPENIVIEMARENQTTQKGQKNSRERMKRIEEGIKELGSQILKEHPVENTQLQNEKLYLYYLQNGRDMYVDQELDINRLSDYDVDHIVPQSFLKDDSIDNKVLTRSDKARGKSDNVPSEEVVKKMKNYWRQLLNAKLITQRKFDNLTKAERGGLSELDKAGFIKRQLVETRQITKHVAQILDSRMNTKYDENDKLIREVKVITLKSKLVSDFRKDFQFYKVREINNYHHAHDAYLNAVVGTALIKKYPKLESEFVYGDYKVYDVRKMIAKSEQEIGKATAKYFFYSNIMNFFKTEITLANGEIRKRPLIETNGETGEIVWDKGRDFATVRKVLSMPQVNIVKKTEVQTGGFSKESILPKRNSDKLIARKKDWDPKKYGGFDSPTVAYSVLVVAKVEKGKSKKLKSVKELLGITIMERSSFEKNPIDFLEAKGYKEVKKDLIIKLPKYSLFELENGRKRMLASAGELQKGNELALPSKYVNFLYLASHYEKLKGSPEDNEQKQLFVEQHKHYLDEIIEQISEFSKRVILADANLDKVLSAYNKHRDKPIREQAENIIHLFTLTNLGAPAAFKYFDTTIDRKRYTSTKEVLDATLIHQSITGLYETRIDLSQLGGDGGGSSPAPEAAAKGGLLGRDLLTKLKAQIQFSTEGPQVTWEDRPAMCLVLNLEEEYRLHEKPVPPSIDPSWLQLFPMVWAEKAGMGLANQVPPVVVELKSDASPVAVRQYPMSKEAREGIRPHIQRFLDLGILVPCQSPWNTPLLPVKKPGTNDYRPVQDLREVNKRVQDIHPTVPNPYNLLSSLPPSHTWYSVLDLKDAFFCLKLHPNSQPLFAFEWRDPEKGNTGQLTWTRLPQGFKNSPTLFNEALHRDLASFRALNPQVVMLQYVDDLLVAAPTYRDCKEGTRRLLQELSKLGYRVSAKKAQLCREEVTYLGYLLKGGKRWLTPARKATVMKIPTPTTPRQVREFLGTAGFCRLWIPGFASLAAPLYPLTRPKVPFTWTEAHQEAFGRIKEALLSAPALALPDLTKPFALYVDEKEGVARGVLTQTLGPWRRPVAYLSKKLDPVASGWPTCLKAIAAVALLLKDADKLTLGQNVLVIAPHNLESIVRQPPDRWMTNARMTHYQSLLLNERVSFAPPAILNPATLLPVESDDTPIHICSEILAEETGTRPDLRDQPLPGVPAWYTDGSSFIMDGRRQAGAAIVDNKRTVWASNLPEGTSAQKAELIALTQALRLAEGKSINIYTDSRYAFATAHVHGAIYKQRGWLTSAGKDIKNKEEILALLEAIHLPKRVAIIHCPGHQRGTDPVATGNRKADEAAKQAAQSTRILTETTKNAGKRTADGSEFEKRTADGSEFESPKKKAKVE

SEQ ID NO: 7591 - protein, 2218 aa, synthetic construct
MPAAKRVKLDGGDKKYSIGLDIGTNSVGWAVITDEYKVPSKKFKVLGNTDRHSIKKNLIGALLFDSGETAEATRLKRTARRRYTRRKNRICYLQEIFSNEMAKVDDSFFHRLEESFLVEEDKKHERHPIFGNIVDEVAYHEKYPTIYHLRKKLVDSTDKADLRLIYLALAHMIKFRGHFLIEGDLNPDNSDVDKLFIQLVQTYNQLFEENPINASGVDAKAILSARLSKSRRLENLIAQLPGEKKNGLFGNLIALSLGLTPNFKSNFDLAEDAKLQLSKDTYDDDLDNLLAQIGDQYADLFLAAKNLSDAILLSDILRVNTEITKAPLSASMIKRYDEHHQDLTLLKALVRQQLPEKYKEIFFDQSKNGYAGYIDGGASQEEFYKFIKPILEKMDGTEELLVKLNREDLLRKQRTFDNGSIPHQIHLGELHAILRRQEDFYPFLKDNREKIEKILTFRIPYYVGPLARGNSRFAWMTRKSEETITPWNFEEVVDKGASAQSFIERMTNFDKNLPNEKVLPKHSLLYEYFTVYNELTKVKYVTEGMRKPAFLSGEQKKAIVDLLFKTNRKVTVKQLKEDYFKKIECFDSVEISGVEDRFNASLGTYHDLLKIIKDKDFLDNEENEDILEDIVLTLTLFEDREMIEERLKTYAHLFDDKVMKQLKRRRYTGWGRLSRKLINGIRDKQSGKTILDFLKSDGFANRNFMQLIHDDSLTFKEDIQKAQVSGQGDSLHEHIANLAGSPAIKKGILQTVKVVDELVKVMGRHKPENIVIEMARENQTTQKGQKNSRERMKRIEEGIKELGSQILKEHPVENTQLQNEKLYLYYLQNGRDMYVDQELDINRLSDYDVDHIVPQSFLKDDSIDNKVLTRSDKARGKSDNVPSEEVVKKMKNYWRQLLNAKLITQRKFDNLTKAERGGLSELDKAGFIKRQLVETRQITKHVAQILDSRMNTKYDENDKLIREVKVITLKSKLVSDFRKDFQFYKVREINNYHHAHDAYLNAVVGTALIKKYPKLESEFVYGDYKVYDVRKMIAKSEQEIGKATAKYFFYSNIMNFFKTEITLANGEIRKRPLIETNGETGEIVWDKGRDFATVRKVLSMPQVNIVKKTEVQTGGFSKESILPKRNSDKLIARKKDWDPKKYGGFDSPTVAYSVLVVAKVEKGKSKKLKSVKELLGITIMERSSFEKNPIDFLEAKGYKEVKKDLIIKLPKYSLFELENGRKRMLASAGELQKGNELALPSKYVNFLYLASHYEKLKGSPEDNEQKQLFVEQHKHYLDEIIEQISEFSKRVILADANLDKVLSAYNKHRDKPIREQAENIIHLFTLTNLGAPAAFKYFDTTIDRKRYTSTKEVLDATLIHQSITGLYETRIDLSQLGGDGGGSSPAPEAAAKGGTLGDQGSRGSDPLPEPRVTLTVEGIPTEFLVNTGAEHSVLTKPMGKMGSKRTVVAGATGSKVYPWTTKRLLKIGQKQVTHSFLVIPECPAPLLGRDLLTKLKAQIQFSTEGPQVTWEDRPAMCLVLNLEEEYRLHEKPVPPSIDPSWLQLFPMVWAEKAGMGLANQVPPVVVELKSDASPVAVRQYPMSKEAREGIRPHIQRFLDLGILVPCQSPWNTPLLPVKKPGTNDYRPVQDLREVNKRVQDIHPTVPNPYNLLSSLPPSHTWYSVLDLKDAFFCLKLHPNSQPLFAFEWRDPEKGNTGQLTWTRLPQGFKNSPTLFNEALHRDLASFRALNPQVVMLQYVDDLLVAAPTYRDCKEGTRRLLQELSKLGYRVSAKKAQLCREEVTYLGYLLKGGKRWLTPARKATVMKIPTPTTPRQVREFLGTAGFCRLWIPGFASLAAPLYPLTRPKVPFTWTEAHQEAFGRIKEALLSAPALALPDLTKPFALYVDEKEGVARGVLTQTLGPWRRPVAYLSKKLDPVASGWPTCLKAIAAVALLLKDADKLTLGQNVLVIAPHNLESIVRQPPDRWMTNARMTHYQSLLLNERVSFAPPAILNPATLLPVESDDTPIHICSEILAEETGTRPDLRDQPLPGVPAWYTDGSSFIMDGRRQAGAAIVDNKRTVWASNLPEGTSAQKAELIALTQALRLAEGKSINIYTDSRYAFATAHVHGAIYKQRGWLTSAGKDIKNKEEILALLEAIHLPKRVAIIHCPGHQRGTDPVATGNRKADEAAKQAAQSTRILTETTKNAGKRTADGSEFEKRTADGSEFESPKKKAKVE

SEQ ID NO: 7592 - protein, 2096 aa, synthetic construct
MPAAKRVKLDGGDKKYSIGLDIGTNSVGWAVITDEYKVPSKKFKVLGNTDRHSIKKNLIGALLFDSGETAEATRLKRTARRRYTRRKNRICYLQEIFSNEMAKVDDSFFHRLEESFLVEEDKKHERHPIFGNIVDEVAYHEKYPTIYHLRKKLVDSTDKADLRLIYLALAHMIKFRGHFLIEGDLNPDNSDVDKLFIQLVQTYNQLFEENPINASGVDAKAILSARLSKSRRLENLIAQLPGEKKNGLFGNLIALSLGLTPNFKSNFDLAEDAKLQLSKDTYDDDLDNLLAQIGDQYADLFLAAKNLSDAILLSDILRVNTEITKAPLSASMIKRYDEHHQDLTLLKALVRQQLPEKYKEIFFDQSKNGYAGYIDGGASQEEFYKFIKPILEKMDGTEELLVKLNREDLLRKQRTFDNGSIPHQIHLGELHAILRRQEDFYPFLKDNREKIEKILTFRIPYYVGPLARGNSRFAWMTRKSEETITPWNFEEVVDKGASAQSFIERMTNFDKNLPNEKVLPKHSLLYEYFTVYNELTKVKYVTEGMRKPAFLSGEQKKAIVDLLFKTNRKVTVKQLKEDYFKKIECFDSVEISGVEDRFNASLGTYHDLLKIIKDKDFLDNEENEDILEDIVLTLTLFEDREMIEERLKTYAHLFDDKVMKQLKRRRYTGWGRLSRKLINGIRDKQSGKTILDFLKSDGFANRNFMQLIHDDSLTFKEDIQKAQVSGQGDSLHEHIANLAGSPAIKKGILQTVKVVDELVKVMGRHKPENIVIEMARENQTTQKGQKNSRERMKRIEEGIKELGSQILKEHPVENTQLQNEKLYLYYLQNGRDMYVDQELDINRLSDYDVDHIVPQSFLKDDSIDNKVLTRSDKARGKSDNVPSEEVVKKMKNYWRQLLNAKLITQRKFDNLTKAERGGLSELDKAGFIKRQLVETRQITKHVAQILDSRMNTKYDENDKLIREVKVITLKSKLVSDFRKDFQFYKVREINNYHHAHDAYLNAVVGTALIKKYPKLESEFVYGDYKVYDVRKMIAKSEQEIGKATAKYFFYSNIMNFFKTEITLANGEIRKRPLIETNGETGEIVWDKGRDFATVRKVLSMPQVNIVKKTEVQTGGFSKESILPKRNSDKLIARKKDWDPKKYGGFDSPTVAYSVLVVAKVEKGKSKKLKSVKELLGITIMERSSFEKNPIDFLEAKGYKEVKKDLIIKLPKYSLFELENGRKRMLASAGELQKGNELALPSKYVNFLYLASHYEKLKGSPEDNEQKQLFVEQHKHYLDEIIEQISEFSKRVILADANLDKVLSAYNKHRDKPIREQAENIIHLFTLTNLGAPAAFKYFDTTIDRKRYTSTKEVLDATLIHQSITGLYETRIDLSQLGGDGGGSSPAPEAAAKGGTLGIEDEYRLHETSTEPDVSLGSTWLSDFPQAWAETGGMGLAVRQAPLIIPLKATSTPVSIQQYPMSHEARLGIKPHIQRLLDQGILVPCQSPWNTPLLPVKKPGTNDYRPVQDLREVNKRVEDIHPTVPNPYNLLSGLPPSHQWYTVLDLKDAFFCLRLHPTSQPLFAFEWRDPGMGISGQLTWTRLPQGFKNSPTLFNEALHRDLADFRIQHPDLILLQYVDDILLAATSELDCQQGTRALLQTLGDLGYRASAKKAQICQKQVKYLGYLLREGQRWLTEARKETVMGQPVPKTPRQLREFLGTAGFCRLWIPGFAEMAAPLYPLTKPGTLFSWGPDQQKAYQEIKQALLTAPALGLPDLTKPFELFVDEKQGYAKGVLTQKLGPWRRPVAYLSKKLDPVAAGWPPCLRMVAAIAVLTKDAGKLTMGQPLVILAPHAVEALVKQPPDRWLSNARMTHYQAMLLDTDRVQFGPVVALNPATLLPLPEEGAPHDCLEILAETHGTRPDLTDQPIPDADHTWYTDGSSFLQEGQRKAGAAVTTETEVIWAGALPAGTSAQRAELIALTQALKMAEGKRLNVYTDSRYAFATAHIHGEIYRRRGWLTSEGREIKNKSEILALLKALFLPKRLSIIHCLGHQKGDSAEARGNRLADQAAREAAIKTPPDTSTLLAGKRTADGSEFEKRTADGSEFESPKKKAKVE

SEQ ID NO: 7593 - protein, 2096 aa, synthetic construct
MPAAKRVKLDGGDKKYSIGLDIGTNSVGWAVITDEYKVPSKKFKVLGNTDRHSIKKNLIGALLFDSGETAEATRLKRTARRRYTRRKNRICYLQEIFSNEMAKVDDSFFHRLEESFLVEEDKKHERHPIFGNIVDEVAYHEKYPTIYHLRKKLVDSTDKADLRLIYLALAHMIKFRGHFLIEGDLNPDNSDVDKLFIQLVQTYNQLFEENPINASGVDAKAILSARLSKSRRLENLIAQLPGEKKNGLFGNLIALSLGLTPNFKSNFDLAEDAKLQLSKDTYDDDLDNLLAQIGDQYADLFLAAKNLSDAILLSDILRVNTEITKAPLSASMIKRYDEHHQDLTLLKALVRQQLPEKYKEIFFDQSKNGYAGYIDGGASQEEFYKFIKPILEKMDGTEELLVKLNREDLLRKQRTFDNGSIPHQIHLGELHAILRRQEDFYPFLKDNREKIEKILTFRIPYYVGPLARGNSRFAWMTRKSEETITPWNFEEVVDKGASAQSFIERMTNFDKNLPNEKVLPKHSLLYEYFTVYNELTKVKYVTEGMRKPAFLSGEQKKAIVDLLFKTNRKVTVKQLKEDYFKKIECFDSVEISGVEDRFNASLGTYHDLLKIIKDKDFLDNEENEDILEDIVLTLTLFEDREMIEERLKTYAHLFDDKVMKQLKRRRYTGWGRLSRKLINGIRDKQSGKTILDFLKSDGFANRNFMQLIHDDSLTFKEDIQKAQVSGQGDSLHEHIANLAGSPAIKKGILQTVKVVDELVKVMGRHKPENIVIEMARENQTTQKGQKNSRERMKRIEEGIKELGSQILKEHPVENTQLQNEKLYLYYLQNGRDMYVDQELDINRLSDYDVDHIVPQSFLKDDSIDNKVLTRSDKARGKSDNVPSEEVVKKMKNYWRQLLNAKLITQRKFDNLTKAERGGLSELDKAGFIKRQLVETRQITKHVAQILDSRMNTKYDENDKLIREVKVITLKSKLVSDFRKDFQFYKVREINNYHHAHDAYLNAVVGTALIKKYPKLESEFVYGDYKVYDVRKMIAKSEQEIGKATAKYFFYSNIMNFFKTEITLANGEIRKRPLIETNGETGEIVWDKGRDFATVRKVLSMPQVNIVKKTEVQTGGFSKESILPKRNSDKLIARKKDWDPKKYGGFDSPTVAYSVLVVAKVEKGKSKKLKSVKELLGITIMERSSFEKNPIDFLEAKGYKEVKKDLIIKLPKYSLFELENGRKRMLASAGELQKGNELALPSKYVNFLYLASHYEKLKGSPEDNEQKQLFVEQHKHYLDEIIEQISEFSKRVILADANLDKVLSAYNKHRDKPIREQAENIIHLFTLTNLGAPAAFKYFDTTIDRKRYTSTKEVLDATLIHQSITGLYETRIDLSQLGGDGGGSSPAPEAAAKGGTLNIEDEHRLHETSKEPDVSLGSTWLSDFPQAWAETGGMGLAVRQAPLIIPLKATSTPVSIKQYPMSQEARLGIKPHIQRLLDQGILVPCQSPWNTPLLPVKKPGTNDYRPVQDLREVNKRVEDIHPTVPNPYNLLSGLPPSHQWYTVLDLKDAFFCLRLHPTSQPLFAFEWRDPEMGISGQLTWTRLPQGFKNSPTLFDEALHRDLADFRIQHPDLILLQYVDDLLLAATSELDCQQGTRALLQTLGNLGYRASAKKAQICQKQVKYLGYLLKEGQRWLTEARKETVMGQPTPKTPRQLREFLGTAGFCRLWIPGFAEMAAPLYPLTKTGTLFNWGPDQQKAYQEIKQALLTAPALGLPDLTKPFELFVDEKQGYAKGVLTQKLGPWRRPVAYLSKKLDPVAAGWPPCLRMVAAIAVLTKDAGKLTMGQPLVILAPHAVEALVKQPPDRWLSNARMTHYQALLLDTDRVQFGPVVALNPATLLPLPEEGLQHNCLDILAEAHGTRPDLTDQPLPDADHTWYTDGSSLLQEGQRKAGAAVTTETEVIWAKALPAGTSAQRAELIALTQALKMAEGKKLNVYTDSRYAFATAHIHGEIYRRRGLLTSEGKEIKNKDEILALLKALFLPKRLSIIHCPGHQKGHSAEARGNRMADQAARKAAITETPDTSTLLAGKRTADGSEFEKRTADGSEFESPKKKAKVE

SEQ ID NO: 7594 - protein, 2096 aa, synthetic construct; identical to SEQ ID NO: 7593

SEQ ID NO: 7595 - protein, 2096 aa, synthetic construct
MPAAKRVKLDGGDKKYSIGLDIGTNSVGWAVITDEYKVPSKKFKVLGNTDRHSIKKNLIGALLFDSGETAEATRLKRTARRRYTRRKNRICYLQEIFSNEMAKVDDSFFHRLEESFLVEEDKKHERHPIFGNIVDEVAYHEKYPTIYHLRKKLVDSTDKADLRLIYLALAHMIKFRGHFLIEGDLNPDNSDVDKLFIQLVQTYNQLFEENPINASGVDAKAILSARLSKSRRLENLIAQLPGEKKNGLFGNLIALSLGLTPNFKSNFDLAEDAKLQLSKDTYDDDLDNLLAQIGDQYADLFLAAKNLSDAILLSDILRVNTEITKAPLSASMIKRYDEHHQDLTLLKALVRQQLPEKYKEIFFDQSKNGYAGYIDGGASQEEFYKFIKPILEKMDGTEELLVKLNREDLLRKQRTFDNGSIPHQIHLGELHAILRRQEDFYPFLKDNREKIEKILTFRIPYYVGPLARGNSRFAWMTRKSEETITPWNFEEVVDKGASAQSFIERMTNFDKNLPNEKVLPKHSLLYEYFTVYNELTKVKYVTEGMRKPAFLSGEQKKAIVDLLFKTNRKVTVKQLKEDYFKKIECFDSVEISGVEDRFNASLGTYHDLLKIIKDKDFLDNEENEDILEDIVLTLTLFEDREMIEERLKTYAHLFDDKVMKQLKRRRYTGWGRLSRKLINGIRDKQSGKTILDFLKSDGFANRNFMQLIHDDSLTFKEDIQKAQVSGQGDSLHEHIANLAGSPAIKKGILQTVKVVDELVKVMGRHKPENIVIEMARENQTTQKGQKNSRERMKRIEEGIKELGSQILKEHPVENTQLQNEKLYLYYLQNGRDMYVDQELDINRLSDYDVDHIVPQSFLKDDSIDNKVLTRSDKARGKSDNVPSEEVVKKMKNYWRQLLNAKLITQRKFDNLTKAERGGLSELDKAGFIKRQLVETRQITKHVAQILDSRMNTKYDENDKLIREVKVITLKSKLVSDFRKDFQFYKVREINNYHHAHDAYLNAVVGTALIKKYPKLESEFVYGDYKVYDVRKMIAKSEQEIGKATAKYFFYSNIMNFFKTEITLANGEIRKRPLIETNGETGEIVWDKGRDFATVRKVLSMPQVNIVKKTEVQTGGFSKESILPKRNSDKLIARKKDWDPKKYGGFDSPTVAYSVLVVAKVEKGKSKKLKSVKELLGITIMERSSFEKNPIDFLEAKGYKEVKKDLIIKLPKYSLFELENGRKRMLASAGELQKGNELALPSKYVNFLYLASHYEKLKGSPEDNEQKQLFVEQHKHYLDEIIEQISEFSKRVILADANLDKVLSAYNKHRDKPIREQAENIIHLFTLTNLGAPAAFKYFDTTIDRKRYTSTKEVLDATLIHQSITGLYETRIDLSQLGGDGGGSSPAPEAAAKGGTLNIEDEYRLHEISTEPDVSPGSTWLSDFPQAWAETGGMGLAVRQAPLIIPLKATSTPVSIKQYPMSQEAKLGIKPHIQRLLDQGILVPCQSPWNTPLLPVKKPGTNDYRPVQGLREVNKRVEDIHPTVPNPYNLLSGLPTSHRWYTVLDLKDAFFCLRLHPTSQPLFASEWRDPGMGISGQLTWTRLPQGFKNSPTLFNEALHRGLADFRIQHPDLILLQYVDDLLLAATSELDCQQGTRALLKTLGNLGYRASAKKAQICQKQVKYLGYLLREGQRWLTEARKETVMGQPTPKTPRQLREFLGTAGFCRLWIPRFAEMAAPLYPLTKPGTLFNWGPDQQKAYHEIKQALLTAPALGLPDLTKPFELFVDEKQGYAKGVLTQKLGPWRRPVAYLSKKLDPVAAGWPPCLRMVAAIAVLTKDAGKLTMGQPLVILAPHAVEALVKQPPDRWLSNARMTHYQAMLLDTDRVQFGPVVALNPATLLPLPEEGAPHDCLEILAETHGTEPDLTDQPIPDADHTWYTDGSSFLQEGQRKAGAAVTTETEVIWARALPAGTSAQRAELIALTQALKMAEGKRLNVYTDSRYAFATAHIHGEIYKRRGWLTSEGREIKNKSEILALLKALFLPKRLSIIHCLGHQKGDSAEARGNRLADQAAREAAIKTPPDTSTLLAGKRTADGSEFEKRTADGSEFESPKKKAKVE

SEQ ID NO: 7596 - protein, 2090 aa, synthetic construct
MPAAKRVKLDGGDKKYSIGLDIGTNSVGWAVITDEYKVPSKKFKVLGNTDRHSIKKNLIGALLFDSGETAEATRLKRTARRRYTRRKNRICYLQEIFSNEMAKVDDSFFHRLEESFLVEEDKKHERHPIFGNIVDEVAYHEKYPTIYHLRKKLVDSTDKADLRLIYLALAHMIKFRGHFLIEGDLNPDNSDVDKLFIQLVQTYNQLFEENPINASGVDAKAILSARLSKSRRLENLIAQLPGEKKNGLFGNLIALSLGLTPNFKSNFDLAEDAKLQLSKDTYDDDLDNLLAQIGDQYADLFLAAKNLSDAILLSDILRVNTEITKAPLSASMIKRYDEHHQDLTLLKALVRQQLPEKYKEIFFDQSKNGYAGYIDGGASQEEFYKFIKPILEKMDGTEELLVKLNREDLLRKQRTFDNGSIPHQIHLGELHAILRRQEDFYPFLKDNREKIEKILTFRIPYYVGPLARGNSRFAWMTRKSEETITPWNFEEVVDKGASAQSFIERMTNFDKNLPNEKVLPKHSLLYEYFTVYNELTKVKYVTEGMRKPAFLSGEQKKAIVDLLFKTNRKVTVKQLKEDYFKKIECFDSVEISGVEDRFNASLGTYHDLLKIIKDKDFLDNEENEDILEDIVLTLTLFEDREMIEERLKTYAHLFDDKVMKQLKRRRYTGWGRLSRKLINGIRDKQSGKTILDFLKSDGFANRNFMQLIHDDSLTFKEDIQKAQVSGQGDSLHEHIANLAGSPAIKKGILQTVKVVDELVKVMGRHKPENIVIEMARENQTTQKGQKNSRERMKRIEEGIKELGSQILKEHPVENTQLQNEKLYLYYLQNGRDMYVDQELDINRLSDYDVDHIVPQSFLKDDSIDNKVLTRSDKARGKSDNVPSEEVVKKMKNYWRQLLNAKLITQRKFDNLTKAERGGLSELDKAGFIKRQLVETRQITKHVAQILDSRMNTKYDENDKLIREVKVITLKSKLVSDFRKDFQFYKVREINNYHHAHDAYLNAVVGTALIKKYPKLESEFVYGDYKVYDVRKMIAKSEQEIGKATAKYFFYSNIMNFFKTEITLANGEIRKRPLIETNGETGEIVWDKGRDFATVRKVLSMPQVNIVKKTEVQTGGFSKESILPKRNSDKLIARKKDWDPKKYGGFDSPTVAYSVLVVAKVEKGKSKKLKSVKELLGITIMERSSFEKNPIDFLEAKGYKEVKKDLIIKLPKYSLFELENGRKRMLASAGELQKGNELALPSKYVNFLYLASHYEKLKGSPEDNEQKQLFVEQHKHYLDEIIEQISEFSKRVILADANLDKVLSAYNKHRDKPIREQAENIIHLFTLTNLGAPAAFKYFDTTIDRKRYTSTKEVLDATLIHQSITGLYETRIDLSQLGGDGGGSSPAPEAAAKGGTLQLDDEYRLYSPLVKPDQNIQFWLEQFPQAWAETAGMGLAKQVPPQVIQLKASATPVSVRQYPLSKEAQEGIRPHVQRLIQQGILVPVQSPWNTPLLPVRKPGTNDYRPVQDLREVNKRVQDIHPTVPNPYNLLCALPPQRSWYTVLDLKDAFFCLRLHPTSQPLFAFEWRDPGTGRTGQLTWTRLPQGFKNSPTIFDEALHRDLANFRIQHPQVTLLQYVDDLLLAGATKQDCLEGTKALLLELSDLGYRASAKKAQICRREVTYLGYSLRDGQRWLTEARKKTVVQIPAPTTAKQVREFLGTAGFCRLWIPGFATLAAPLYPLTKEKGEFSWAPEHQKAFDAIKKALLSAPALALPDVTKPFTLYVDERKGVARGVLTQTLGPWRRPVAYLSKKLDPVASGWPVCLKAIAAVAILVKDADKLTLGQNITVIAPHALENIVRQPPDRWMTNARMTHYQSLLLTERVTFAPPAALNPATLLPEETDEPVTHDCHQLLIEETGVRKDLTDIPLTGEVLTWFTDGSSYVVEGKRMAGAAVVDGTRTIWASSLPEGTSAQKAELMALTQALRLAEGKSINIYTDSRYAFATAHVHGAIYKQRGLLTSAGREIKNKEEILSLLEALHLPKRLAIIHCPGHQKAKDPISRGNQMADRVAKQAAQGVNLLAGKRTADGSEFEKRTADGSEFESPKKKAKVE

SEQ ID NO: 7597 - protein, 2090 aa, synthetic construct; identical to SEQ ID NO: 7596

SEQ ID NO: 7598 - protein, 2176 aa, synthetic construct
MPAAKRVKLDGGDKKYSIGLDIGTNSVGWAVITDEYKVPSKKFKVLGNTDRHSIKKNLIGALLFDSGETAEATRLKRTARRRYTRRKNRICYLQEIFSNEMAKVDDSFFHRLEESFLVEEDKKHERHPIFGNIVDEVAYHEKYPTIYHLRKKLVDSTDKADLRLIYLALAHMIKFRGHFLIEGDLNPDNSDVDKLFIQLVQTYNQLFEENPINASGVDAKAILSARLSKSRRLENLIAQLPGEKKNGLFGNLIALSLGLTPNFKSNFDLAEDAKLQLSKDTYDDDLDNLLAQIGDQYADLFLAAKNLSDAILLSDILRVNTEITKAPLSASMIKRYDEHHQDLTLLKALVRQQLPEKYKEIFFDQSKNGYAGYIDGGASQEEFYKFIKPILEKMDGTEELLVKLNREDLLRKQRTFDNGSIPHQIHLGELHAILRRQEDFYPFLKDNREKIEKILTFRIPYYVGPLARGNSRFAWMTRKSEETITPWNFEEVVDKGASAQSFIERMTNFDKNLPNEKVLPKHSLLYEYFTVYNELTKVKYVTEGMRKPAFLSGEQKKAIVDLLFKTNRKVTVKQLKEDYFKKIECFDSVEISGVEDRFNASLGTYHDLLKIIKDKDFLDNEENEDILEDIVLTLTLFEDREMIEERLKTYAHLFDDKVMKQLKRRRYTGWGRLSRKLINGIRDKQSGKTILDFLKSDGFANRNFMQLIHDDSLTFKEDIQKAQVSGQGDSLHEHIANLAGSPAIKKGILQTVKVVDELVKVMGRHKPENIVIEMARENQTTQKGQKNSRERMKRIEEGIKELGSQILKEHPVENTQLQNEKLYLYYLQNGRDMYVDQELDINRLSDYDVDHIVPQSFLKDDSIDNKVLTRSDKARGKSDNVPSEEVVKKMKNYWRQLLNAKLITQRKFDNLTKAERGGLSELDKAGFIKRQLVETRQITKHVAQILDSRMNTKYDENDKLIREVKVITLKSKLVSDFRKDFQFYKVREINNYHHAHDAYLNAVVGTALIKKYPKLESEFVYGDYKVYDVRKMIAKSEQEIGKATAKYFFYSNIMNFFKTEITLANGEIRKRPLIETNGETGEIVWDKGRDFATVRKVLSMPQVNIVKKTEVQTGGFSKESILPKRNSDKLIARKKDWDPKKYGGFDSPTVAYSVLVVAKVEKGKSKKLKSVKELLGITIMERSSFEKNPIDFLEAKGYKEVKKDLIIKLPKYSLFELENGRKRMLASAGELQKGNELALPSKYVNFLYLASHYEKLKGSPEDNEQKQLFVEQHKHYLDEIIEQISEFSKRVILADANLDKVLSAYNKHRDKPIREQAENIIHLFTLTNLGAPAAFKYFDTTIDRKRYTSTKEVLDATLIHQSITGLYETRIDLSQLGGDGGGSSPAPEAAAKGGMDPLQLLQPLEAEIKGTKLKAHWNSGATITCVPEAFLEDERPIQTMLIKTIHGEKQQDVYYLTFKVQGRKVEAEVLASPYDYILLNPSDVPWLMKKPLQLTVLVPLHEYQERLLQQTALPKEQKELLQKLFLKYDALWQHWENQVGHRRIKPHNIATGTLAPRPQKQYPINPKAKPSIQIVIDDLLKQGVLIQQNSTMNTPVYPVPKPDGKWRMVLDYREVNKTIPLIAAQNQHSAGILSSIYRGKYKTTLDLTNGFWAHPITPESYWLTAFTWQGKQYCWTRLPQGFLNSPALFTADVVDLLKEIPNVQAYVDDIYISHDDPQEHLEQLEKIFSILLNAGYVVSLKKSEIAQREVEFLGFNITKEGRGLTDTFKQKLLNITPPKDLKQLQSILGLLNFARNFIPNYSELVKPLYTIVANANGKFISWTEDNSNQLQHIISVLNQADNLEERNPETRLIIKVNSSPSAGYIRYYNEGSKRPIMYVNYIFSKAEAKFTQTEKLLTTMHKGLIKAMDLAMGQEILVYSPIVSMTKIQRTPLPERKALPVRWITWMTYLEDPRIQFHYDKSLPELQQIPNVTEDVIAKTKHPSEFAMVFYTDGSAIKHPDVNKSHSAGMGIAQVQFIPEYKIVHQWSIPLGDHTAQLAEIAAVEFACKKALKISGPVLIVTDSFYVAESANKELPYWKSNGFLNNKKKPLRHVSKWKSIAECLQLKPDIIIMHEKGHQQPMTTLHTEGNNLADKLATQGSYVVHAGKRTADGSEFEKRTADGSEFESPKKKAKVE

SEQ ID NO: 7599 - protein, 2087 aa, synthetic construct
MPAAKRVKLDGGDKKYSIGLDIGTNSVGWAVITDEYKVPSKKFKVLGNTDRHSIKKNLIGALLFDSGETAEATRLKRTARRRYTRRKNRICYLQEIFSNEMAKVDDSFFHRLEESFLVEEDKKHERHPIFGNIVDEVAYHEKYPTIYHLRKKLVDSTDKADLRLIYLALAHMIKFRGHFLIEGDLNPDNSDVDKLFIQLVQTYNQLFEENPINASGVDAKAILSARLSKSRRLENLIAQLPGEKKNGLFGNLIALSLGLTPNFKSNFDLAEDAKLQLSKDTYDDDLDNLLAQIGDQYADLFLAAKNLSDAILLSDILRVNTEITKAPLSASMIKRYDEHHQDLTLLKALVRQQLPEKYKEIFFDQSKNGYAGYIDGGASQEEFYKFIKPILEKMDGTEELLVKLNREDLLRKQRTFDNGSIPHQIHLGELHAILRRQEDFYPFLKDNREKIEKILTFRIPYYVGPLARGNSRFAWMTRKSEETITPWNFEEVVDKGASAQSFIERMTNFDKNLPNEKVLPKHSLLYEYFTVYNELTKVKYVTEGMRKPAFLSGEQKKAIVDLLFKTNRKVTVKQLKEDYFKKIECFDSVEISGVEDRFNASLGTYHDLLKIIKDKDFLDNEENEDILEDIVLTLTLFEDREMIEERLKTYAHLFDDKVMKQLKRRRYTGWGRLSRKLINGIRDKQSGKTILDFLKSDGFANRNFMQLIHDDSLTFKEDIQKAQVSGQGDSLHEHIANLAGSPAIKKGILQTVKVVDELVKVMGRHKPENIVIEMARENQTTQKGQKNSRERMKRIEEGIKELGSQILKEHPVENTQLQNEKLYLYYLQNGRDMYVDQELDINRLSDYDVDHIVPQSFLKDDSIDNKVLTRSDKARGKSDNVPSEEVVKKMKNYWRQLLNAKLITQRKFDNLTKAERGGLSELDKAGFIKRQLVETRQITKHVAQILDSRMNTKYDENDKLIREVKVITLKSKLVSDFRKDFQFYKVREINNYHHAHDAYLNAVVGTALIKKYPKLESEFVYGDYKVYDVRKMIAKSEQEIGKATAKYFFYSNIMNFFKTEITLANGEIRKRPLIETNGETGEIVWDKGRDFATVRKVLSMPQVNIVKKTEVQTGGFSKESILPKRNSDKLIARKKDWDPKKYGGFDSPTVAYSVLVVAKVEKGKSKKLKSVKELLGITIMERSSFEKNPIDFLEAKGYKEVKKDLIIKLPKYSLFELENGRKRMLASAGELQKGNELALPSKYVNFLYLASHYEKLKGSPEDNEQKQLFVEQHKHYLDEIIEQISEFSKRVILADANLDKVLSAYNKHRDKPIREQAENIIHLFTLTNLGAPAAFKYFDTTIDRKRYTSTKEVLDATLIHQSITGLYETRIDLSQLGGDGGGSSPAPEAAAKGGIPWLMKKPLQLTTLVPLQEYEERLLKQTMLTGSYKEKLQSLFLKYDALWQHWENQVGHRRIKPHHIATGTVNPRPQKQYPINPKAKASIQTVINDLLKQGVLIQQNSIMNTPVYPVPKPDGKWRMVLDYREVNKTIPLIAAQNQHSAGILSSIFRGKYKTTLDLSNGFWAHSITPESYWLTAFTWLGQQYCWTRLPQGFLNSPALFNADVVDLLKEVPNVQVYVDDIYISHDDPREHLEQLEKVFSLLLNAGYVVSLKKSEIAQHEVEFLGFNITKEGRGLTETFKQKLLNITPPRDLKQLQSILGKLNFARNFIPNFSELVKPLYNIIATAPGKYITWTTDNSQQLQNIISMLNSAENLEERNPEVRLIMKVNTSPSAGYIRFYNEFAKRPIMYLNYVYTKAEVKFTNTEKLLTTIHKGLIKALDLGMGQEILVYSPIVSMTKIQKTPLPERKALPIRWITWMSYLEDPRIQFHYDKTLPELQQVPTVTDDIIAKIKHPSEFSMVFYTDGSAIKHPNVNKSHNAGMGIAQVQFKPEFTVINTWSIPLGDHTAQLAEVAAVEFACKKALKIDGPVLIVTDSFYVAESVNKELPYWQSNGFFNNKKKPLKHVSKWKSIADCIQLKPDIIIIHEKGHQPTASTFHTEGNNLADKLATQGSYVVNAGKRTADGSEFEKRTADGSEFESPKKKAKVE

SEQ ID NO: 7600 - protein, 2096 aa, synthetic construct
MPAAKRVKLDGGDKKYSIGLDIGTNSVGWAVITDEYKVPSKKFKVLGNTDRHSIKKNLIGALLFDSGETAEATRLKRTARRRYTRRKNRICYLQEIFSNEMAKVDDSFFHRLEESFLVEEDKKHERHPIFGNIVDEVAYHEKYPTIYHLRKKLVDSTDKADLRLIYLALAHMIKFRGHFLIEGDLNPDNSDVDKLFIQLVQTYNQLFEENPINASGVDAKAILSARLSKSRRLENLIAQLPGEKKNGLFGNLIALSLGLTPNFKSNFDLAEDAKLQLSKDTYDDDLDNLLAQIGDQYADLFLAAKNLSDAILLSDILRVNTEITKAPLSASMIKRYDEHHQDLTLLKALVRQQLPEKYKEIFFDQSKNGYAGYIDGGASQEEFYKFIKPILEKMDGTEELLVKLNREDLLRKQRTFDNGSIPHQIHLGELHAILRRQEDFYPFLKDNREKIEKILTFRIPYYVGPLARGNSRFAWMTRKSEETITPWNFEEVVDKGASAQSFIERMTNFDKNLPNEKVLPKHSLLYEYFTVYNELTKVKYVTEGMRKPAFLSGEQKKAIVDLLFKTNRKVTVKQLKEDYFKKIECFDSVEISGVEDRFNASLGTYHDLLKIIKDKDFLDNEENEDILEDIVLTLTLFEDREMIEERLKTYAHLFDDKVMKQLKRRRYTGWGRLSRKLINGIRDKQSGKTILDFLKSDGFANRNFMQLIHDDSLTFKEDIQKAQVSGQGDSLHEHIANLAGSPAIKKGILQTVKVVDELVKVMGRHKPENIVIEMARENQTTQKGQKNSRERMKRIEEGIKELGSQILKEHPVENTQLQNEKLYLYYLQNGRDMYVDQELDINRLSDYDVDHIVPQSFLKDDSIDNKVLTRSDKARGKSDNVPSEEVVKKMKNYWRQLLNAKLITQRKFDNLTKAERGGLSELDKAGFIKRQLVETRQITKHVAQILDSRMNTKYDENDKLIREVKVITLKSKLVSDFRKDFQFYKVREINNYHHAHDAYLNAVVGTALIKKYPKLESEFVYGDYKVYDVRKMIAKSEQEIGKATAKYFFYSNIMNFFKTEITLANGEIRKRPLIETNGETGEIVWDKGRDFATVRKVLSMPQVNIVKKTEVQTGGFSKESILPKRNSDKLIARKKDWDPKKYGGFDSPTVAYSVLVVAKVEKGKSKKLKSVKELLGITIMERSSFEKNPIDFLEAKGYKEVKKDLIIKLPKYSLFELENGRKRMLASAGELQKGNELALPSKYVNFLYLASHYEKLKGSPEDNEQKQLFVEQHKHYLDEIIEQISEFSKRVILADANLDKVLSAYNKHRDKPIREQAENIIHLFTLTNLGAPAAFKYFDTTIDRKRYTSTKEVLDATLIHQSITGLYETRIDLSQLGGDGGGSSPAPEAAAKGGTLNIEDEYRLHETSKEPDVPLGSTWLSDFPQAWAETGGMGLAVRQAPLIIPLKATSTPVSIKQYPMSQEARLGIKPHIQRLLDQGILVPCQSPWNTPLLPVKKPGTNDYRPVQDLREVNKRVEDIHPTVPNPYNLLSGLPPSHQWYTVLDLKDAFFCLRLHPTSQPLFAFEWRDPEMGISGQLTWTRLPQGFKNSPTLFNEALHRDLADFRIQHPDLILLQYVDDLLLAATSEQDCQRGTRALLQTLGNLGYRASAKKAQICQKQVKYLGYLLKEGQRWLTEARKETVMGQPTPKTPRQLREFLGTAGFCRLWIPGFAEMAAPLYPLTKPGTLFNWGPDQQKAYQEIKQALLTAPALGLPDLTKPFELFVDEKQGYAKGVLTQKLGPWRRPVAYLSKKLDPVAAGWPPCLRMVAAIAVLTKDAGKLTMGQPLVILAPHAVEALVKQPPDRWLSNARMTHYQAMLLDTDRVQFGPVVALNPATLLPLPEKEAPHDCLEILAETHGTRPDLTDQPIPDADYTWYTDGSSFLQEGQRRAGAAVTTETEVIWARALPAGTSAQRAELIALTQALKMAEGKKLNVYTDSRYAFATAHVHGEIYRRRGWLTSEGREIKNKNEILALLKALFLPKRLSIIHCPGHQKGNSAEARGNRMADQAAREAAMKAVLETSTLLAGKRTADGSEFEKRTADGSEFESPKKKAKVE

SEQ ID NO: 7601 - protein, 2087 aa, synthetic construct
MPAAKRVKLDGGDKKYSIGLDIGTNSVGWAVITDEYKVPSKKFKVLGNTDRHSIKKNLIGALLFDSGETAEATRLKRTARRRYTRRKNRICYLQEIFSNEMAKVDDSFFHRLEESFLVEEDKKHERHPIFGNIVDEVAYHEKYPTIYHLRKKLVDSTDKADLRLIYLALAHMIKFRGHFLIEGDLNPDNSDVDKLFIQLVQTYNQLFEENPINASGVDAKAILSARLSKSRRLENLIAQLPGEKKNGLFGNLIALSLGLTPNFKSNFDLAEDAKLQLSKDTYDDDLDNLLAQIGDQYADLFLAAKNLSDAILLSDILRVNTEITKAPLSASMIKRYDEHHQDLTLLKALVRQQLPEKYKEIFFDQSKNGYAGYIDGGASQEEFYKFIKPILEKMDGTEELLVKLNREDLLRKQRTFDNGSIPHQIHLGELHAILRRQEDFYPFLKDNREKIEKILTFRIPYYVGPLARGNSRFAWMTRKSEETITPWNFEEVVDKGASAQSFIERMTNFDKNLPNEKVLPKHSLLYEYFTVYNELTKVKYVTEGMRKPAFLSGEQKKAIVDLLFKTNRKVTVKQLKEDYFKKIECFDSVEISGVEDRFNASLGTYHDLLKIIKDKDFLDNEENEDILEDIVLTLTLFEDREMIEERLKTYAHLFDDKVMKQLKRRRYTGWGRLSRKLINGIRDKQSGKTILDFLKSDGFANRNFMQLIHDDSLTFKEDIQKAQVSGQGDSLHEHIANLAGSPAIKKGILQTVKVVDELVKVMGRHKPENIVIEMARENQTTQKGQKNSRERMKRIEEGIKELGSQILKEHPVENTQLQNEKLYLYYLQNGRDMYVDQELDINRLSDYDVDHIVPQSFLKDDSIDNKVLTRSDKARGKSDNVPSEEVVKKMKNYWRQLLNAKLITQRKFDNLTKAERGGLSELDKAGFIKRQLVETRQITKHVAQILDSRMNTKYDENDKLIREVKVITLKSKLVSDFRKDFQFYKVREINNYHHAHDAYLNAVVGTALIKKYPKLESEFVYGDYKVYDVRKMIAKSEQEIGKATAKYFFYSNIMNFFKTEITLANGEIRKRPLIETNGETGEIVWDKGRDFATVRKVLSMPQVNIVKKTEVQTGGFSKESILPKRNSDKLIARKKDWDPKKYGGFDSPTVAYSVLVVAKVEKGKSKKLKSVKELLGITIMERSSFEKNPIDFLEAKGYKEVKKDLIIKLPKYSLFELENGRKRMLASAGELQKGNELALPSKYVNFLYLASHYEKLKGSPEDNEQKQLFVEQHKHYLDEIIEQISEFSKRVILADANLDKVLSAYNKHRDKPIREQAENIIHLFTLTNLGAPAAFKYFDTTIDRKRYTSTKEVLDATLIHQSITGLYETRIDLSQLGGDGGEAAAKGSSPAPGGVPWILKKPLELTIKLDLEEQQGTLLNNSILSKKGKEELKQLFEKYSALWQSWENQVGHRRIRPHKIATGTVKPTPQKQYHINPKAKPDIQIVINDLLKQGVLIQKESTMNTPVYPVPKPNGRWRMVLDYRAVNKVTPLIAVQNQHSYGILGSLFKGRYKTTIDLSNGFWAHPIVPEDYWITAFTWQGKQYCWTVLPQGFLNSPGLFTGDVVDLLQGIPNVEVYVDDVYISHDSEKEHLEYLDILFNRLKEAGYIISLKKSNIANSIVDFLGFQITNEGRGLTDTFKEKLENITAPTTLKQLQSILGLLNFARNFIPDFTELIAPLYALIPKSTKNYVPWQIEHSTTLETLITKLNGAEYLQGRKGDKTLIMKVNASYTTGYIRYYNEGEKKPISYVSIVFSKTELKFTELEKLLTTVHKGLLKALDLSMGQNIHVYSPIVSMQNIQKTPQTAKKALASRWLSWLSYLEDPRIRFFYDPQMPALKDLPAVDTGKDNKKHPSNFQHIFYTDGSAITSPTKEGHLNAGMGIVYFINKDGNLQKQQEWSISLGNHTAQFAEIAAFEFALKKCLPLGGNILVVTDSNYVAKAYNEELDVWASNGFVNNRKKPLKHISKWKSVADLKRLRPDVVVTHEPGHQKLDSSPHAYGNNLADQLATQASFKVHAGKRTADGSEFEKRTADGSEFESPKKKAKVE

SEQ ID NO: 7602 - protein, 2087 aa, synthetic construct
MPAAKRVKLDGGDKKYSIGLDIGTNSVGWAVITDEYKVPSKKFKVLGNTDRHSIKKNLIGALLFDSGETAEATRLKRTARRRYTRRKNRICYLQEIFSNEMAKVDDSFFHRLEESFLVEEDKKHERHPIFGNIVDEVAYHEKYPTIYHLRKKLVDSTDKADLRLIYLALAHMIKFRGHFLIEGDLNPDNSDVDKLFIQLVQTYNQLFEENPINASGVDAKAILSARLSKSRRLENLIAQLPGEKKNGLFGNLIALSLGLTPNFKSNFDLAEDAKLQLSKDTYDDDLDNLLAQIGDQYADLFLAAKNLSDAILLSDILRVNTEITKAPLSASMIKRYDEHHQDLTLLKALVRQQLPEKYKEIFFDQSKNGYAGYIDGGASQEEFYKFIKPILEKMDGTEELLVKLNREDLLRKQRTFDNGSIPHQIHLGELHAILRRQEDFYPFLKDNREKIEKILTFRIPYYVGPLARGNSRFAWMTRKSEETITPWNFEEVVDKGASAQSFIERMTNFDKNLPNEKVLPKHSLLYEYFTVYNELTKVKYVTEGMRKPAFLSGEQKKAIVDLLFKTNRKVTVKQLKEDYFKKIECFDSVEISGVEDRFNASLGTYHDLLKIIKDKDFLDNEENEDILEDIVLTLTLFEDREMIEERLKTYAHLFDDKVMKQLKRRRYTGWGRLSRKLINGIRDKQSGKTILDFLKSDGFANRNFMQLIHDDSLTFKEDIQKAQVSGQGDSLHEHIANLAGSPAIKKGILQTVKVVDELVKVMGRHKPENIVIEMARENQTTQKGQKNSRERMKRIEEGIKELGSQILKEHPVENTQLQNEKLYLYYLQNGRDMYVDQELDINRLSDYDVDHIVPQSFLKDDSIDNKVLTRSDKARGKSDNVPSEEVVKKMKNYWRQLLNAKLITQRKFDNLTKAERGGLSELDKAGFIKRQLVETRQITKHVAQILDSRMNTKYDENDKLIREVKVITLKSKLVSDFRKDFQFYKVREINNYHHAHDAYLNAVVGTALIKKYPKLESEFVYGDYKVYDVRKMIAKSEQEIGKATAKYFFYSNIMNFFKTEITLANGEIRKRPLIETNGETGEIVWDKGRDFATVRKVLSMPQVNIVKKTEVQTGGFSKESILPKRNSDKLIARKKDWDPKKYGGFDSPTVAYSVLVVAKVEKGKSKKLKSVKELLGITIMERSSFEKNPIDFLEAKGYKEVKKDLIIKLPKYSLFELENGRKRMLASAGELQKGNELALPSKYVNFLYLASHYEKLKGSPEDNEQKQLFVEQHKHYLDEIIEQISEFSKRVILADANLDKVLSAYNKHRDKPIREQAENIIHLFTLTNLGAPAAFKYFDTTIDRKRYTSTKEVLDATLIHQSITGLYETRIDLSQLGGDGGEAAAKGSSPAPGGVPWLTQQPLQLTILVPLQEYQEKILSKTALPEDQKQQLKTLFVKYDNLWQHWENQVGHRKIRPHNIATGDYPPRPQKQYPINPKAKPSIQIVIDDLLKQGVLTPQNSTMNTPVYPVPKPDGRWRMVLDYREVNKTIPLTAAQNQHSAGILATIVRQKYKTTLDLANGFWAHPITPESYWLTAFTWQGKQYCWTRLPQGFLNSPALFNADVVDLLKEIPNVQVYVDDIYLSHDDPKEHVQQLEKVFQILLQAGYVVSLKKSEIGQKTVEFLGFNITKEGRGLTDTFKTKLLNITPPKDLKQLQSILGKLNFARNFIPNFAELVQPLYNLIAPAKGKYIEWSEENTKQLNMVIEALNTASNLEERLPEQRLVIKVNTSPSAGYVRYYNETGKKPIMYLNYVFSKAELKFSMLEKLLTTMHKALIKAMDLAMGQEILVYSPIVSMTKIQKTPLPERKALPIRWITWMTYLEDPRIQFHYDKTLPELKHIPDVYTSSQSPVKHPSQYEGVFYTDGSAIKSPDPTKSNNAGMGIVHATYKPEYQVLNQWSIPLGNHTAQMAEIAAVEFACKKALKIPGPVLVITDSFYVAESANKELPYWKSNGFVNNKKKPLKHISKWKSIAECLSMKPDITIQHEKGISLQIPVFILKGNALADKLATQGSYVVNAGKRTADGSEFEKRTADGSEFESPKKKAKVE

SEQ ID NO: 7603 - protein, 2218 aa, synthetic construct
MPAAKRVKLDGGDKKYSIGLDIGTNSVGWAVITDEYKVPSKKFKVLGNTDRHSIKKNLIGALLFDSGETAEATRLKRTARRRYTRRKNRICYLQEIFSNEMAKVDDSFFHRLEESFLVEEDKKHERHPIFGNIVDEVAYHEKYPTIYHLRKKLVDSTDKADLRLIYLALAHMIKFRGHFLIEGDLNPDNSDVDKLFIQLVQTYNQLFEENPINASGVDAKAILSARLSKSRRLENLIAQLPGEKKNGLFGNLIALSLGLTPNFKSNFDLAEDAKLQLSKDTYDDDLDNLLAQIGDQYADLFLAAKNLSDAILLSDILRVNTEITKAPLSASMIKRYDEHHQDLTLLKALVRQQLPEKYKEIFFDQSKNGYAGYIDGGASQEEFYKFIKPILEKMDGTEELLVKLNREDLLRKQRTFDNGSIPHQIHLGELHAILRRQEDFYPFLKDNREKIEKILTFRIPYYVGPLARGNSRFAWMTRKSEETITPWNFEEVVDKGASAQSFIERMTNFDKNLPNEKVLPKHSLLYEYFTVYNELTKVKYVTEGMRKPAFLSGEQKKAIVDLLFKTNRKVTVKQLKEDYFKKIECFDSVEISGVEDRFNASLGTYHDLLKIIKDKDFLDNEENEDILEDIVLTLTLFEDREMIEERLKTYAHLFDDKVMKQLKRRRYTGWGRLSRKLINGIRDKQSGKTILDFLKSDGFANRNFMQLIHDDSLTFKEDIQKAQVSGQGDSLHEHIANLAGSPAIKKGILQTVKVVDELVKVMGRHKPENIVIEMARENQTTQKGQKNSRERMKRIEEGIKELGSQILKEHPVENTQLQNEKLYLYYLQNGRDMYVDQELDINRLSDYDVDHIVPQSFLKDDSIDNKVLTRSDKARGKSDNVPSEEVVKKMKNYWRQLLNAKLITQRKFDNLTKAERGGLSELDKAGFIKRQLVETRQITKHVAQILDSRMNTKYDENDKLIREVKVITLKSKLVSDFRKDFQFYKVREINNYHHAHDAYLNAVVGTALIKKYPKLESEFVYGDYKVYDVRKMIAKSEQEIGKATAKYFFYSNIMNFFKTEITLANGEIRKRPLIETNGETGEIVWDKGRDFATVRKVLSMPQVNIVKKTEVQTGGFSKESILPKRNSDKLIARKKDWDPKKYGGFDSPTVAYSVLVVAKVEKGKSKKLKSVKELLGITIMERSSFEKNPIDFLEAKGYKEVKKDLIIKLPKYSLFELENGRKRMLASAGELQKGNELALPSKYVNFLYLASHYEKLKGSPEDNEQKQLFVEQHKHYLDEIIEQISEFSKRVILADANLDKVLSAYNKHRDKPIREQAENIIHLFTLTNLGAPAAFKYFDTTIDRKRYTSTKEVLDATLIHQSITGLYETRIDLSQLGGDGGEAAAKGSSPAPGGTLGDQGSRGSDPLPEPRVTLTVEGIPTEFLVNTGAEHSVLTKPMGKMGSKRTVVAGATGSKVYPWTTKRLLKIGQKQVTHSFLVIPECPAPLLGRDLLTKLKAQIQFSTEGPQVTWEDRPAMCLVLNLEEEYRLHEKPVPPSIDPSWLQLFPMVWAEKAGMGLANQVPPVVVELKSDASPVAVRQYPMSKEAREGIRPHIQRFLDLGILVPCQSPWNTPLLPVKKPGTNDYRPVQDLREVNKRVQDIHPTVPNPYNLLSSLPPSHTWYSVLDLKDAFFCLKLHPNSQPLFAFEWRDPEKGNTGQLTWTRLPQGFKNSPTLFNEALHRDLASFRALNPQVVMLQYVDDLLVAAPTYRDCKEGTRRLLQELSKLGYRVSAKKAQLCREEVTYLGYLLKGGKRWLTPARKATVMKIPTPTTPRQVREFLGTAGFCRLWIPGFASLAAPLYPLTRPKVPFTWTEAHQEAFGRIKEALLSAPALALPDLTKPFALYVDEKEGVARGVLTQTLGPWRRPVAYLSKKLDPVASGWPTCLKAIAAVALLLKDADKLTLGQNVLVIAPHNLESIVRQPPDRWMTNARMTHYQSLLLNERVSFAPPAILNPATLLPVESDDTPIHICSEILAEETGTRPDLRDQPLPGVPAWYTDGSSFIMDGRRQAGAAIVDNKRTVWASNLPEGTSAQKAELIALTQALRLAEGKSINIYTDSRYAFATAHVHGAIYKQRGWLTSAGKDIKNKEEILALLEAIHLPKRVAIIHCPGHQRGTDPVATGNRKADEAAKQAAQSTRILTETTKNAGKRTADGSEFEKRTADGSEFESPKKKAKVE

SEQ ID NO: 7604 - protein, 2096 aa, synthetic construct
MPAAKRVKLDGGDKKYSIGLDIGTNSVGWAVITDEYKVPSKKFKVLGNTDRHSIKKNLIGALLFDSGETAEATRLKRTARRRYTRRKNRICYLQEIFSNEMAKVDDSFFHRLEESFLVEEDKKHERHPIFGNIVDEVAYHEKYPTIYHLRKKLVDSTDKADLRLIYLALAHMIKFRGHFLIEGDLNPDNSDVDKLFIQLVQTYNQLFEENPINASGVDAKAILSARLSKSRRLENLIAQLPGEKKNGLFGNLIALSLGLTPNFKSNFDLAEDAKLQLSKDTYDDDLDNLLAQIGDQYADLFLAAKNLSDAILLSDILRVNTEITKAPLSASMIKRYDEHHQDLTLLKALVRQQLPEKYKEIFFDQSKNGYAGYIDGGASQEEFYKFIKPILEKMDGTEELLVKLNREDLLRKQRTFDNGSIPHQIHLGELHAILRRQEDFYPFLKDNREKIEKILTFRIPYYVGPLARGNSRFAWMTRKSEETITPWNFEEVVDKGASAQSFIERMTNFDKNLPNEKVLPKHSLLYEYFTVYNELTKVKYVTEGMRKPAFLSGEQKKAIVDLLFKTNRKVTVKQLKEDYFKKIECFDSVEISGVEDRFNASLGTYHDLLKIIKDKDFLDNEENEDILEDIVLTLTLFEDREMIEERLKTYAHLFDDKVMKQLKRRRYTGWGRLSRKLINGIRDKQSGKTILDFLKSDGFANRNFMQLIHDDSLTFKEDIQKAQVSGQGDSLHEHIANLAGSPAIKKGILQTVKVVDELVKVMGRHKPENIVIEMARENQTTQKGQKNSRERMKRIEEGIKELGSQILKEHPVENTQLQNEKLYLYYLQNGRDMYVDQELDINRLSDYDVDHIVPQSFLKDDSIDNKVLTRSDKARGKSDNVPSEEVVKKMKNYWRQLLNAKLITQRKFDNLTKAERGGLSELDKAGFIKRQLVETRQITKHVAQILDSRMNTKYDENDKLIREVKVITLKSKLVSDFRKDFQFYKVREINNYHHAHDAYLNAVVGTALIKKYPKLESEFVYGDYKVYDVRKMIAKSEQEIGKATAKYFFYSNIMNFFKTEITLANGEIRKRPLIETNGETGEIVWDKGRDFATVRKVLSMPQVNIVKKTEVQTGGFSKESILPKRNSDKLIARKKDWDPKKYGGFDSPTVAYSVLVVAKVEKGKSKKLKSVKELLGITIMERSSFEKNPIDFLEAKGYKEVKKDLIIKLPKYSLFELENGRKRMLASAGELQKGNELALPSKYVNFLYLASHYEKLKGSPEDNEQKQLFVEQHKHYLDEIIEQISEFSKRVILADANLDKVLSAYNKHRDKPIREQAENIIHLFTLTNLGAPAAFKYFDTTIDRKRYTSTKEVLDATLIHQSITGLYETRIDLSQLGGDGGEAAAKGSSPAPGGTLNLEDEYRLYETSAEPEVSPGSTWLSDFPQAWAETGGMGLAVRQAPLIIPLKATSTPVSIKQYPMSQEAKLGIKPHIQRLLDQGILVPCQSPWNTPLLPVKKPGTNDYRPVQDLREVNKRVEDIHPTVPNPYNLLSGLPPSHRWYTVLDLKDAFFCLRLHPTSQPLFAFEWRDPGMGISGQLTWTRLPQGFKNSPTLFNEALHRDLADFRIQHPDLILLQYVDDILLAATSELDCQQGTRALLLTLGNLGYRASAKKAQLCQKQVKYLGYLLKEGQRWLTEARKETVMGQPTPKTPRQLREFLGTAGFCRLWIPGFAEMAAPLYPLTKPGTLFNWGPDQQKAYQEIKQALLTAPALGLPDLTKPFELFVDEKQGYAKGVLTQKLGPWRRPVAYLSKKLDPVAAGWPPCLRMVAAIAVLRKDAGKLTMGQPLVILAPHAVEALVKQPPDRWLSNARMTHYQAMLLDTDRVQFGPVVALNPATLLPLPEEGAPHDCLEILAETHGTRPDLTDQPIPDADHTWYTDGSSFLQEGQRKAGAAVTTETEVIWARALPAGTSAQRAELIALTQALKMAEGKRLNVYTDSRYAFATAHIHGEIYRRRGWLTSEGREIKNKSEILALLKALFLPKRLSIIHCLGHQKGDSAEARGNRLADQAAREAAIKTPPDTSTLLAGKRTADGSEFEKRTADGSEFESPKKKAKVE

SEQ ID NO: 7605 - protein, 2096 aa, synthetic construct
MPAAKRVKLDGGDKKYSIGLDIGTNSVGWAVITDEYKVPSKKFKVLGNTDRHSIKKNLIGALLFDSGETAEATRLKRTARRRYTRRKNRICYLQEIFSNEMAKVDDSFFHRLEESFLVEEDKKHERHPIFGNIVDEVAYHEKYPTIYHLRKKLVDSTDKADLRLIYLALAHMIKFRGHFLIEGDLNPDNSDVDKLFIQLVQTYNQLFEENPINASGVDAKAILSARLSKSRRLENLIAQLPGEKKNGLFGNLIALSLGLTPNFKSNFDLAEDAKLQLSKDTYDDDLDNLLAQIGDQYADLFLAAKNLSDAILLSDILRVNTEITKAPLSASMIKRYDEHHQDLTLLKALVRQQLPEKYKEIFFDQSKNGYAGYIDGGASQEEFYKFIKPILEKMDGTEELLVKLNREDLLRKQRTFDNGSIPHQIHLGELHAILRRQEDFYPFLKDNREKIEKILTFRIPYYVGPLARGNSRFAWMTRKSEETITPWNFEEVVDKGASAQSFIERMTNFDKNLPNEKVLPKHSLLYEYFTVYNELTKVKYVTEGMRKPAFLSGEQKKAIVDLLFKTNRKVTVKQLKEDYFKKIECFDSVEISGVEDRFNASLGTYHDLLKIIKDKDFLDNEENEDILEDIVLTLTLFEDREMIEERLKTYAHLFDDKVMKQLKRRRYTGWGRLSRKLINGIRDKQSGKTILDFLKSDGFANRNFMQLIHDDSLTFKEDIQKAQVSGQGDSLHEHIANLAGSPAIKKGILQTVKVVDELVKVMGRHKPENIVIEMARENQTTQKGQKNSRERMKRIEEGIKELGSQILKEHPVENTQLQNEKLYLYYLQNGRDMYVDQELDINRLSDYDVDHIVPQSFLKDDSIDNKVLTRSDKARGKSDNVPSEEVVKKMKNYWRQLLNAKLITQRKFDNLTKAERGGLSELDKAGFIKRQLVETRQITKHVAQILDSRMNTKYDENDKLIREVKVITLKSKLVSDFRKDFQFYKVREINNYHHAHDAYLNAVVGTALIKKYPKLESEFVYGDYKVYDVRKMIAKSEQEIGKATAKYFFYSNIMNFFKTEITLANGEIRKRPLIETNGETGEIVWDKGRDFATVRKVLSMPQVNIVKKTEVQTGGFSKESILPKRNSDKLIARKKDWDPKKYGGFDSPTVAYSVLVVAKVEKGKSKKLKSVKELLGITIMERSSFEKNPIDFLEAKGYKEVKKDLIIKLPKYSLFELENGRKRMLASAGELQKGNELALPSKYVNFLYLASHYEKLKGSPEDNEQKQLFVEQHKHYLDEIIEQISEFSKRVILADANLDKVLSAYNKHRDKPIREQAENIIHLFTLTNLGAPAAFKYFDTTIDRKRYTSTKEVLDATLIHQSITGLYETRIDLSQLGGDGGEAAAKGSSPAPGGTLNIEDEYRLHETSKEPDVSLGSTWLSDFPQAWAETGGMGLAVRQAPLIIPLKATSTPVSIKQYPMSQEARLGIKPHIQRLLDQGILVPCQSPWNTPLLPVKKPGTNDYRPVQDLREVNKRVEDIHPTVPNPYNLLSGLPPSHQWYTVLDLKDAFFCLRLHPTSQPLFAFEWRDPEMGISGQLTWTRLPQGFKNSPTLFDEALHRDLAGFRIQHPDLILLQYVDDLLLAATSELDCQQGTRALLQTLGDLGYRASAKKAQICQKQVKYLGYLLKEGQRWLTEARKETVMGQPIPKTPRQLREFLGTAGFCRLWIPGFAEMAAPLYPLTKTGTLFNWGPDQQKAFQEIKQALLTAPALGLPDLTKPFELFVDEKQGYAKGVLTQKLGPWRRPVAYLSKKLDPVAAGWPPCLRMVAAIAVLTKDAGKLTMGQPLVILAPHAVEALVKQPPDRWLSNARMTHYQALLLDTDRVQFGPVVALNPATLLPLPEEGLQHDCLDILAEAHGTRSDLMDQPLPDADHTWYTDGSSFLQEGQRKAGAAVTTETEVIWARALPAGTSAQRAELIALTQALKMAEGKKLNVYTDSRYAFATAHIHGEIYRRRGLLTSEGKEIKNKDEILALLKALFLPKRLSIIHCPGHQKGNSAEARGNRMADQAAREVATRETPETSTLLAGKRTADGSEFEKRTADGSEFESPKKKAKVE

SEQ ID NO: 7606 - protein, 2096 aa, synthetic construct
MPAAKRVKLDGGDKKYSIGLDIGTNSVGWAVITDEYKVPSKKFKVLGNTDRHSIKKNLIGALLFDSGETAEATRLKRTARRRYTRRKNRICYLQEIFSNEMAKVDDSFFHRLEESFLVEEDKKHERHPIFGNIVDEVAYHEKYPTIYHLRKKLVDSTDKADLRLIYLALAHMIKFRGHFLIEGDLNPDNSDVDKLFIQLVQTYNQLFEENPINASGVDAKAILSARLSKSRRLENLIAQLPGEKKNGLFGNLIALSLGLTPNFKSNFDLAEDAKLQLSKDTYDDDLDNLLAQIGDQYADLFLAAKNLSDAILLSDILRVNTEITKAPLSASMIKRYDEHHQDLTLLKALVRQQLPEKYKEIFFDQSKNGYAGYIDGGASQEEFYKFIKPILEKMDGTEELLVKLNREDLLRKQRTFDNGSIPHQIHLGELHAILRRQEDFYPFLKDNREKIEKILTFRIPYYVGPLARGNSRFAWMTRKSEETITPWNFEEVVDKGASAQSFIERMTNFDKNLPNEKVLPKHSLLYEYFTVYNELTKVKYVTEGMRKPAFLSGEQKKAIVDLLFKTNRKVTVKQLKEDYFKKIECFDSVEISGVEDRFNASLGTYHDLLKIIKDKDFLDNEENEDILEDIVLTLTLFEDREMIEERLKTYAHLFDDKVMKQLKRRRYTGWGRLSRKLINGIRDKQSGKTILDFLKSDGFANRNFMQLIHDDSLTFKEDIQKAQVSGQGDSLHEHIANLAGSPAIKKGILQTVKVVDELVKVMGRHKPENIVIEMARENQTTQKGQKNSRERMKRIEEGIKELGSQILKEHPVENTQLQNEKLYLYYLQNGRDMYVDQELDINRLSDYDVDHIVPQSFLKDDSIDNKVLTRSDKARGKSDNVPSEEVVKKMKNYWRQLLNAKLITQRKFDNLTKAERGGLSELDKAGFIKRQLVETRQITKHVAQILDSRMNTKYDENDKLIREVKVITLKSKLVSDFRKDFQFYKVREINNYHHAHDAYLNAVVGTALIKKYPKLESEFVYGDYKVYDVRKMIAKSEQEIGKATAKYFFYSNIMNFFKTEITLANGEIRKRPLIETNGETGEIVWDKGRDFATVRKVLSMPQVNIVKKTEVQTGGFSKESILPKRNSDKLIARKKDWDPKKYGGFDSPTVAYSVLVVAKVEKGKSKKLKSVKELLGITIMERSSFEKNPIDFLEAKGYKEVKKDLIIKLPKYSLFELENGRKRMLASAGELQKGNELALPSKYVNFLYLASHYEKLKGSPEDNEQKQLFVEQHKHYLDEIIEQISEFSKRVILADANLDKVLSAYNKHRDKPIREQAENIIHLFTLTNLGAPAAFKYFDTTIDRKRYTSTKEVLDATLIHQSITGLYETRIDLSQLGGDGGEAAAKGSSPAPGGTLNIEDEYRLHETSKEPDVSLGSTWLSDFPQAWAETGGMGLAVRQAPLIIPLKATSTPVSIKQYPMSQEARLGIKPHIQRLLDQGILVPCQSPWNTPLLPVKKPGTNDYRPVQDLREVNKRVEDIHPTVPNPYNLLSGLPPSHQWYTVLDLKDAFFCLRLHPTSQPLFAFEWRDPEMGISGQLTWTRLPQGFKNSPTLFNEALHRDLAGFRIQHPDLILLQYVDDLLLAATSELDCQQGTRALLQTLGDLGYRASAKKAQICQKQVKYLGYLLKEGQRWLTEARKETVMGQPIPKTPRQLREFLGKAGFCRLFIPGFAEMAAPLYPLTKPGTLFNWGPDQQKAFQEIKQALLTAPALGLPDLTKPFELFVDEKQGYAKGVLTQKLGPWRRPVAYLSKKLDPVAAGWPPCLRMVAAIAVLTKDAGKLTMGQPLVILAPHAVEALVKQPPDRWLSNARMTHYQALLLDTDRVQFGPVVALNPATLLPLPEEGLQHDCLDILAEAHGTRSDLMDQPLPDADHTWYTDGSSFLQEGQRKAGAAVTTETEVIWARALPAGTSAQRAELIALTQALKMAEGKKLNVYTDSRYAFATAHIHGEIYRRRGWLTSEGKEIKNKDEILALLKALFLPKRLSIIHCPGHQKGNSAEARGNRMADQAAREVATRETPETSTLLAGKRTADGSEFEKRTADGSEFESPKKKAKVE

SEQ ID NO: 7607 - protein, 2096 aa, synthetic construct
MPAAKRVKLDGGDKKYSIGLDIGTNSVGWAVITDEYKVPSKKFKVLGNTDRHSIKKNLIGALLFDSGETAEATRLKRTARRRYTRRKNRICYLQEIFSNEMAKVDDSFFHRLEESFLVEEDKKHERHPIFGNIVDEVAYHEKYPTIYHLRKKLVDSTDKADLRLIYLALAHMIKFRGHFLIEGDLNPDNSDVDKLFIQLVQTYNQLFEENPINASGVDAKAILSARLSKSRRLENLIAQLPGEKKNGLFGNLIALSLGLTPNFKSNFDLAEDAKLQLSKDTYDDDLDNLLAQIGDQYADLFLAAKNLSDAILLSDILRVNTEITKAPLSASMIKRYDEHHQDLTLLKALVRQQLPEKYKEIFFDQSKNGYAGYIDGGASQEEFYKFIKPILEKMDGTEELLVKLNREDLLRKQRTFDNGSIPHQIHLGELHAILRRQEDFYPFLKDNREKIEKILTFRIPYYVGPLARGNSRFAWMTRKSEETITPWNFEEVVDKGASAQSFIERMTNFDKNLPNEKVLPKHSLLYEYFTVYNELTKVKYVTEGMRKPAFLSGEQKKAIVDLLFKTNRKVTVKQLKEDYFKKIECFDSVEISGVEDRFNASLGTYHDLLKIIKDKDFLDNEENEDILEDIVLTLTLFEDREMIEERLKTYAHLFDDKVMKQLKRRRYTGWGRLSRKLINGIRDKQSGKTILDFLKSDGFANRNFMQLIHDDSLTFKEDIQKAQVSGQGDSLHEHIANLAGSPAIKKGILQTVKVVDELVKVMGRHKPENIVIEMARENQTTQKGQKNSRERMKRIEEGIKELGSQILKEHPVENTQLQNEKLYLYYLQNGRDMYVDQELDINRLSDYDVDHIVPQSFLKDDSIDNKVLTRSDKARGKSDNVPSEEVVKKMKNYWRQLLNAKLITQRKFDNLTKAERGGLSELDKAGFIKRQLVETRQITKHVAQILDSRMNTKYDENDKLIREVKVITLKSKLVSDFRKDFQFYKVREINNYHHAHDAYLNAVVGTALIKKYPKLESEFVYGDYKVYDVRKMIAKSEQEIGKATAKYFFYSNIMNFFKTEITLANGEIRKRPLIETNGETGEIVWDKGRDFATVRKVLSMPQVNIVKKTEVQTGGFSKESILPKRNSDKLIARKKDWDPKKYGGFDSPTVAYSVLVVAKVEKGKSKKLKSVKELLGITIMERSSFEKNPIDFLEAKGYKEVKKDLIIKLPKYSLFELENGRKRMLASAGELQKGNELALPSKYVNFLYLASHYEKLKGSPEDNEQKQLFVEQHKHYLDEIIEQISEFSKRVILADANLDKVLSAYNKHRDKPIREQAENIIHLFTLTNLGAPAAFKYFDTTIDRKRYTSTKEVLDATLIHQSITGLYETRIDLSQLGGDGGEAAAKGSSPAPGGTLNIEDEHRLHETSKEPDVSLGSTWLSDFPQAWAETGGMGLAVRQAPLIIPLKATSTPVSIKQYPMSQEARLGIKPHIQRLLDQGILVPCQSPWNTPLLPVKKPGTNDYRPVQDLREVNKRVEDIHPTVPNPYNLLSGLPPSHQWYTVLDLKDAFFCLRLHPTSQPLFAFEWRDPEMGISGQLTWTRLPQGFKNSPTLFDEALHRDLADFRIQHPDLILLQYVDDLLLAATSELDCQQGTRALLQTLGNLGYRASAKKAQICQKQVKYLGYLLKEGQRWLTEARKETVMGQPTPKTPRQLREFLGTAGFCRLWIPGFAEMAAPLYPLTKTGTLFNWGPDQQKAYQEIKQALLTAPALGLPDLTKPFELFVDEKQGYAKGVLTQKLGPWRRPVAYLSKKLDPVAAGWPPCLRMVAAIAVLTKDAGKLTMGQPLVILAPHAVEALVKQPPDRWLSNARMTHYQALLLDTDRVQFGPVVALNPATLLPLPEEGLQHNCLDILAEAHGTRPDLTDQPLPDADHTWYTDGSSLLQEGQRKAGAAVTTETEVIWAKALPAGTSAQRAELIALTQALKMAEGKKLNVYTDSRYAFATAHIHGEIYRRRGLLTSEGKEIKNKDEILALLKALFLPKRLSIIHCPGHQKGHSAEARGNRMADQAARKAAITETPDTSTLLAGKRTADGSEFEKRTADGSEFESPKKKAKVE

SEQ ID NO: 7608 - protein, 2024 aa, synthetic construct
MPAAKRVKLDGGDKKYSIGLDIGTNSVGWAVITDEYKVPSKKFKVLGNTDRHSIKKNLIGALLFDSGETAEATRLKRTARRRYTRRKNRICYLQEIFSNEMAKVDDSFFHRLEESFLVEEDKKHERHPIFGNIVDEVAYHEKYPTIYHLRKKLVDSTDKADLRLIYLALAHMIKFRGHFLIEGDLNPDNSDVDKLFIQLVQTYNQLFEENPINASGVDAKAILSARLSKSRRLENLIAQLPGEKKNGLFGNLIALSLGLTPNFKSNFDLAEDAKLQLSKDTYDDDLDNLLAQIGDQYADLFLAAKNLSDAILLSDILRVNTEITKAPLSASMIKRYDEHHQDLTLLKALVRQQLPEKYKEIFFDQSKNGYAGYIDGGASQEEFYKFIKPILEKMDGTEELLVKLNREDLLRKQRTFDNGSIPHQIHLGELHAILRRQEDFYPFLKDNREKIEKILTFRIPYYVGPLARGNSRFAWMTRKSEETITPWNFEEVVDKGASAQSFIERMTNFDKNLPNEKVLPKHSLLYEYFTVYNELTKVKYVTEGMRKPAFLSGEQKKAIVDLLFKTNRKVTVKQLKEDYFKKIECFDSVEISGVEDRFNASLGTYHDLLKIIKDKDFLDNEENEDILEDIVLTLTLFEDREMIEERLKTYAHLFDDKVMKQLKRRRYTGWGRLSRKLINGIRDKQSGKTILDFLKSDGFANRNFMQLIHDDSLTFKEDIQKAQVSGQGDSLHEHIANLAGSPAIKKGILQTVKVVDELVKVMGRHKPENIVIEMARENQTTQKGQKNSRERMKRIEEGIKELGSQILKEHPVENTQLQNEKLYLYYLQNGRDMYVDQELDINRLSDYDVDHIVPQSFLKDDSIDNKVLTRSDKARGKSDNVPSEEVVKKMKNYWRQLLNAKLITQRKFDNLTKAERGGLSELDKAGFIKRQLVETRQITKHVAQILDSRMNTKYDENDKLIREVKVITLKSKLVSDFRKDFQFYKVREINNYHHAHDAYLNAVVGTALIKKYPKLESEFVYGDYKVYDVRKMIAKSEQEIGKATAKYFFYSNIMNFFKTEITLANGEIRKRPLIETNGETGEIVWDKGRDFATVRKVLSMPQVNIVKKTEVQTGGFSKESILPKRNSDKLIARKKDWDPKKYGGFDSPTVAYSVLVVAKVEKGKSKKLKSVKELLGITIMERSSFEKNPIDFLEAKGYKEVKKDLIIKLPKYSLFELENGRKRMLASAGELQKGNELALPSKYVNFLYLASHYEKLKGSPEDNEQKQLFVEQHKHYLDEIIEQISEFSKRVILADANLDKVLSAYNKHRDKPIREQAENIIHLFTLTNLGAPAAFKYFDTTIDRKRYTSTKEVLDATLIHQSITGLYETRIDLSQLGGDGGEAAAKGSSPAPGGGRDIMKDIKVRLMTDSPDDSQDLMIGAIESNLFADQISWKSDQPVWLNQWPLKQEKLQALQQLVTEQLQLGHLEESNSPWNTPVFVIKKKSGKWRLLQDLRAVNATMHDMGALQPGLPSPVAPPKGWEIIIIDLQDCFFNIKLHPEDCKRFAFSVPSPNFKRPYQRFQWKVLPQGMKNSPTLCQKFVDKAILTVRDKYQDSYIVHYMDDILLAHPSRSIVDEILTSMIQALNKHGLVVSTEKIQKYDNLKYLGTHIQGDSVSYQKLQIRTDKLRTLNDFQKLLGNINWIRPFLKLTTGELKPLFEILNPDSNPISTRKLTPEACKALQLMNERLSTARVKRLDLSQPWSLCILKTEYTPTACLWQDGVVEWIHLPHISPKVITPYDIFCTQLIIKGRHRSKELFSKDPDYIVVPYTKVQFDLLLQEKEDWPISLLGFLGEVHFHLPKDPLLTFTLQTAIIFPHMTSTTPLEKGIVIFTDGSANGRSVTYIQGREPIIKENTQNTAQQAEIVAVITAFEEVSQPFNLYTDSKYVTGLFPEIETATLSPRTKIYTELKHLQRLIHKRQEKFYIGHIRGHTGLPGPLAQGNAYADSLTRILTAGKRTADGSEFEKRTADGSEFESPKKKAKVE

SEQ ID NO: 7609 - protein, 2176 aa, synthetic construct
MPAAKRVKLDGGDKKYSIGLDIGTNSVGWAVITDEYKVPSKKFKVLGNTDRHSIKKNLIGALLFDSGETAEATRLKRTARRRYTRRKNRICYLQEIFSNEMAKVDDSFFHRLEESFLVEEDKKHERHPIFGNIVDEVAYHEKYPTIYHLRKKLVDSTDKADLRLIYLALAHMIKFRGHFLIEGDLNPDNSDVDKLFIQLVQTYNQLFEENPINASGVDAKAILSARLSKSRRLENLIAQLPGEKKNGLFGNLIALSLGLTPNFKSNFDLAEDAKLQLSKDTYDDDLDNLLAQIGDQYADLFLAAKNLSDAILLSDILRVNTEITKAPLSASMIKRYDEHHQDLTLLKALVRQQLPEKYKEIFFDQSKNGYAGYIDGGASQEEFYKFIKPILEKMDGTEELLVKLNREDLLRKQRTFDNGSIPHQIHLGELHAILRRQEDFYPFLKDNREKIEKILTFRIPYYVGPLARGNSRFAWMTRKSEETITPWNFEEVVDKGASAQSFIERMTNFDKNLPNEKVLPKHSLLYEYFTVYNELTKVKYVTEGMRKPAFLSGEQKKAIVDLLFKTNRKVTVKQLKEDYFKKIECFDSVEISGVEDRFNASLGTYHDLLKIIKDKDFLDNEENEDILEDIVLTLTLFEDREMIEERLKTYAHLFDDKVMKQLKRRRYTGWGRLSRKLINGIRDKQSGKTILDFLKSDGFANRNFMQLIHDDSLTFKEDIQKAQVSGQGDSLHEHIANLAGSPAIKKGILQTVKVVDELVKVMGRHKPENIVIEMARENQTTQKGQKNSRERMKRIEEGIKELGSQILKEHPVENTQLQNEKLYLYYLQNGRDMYVDQELDINRLSDYDVDHIVPQSFLKDDSIDNKVLTRSDKARGKSDNVPSEEVVKKMKNYWRQLLNAKLITQRKFDNLTKAERGGLSELDKAGFIKRQLVETRQITKHVAQILDSRMNTKYDENDKLIREVKVITLKSKLVSDFRKDFQFYKVREINNYHHAHDAYLNAVVGTALIKKYPKLESEFVYGDYKVYDVRKMIAKSEQEIGKATAKYFFYSNIMNFFKTEITLANGEIRKRPLIETNGETGEIVWDKGRDFATVRKVLSMPQVNIVKKTEVQTGGFSKESILPKRNSDKLIARKKDWDPKKYGGFDSPTVAYSVLVVAKVEKGKSKKLKSVKELLGITIMERSSFEKNPIDFLEAKGYKEVKKDLIIKLPKYSLFELENGRKRMLASAGELQKGNELALPSKYVNFLYLASHYEKLKGSPEDNEQKQLFVEQHKHYLDEIIEQISEFSKRVILADANLDKVLSAYNKHRDKPIREQAENIIHLFTLTNLGAPAAFKYFDTTIDRKRYTSTKEVLDATLIHQSITGLYETRIDLSQLGGDGGEAAAKGSSPAPGGMDPLQLLQPLEAEIKGTKLKAHWNSGATITCVPEAFLEDERPIQTMLIKTIHGEKQQDVYYLTFKVQGRKVEAEVLASPYDYILLNPSDVPWLMKKPLQLTVLVPLHEYQERLLQQTALPKEQKELLQKLFLKYDALWQHWENQVGHRRIKPHNIATGTLAPRPQKQYPINPKAKPSIQIVIDDLLKQGVLIQQNSTMNTPVYPVPKPDGKWRMVLDYREVNKTIPLIAAQNQHSAGILSSIYRGKYKTTLDLTNGFWAHPITPESYWLTAFTWQGKQYCWTRLPQGFLNSPALFNADVVDLLKEIPNVQAYVDDIYISHDDPQEHLEQLEKIFSILLNAGYVVSLKKSEIAQREVEFLGFNITKEGRGLTDTFKQKLLNITPPKDLKQLQSILGKLNFARNFIPNYSELVKPLYTIVAPANGKFISWTEDNSNQLQHIISVLNQADNLEERNPETRLIIKVNSSPSAGYIRYYNEGSKRPIMYVNYIFSKAEAKFTQTEKLLTTMHKGLIKAMDLAMGQEILVYSPIVSMTKIQRTPLPERKALPVRWITWMTYLEDPRIQFHYDKSLPELQQIPNVTEDVIAKTKHPSEFAMVFYTDGSAIKHPDVNKSHSAGMGIAQVQFIPEYKIVHQWSIPLGDHTAQLAEIAAVEFACKKALKISGPVLIVTDSFYVAESANKELPYWKSNGFLNNKKKPLRHVSKWKSIAECLQLKPDIIIMHEKGHQQPMTTLHTEGNNLADKLATQGSYVVHAGKRTADGSEFEKRTADGSEFESPKKKAKVE

SEQ ID NO: 7610 - protein, 2087 aa, synthetic construct
MPAAKRVKLDGGDKKYSIGLDIGTNSVGWAVITDEYKVPSKKFKVLGNTDRHSIKKNLIGALLFDSGETAEATRLKRTARRRYTRRKNRICYLQEIFSNEMAKVDDSFFHRLEESFLVEEDKKHERHPIFGNIVDEVAYHEKYPTIYHLRKKLVDSTDKADLRLIYLALAHMIKFRGHFLIEGDLNPDNSDVDKLFIQLVQTYNQLFEENPINASGVDAKAILSARLSKSRRLENLIAQLPGEKKNGLFGNLIALSLGLTPNFKSNFDLAEDAKLQLSKDTYDDDLDNLLAQIGDQYADLFLAAKNLSDAILLSDILRVNTEITKAPLSASMIKRYDEHHQDLTLLKALVRQQLPEKYKEIFFDQSKNGYAGYIDGGASQEEFYKFIKPILEKMDGTEELLVKLNREDLLRKQRTFDNGSIPHQIHLGELHAILRRQEDFYPFLKDNREKIEKILTFRIPYYVGPLARGNSRFAWMTRKSEETITPWNFEEVVDKGASAQSFIERMTNFDKNLPNEKVLPKHSLLYEYFTVYNELTKVKYVTEGMRKPAFLSGEQKKAIVDLLFKTNRKVTVKQLKEDYFKKIECFDSVEISGVEDRFNASLGTYHDLLKIIKDKDFLDNEENEDILEDIVLTLTLFEDREMIEERLKTYAHLFDDKVMKQLKRRRYTGWGRLSRKLINGIRDKQSGKTILDFLKSDGFANRNFMQLIHDDSLTFKEDIQKAQVSGQGDSLHEHIANLAGSPAIKKGILQTVKVVDELVKVMGRHKPENIVIEMARENQTTQKGQKNSRERMKRIEEGIKELGSQILKEHPVENTQLQNEKLYLYYLQNGRDMYVDQELDINRLSDYDVDHIVPQSFLKDDSIDNKVLTRSDKARGKSDNVPSEEVVKKMKNYWRQLLNAKLITQRKFDNLTKAERGGLSELDKAGFIKRQLVETRQITKHVAQILDSRMNTKYDENDKLIREVKVITLKSKLVSDFRKDFQFYKVREINNYHHAHDAYLNAVVGTALIKKYPKLESEFVYGDYKVYDVRKMIAKSEQEIGKATAKYFFYSNIMNFFKTEITLANGEIRKRPLIETNGETGEIVWDKGRDFATVRKVLSMPQVNIVKKTEVQTGGFSKESILPKRNSDKLIARKKDWDPKKYGGFDSPTVAYSVLVVAKVEKGKSKKLKSVKELLGITIMERSSFEKNPIDFLEAKGYKEVKKDLIIKLPKYSLFELENGRKRMLASAGELQKGNELALPSKYVNFLYLASHYEKLKGSPEDNEQKQLFVEQHKHYLDEIIEQISEFSKRVILADANLDKVLSAYNKHRDKPIREQAENIIHLFTLTNLGAPAAFKYFDTTIDRKRYTSTKEVLDATLIHQSITGLYETRIDLSQLGGDGGEAAAKGSSPAPGGIPWLMKKPLQLTTLVPLQEYEERLLKQTMLTGSYKEKLQSLFLKYDALWQHWENQVGHRRIKPHHIATGTVNPRPQKQYPINPKAKASIQTVINDLLKQGVLIQQNSIMNTPVYPVPKPDGKWRMVLDYREVNKTIPLIAAQNQHSAGILSSIFRGKYKTTLDLSNGFWAHSITPESYWLTAFTWLGQQYCWTRLPQGFLNSPALFNADVVDLLKEVPNVQVYVDDIYISHDDPREHLEQLEKVFSLLLNAGYVVSLKKSEIAQHEVEFLGFNITKEGRGLTETFKQKLLNITPPRDLKQLQSILGKLNFARNFIPNFSELVKPLYNIIATAPGKYITWTTDNSQQLQNIISMLNSAENLEERNPEVRLIMKVNTSPSAGYIRFYNEFAKRPIMYLNYVYTKAEVKFTNTEKLLTTIHKGLIKALDLGMGQEILVYSPIVSMTKIQKTPLPERKALPIRWITWMSYLEDPRIQFHYDKTLPELQQVPTVTDDIIAKIKHPSEFSMVFYTDGSAIKHPNVNKSHNAGMGIAQVQFKPEFTVINTWSIPLGDHTAQLAEVAAVEFACKKALKIDGPVLIVTDSFYVAESVNKELPYWQSNGFFNNKKKPLKHVSKWKSIADCIQLKPDIIIIHEKGHQPTASTFHTEGNNLADKLATQGSYVVNAGKRTADGSEFEKRTADGSEFESPKKKAKVE

SEQ ID NO: 7611 - protein, 2176 aa, synthetic construct
MPAAKRVKLDGGDKKYSIGLDIGTNSVGWAVITDEYKVPSKKFKVLGNTDRHSIKKNLIGALLFDSGETAEATRLKRTARRRYTRRKNRICYLQEIFSNEMAKVDDSFFHRLEESFLVEEDKKHERHPIFGNIVDEVAYHEKYPTIYHLRKKLVDSTDKADLRLIYLALAHMIKFRGHFLIEGDLNPDNSDVDKLFIQLVQTYNQLFEENPINASGVDAKAILSARLSKSRRLENLIAQLPGEKKNGLFGNLIALSLGLTPNFKSNFDLAEDAKLQLSKDTYDDDLDNLLAQIGDQYADLFLAAKNLSDAILLSDILRVNTEITKAPLSASMIKRYDEHHQDLTLLKALVRQQLPEKYKEIFFDQSKNGYAGYIDGGASQEEFYKFIKPILEKMDGTEELLVKLNREDLLRKQRTFDNGSIPHQIHLGELHAILRRQEDFYPFLKDNREKIEKILTFRIPYYVGPLARGNSRFAWMTRKSEETITPWNFEEVVDKGASAQSFIERMTNFDKNLPNEKVLPKHSLLYEYFTVYNELTKVKYVTEGMRKPAFLSGEQKKAIVDLLFKTNRKVTVKQLKEDYFKKIECFDSVEISGVEDRFNASLGTYHDLLKIIKDKDFLDNEENEDILEDIVLTLTLFEDREMIEERLKTYAHLFDDKVMKQLKRRRYTGWGRLSRKLINGIRDKQSGKTILDFLKSDGFANRNFMQLIHDDSLTFKEDIQKAQVSGQGDSLHEHIANLAGSPAIKKGILQTVKVVDELVKVMGRHKPENIVIEMARENQTTQKGQKNSRERMKRIEEGIKELGSQILKEHPVENTQLQNEKLYLYYLQNGRDMYVDQELDINRLSDYDVDHIVPQSFLKDDSIDNKVLTRSDKARGKSDNVPSEEVVKKMKNYWRQLLNAKLITQRKFDNLTKAERGGLSELDKAGFIKRQLVETRQITKHVAQILDSRMNTKYDENDKLIREVKVITLKSKLVSDFRKDFQFYKVREINNYHHAHDAYLNAVVGTALIKKYPKLESEFVYGDYKVYDVRKMIAKSEQEIGKATAKYFFYSNIMNFFKTEITLANGEIRKRPLIETNGETGEIVWDKGRDFATVRKVLSMPQVNIVKKTEVQTGGFSKESILPKRNSDKLIARKKDWDPKKYGGFDSPTVAYSVLVVAKVEKGKSKKLKSVKELLGITIMERSSFEKNPIDFLEAKGYKEVKKDLIIKLPKYSLFELENGRKRMLASAGELQKGNELALPSKYVNFLYLASHYEKLKGSPEDNEQKQLFVEQHKHYLDEIIEQISEFSKRVILADANLDKVLSAYNKHRDKPIREQAENIIHLFTLTNLGAPAAFKYFDTTIDRKRYTSTKEVLDATLIHQSITGLYETRIDLSQLGGDGGEAAAKGSSPAPGGMDPLQLLQPLEAEIKGTKLKAHWNSGATITCVPQAFLEEEVPIKNIWIKTIHGEKEQPVYYLTFKIQGRKVEAEVISSPYDYILVSPSDIPWLMKKPLQLTTLVPLQEYEERLLKQTMLTGSYKEKLQSLFLKYDALWQHWENQVGHRRIKPHHIATGTVNPRPQKQYPINPKAKASIQTVINDLLKQGVLIQQNSIMNTPVYPVPKPDGKWRMVLDYREVNKTIPLIAAQNQHSAGILSSIFRGKYKTTLDLSNGFWAHSITPESYWLTAFTWLGQQYCWTRLPQGFLNSPALFNADVVDLLKEVPNVQVYVDDIYISHDDPREHLEQLEKVFSLLLNAGYVVSLKKSEIAQHEVEFLGFNITKEGRGLTETFKQKLLNITPPRDLKQLQSILGKLNFARNFIPNFSELVKPLYNIIATAPGKYITWTTDNSQQLQNIISMLNSAENLEERNPEVRLIMKVNTSPSAGYIRFYNEFAKRPIMYLNYVYTKAEVKFTNTEKLLTTIHKGLIKALDLGMGQEILVYSPIVSMTKIQKTPLPERKALPIRWITWMSYLEDPRIQFHYDKTLPELQQVPTVTDDIIAKIKHPSEFSMVFYTDGSAIKHPNVNKSHNAGMGIAQVQFKPEFTVINTWSIPLGDHTAQLAEVAAVEFACKKALKIDGPVLIVTDSFYVAESVNKELPYWQSNGFFNNKKKPLKHVSKWKSIADCIQLKPDIIIIHEKGHQPTASTFHTEGNNLADKLATQGSYVVNAGKRTADGSEFEKRTADGSEFESPKKKAKVE

SEQ ID NO: 7612 - protein, 2098 aa, synthetic construct
MPAAKRVKLDGGDKKYSIGLDIGTNSVGWAVITDEYKVPSKKFKVLGNTDRHSIKKNLIGALLFDSGETAEATRLKRTARRRYTRRKNRICYLQEIFSNEMAKVDDSFFHRLEESFLVEEDKKHERHPIFGNIVDEVAYHEKYPTIYHLRKKLVDSTDKADLRLIYLALAHMIKFRGHFLIEGDLNPDNSDVDKLFIQLVQTYNQLFEENPINASGVDAKAILSARLSKSRRLENLIAQLPGEKKNGLFGNLIALSLGLTPNFKSNFDLAEDAKLQLSKDTYDDDLDNLLAQIGDQYADLFLAAKNLSDAILLSDILRVNTEITKAPLSASMIKRYDEHHQDLTLLKALVRQQLPEKYKEIFFDQSKNGYAGYIDGGASQEEFYKFIKPILEKMDGTEELLVKLNREDLLRKQRTFDNGSIPHQIHLGELHAILRRQEDFYPFLKDNREKIEKILTFRIPYYVGPLARGNSRFAWMTRKSEETITPWNFEEVVDKGASAQSFIERMTNFDKNLPNEKVLPKHSLLYEYFTVYNELTKVKYVTEGMRKPAFLSGEQKKAIVDLLFKTNRKVTVKQLKEDYFKKIECFDSVEISGVEDRFNASLGTYHDLLKIIKDKDFLDNEENEDILEDIVLTLTLFEDREMIEERLKTYAHLFDDKVMKQLKRRRYTGWGRLSRKLINGIRDKQSGKTILDFLKSDGFANRNFMQLIHDDSLTFKEDIQKAQVSGQGDSLHEHIANLAGSPAIKKGILQTVKVVDELVKVMGRHKPENIVIEMARENQTTQKGQKNSRERMKRIEEGIKELGSQILKEHPVENTQLQNEKLYLYYLQNGRDMYVDQELDINRLSDYDVDHIVPQSFLKDDSIDNKVLTRSDKARGKSDNVPSEEVVKKMKNYWRQLLNAKLITQRKFDNLTKAERGGLSELDKAGFIKRQLVETRQITKHVAQILDSRMNTKYDENDKLIREVKVITLKSKLVSDFRKDFQFYKVREINNYHHAHDAYLNAVVGTALIKKYPKLESEFVYGDYKVYDVRKMIAKSEQEIGKATAKYFFYSNIMNFFKTEITLANGEIRKRPLIETNGETGEIVWDKGRDFATVRKVLSMPQVNIVKKTEVQTGGFSKESILPKRNSDKLIARKKDWDPKKYGGFDSPTVAYSVLVVAKVEKGKSKKLKSVKELLGITIMERSSFEKNPIDFLEAKGYKEVKKDLIIKLPKYSLFELENGRKRMLASAGELQKGNELALPSKYVNFLYLASHYEKLKGSPEDNEQKQLFVEQHKHYLDEIIEQISEFSKRVILADANLDKVLSAYNKHRDKPIREQAENIIHLFTLTNLGAPAAFKYFDTTIDRKRYTSTKEVLDATLIHQSITGLYETRIDLSQLGGDGGEAAAKPAPGSSGGTAPLEEEYRLFLEAPIQNVTLLEQWKREIPKVWAEINPPGLASTQAPIHVQLLSTALPVRVRQYPITLEAKRSLRETIRKFRAAGILRPVHSPWNTPLLPVRKSGTSEYRMVQDLREVNKRVETIHPTVPNPYTLLSLLPPDRIWYSVLDLKDAFFCIPLAPESQLIFAFEWADAEEGESGQLTWTRLPQGFKNSPTLFNEALNRDLQGFRLDHPSVSLLQYVDDLLIAADTQAACLSATRDLLMTLAELGYRVSGKKAQLCQEEVTYLGFKIHKGSRSLSNSRTQAILQIPVPKTKRQVREFLGKIGYCRLFIPGFAELAQPLYAATRPGNDPLVWGEKEEEAFQSLKLALTQPPALALPSLDKPFQLFVEETSGAAKGVLTQALGPWKRPVAYLSKRLDPVAAGWPRCLRAIAAAALLTREASKLTFGQDIEITSSHNLESLLRSPPDKWLTNARITQYQVLLLDPPRVRFKQTAALNPATLLPETDDTLPIHHCLDTLDSLTSTRPDLTDQPLAQAEATLFTDGSSYIRDGKRYAGAAVVTLDSVIWAEPLPIGTSAQKAELIALTKALEWSKDKSVNIYTDSRYAFATLHVHGMIYRERGWLTAGGKAIKNAPEILALLTAVWLPKRVAVMHCKGHQKDDAPTSTGNRRADEVAREVAIRPLSTQATISAGKRTADGSEFEKRTADGSEFESPKKKAKVE

SEQ ID NO: 7613 - protein, 2102 aa, synthetic construct
MPAAKRVKLDGGDKKYSIGLDIGTNSVGWAVITDEYKVPSKKFKVLGNTDRHSIKKNLIGALLFDSGETAEATRLKRTARRRYTRRKNRICYLQEIFSNEMAKVDDSFFHRLEESFLVEEDKKHERHPIFGNIVDEVAYHEKYPTIYHLRKKLVDSTDKADLRLIYLALAHMIKFRGHFLIEGDLNPDNSDVDKLFIQLVQTYNQLFEENPINASGVDAKAILSARLSKSRRLENLIAQLPGEKKNGLFGNLIALSLGLTPNFKSNFDLAEDAKLQLSKDTYDDDLDNLLAQIGDQYADLFLAAKNLSDAILLSDILRVNTEITKAPLSASMIKRYDEHHQDLTLLKALVRQQLPEKYKEIFFDQSKNGYAGYIDGGASQEEFYKFIKPILEKMDGTEELLVKLNREDLLRKQRTFDNGSIPHQIHLGELHAILRRQEDFYPFLKDNREKIEKILTFRIPYYVGPLARGNSRFAWMTRKSEETITPWNFEEVVDKGASAQSFIERMTNFDKNLPNEKVLPKHSLLYEYFTVYNELTKVKYVTEGMRKPAFLSGEQKKAIVDLLFKTNRKVTVKQLKEDYFKKIECFDSVEISGVEDRFNASLGTYHDLLKIIKDKDFLDNEENEDILEDIVLTLTLFEDREMIEERLKTYAHLFDDKVMKQLKRRRYTGWGRLSRKLINGIRDKQSGKTILDFLKSDGFANRNFMQLIHDDSLTFKEDIQKAQVSGQGDSLHEHIANLAGSPAIKKGILQTVKVVDELVKVMGRHKPENIVIEMARENQTTQKGQKNSRERMKRIEEGIKELGSQILKEHPVENTQLQNEKLYLYYLQNGRDMYVDQELDINRLSDYDVDHIVPQSFLKDDSIDNKVLTRSDKARGKSDNVPSEEVVKKMKNYWRQLLNAKLITQRKFDNLTKAERGGLSELDKAGFIKRQLVETRQITKHVAQILDSRMNTKYDENDKLIREVKVITLKSKLVSDFRKDFQFYKVREINNYHHAHDAYLNAVVGTALIKKYPKLESEFVYGDYKVYDVRKMIAKSEQEIGKATAKYFFYSNIMNFFKTEITLANGEIRKRPLIETNGETGEIVWDKGRDFATVRKVLSMPQVNIVKKTEVQTGGFSKESILPKRNSDKLIARKKDWDPKKYGGFDSPTVAYSVLVVAKVEKGKSKKLKSVKELLGITIMERSSFEKNPIDFLEAKGYKEVKKDLIIKLPKYSLFELENGRKRMLASAGELQKGNELALPSKYVNFLYLASHYEKLKGSPEDNEQKQLFVEQHKHYLDEIIEQISEFSKRVILADANLDKVLSAYNKHRDKPIREQAENIIHLFTLTNLGAPAAFKYFDTTIDRKRYTSTKEVLDATLIHQSITGLYETRIDLSQLGGDGGEAAAKPAPGSSGGTVSLQDEHRLFDIPVTTSLPDVWLQDFPQAWAETGGLGRAKCQAPIIIDLKPTAVPVSIKQYPMSLEAHMGIRQHIIKFLELGVLRPCRSPWNTPLLPVKKPGTQDYRPVQDLREINKRTVDIHPTVPNPYNLLSTLKPDYSWYTVLDLKDAFFCLPLAPQSQELFAFEWKDPERGISGQLTWTRLPQGFKNSPTLFNEALHRDLTDFRTQHPEVTLLQYVDDLLLAAPTKKACTQGTRHLLQELGEKGYRASAKKAQICQTKVTYLGYILSEGKRWLTPGRIETVARIPPPRNPREVREFLGTAGFCRLWIPGFAELAAPLYALTKPSTPFTWQTEHQLAFEALKKALLSAPALGLPDTSKPFTLFLDERQGIAKGVLTQKLGPWKRPVAYLSKKLDPVAAGWPPCLRIMAATAMLVKDSAKLTLGQPLTVITPHTLEAIVRQPPDRWITNARLTHYQALLLDTDRVQFGPPVTLNPATLLPVPENQPSPHDCRQVLAETHGTREDLKDQELPDADHTWYTDGSSYLDSGTRRAGAAVVDGHNTIWAQSLPPGTSAQKAELIALTKALELSKGKKANIYTDSRYAFATAHTHGSIYERRGWLTSEGKEIKNKAEIIALLKALFLPQEVAIIHCPGHQKGQDPVAVGNRQADRVARQAAMAEVLTLATEPDNTSHITAGKRTADGSEFEKRTADGSEFESPKKKAKVE

SEQ ID NO: 7614 - protein, 2173 aa, synthetic construct
MPAAKRVKLDGGDKKYSIGLDIGTNSVGWAVITDEYKVPSKKFKVLGNTDRHSIKKNLIGALLFDSGETAEATRLKRTARRRYTRRKNRICYLQEIFSNEMAKVDDSFFHRLEESFLVEEDKKHERHPIFGNIVDEVAYHEKYPTIYHLRKKLVDSTDKADLRLIYLALAHMIKFRGHFLIEGDLNPDNSDVDKLFIQLVQTYNQLFEENPINASGVDAKAILSARLSKSRRLENLIAQLPGEKKNGLFGNLIALSLGLTPNFKSNFDLAEDAKLQLSKDTYDDDLDNLLAQIGDQYADLFLAAKNLSDAILLSDILRVNTEITKAPLSASMIKRYDEHHQDLTLLKALVRQQLPEKYKEIFFDQSKNGYAGYIDGGASQEEFYKFIKPILEKMDGTEELLVKLNREDLLRKQRTFDNGSIPHQIHLGELHAILRRQEDFYPFLKDNREKIEKILTFRIPYYVGPLARGNSRFAWMTRKSEETITPWNFEEVVDKGASAQSFIERMTNFDKNLPNEKVLPKHSLLYEYFTVYNELTKVKYVTEGMRKPAFLSGEQKKAIVDLLFKTNRKVTVKQLKEDYFKKIECFDSVEISGVEDRFNASLGTYHDLLKIIKDKDFLDNEENEDILEDIVLTLTLFEDREMIEERLKTYAHLFDDKVMKQLKRRRYTGWGRLSRKLINGIRDKQSGKTILDFLKSDGFANRNFMQLIHDDSLTFKEDIQKAQVSGQGDSLHEHIANLAGSPAIKKGILQTVKVVDELVKVMGRHKPENIVIEMARENQTTQKGQKNSRERMKRIEEGIKELGSQILKEHPVENTQLQNEKLYLYYLQNGRDMYVDQELDINRLSDYDVDHIVPQSFLKDDSIDNKVLTRSDKARGKSDNVPSEEVVKKMKNYWRQLLNAKLITQRKFDNLTKAERGGLSELDKAGFIKRQLVETRQITKHVAQILDSRMNTKYDENDKLIREVKVITLKSKLVSDFRKDFQFYKVREINNYHHAHDAYLNAVVGTALIKKYPKLESEFVYGDYKVYDVRKMIAKSEQEIGKATAKYFFYSNIMNFFKTEITLANGEIRKRPLIETNGETGEIVWDKGRDFATVRKVLSMPQVNIVKKTEVQTGGFSKESILPKRNSDKLIARKKDWDPKKYGGFDSPTVAYSVLVVAKVEKGKSKKLKSVKELLGITIMERSSFEKNPIDFLEAKGYKEVKKDLIIKLPKYSLFELENGRKRMLASAGELQKGNELALPSKYVNFLYLASHYEKLKGSPEDNEQKQLFVEQHKHYLDEIIEQISEFSKRVILADANLDKVLSAYNKHRDKPIREQAENIIHLFTLTNLGAPAAFKYFDTTIDRKRYTSTKEVLDATLIHQSITGLYETRIDLSQLGGDGGEAAAKPAPGSSGGMDLLKPLTVERKGVKIKGYWNSQADITCVPKDLLQGEEPVRQQNVTTIHGTQEGDVYYVNLKIDGRRINTEVIGTTLDYAIITPGDVPWILKKPLELTIKLDLEEQQGTLLNNSILSKKGKEELKQLFEKYSALWQSWENQVGHRRIRPHKIATGTVKPTPQKQYHINPKAKPDIQIVINDLLKQGVLIQKESTMNTPVYPVPKPNGRWRMVLDYRAVNKVTPLIAVQNQHSYGILGSLFKGRYKTTIDLSNGFWAHPIVPEDYWITAFTWQGKQYCWTVLPQGFLNSPGLFTGDVVDLLQGIPNVEVYVDDVYISHDSEKEHLEYLDILFNRLKEAGYIISLKKSNIANSIVDFLGFQITNEGRGLTDTFKEKLENITAPTTLKQLQSILGLLNFARNFIPDFTELIAPLYALIPKSTKNYVPWQIEHSTTLETLITKLNGAEYLQGRKGDKTLIMKVNASYTTGYIRYYNEGEKKPISYVSIVFSKTELKFTELEKLLTTVHKGLLKALDLSMGQNIHVYSPIVSMQNIQKTPQTAKKALASRWLSWLSYLEDPRIRFFYDPQMPALKDLPAVDTGKDNKKHPSNFQHIFYTDGSAITSPTKEGHLNAGMGIVYFINKDGNLQKQQEWSISLGNHTAQFAEIAAFEFALKKCLPLGGNILVVTDSNYVAKAYNEELDVWASNGFVNNRKKPLKHISKWKSVADLKRLRPDVVVTHEPGHQKLDSSPHAYGNNLADQLATQASFKVHAGKRTADGSEFEKRTADGSEFESPKKKAKVE

SEQ ID NO: 7615 - protein, 2095 aa, synthetic construct
MPAAKRVKLDGGDKKYSIGLDIGTNSVGWAVITDEYKVPSKKFKVLGNTDRHSIKKNLIGALLFDSGETAEATRLKRTARRRYTRRKNRICYLQEIFSNEMAKVDDSFFHRLEESFLVEEDKKHERHPIFGNIVDEVAYHEKYPTIYHLRKKLVDSTDKADLRLIYLALAHMIKFRGHFLIEGDLNPDNSDVDKLFIQLVQTYNQLFEENPINASGVDAKAILSARLSKSRRLENLIAQLPGEKKNGLFGNLIALSLGLTPNFKSNFDLAEDAKLQLSKDTYDDDLDNLLAQIGDQYADLFLAAKNLSDAILLSDILRVNTEITKAPLSASMIKRYDEHHQDLTLLKALVRQQLPEKYKEIFFDQSKNGYAGYIDGGASQEEFYKFIKPILEKMDGTEELLVKLNREDLLRKQRTFDNGSIPHQIHLGELHAILRRQEDFYPFLKDNREKIEKILTFRIPYYVGPLARGNSRFAWMTRKSEETITPWNFEEVVDKGASAQSFIERMTNFDKNLPNEKVLPKHSLLYEYFTVYNELTKVKYVTEGMRKPAFLSGEQKKAIVDLLFKTNRKVTVKQLKEDYFKKIECFDSVEISGVEDRFNASLGTYHDLLKIIKDKDFLDNEENEDILEDIVLTLTLFEDREMIEERLKTYAHLFDDKVMKQLKRRRYTGWGRLSRKLINGIRDKQSGKTILDFLKSDGFANRNFMQLIHDDSLTFKEDIQKAQVSGQGDSLHEHIANLAGSPAIKKGILQTVKVVDELVKVMGRHKPENIVIEMARENQTTQKGQKNSRERMKRIEEGIKELGSQILKEHPVENTQLQNEKLYLYYLQNGRDMYVDQELDINRLSDYDVDHIVPQSFLKDDSIDNKVLTRSDKARGKSDNVPSEEVVKKMKNYWRQLLNAKLITQRKFDNLTKAERGGLSELDKAGFIKRQLVETRQITKHVAQILDSRMNTKYDENDKLIREVKVITLKSKLVSDFRKDFQFYKVREINNYHHAHDAYLNAVVGTALIKKYPKLESEFVYGDYKVYDVRKMIAKSEQEIGKATAKYFFYSNIMNFFKTEITLANGEIRKRPLIETNGETGEIVWDKGRDFATVRKVLSMPQVNIVKKTEVQTGGFSKESILPKRNSDKLIARKKDWDPKKYGGFDSPTVAYSVLVVAKVEKGKSKKLKSVKELLGITIMERSSFEKNPIDFLEAKGYKEVKKDLIIKLPKYSLFELENGRKRMLASAGELQKGNELALPSKYVNFLYLASHYEKLKGSPEDNEQKQLFVEQHKHYLDEIIEQISEFSKRVILADANLDKVLSAYNKHRDKPIREQAENIIHLFTLTNLGAPAAFKYFDTTIDRKRYTSTKEVLDATLIHQSITGLYETRIDLSQLGGDGGEAAAKPAPGSSGGTLQLEEEYRLFEPESTQKQEMDIWLKNFPQAWAETGGMGTAHCQAPVLIQLKATATPISIRQYPMPHEAYQGIKPHIRRMLDQGILKPCQSPWNTPLLPVKKPGTEDYRPVQDLREVNKRVEDIHPTVPNPYNLLSTLPPSHPWYTVLDLKDAFFCLRLHSESQLLFAFEWRDPEIGLSGQLTWTRLPQGFKNSPTLFNEALHSDLADFRVRYPALVLLQYVDDLLLAAATRTECLEGTKALLETLGNKGYRASAKKAQICLQEVTYLGYSLKDGQRWLTKARKEAILSIPVPKNSRQVREFLGKAGYCRLFIPGFAELAAPLYPLTRPGTLFQWGTEQQLAFEDIKKALLSSPALGLPDITKPFELFIDENSGFAKGVLVQKLGPWKRPVAYLSKKLDTVASGWPPCLRMVAAIAILVKDAGKLTLGQPLTILTSHPVEALVRQPPNKWLSNARMTHYQAMLLDAERVHFGPTVSLNPATLLPLPSGGNHHDCLQILAETHGTRPDLTDQPLPDADLTWYTDGSSFIRNGEREAGAAVTTESEVIWAAPLPPGTSAQRAELIALTQALKMAEGKKLTVYTDSRYAFATTHVHGEIYRRRGWLTSEGKEIKNKNEILALLEALFLPKRLSIIHCPGHQKGDSPQAKGNRLADDTAKKAATETHSSLTVLPAGKRTADGSEFEKRTADGSEFESPKKKAKVE

SEQ ID NO: 7616 - protein, 2087 aa, synthetic construct
MPAAKRVKLDGGDKKYSIGLDIGTNSVGWAVITDEYKVPSKKFKVLGNTDRHSIKKNLIGALLFDSGETAEATRLKRTARRRYTRRKNRICYLQEIFSNEMAKVDDSFFHRLEESFLVEEDKKHERHPIFGNIVDEVAYHEKYPTIYHLRKKLVDSTDKADLRLIYLALAHMIKFRGHFLIEGDLNPDNSDVDKLFIQLVQTYNQLFEENPINASGVDAKAILSARLSKSRRLENLIAQLPGEKKNGLFGNLIALSLGLTPNFKSNFDLAEDAKLQLSKDTYDDDLDNLLAQIGDQYADLFLAAKNLSDAILLSDILRVNTEITKAPLSASMIKRYDEHHQDLTLLKALVRQQLPEKYKEIFFDQSKNGYAGYIDGGASQEEFYKFIKPILEKMDGTEELLVKLNREDLLRKQRTFDNGSIPHQIHLGELHAILRRQEDFYPFLKDNREKIEKILTFRIPYYVGPLARGNSRFAWMTRKSEETITPWNFEEVVDKGASAQSFIERMTNFDKNLPNEKVLPKHSLLYEYFTVYNELTKVKYVTEGMRKPAFLSGEQKKAIVDLLFKTNRKVTVKQLKEDYFKKIECFDSVEISGVEDRFNASLGTYHDLLKIIKDKDFLDNEENEDILEDIVLTLTLFEDREMIEERLKTYAHLFDDKVMKQLKRRRYTGWGRLSRKLINGIRDKQSGKTILDFLKSDGFANRNFMQLIHDDSLTFKEDIQKAQVSGQGDSLHEHIANLAGSPAIKKGILQTVKVVDELVKVMGRHKPENIVIEMARENQTTQKGQKNSRERMKRIEEGIKELGSQILKEHPVENTQLQNEKLYLYYLQNGRDMYVDQELDINRLSDYDVDHIVPQSFLKDDSIDNKVLTRSDKARGKSDNVPSEEVVKKMKNYWRQLLNAKLITQRKFDNLTKAERGGLSELDKAGFIKRQLVETRQITKHVAQILDSRMNTKYDENDKLIREVKVITLKSKLVSDFRKDFQFYKVREINNYHHAHDAYLNAVVGTALIKKYPKLESEFVYGDYKVYDVRKMIAKSEQEIGKATAKYFFYSNIMNFFKTEITLANGEIRKRPLIETNGETGEIVWDKGRDFATVRKVLSMPQVNIVKKTEVQTGGFSKESILPKRNSDKLIARKKDWDPKKYGGFDSPTVAYSVLVVAKVEKGKSKKLKSVKELLGITIMERSSFEKNPIDFLEAKGYKEVKKDLIIKLPKYSLFELENGRKRMLASAGELQKGNELALPSKYVNFLYLASHYEKLKGSPEDNEQKQLFVEQHKHYLDEIIEQISEFSKRVILADANLDKVLSAYNKHRDKPIREQAENIIHLFTLTNLGAPAAFKYFDTTIDRKRYTSTKEVLDATLIHQSITGLYETRIDLSQLGGDGGEAAAKPAPGSSGGVPWLTQQPLQLTILVPLQEYQEKILSKTALPEDQKQQLKTLFVKYDNLWQHWENQVGHRKIRPHNIATGDYPPRPQKQYPINPKAKPSIQIVIDDLLKQGVLTPQNSTMNTPVYPVPKPDGRWRMVLDYREVNKTIPLTAAQNQHSAGILATIVRQKYKTTLDLANGFWAHPITPESYWLTAFTWQGKQYCWTRLPQGFLNSPALFNADVVDLLKEIPNVQVYVDDIYLSHDDPKEHVQQLEKVFQILLQAGYVVSLKKSEIGQKTVEFLGFNITKEGRGLTDTFKTKLLNITPPKDLKQLQSILGKLNFARNFIPNFAELVQPLYNLIAPAKGKYIEWSEENTKQLNMVIEALNTASNLEERLPEQRLVIKVNTSPSAGYVRYYNETGKKPIMYLNYVFSKAELKFSMLEKLLTTMHKALIKAMDLAMGQEILVYSPIVSMTKIQKTPLPERKALPIRWITWMTYLEDPRIQFHYDKTLPELKHIPDVYTSSQSPVKHPSQYEGVFYTDGSAIKSPDPTKSNNAGMGIVHATYKPEYQVLNQWSIPLGNHTAQMAEIAAVEFACKKALKIPGPVLVITDSFYVAESANKELPYWKSNGFVNNKKKPLKHISKWKSIAECLSMKPDITIQHEKGISLQIPVFILKGNALADKLATQGSYVVNAGKRTADGSEFEKRTADGSEFESPKKKAKVE

SEQ ID NO: 7617 - protein, 2094 aa, synthetic construct
MPAAKRVKLDGGDKKYSIGLDIGTNSVGWAVITDEYKVPSKKFKVLGNTDRHSIKKNLIGALLFDSGETAEATRLKRTARRRYTRRKNRICYLQEIFSNEMAKVDDSFFHRLEESFLVEEDKKHERHPIFGNIVDEVAYHEKYPTIYHLRKKLVDSTDKADLRLIYLALAHMIKFRGHFLIEGDLNPDNSDVDKLFIQLVQTYNQLFEENPINASGVDAKAILSARLSKSRRLENLIAQLPGEKKNGLFGNLIALSLGLTPNFKSNFDLAEDAKLQLSKDTYDDDLDNLLAQIGDQYADLFLAAKNLSDAILLSDILRVNTEITKAPLSASMIKRYDEHHQDLTLLKALVRQQLPEKYKEIFFDQSKNGYAGYIDGGASQEEFYKFIKPILEKMDGTEELLVKLNREDLLRKQRTFDNGSIPHQIHLGELHAILRRQEDFYPFLKDNREKIEKILTFRIPYYVGPLARGNSRFAWMTRKSEETITPWNFEEVVDKGASAQSFIERMTNFDKNLPNEKVLPKHSLLYEYFTVYNELTKVKYVTEGMRKPAFLSGEQKKAIVDLLFKTNRKVTVKQLKEDYFKKIECFDSVEISGVEDRFNASLGTYHDLLKIIKDKDFLDNEENEDILEDIVLTLTLFEDREMIEERLKTYAHLFDDKVMKQLKRRRYTGWGRLSRKLINGIRDKQSGKTILDFLKSDGFANRNFMQLIHDDSLTFKEDIQKAQVSGQGDSLHEHIANLAGSPAIKKGILQTVKVVDELVKVMGRHKPENIVIEMARENQTTQKGQKNSRERMKRIEEGIKELGSQILKEHPVENTQLQNEKLYLYYLQNGRDMYVDQELDINRLSDYDVDHIVPQSFLKDDSIDNKVLTRSDKARGKSDNVPSEEVVKKMKNYWRQLLNAKLITQRKFDNLTKAERGGLSELDKAGFIKRQLVETRQITKHVAQILDSRMNTKYDENDKLIREVKVITLKSKLVSDFRKDFQFYKVREINNYHHAHDAYLNAVVGTALIKKYPKLESEFVYGDYKVYDVRKMIAKSEQEIGKATAKYFFYSNIMNFFKTEITLANGEIRKRPLIETNGETGEIVWDKGRDFATVRKVLSMPQVNIVKKTEVQTGGFSKESILPKRNSDKLIARKKDWDPKKYGGFDSPTVAYSVLVVAKVEKGKSKKLKSVKELLGITIMERSSFEKNPIDFLEAKGYKEVKKDLIIKLPKYSLFELENGRKRMLASAGELQKGNELALPSKYVNFLYLASHYEKLKGSPEDNEQKQLFVEQHKHYLDEIIEQISEFSKRVILADANLDKVLSAYNKHRDKPIREQAENIIHLFTLTNLGAPAAFKYFDTTIDRKRYTSTKEVLDATLIHQSITGLYETRIDLSQLGGDGGEAAAKPAPGSSGGVLNLEEEYRLHEKPVPSSIDPSWLQLFPTVWAERAGMGLANQVPPVVVELRSGASPVAVRQYPMSKEAREGIRPHIQKFLDLGVLVPCRSPWNTPLLPVKKPGTNDYRPVQDLREINKRVQDIHPTVPNPYNLLSSLPPSYTWYSVLDLKDAFFCLRLHPNSQPLFAFEWKDPEKGNTGQLTWTRLPQGFKNSPTLFNEALHRDLAPFRALNPQVVLLQYVDDLLVAAPTYEDCKKGTQKLLQELSKLGYRVSAKKAQLCQREVTYLGYLLKEGKRWLTPARKATVMKIPVPTTPRQVREFLGTAGFCRLWIPGFASLAAPLYPLTKPSIPFIWTEEHQQAFDHIKKALLSAPALALPDLTKPFTLYIDERAGVARGVLTQTLGPWRRPVAYLSKKLDPVASGWPTCLKAVAAVALLLKDADKLTLGQNVTVIASHSLESIVRQPPDRWMTNARMTHYQSLLLNERVSFAPPAVLNPATLLPVESEATPVHRCSEILAEETGTRRDLEDQPLPGVPTWYTDGSSFITEGKRRAGAPIVDGKRTVWASSLPEGTSAQKAELVALTQALRLAEGKNINIYTDSRYAFATAHIHGAIYKQRGWLTSAGKDIKNKEEILALLEAIHLPRRVAIIHCPGHQRGSNPVATGNRRADEAAKQAALSTRVLAGTTKPAGKRTADGSEFEKRTADGSEFESPKKKAKVE

SEQ ID NO: 7618 - protein, 2094 aa, synthetic construct
MPAAKRVKLDGGDKKYSIGLDIGTNSVGWAVITDEYKVPSKKFKVLGNTDRHSIKKNLIGALLFDSGETAEATRLKRTARRRYTRRKNRICYLQEIFSNEMAKVDDSFFHRLEESFLVEEDKKHERHPIFGNIVDEVAYHEKYPTIYHLRKKLVDSTDKADLRLIYLALAHMIKFRGHFLIEGDLNPDNSDVDKLFIQLVQTYNQLFEENPINASGVDAKAILSARLSKSRRLENLIAQLPGEKKNGLFGNLIALSLGLTPNFKSNFDLAEDAKLQLSKDTYDDDLDNLLAQIGDQYADLFLAAKNLSDAILLSDILRVNTEITKAPLSASMIKRYDEHHQDLTLLKALVRQQLPEKYKEIFFDQSKNGYAGYIDGGASQEEFYKFIKPILEKMDGTEELLVKLNREDLLRKQRTFDNGSIPHQIHLGELHAILRRQEDFYPFLKDNREKIEKILTFRIPYYVGPLARGNSRFAWMTRKSEETITPWNFEEVVDKGASAQSFIERMTNFDKNLPNEKVLPKHSLLYEYFTVYNELTKVKYVTEGMRKPAFLSGEQKKAIVDLLFKTNRKVTVKQLKEDYFKKIECFDSVEISGVEDRFNASLGTYHDLLKIIKDKDFLDNEENEDILEDIVLTLTLFEDREMIEERLKTYAHLFDDKVMKQLKRRRYTGWGRLSRKLINGIRDKQSGKTILDFLKSDGFANRNFMQLIHDDSLTFKEDIQKAQVSGQGDSLHEHIANLAGSPAIKKGILQTVKVVDELVKVMGRHKPENIVIEMARENQTTQKGQKNSRERMKRIEEGIKELGSQILKEHPVENTQLQNEKLYLYYLQNGRDMYVDQELDINRLSDYDVDHIVPQSFLKDDSIDNKVLTRSDKARGKSDNVPSEEVVKKMKNYWRQLLNAKLITQRKFDNLTKAERGGLSELDKAGFIKRQLVETRQITKHVAQILDSRMNTKYDENDKLIREVKVITLKSKLVSDFRKDFQFYKVREINNYHHAHDAYLNAVVGTALIKKYPKLESEFVYGDYKVYDVRKMIAKSEQEIGKATAKYFFYSNIMNFFKTEITLANGEIRKRPLIETNGETGEIVWDKGRDFATVRKVLSMPQVNIVKKTEVQTGGFSKESILPKRNSDKLIARKKDWDPKKYGGFDSPTVAYSVLVVAKVEKGKSKKLKSVKELLGITIMERSSFEKNPIDFLEAKGYKEVKKDLIIKLPKYSLFELENGRKRMLASAGELQKGNELALPSKYVNFLYLASHYEKLKGSPEDNEQKQLFVEQHKHYLDEIIEQISEFSKRVILADANLDKVLSAYNKHRDKPIREQAENIIHLFTLTNLGAPAAFKYFDTTIDRKRYTSTKEVLDATLIHQSITGLYETRIDLSQLGGDGGEAAAKPAPGSSGGVLNLEEEYRLHEKPVPSSIDPSWLQLFPTVWAERAGMGLANQVPPVVVELRSGASPVAVRQYPMSKEAREGIRPHIQKFLDLGVLVPCRSPWNTPLLPVKKPGTNDYRPVQDLREINKRVQDIHPTVPNPYNLLSSLPPSYTWYSVLDLKDAFFCLRLHPNSQPLFAFEWKDPEKGNTGQLTWTRLPQGFKNSPTLFNEALHRDLAPFRALNPQVVLLQYVDDLLVAAPTYEDCKKGTQKLLQELSKLGYRVSAKKAQLCQREVTYLGYLLKEGKRWLTPARKATVMKIPVPTTPRQVREFLGKAGFCRLFIPGFASLAAPLYPLTKPSIPFIWTEEHQQAFDHIKKALLSAPALALPDLTKPFTLYIDERAGVARGVLTQTLGPWRRPVAYLSKKLDPVASGWPTCLKAVAAVALLLKDADKLTLGQNVTVIASHSLESIVRQPPDRWMTNARMTHYQSLLLNERVSFAPPAVLNPATLLPVESEATPVHRCSEILAEETGTRRDLEDQPLPGVPTWYTDGSSFITEGKRRAGAPIVDGKRTVWASSLPEGTSAQKAELVALTQALRLAEGKNINIYTDSRYAFATAHIHGAIYKQRGWLTSAGKDIKNKEEILALLEAIHLPRRVAIIHCPGHQRGSNPVATGNRRADEAAKQAALSTRVLAGTTKPAGKRTADGSEFEKRTADGSEFESPKKKAKVE

SEQ ID NO: 7619 - protein, 2218 aa, synthetic construct
MPAAKRVKLDGGDKKYSIGLDIGTNSVGWAVITDEYKVPSKKFKVLGNTDRHSIKKNLIGALLFDSGETAEATRLKRTARRRYTRRKNRICYLQEIFSNEMAKVDDSFFHRLEESFLVEEDKKHERHPIFGNIVDEVAYHEKYPTIYHLRKKLVDSTDKADLRLIYLALAHMIKFRGHFLIEGDLNPDNSDVDKLFIQLVQTYNQLFEENPINASGVDAKAILSARLSKSRRLENLIAQLPGEKKNGLFGNLIALSLGLTPNFKSNFDLAEDAKLQLSKDTYDDDLDNLLAQIGDQYADLFLAAKNLSDAILLSDILRVNTEITKAPLSASMIKRYDEHHQDLTLLKALVRQQLPEKYKEIFFDQSKNGYAGYIDGGASQEEFYKFIKPILEKMDGTEELLVKLNREDLLRKQRTFDNGSIPHQIHLGELHAILRRQEDFYPFLKDNREKIEKILTFRIPYYVGPLARGNSRFAWMTRKSEETITPWNFEEVVDKGASAQSFIERMTNFDKNLPNEKVLPKHSLLYEYFTVYNELTKVKYVTEGMRKPAFLSGEQKKAIVDLLFKTNRKVTVKQLKEDYFKKIECFDSVEISGVEDRFNASLGTYHDLLKIIKDKDFLDNEENEDILEDIVLTLTLFEDREMIEERLKTYAHLFDDKVMKQLKRRRYTGWGRLSRKLINGIRDKQSGKTILDFLKSDGFANRNFMQLIHDDSLTFKEDIQKAQVSGQGDSLHEHIANLAGSPAIKKGILQTVKVVDELVKVMGRHKPENIVIEMARENQTTQKGQKNSRERMKRIEEGIKELGSQILKEHPVENTQLQNEKLYLYYLQNGRDMYVDQELDINRLSDYDVDHIVPQSFLKDDSIDNKVLTRSDKARGKSDNVPSEEVVKKMKNYWRQLLNAKLITQRKFDNLTKAERGGLSELDKAGFIKRQLVETRQITKHVAQILDSRMNTKYDENDKLIREVKVITLKSKLVSDFRKDFQFYKVREINNYHHAHDAYLNAVVGTALIKKYPKLESEFVYGDYKVYDVRKMIAKSEQEIGKATAKYFFYSNIMNFFKTEITLANGEIRKRPLIETNGETGEIVWDKGRDFATVRKVLSMPQVNIVKKTEVQTGGFSKESILPKRNSDKLIARKKDWDPKKYGGFDSPTVAYSVLVVAKVEKGKSKKLKSVKELLGITIMERSSFEKNPIDFLEAKGYKEVKKDLIIKLPKYSLFELENGRKRMLASAGELQKGNELALPSKYVNFLYLASHYEKLKGSPEDNEQKQLFVEQHKHYLDEIIEQISEFSKRVILADANLDKVLSAYNKHRDKPIREQAENIIHLFTLTNLGAPAAFKYFDTTIDRKRYTSTKEVLDATLIHQSITGLYETRIDLSQLGGDGGEAAAKPAPGSSGGTLGDQGSRGSDPLPEPRVTLTVEGIPTEFLVNTGAEHSVLTKPMGKMGSKRTVVAGATGSKVYPWTTKRLLKIGQKQVTHSFLVIPECPAPLLGRDLLTKLKAQIQFSTEGPQVTWEDRPAMCLVLNLEEEYRLHEKPVPPSIDPSWLQLFPMVWAEKAGMGLANQVPPVVVELKSDASPVAVRQYPMSKEAREGIRPHIQRFLDLGILVPCQSPWNTPLLPVKKPGTNDYRPVQDLREVNKRVQDIHPTVPNPYNLLSSLPPSHTWYSVLDLKDAFFCLKLHPNSQPLFAFEWRDPEKGNTGQLTWTRLPQGFKNSPTLFDEALHRDLASFRALNPQVVMLQYVDDLLVAAPTYRDCKEGTRRLLQELSKLGYRVSAKKAQLCREEVTYLGYLLKGGKRWLTPARKATVMKIPTPTTPRQVREFLGTAGFCRLWIPGFASLAAPLYPLTREKVPFTWTEAHQEAFGRIKEALLSAPALALPDLTKPFALYVDEKEGVARGVLTQTLGPWRRPVAYLSKKLDPVASGWPTCLKAIAAVALLLKDADKLTLGQNVLVIAPHNLESIVRQPPDRWMTNARMTHYQSLLLNERVSFAPPAILNPATLLPVESDDTPIHICSEILAEETGTRPDLRDQPLPGVPAWYTDGSSFIMDGRRQAGAAIVDNKRTVWASNLPEGTSAQKAELIALTQALRLAEGKSINIYTDSRYAFATAHVHGAIYKQRGLLTSAGKDIKNKEEILALLEAIHLPKRVAIIHCPGHQRGTDPVATGNRKADEAAKQAAQSTRILTETTKNAGKRTADGSEFEKRTADGSEFESPKKKAKVE

SEQ ID NO: 7620 - protein, 2218 aa, synthetic construct
MPAAKRVKLDGGDKKYSIGLDIGTNSVGWAVITDEYKVPSKKFKVLGNTDRHSIKKNLIGALLFDSGETAEATRLKRTARRRYTRRKNRICYLQEIFSNEMAKVDDSFFHRLEESFLVEEDKKHERHPIFGNIVDEVAYHEKYPTIYHLRKKLVDSTDKADLRLIYLALAHMIKFRGHFLIEGDLNPDNSDVDKLFIQLVQTYNQLFEENPINASGVDAKAILSARLSKSRRLENLIAQLPGEKKNGLFGNLIALSLGLTPNFKSNFDLAEDAKLQLSKDTYDDDLDNLLAQIGDQYADLFLAAKNLSDAILLSDILRVNTEITKAPLSASMIKRYDEHHQDLTLLKALVRQQLPEKYKEIFFDQSKNGYAGYIDGGASQEEFYKFIKPILEKMDGTEELLVKLNREDLLRKQRTFDNGSIPHQIHLGELHAILRRQEDFYPFLKDNREKIEKILTFRIPYYVGPLARGNSRFAWMTRKSEETITPWNFEEVVDKGASAQSFIERMTNFDKNLPNEKVLPKHSLLYEYFTVYNELTKVKYVTEGMRKPAFLSGEQKKAIVDLLFKTNRKVTVKQLKEDYFKKIECFDSVEISGVEDRFNASLGTYHDLLKIIKDKDFLDNEENEDILEDIVLTLTLFEDREMIEERLKTYAHLFDDKVMKQLKRRRYTGWGRLSRKLINGIRDKQSGKTILDFLKSDGFANRNFMQLIHDDSLTFKEDIQKAQVSGQGDSLHEHIANLAGSPAIKKGILQTVKVVDELVKVMGRHKPENIVIEMARENQTTQKGQKNSRERMKRIEEGIKELGSQILKEHPVENTQLQNEKLYLYYLQNGRDMYVDQELDINRLSDYDVDHIVPQSFLKDDSIDNKVLTRSDKARGKSDNVPSEEVVKKMKNYWRQLLNAKLITQRKFDNLTKAERGGLSELDKAGFIKRQLVETRQITKHVAQILDSRMNTKYDENDKLIREVKVITLKSKLVSDFRKDFQFYKVREINNYHHAHDAYLNAVVGTALIKKYPKLESEFVYGDYKVYDVRKMIAKSEQEIGKATAKYFFYSNIMNFFKTEITLANGEIRKRPLIETNGETGEIVWDKGRDFATVRKVLSMPQVNIVKKTEVQTGGFSKESILPKRNSDKLIARKKDWDPKKYGGFDSPTVAYSVLVVAKVEKGKSKKLKSVKELLGITIMERSSFEKNPIDFLEAKGYKEVKKDLIIKLPKYSLFELENGRKRMLASAGELQKGNELALPSKYVNFLYLASHYEKLKGSPEDNEQKQLFVEQHKHYLDEIIEQISEFSKRVILADANLDKVLSAYNKHRDKPIREQAENIIHLFTLTNLGAPAAFKYFDTTIDRKRYTSTKEVLDATLIHQSITGLYETRIDLSQLGGDGGEAAAKPAPGSSGGTLGDQGSRGSDPLPEPRVTLTVEGIPTEFLVNTGAEHSVLTKPMGKMGSKRTVVAGATGSKVYPWTTKRLLKIGQKQVTHSFLVIPECPAPLLGRDLLTKLKAQIQFSTEGPQVTWEDRPAMCLVLNLEEEYRLHEKPVPPSIDPSWLQLFPMVWAEKAGMGLANQVPPVVVELKSDASPVAVRQYPMSKEAREGIRPHIQRFLDLGILVPCQSPWNTPLLPVKKPGTNDYRPVQDLREVNKRVQDIHPTVPNPYNLLSSLPPSHTWYSVLDLKDAFFCLKLHPNSQPLFAFEWRDPEKGNTGQLTWTRLPQGFKNSPTLFNEALHRDLASFRALNPQVVMLQYVDDLLVAAPTYRDCKEGTRRLLQELSKLGYRVSAKKAQLCREEVTYLGYLLKGGKRWLTPARKATVMKIPTPTTPRQVREFLGTAGFCRLWIPGFASLAAPLYPLTRPKVPFTWTEAHQEAFGRIKEALLSAPALALPDLTKPFALYVDEKEGVARGVLTQTLGPWRRPVAYLSKKLDPVASGWPTCLKAIAAVALLLKDADKLTLGQNVLVIAPHNLESIVRQPPDRWMTNARMTHYQSLLLNERVSFAPPAILNPATLLPVESDDTPIHICSEILAEETGTRPDLRDQPLPGVPAWYTDGSSFIMDGRRQAGAAIVDNKRTVWASNLPEGTSAQKAELIALTQALRLAEGKSINIYTDSRYAFATAHVHGAIYKQRGWLTSAGKDIKNKEEILALLEAIHLPKRVAIIHCPGHQRGTDPVATGNRKADEAAKQAAQSTRILTETTKNAGKRTADGSEFEKRTADGSEFESPKKKAKVE

SEQ ID NO: 7621 - protein, 2096 aa, synthetic construct
MPAAKRVKLDGGDKKYSIGLDIGTNSVGWAVITDEYKVPSKKFKVLGNTDRHSIKKNLIGALLFDSGETAEATRLKRTARRRYTRRKNRICYLQEIFSNEMAKVDDSFFHRLEESFLVEEDKKHERHPIFGNIVDEVAYHEKYPTIYHLRKKLVDSTDKADLRLIYLALAHMIKFRGHFLIEGDLNPDNSDVDKLFIQLVQTYNQLFEENPINASGVDAKAILSARLSKSRRLENLIAQLPGEKKNGLFGNLIALSLGLTPNFKSNFDLAEDAKLQLSKDTYDDDLDNLLAQIGDQYADLFLAAKNLSDAILLSDILRVNTEITKAPLSASMIKRYDEHHQDLTLLKALVRQQLPEKYKEIFFDQSKNGYAGYIDGGASQEEFYKFIKPILEKMDGTEELLVKLNREDLLRKQRTFDNGSIPHQIHLGELHAILRRQEDFYPFLKDNREKIEKILTFRIPYYVGPLARGNSRFAWMTRKSEETITPWNFEEVVDKGASAQSFIERMTNFDKNLPNEKVLPKHSLLYEYFTVYNELTKVKYVTEGMRKPAFLSGEQKKAIVDLLFKTNRKVTVKQLKEDYFKKIECFDSVEISGVEDRFNASLGTYHDLLKIIKDKDFLDNEENEDILEDIVLTLTLFEDREMIEERLKTYAHLFDDKVMKQLKRRRYTGWGRLSRKLINGIRDKQSGKTILDFLKSDGFANRNFMQLIHDDSLTFKEDIQKAQVSGQGDSLHEHIANLAGSPAIKKGILQTVKVVDELVKVMGRHKPENIVIEMARENQTTQKGQKNSRERMKRIEEGIKELGSQILKEHPVENTQLQNEKLYLYYLQNGRDMYVDQELDINRLSDYDVDHIVPQSFLKDDSIDNKVLTRSDKARGKSDNVPSEEVVKKMKNYWRQLLNAKLITQRKFDNLTKAERGGLSELDKAGFIKRQLVETRQITKHVAQILDSRMNTKYDENDKLIREVKVITLKSKLVSDFRKDFQFYKVREINNYHHAHDAYLNAVVGTALIKKYPKLESEFVYGDYKVYDVRKMIAKSEQEIGKATAKYFFYSNIMNFFKTEITLANGEIRKRPLIETNGETGEIVWDKGRDFATVRKVLSMPQVNIVKKTEVQTGGFSKESILPKRNSDKLIARKKDWDPKKYGGFDSPTVAYSVLVVAKVEKGKSKKLKSVKELLGITIMERSSFEKNPIDFLEAKGYKEVKKDLIIKLPKYSLFELENGRKRMLASAGELQKGNELALPSKYVNFLYLASHYEKLKGSPEDNEQKQLFVEQHKHYLDEIIEQISEFSKRVILADANLDKVLSAYNKHRDKPIREQAENIIHLFTLTNLGAPAAFKYFDTTIDRKRYTSTKEVLDATLIHQSITGLYETRIDLSQLGGDGGEAAAKPAPGSSGGTLNLEDEYRLYETSAEPEVSPGSTWLSDFPQAWAETGGMGLAVRQAPLIIPLKATSTPVSIKQYPMSQEAKLGIKPHIQRLLDQGILVPCQSPWNTPLLPVKKPGTNDYRPVQDLREVNKRVEDIHPTVPNPYNLLSGLPPSHRWYTVLDLKDAFFCLRLHPTSQPLFAFEWRDPGMGISGQLTWTRLPQGFKNSPTLFNEALHRDLADFRIQHPDLILLQYVDDILLAATSELDCQQGTRALLLTLGNLGYRASAKKAQLCQKQVKYLGYLLKEGQRWLTEARKETVMGQPTPKTPRQLREFLGKAGFCRLFIPGFAEMAAPLYPLTKPGTLFNWGPDQQKAYQEIKQALLTAPALGLPDLTKPFELFVDEKQGYAKGVLTQKLGPWRRPVAYLSKKLDPVAAGWPPCLRMVAAIAVLRKDAGKLTMGQPLVILAPHAVEALVKQPPDRWLSNARMTHYQAMLLDTDRVQFGPVVALNPATLLPLPEEGAPHDCLEILAETHGTRPDLTDQPIPDADHTWYTDGSSFLQEGQRKAGAAVTTETEVIWARALPAGTSAQRAELIALTQALKMAEGKRLNVYTDSRYAFATAHIHGEIYRRRGWLTSEGREIKNKSEILALLKALFLPKRLSIIHCLGHQKGDSAEARGNRLADQAAREAAIKTPPDTSTLLAGKRTADGSEFEKRTADGSEFESPKKKAKVE

SEQ ID NO: 7622 - protein, 2096 aa, synthetic construct
MPAAKRVKLDGGDKKYSIGLDIGTNSVGWAVITDEYKVPSKKFKVLGNTDRHSIKKNLIGALLFDSGETAEATRLKRTARRRYTRRKNRICYLQEIFSNEMAKVDDSFFHRLEESFLVEEDKKHERHPIFGNIVDEVAYHEKYPTIYHLRKKLVDSTDKADLRLIYLALAHMIKFRGHFLIEGDLNPDNSDVDKLFIQLVQTYNQLFEENPINASGVDAKAILSARLSKSRRLENLIAQLPGEKKNGLFGNLIALSLGLTPNFKSNFDLAEDAKLQLSKDTYDDDLDNLLAQIGDQYADLFLAAKNLSDAILLSDILRVNTEITKAPLSASMIKRYDEHHQDLTLLKALVRQQLPEKYKEIFFDQSKNGYAGYIDGGASQEEFYKFIKPILEKMDGTEELLVKLNREDLLRKQRTFDNGSIPHQIHLGELHAILRRQEDFYPFLKDNREKIEKILTFRIPYYVGPLARGNSRFAWMTRKSEETITPWNFEEVVDKGASAQSFIERMTNFDKNLPNEKVLPKHSLLYEYFTVYNELTKVKYVTEGMRKPAFLSGEQKKAIVDLLFKTNRKVTVKQLKEDYFKKIECFDSVEISGVEDRFNASLGTYHDLLKIIKDKDFLDNEENEDILEDIVLTLTLFEDREMIEERLKTYAHLFDDKVMKQLKRRRYTGWGRLSRKLINGIRDKQSGKTILDFLKSDGFANRNFMQLIHDDSLTFKEDIQKAQVSGQGDSLHEHIANLAGSPAIKKGILQTVKVVDELVKVMGRHKPENIVIEMARENQTTQKGQKNSRERMKRIEEGIKELGSQILKEHPVENTQLQNEKLYLYYLQNGRDMYVDQELDINRLSDYDVDHIVPQSFLKDDSIDNKVLTRSDKARGKSDNVPSEEVVKKMKNYWRQLLNAKLITQRKFDNLTKAERGGLSELDKAGFIKRQLVETRQITKHVAQILDSRMNTKYDENDKLIREVKVITLKSKLVSDFRKDFQFYKVREINNYHHAHDAYLNAVVGTALIKKYPKLESEFVYGDYKVYDVRKMIAKSEQEIGKATAKYFFYSNIMNFFKTEITLANGEIRKRPLIETNGETGEIVWDKGRDFATVRKVLSMPQVNIVKKTEVQTGGFSKESILPKRNSDKLIARKKDWDPKKYGGFDSPTVAYSVLVVAKVEKGKSKKLKSVKELLGITIMERSSFEKNPIDFLEAKGYKEVKKDLIIKLPKYSLFELENGRKRMLASAGELQKGNELALPSKYVNFLYLASHYEKLKGSPEDNEQKQLFVEQHKHYLDEIIEQISEFSKRVILADANLDKVLSAYNKHRDKPIREQAENIIHLFTLTNLGAPAAFKYFDTTIDRKRYTSTKEVLDATLIHQSITGLYETRIDLSQLGGDGGEAAAKPAPGSSGGTLNIEDEYRLHETSKGPDVPLGSTWLSDFPQAWAETGGMGLAFRQAPLIISLKATSTPVSIKQYPMSQEARLGIKPHIQRLLDQGILVPCQSPWNTPLLPVKKPGTNDYRPVQDLREVNKRVEDIHPTVPNPYNLLSGLPPSHQWYTVLDLKDAFFCLRLHPTSQSLFAFEWKDPEMGISGQLTWTRLPQGFKNSPTLFNEALHRDLADFRIQHPDLILLQYVDDLLLAATSELDCQQGTRALLQTLGDLGYRASAKKAQICQKQVKYLGYLLKEGQRWLTEARKETVMGQPTPKTPRQLREFLGKAGLCRLFIPGFAEMAAPLYPLTKPGTLFKWGPDQQKAYQEIKQALLTAPALGLPDLTKPFELFVDEKQGYAKGVLTQKLGPWRRPVAYLSKKLDPVAAGWPPCLRMVAAIAVLTKDVGKLTMGQPLVILAPHAVEALVKQPPDRWLSNARMTHYQALLLDTDRVQFGPIVALNPATLLPLPEEGLQHDCLDILAEAHGTRPDLTDQPLPDADHTWYTDGSSFLQEGQRRAGAAVTTETEVIWAKALPAGTSAQRAELIALTQALKMAAGKKLNVYTDSRYAFATAHIHGEIYRRRGWLTSEGKEIKNKDEILALLKALFLPKRLSIIHCPGHQKGNHAEARGNRMADQAAREVATRETPETSTLLAGKRTADGSEFEKRTADGSEFESPKKKAKVE

SEQ ID NO: 7623 - protein, 2096 aa, synthetic construct
MPAAKRVKLDGGDKKYSIGLDIGTNSVGWAVITDEYKVPSKKFKVLGNTDRHSIKKNLIGALLFDSGETAEATRLKRTARRRYTRRKNRICYLQEIFSNEMAKVDDSFFHRLEESFLVEEDKKHERHPIFGNIVDEVAYHEKYPTIYHLRKKLVDSTDKADLRLIYLALAHMIKFRGHFLIEGDLNPDNSDVDKLFIQLVQTYNQLFEENPINASGVDAKAILSARLSKSRRLENLIAQLPGEKKNGLFGNLIALSLGLTPNFKSNFDLAEDAKLQLSKDTYDDDLDNLLAQIGDQYADLFLAAKNLSDAILLSDILRVNTEITKAPLSASMIKRYDEHHQDLTLLKALVRQQLPEKYKEIFFDQSKNGYAGYIDGGASQEEFYKFIKPILEKMDGTEELLVKLNREDLLRKQRTFDNGSIPHQIHLGELHAILRRQEDFYPFLKDNREKIEKILTFRIPYYVGPLARGNSRFAWMTRKSEETITPWNFEEVVDKGASAQSFIERMTNFDKNLPNEKVLPKHSLLYEYFTVYNELTKVKYVTEGMRKPAFLSGEQKKAIVDLLFKTNRKVTVKQLKEDYFKKIECFDSVEISGVEDRFNASLGTYHDLLKIIKDKDFLDNEENEDILEDIVLTLTLFEDREMIEERLKTYAHLFDDKVMKQLKRRRYTGWGRLSRKLINGIRDKQSGKTILDFLKSDGFANRNFMQLIHDDSLTFKEDIQKAQVSGQGDSLHEHIANLAGSPAIKKGILQTVKVVDELVKVMGRHKPENIVIEMARENQTTQKGQKNSRERMKRIEEGIKELGSQILKEHPVENTQLQNEKLYLYYLQNGRDMYVDQELDINRLSDYDVDHIVPQSFLKDDSIDNKVLTRSDKARGKSDNVPSEEVVKKMKNYWRQLLNAKLITQRKFDNLTKAERGGLSELDKAGFIKRQLVETRQITKHVAQILDSRMNTKYDENDKLIREVKVITLKSKLVSDFRKDFQFYKVREINNYHHAHDAYLNAVVGTALIKKYPKLESEFVYGDYKVYDVRKMIAKSEQEIGKATAKYFFYSNIMNFFKTEITLANGEIRKRPLIETNGETGEIVWDKGRDFATVRKVLSMPQVNIVKKTEVQTGGFSKESILPKRNSDKLIARKKDWDPKKYGGFDSPTVAYSVLVVAKVEKGKSKKLKSVKELLGITIMERSSFEKNPIDFLEAKGYKEVKKDLIIKLPKYSLFELENGRKRMLASAGELQKGNELALPSKYVNFLYLASHYEKLKGSPEDNEQKQLFVEQHKHYLDEIIEQISEFSKRVILADANLDKVLSAYNKHRDKPIREQAENIIHLFTLTNLGAPAAFKYFDTTIDRKRYTSTKEVLDATLIHQSITGLYETRIDLSQLGGDGGEAAAKPAPGSSGGTLNIEDEHRLHETSKEPDVSLGSTWLSDFPQAWAETGGMGLAVRQAPLIIPLKATSTPVSIKQYPMSQEARLGIKPHIQRLLDQGILVPCQSPWNTPLLPVKKPGTNDYRPVQDLREVNKRVEDIHPTVPNPYNLLSGLPPSHQWYTVLDLKDAFFCLRLHPTSQPLFAFEWRDPEMGISGQLTWTRLPQGFKNSPTLFDEALHRDLADFRIQHPDLILLQYVDDLLLAATSELDCQQGTRALLQTLGNLGYRASAKKAQICQKQVKYLGYLLKEGQRWLTEARKETVMGQPTPKTPRQLREFLGTAGFCRLWIPGFAEMAAPLYPLTKTGTLFNWGPDQQKAYQEIKQALLTAPALGLPDLTKPFELFVDEKQGYAKGVLTQKLGPWRRPVAYLSKKLDPVAAGWPPCLRMVAAIAVLTKDAGKLTMGQPLVILAPHAVEALVKQPPDRWLSNARMTHYQALLLDTDRVQFGPVVALNPATLLPLPEEGLQHNCLDILAEAHGTRPDLTDQPLPDADHTWYTDGSSLLQEGQRKAGAAVTTETEVIWAKALPAGTSAQRAELIALTQALKMAEGKKLNVYTDSRYAFATAHIHGEIYRRRGLLTSEGKEIKNKDEILALLKALFLPKRLSIIHCPGHQKGHSAEARGNRMADQAARKAAITETPDTSTLLAGKRTADGSEFEKRTADGSEFESPKKKAKVE

SEQ ID NO: 7624 - protein, 2090 aa, synthetic construct
MPAAKRVKLDGGDKKYSIGLDIGTNSVGWAVITDEYKVPSKKFKVLGNTDRHSIKKNLIGALLFDSGETAEATRLKRTARRRYTRRKNRICYLQEIFSNEMAKVDDSFFHRLEESFLVEEDKKHERHPIFGNIVDEVAYHEKYPTIYHLRKKLVDSTDKADLRLIYLALAHMIKFRGHFLIEGDLNPDNSDVDKLFIQLVQTYNQLFEENPINASGVDAKAILSARLSKSRRLENLIAQLPGEKKNGLFGNLIALSLGLTPNFKSNFDLAEDAKLQLSKDTYDDDLDNLLAQIGDQYADLFLAAKNLSDAILLSDILRVNTEITKAPLSASMIKRYDEHHQDLTLLKALVRQQLPEKYKEIFFDQSKNGYAGYIDGGASQEEFYKFIKPILEKMDGTEELLVKLNREDLLRKQRTFDNGSIPHQIHLGELHAILRRQEDFYPFLKDNREKIEKILTFRIPYYVGPLARGNSRFAWMTRKSEETITPWNFEEVVDKGASAQSFIERMTNFDKNLPNEKVLPKHSLLYEYFTVYNELTKVKYVTEGMRKPAFLSGEQKKAIVDLLFKTNRKVTVKQLKEDYFKKIECFDSVEISGVEDRFNASLGTYHDLLKIIKDKDFLDNEENEDILEDIVLTLTLFEDREMIEERLKTYAHLFDDKVMKQLKRRRYTGWGRLSRKLINGIRDKQSGKTILDFLKSDGFANRNFMQLIHDDSLTFKEDIQKAQVSGQGDSLHEHIANLAGSPAIKKGILQTVKVVDELVKVMGRHKPENIVIEMARENQTTQKGQKNSRERMKRIEEGIKELGSQILKEHPVENTQLQNEKLYLYYLQNGRDMYVDQELDINRLSDYDVDHIVPQSFLKDDSIDNKVLTRSDKARGKSDNVPSEEVVKKMKNYWRQLLNAKLITQRKFDNLTKAERGGLSELDKAGFIKRQLVETRQITKHVAQILDSRMNTKYDENDKLIREVKVITLKSKLVSDFRKDFQFYKVREINNYHHAHDAYLNAVVGTALIKKYPKLESEFVYGDYKVYDVRKMIAKSEQEIGKATAKYFFYSNIMNFFKTEITLANGEIRKRPLIETNGETGEIVWDKGRDFATVRKVLSMPQVNIVKKTEVQTGGFSKESILPKRNSDKLIARKKDWDPKKYGGFDSPTVAYSVLVVAKVEKGKSKKLKSVKELLGITIMERSSFEKNPIDFLEAKGYKEVKKDLIIKLPKYSLFELENGRKRMLASAGELQKGNELALPSKYVNFLYLASHYEKLKGSPEDNEQKQLFVEQHKHYLDEIIEQISEFSKRVILADANLDKVLSAYNKHRDKPIREQAENIIHLFTLTNLGAPAAFKYFDTTIDRKRYTSTKEVLDATLIHQSITGLYETRIDLSQLGGDGGEAAAKPAPGSSGGTLQLDDEYRLYSPLVKPDQNIQFWLEQFPQAWAETAGMGLAKQVPPQVIQLKASATPVSVRQYPLSKEAQEGIRPHVQRLIQQGILVPVQSPWNTPLLPVRKPGTNDYRPVQDLREVNKRVQDIHPTVPNPYNLLCALPPQRSWYTVLDLKDAFFCLRLHPTSQPLFAFEWRDPGTGRTGQLTWTRLPQGFKNSPTIFDEALHRDLANFRIQHPQVTLLQYVDDLLLAGATKQDCLEGTKALLLELSDLGYRASAKKAQICRREVTYLGYSLRDGQRWLTEARKKTVVQIPAPTTAKQVREFLGTAGFCRLWIPGFATLAAPLYPLTKEKGEFSWAPEHQKAFDAIKKALLSAPALALPDVTKPFTLYVDERKGVARGVLTQTLGPWRRPVAYLSKKLDPVASGWPVCLKAIAAVAILVKDADKLTLGQNITVIAPHALENIVRQPPDRWMTNARMTHYQSLLLTERVTFAPPAALNPATLLPEETDEPVTHDCHQLLIEETGVRKDLTDIPLTGEVLTWFTDGSSYVVEGKRMAGAAVVDGTRTIWASSLPEGTSAQKAELMALTQALRLAEGKSINIYTDSRYAFATAHVHGAIYKQRGLLTSAGREIKNKEEILSLLEALHLPKRLAIIHCPGHQKAKDPISRGNQMADRVAKQAAQGVNLLAGKRTADGSEFEKRTADGSEFESPKKKAKVE

SEQ ID NO: 7625 - protein, 2096 aa, synthetic construct
MPAAKRVKLDGGDKKYSIGLDIGTNSVGWAVITDEYKVPSKKFKVLGNTDRHSIKKNLIGALLFDSGETAEATRLKRTARRRYTRRKNRICYLQEIFSNEMAKVDDSFFHRLEESFLVEEDKKHERHPIFGNIVDEVAYHEKYPTIYHLRKKLVDSTDKADLRLIYLALAHMIKFRGHFLIEGDLNPDNSDVDKLFIQLVQTYNQLFEENPINASGVDAKAILSARLSKSRRLENLIAQLPGEKKNGLFGNLIALSLGLTPNFKSNFDLAEDAKLQLSKDTYDDDLDNLLAQIGDQYADLFLAAKNLSDAILLSDILRVNTEITKAPLSASMIKRYDEHHQDLTLLKALVRQQLPEKYKEIFFDQSKNGYAGYIDGGASQEEFYKFIKPILEKMDGTEELLVKLNREDLLRKQRTFDNGSIPHQIHLGELHAILRRQEDFYPFLKDNREKIEKILTFRIPYYVGPLARGNSRFAWMTRKSEETITPWNFEEVVDKGASAQSFIERMTNFDKNLPNEKVLPKHSLLYEYFTVYNELTKVKYVTEGMRKPAFLSGEQKKAIVDLLFKTNRKVTVKQLKEDYFKKIECFDSVEISGVEDRFNASLGTYHDLLKIIKDKDFLDNEENEDILEDIVLTLTLFEDREMIEERLKTYAHLFDDKVMKQLKRRRYTGWGRLSRKLINGIRDKQSGKTILDFLKSDGFANRNFMQLIHDDSLTFKEDIQKAQVSGQGDSLHEHIANLAGSPAIKKGILQTVKVVDELVKVMGRHKPENIVIEMARENQTTQKGQKNSRERMKRIEEGIKELGSQILKEHPVENTQLQNEKLYLYYLQNGRDMYVDQELDINRLSDYDVDHIVPQSFLKDDSIDNKVLTRSDKARGKSDNVPSEEVVKKMKNYWRQLLNAKLITQRKFDNLTKAERGGLSELDKAGFIKRQLVETRQITKHVAQILDSRMNTKYDENDKLIREVKVITLKSKLVSDFRKDFQFYKVREINNYHHAHDAYLNAVVGTALIKKYPKLESEFVYGDYKVYDVRKMIAKSEQEIGKATAKYFFYSNIMNFFKTEITLANGEIRKRPLIETNGETGEIVWDKGRDFATVRKVLSMPQVNIVKKTEVQTGGFSKESILPKRNSDKLIARKKDWDPKKYGGFDSPTVAYSVLVVAKVEKGKSKKLKSVKELLGITIMERSSFEKNPIDFLEAKGYKEVKKDLIIKLPKYSLFELENGRKRMLASAGELQKGNELALPSKYVNFLYLASHYEKLKGSPEDNEQKQLFVEQHKHYLDEIIEQISEFSKRVILADANLDKVLSAYNKHRDKPIREQAENIIHLFTLTNLGAPAAFKYFDTTIDRKRYTSTKEVLDATLIHQSITGLYETRIDLSQLGGDGGEAAAKPAPGSSGGTLNIEDEYRLHETSKEPDVPLGSTWLSDFPQAWAETGGMGLAVRQAPLIIPLKATSTPVSIKQYPMSQEARLGIKPHIQRLLDQGILVPCQSPWNTPLLPVKKPGTNDYRPVQDLREVNKRVEDIHPTVPNPYNLLSGLPPSHQWYTVLDLKDAFFCLRLHPTSQPLFAFEWRDPEMGISGQLTWTRLPQGFKNSPTLFNEALHRDLADFRIQHPDLILLQYVDDLLLAATSEQDCQRGTRALLQTLGNLGYRASAKKAQICQKQVKYLGYLLKEGQRWLTEARKETVMGQPTPKTPRQLREFLGTAGFCRLWIPGFAEMAAPLYPLTKPGTLFNWGPDQQKAYQEIKQALLTAPALGLPDLTKPFELFVDEKQGYAKGVLTQKLGPWRRPVAYLSKKLDPVAAGWPPCLRMVAAIAVLTKDAGKLTMGQPLVILAPHAVEALVKQPPDRWLSNARMTHYQAMLLDTDRVQFGPVVALNPATLLPLPEKEAPHDCLEILAETHGTRPDLTDQPIPDADYTWYTDGSSFLQEGQRRAGAAVTTETEVIWARALPAGTSAQRAELIALTQALKMAEGKKLNVYTDSRYAFATAHVHGEIYRRRGWLTSEGREIKNKNEILALLKALFLPKRLSIIHCPGHQKGNSAEARGNRMADQAAREAAMKAVLETSTLLAGKRTADGSEFEKRTADGSEFESPKKKAKVE

SEQ ID NO: 7626 - protein, 2098 aa, synthetic construct
MPAAKRVKLDGGDKKYSIGLDIGTNSVGWAVITDEYKVPSKKFKVLGNTDRHSIKKNLIGALLFDSGETAEATRLKRTARRRYTRRKNRICYLQEIFSNEMAKVDDSFFHRLEESFLVEEDKKHERHPIFGNIVDEVAYHEKYPTIYHLRKKLVDSTDKADLRLIYLALAHMIKFRGHFLIEGDLNPDNSDVDKLFIQLVQTYNQLFEENPINASGVDAKAILSARLSKSRRLENLIAQLPGEKKNGLFGNLIALSLGLTPNFKSNFDLAEDAKLQLSKDTYDDDLDNLLAQIGDQYADLFLAAKNLSDAILLSDILRVNTEITKAPLSASMIKRYDEHHQDLTLLKALVRQQLPEKYKEIFFDQSKNGYAGYIDGGASQEEFYKFIKPILEKMDGTEELLVKLNREDLLRKQRTFDNGSIPHQIHLGELHAILRRQEDFYPFLKDNREKIEKILTFRIPYYVGPLARGNSRFAWMTRKSEETITPWNFEEVVDKGASAQSFIERMTNFDKNLPNEKVLPKHSLLYEYFTVYNELTKVKYVTEGMRKPAFLSGEQKKAIVDLLFKTNRKVTVKQLKEDYFKKIECFDSVEISGVEDRFNASLGTYHDLLKIIKDKDFLDNEENEDILEDIVLTLTLFEDREMIEERLKTYAHLFDDKVMKQLKRRRYTGWGRLSRKLINGIRDKQSGKTILDFLKSDGFANRNFMQLIHDDSLTFKEDIQKAQVSGQGDSLHEHIANLAGSPAIKKGILQTVKVVDELVKVMGRHKPENIVIEMARENQTTQKGQKNSRERMKRIEEGIKELGSQILKEHPVENTQLQNEKLYLYYLQNGRDMYVDQELDINRLSDYDVDHIVPQSFLKDDSIDNKVLTRSDKARGKSDNVPSEEVVKKMKNYWRQLLNAKLITQRKFDNLTKAERGGLSELDKAGFIKRQLVETRQITKHVAQILDSRMNTKYDENDKLIREVKVITLKSKLVSDFRKDFQFYKVREINNYHHAHDAYLNAVVGTALIKKYPKLESEFVYGDYKVYDVRKMIAKSEQEIGKATAKYFFYSNIMNFFKTEITLANGEIRKRPLIETNGETGEIVWDKGRDFATVRKVLSMPQVNIVKKTEVQTGGFSKESILPKRNSDKLIARKKDWDPKKYGGFDSPTVAYSVLVVAKVEKGKSKKLKSVKELLGITIMERSSFEKNPIDFLEAKGYKEVKKDLIIKLPKYSLFELENGRKRMLASAGELQKGNELALPSKYVNFLYLASHYEKLKGSPEDNEQKQLFVEQHKHYLDEIIEQISEFSKRVILADANLDKVLSAYNKHRDKPIREQAENIIHLFTLTNLGAPAAFKYFDTTIDRKRYTSTKEVLDATLIHQSITGLYETRIDLSQLGGDGGPAPGSSEAAAKGGTAPLEEEYRLFLEAPIQNVTLLEQWKREIPKVWAEINPPGLASTQAPIHVQLLSTALPVRVRQYPITLEAKRSLRETIRKFRAAGILRPVHSPWNTPLLPVRKSGTSEYRMVQDLREVNKRVETIHPTVPNPYTLLSLLPPDRIWYSVLDLKDAFFCIPLAPESQLIFAFEWADAEEGESGQLTWTRLPQGFKNSPTLFNEALNRDLQGFRLDHPSVSLLQYVDDLLIAADTQAACLSATRDLLMTLAELGYRVSGKKAQLCQEEVTYLGFKIHKGSRSLSNSRTQAILQIPVPKTKRQVREFLGTIGYCRLWIPGFAELAQPLYAATRPGNDPLVWGEKEEEAFQSLKLALTQPPALALPSLDKPFQLFVEETSGAAKGVLTQALGPWKRPVAYLSKRLDPVAAGWPRCLRAIAAAALLTREASKLTFGQDIEITSSHNLESLLRSPPDKWLTNARITQYQVLLLDPPRVRFKQTAALNPATLLPETDDTLPIHHCLDTLDSLTSTRPDLTDQPLAQAEATLFTDGSSYIRDGKRYAGAAVVTLDSVIWAEPLPIGTSAQKAELIALTKALEWSKDKSVNIYTDSRYAFATLHVHGMIYRERGWLTAGGKAIKNAPEILALLTAVWLPKRVAVMHCKGHQKDDAPTSTGNRRADEVAREVAIRPLSTQATISAGKRTADGSEFEKRTADGSEFESPKKKAKVE

SEQ ID NO: 7627 - protein, 2098 aa, synthetic construct
MPAAKRVKLDGGDKKYSIGLDIGTNSVGWAVITDEYKVPSKKFKVLGNTDRHSIKKNLIGALLFDSGETAEATRLKRTARRRYTRRKNRICYLQEIFSNEMAKVDDSFFHRLEESFLVEEDKKHERHPIFGNIVDEVAYHEKYPTIYHLRKKLVDSTDKADLRLIYLALAHMIKFRGHFLIEGDLNPDNSDVDKLFIQLVQTYNQLFEENPINASGVDAKAILSARLSKSRRLENLIAQLPGEKKNGLFGNLIALSLGLTPNFKSNFDLAEDAKLQLSKDTYDDDLDNLLAQIGDQYADLFLAAKNLSDAILLSDILRVNTEITKAPLSASMIKRYDEHHQDLTLLKALVRQQLPEKYKEIFFDQSKNGYAGYIDGGASQEEFYKFIKPILEKMDGTEELLVKLNREDLLRKQRTFDNGSIPHQIHLGELHAILRRQEDFYPFLKDNREKIEKILTFRIPYYVGPLARGNSRFAWMTRKSEETITPWNFEEVVDKGASAQSFIERMTNFDKNLPNEKVLPKHSLLYEYFTVYNELTKVKYVTEGMRKPAFLSGEQKKAIVDLLFKTNRKVTVKQLKEDYFKKIECFDSVEISGVEDRFNASLGTYHDLLKIIKDKDFLDNEENEDILEDIVLTLTLFEDREMIEERLKTYAHLFDDKVMKQLKRRRYTGWGRLSRKLINGIRDKQSGKTILDFLKSDGFANRNFMQLIHDDSLTFKEDIQKAQVSGQGDSLHEHIANLAGSPAIKKGILQTVKVVDELVKVMGRHKPENIVIEMARENQTTQKGQKNSRERMKRIEEGIKELGSQILKEHPVENTQLQNEKLYLYYLQNGRDMYVDQELDINRLSDYDVDHIVPQSFLKDDSIDNKVLTRSDKARGKSDNVPSEEVVKKMKNYWRQLLNAKLITQRKFDNLTKAERGGLSELDKAGFIKRQLVETRQITKHVAQILDSRMNTKYDENDKLIREVKVITLKSKLVSDFRKDFQFYKVREINNYHHAHDAYLNAVVGTALIKKYPKLESEFVYGDYKVYDVRKMIAKSEQEIGKATAKYFFYSNIMNFFKTEITLANGEIRKRPLIETNGETGEIVWDKGRDFATVRKVLSMPQVNIVKKTEVQTGGFSKESILPKRNSDKLIARKKDWDPKKYGGFDSPTVAYSVLVVAKVEKGKSKKLKSVKELLGITIMERSSFEKNPIDFLEAKGYKEVKKDLIIKLPKYSLFELENGRKRMLASAGELQKGNELALPSKYVNFLYLASHYEKLKGSPEDNEQKQLFVEQHKHYLDEIIEQISEFSKRVILADANLDKVLSAYNKHRDKPIREQAENIIHLFTLTNLGAPAAFKYFDTTIDRKRYTSTKEVLDATLIHQSITGLYETRIDLSQLGGDGGPAPGSSEAAAKGGTAPLEEEYRLFLEAPIQNVTLLEQWKREIPKVWAEINPPGLASTQAPIHVQLLSTALPVRVRQYPITLEAKRSLRETIRKFRAAGILRPVHSPWNTPLLPVRKSGTSEYRMVQDLREVNKRVETIHPTVPNPYTLLSLLPPDRIWYSVLDLKDAFFCIPLAPESQLIFAFEWADAEEGESGQLTWTRLPQGFKNSPTLFNEALNRDLQGFRLDHPSVSLLQYVDDLLIAADTQAACLSATRDLLMTLAELGYRVSGKKAQLCQEEVTYLGFKIHKGSRSLSNSRTQAILQIPVPKTKRQVREFLGKIGYCRLFIPGFAELAQPLYAATRPGNDPLVWGEKEEEAFQSLKLALTQPPALALPSLDKPFQLFVEETSGAAKGVLTQALGPWKRPVAYLSKRLDPVAAGWPRCLRAIAAAALLTREASKLTFGQDIEITSSHNLESLLRSPPDKWLTNARITQYQVLLLDPPRVRFKQTAALNPATLLPETDDTLPIHHCLDTLDSLTSTRPDLTDQPLAQAEATLFTDGSSYIRDGKRYAGAAVVTLDSVIWAEPLPIGTSAQKAELIALTKALEWSKDKSVNIYTDSRYAFATLHVHGMIYRERGWLTAGGKAIKNAPEILALLTAVWLPKRVAVMHCKGHQKDDAPTSTGNRRADEVAREVAIRPLSTQATISAGKRTADGSEFEKRTADGSEFESPKKKAKVE

SEQ ID NO: 7628 - protein, 2087 aa, synthetic construct
MPAAKRVKLDGGDKKYSIGLDIGTNSVGWAVITDEYKVPSKKFKVLGNTDRHSIKKNLIGALLFDSGETAEATRLKRTARRRYTRRKNRICYLQEIFSNEMAKVDDSFFHRLEESFLVEEDKKHERHPIFGNIVDEVAYHEKYPTIYHLRKKLVDSTDKADLRLIYLALAHMIKFRGHFLIEGDLNPDNSDVDKLFIQLVQTYNQLFEENPINASGVDAKAILSARLSKSRRLENLIAQLPGEKKNGLFGNLIALSLGLTPNFKSNFDLAEDAKLQLSKDTYDDDLDNLLAQIGDQYADLFLAAKNLSDAILLSDILRVNTEITKAPLSASMIKRYDEHHQDLTLLKALVRQQLPEKYKEIFFDQSKNGYAGYIDGGASQEEFYKFIKPILEKMDGTEELLVKLNREDLLRKQRTFDNGSIPHQIHLGELHAILRRQEDFYPFLKDNREKIEKILTFRIPYYVGPLARGNSRFAWMTRKSEETITPWNFEEVVDKGASAQSFIERMTNFDKNLPNEKVLPKHSLLYEYFTVYNELTKVKYVTEGMRKPAFLSGEQKKAIVDLLFKTNRKVTVKQLKEDYFKKIECFDSVEISGVEDRFNASLGTYHDLLKIIKDKDFLDNEENEDILEDIVLTLTLFEDREMIEERLKTYAHLFDDKVMKQLKRRRYTGWGRLSRKLINGIRDKQSGKTILDFLKSDGFANRNFMQLIHDDSLTFKEDIQKAQVSGQGDSLHEHIANLAGSPAIKKGILQTVKVVDELVKVMGRHKPENIVIEMARENQTTQKGQKNSRERMKRIEEGIKELGSQILKEHPVENTQLQNEKLYLYYLQNGRDMYVDQELDINRLSDYDVDHIVPQSFLKDDSIDNKVLTRSDKARGKSDNVPSEEVVKKMKNYWRQLLNAKLITQRKFDNLTKAERGGLSELDKAGFIKRQLVETRQITKHVAQILDSRMNTKYDENDKLIREVKVITLKSKLVSDFRKDFQFYKVREINNYHHAHDAYLNAVVGTALIKKYPKLESEFVYGDYKVYDVRKMIAKSEQEIGKATAKYFFYSNIMNFFKTEITLANGEIRKRPLIETNGETGEIVWDKGRDFATVRKVLSMPQVNIVKKTEVQTGGFSKESILPKRNSDKLIARKKDWDPKKYGGFDSPTVAYSVLVVAKVEKGKSKKLKSVKELLGITIMERSSFEKNPIDFLEAKGYKEVKKDLIIKLPKYSLFELENGRKRMLASAGELQKGNELALPSKYVNFLYLASHYEKLKGSPEDNEQKQLFVEQHKHYLDEIIEQISEFSKRVILADANLDKVLSAYNKHRDKPIREQAENIIHLFTLTNLGAPAAFKYFDTTIDRKRYTSTKEVLDATLIHQSITGLYETRIDLSQLGGDGGPAPGSSEAAAKGGVPWILKKPLELTIKLDLEEQQGTLLNNSILSKKGKEELKQLFEKYSALWQSWENQVGHRRIRPHKIATGTVKPTPQKQYHINPKAKPDIQIVINDLLKQGVLIQKESTMNTPVYPVPKPNGRWRMVLDYRAVNKVTPLIAVQNQHSYGILGSLFKGRYKTTIDLSNGFWAHPIVPEDYWITAFTWQGKQYCWTVLPQGFLNSPGLFTGDVVDLLQGIPNVEVYVDDVYISHDSEKEHLEYLDILFNRLKEAGYIISLKKSNIANSIVDFLGFQITNEGRGLTDTFKEKLENITAPTTLKQLQSILGLLNFARNFIPDFTELIAPLYALIPKSTKNYVPWQIEHSTTLETLITKLNGAEYLQGRKGDKTLIMKVNASYTTGYIRYYNEGEKKPISYVSIVFSKTELKFTELEKLLTTVHKGLLKALDLSMGQNIHVYSPIVSMQNIQKTPQTAKKALASRWLSWLSYLEDPRIRFFYDPQMPALKDLPAVDTGKDNKKHPSNFQHIFYTDGSAITSPTKEGHLNAGMGIVYFINKDGNLQKQQEWSISLGNHTAQFAEIAAFEFALKKCLPLGGNILVVTDSNYVAKAYNEELDVWASNGFVNNRKKPLKHISKWKSVADLKRLRPDVVVTHEPGHQKLDSSPHAYGNNLADQLATQASFKVHAGKRTADGSEFEKRTADGSEFESPKKKAKVE

SEQ ID NO: 7629 - protein, 2095 aa, synthetic construct
MPAAKRVKLDGGDKKYSIGLDIGTNSVGWAVITDEYKVPSKKFKVLGNTDRHSIKKNLIGALLFDSGETAEATRLKRTARRRYTRRKNRICYLQEIFSNEMAKVDDSFFHRLEESFLVEEDKKHERHPIFGNIVDEVAYHEKYPTIYHLRKKLVDSTDKADLRLIYLALAHMIKFRGHFLIEGDLNPDNSDVDKLFIQLVQTYNQLFEENPINASGVDAKAILSARLSKSRRLENLIAQLPGEKKNGLFGNLIALSLGLTPNFKSNFDLAEDAKLQLSKDTYDDDLDNLLAQIGDQYADLFLAAKNLSDAILLSDILRVNTEITKAPLSASMIKRYDEHHQDLTLLKALVRQQLPEKYKEIFFDQSKNGYAGYIDGGASQEEFYKFIKPILEKMDGTEELLVKLNREDLLRKQRTFDNGSIPHQIHLGELHAILRRQEDFYPFLKDNREKIEKILTFRIPYYVGPLARGNSRFAWMTRKSEETITPWNFEEVVDKGASAQSFIERMTNFDKNLPNEKVLPKHSLLYEYFTVYNELTKVKYVTEGMRKPAFLSGEQKKAIVDLLFKTNRKVTVKQLKEDYFKKIECFDSVEISGVEDRFNASLGTYHDLLKIIKDKDFLDNEENEDILEDIVLTLTLFEDREMIEERLKTYAHLFDDKVMKQLKRRRYTGWGRLSRKLINGIRDKQSGKTILDFLKSDGFANRNFMQLIHDDSLTFKEDIQKAQVSGQGDSLHEHIANLAGSPAIKKGILQTVKVVDELVKVMGRHKPENIVIEMARENQTTQKGQKNSRERMKRIEEGIKELGSQILKEHPVENTQLQNEKLYLYYLQNGRDMYVDQELDINRLSDYDVDHIVPQSFLKDDSIDNKVLTRSDKARGKSDNVPSEEVVKKMKNYWRQLLNAKLITQRKFDNLTKAERGGLSELDKAGFIKRQLVETRQITKHVAQILDSRMNTKYDENDKLIREVKVITLKSKLVSDFRKDFQFYKVREINNYHHAHDAYLNAVVGTALIKKYPKLESEFVYGDYKVYDVRKMIAKSEQEIGKATAKYFFYSNIMNFFKTEITLANGEIRKRPLIETNGETGEIVWDKGRDFATVRKVLSMPQVNIVKKTEVQTGGFSKESILPKRNSDKLIARKKDWDPKKYGGFDSPTVAYSVLVVAKVEKGKSKKLKSVKELLGITIMERSSFEKNPIDFLEAKGYKEVKKDLIIKLPKYSLFELENGRKRMLASAGELQKGNELALPSKYVNFLYLASHYEKLKGSPEDNEQKQLFVEQHKHYLDEIIEQISEFSKRVILADANLDKVLSAYNKHRDKPIREQAENIIHLFTLTNLGAPAAFKYFDTTIDRKRYTSTKEVLDATLIHQSITGLYETRIDLSQLGGDGGPAPGSSEAAAKGGTLQLEEEYRLFEPESTQKQEMDIWLKNFPQAWAETGGMGTAHCQAPVLIQLKATATPISIRQYPMPHEAYQGIKPHIRRMLDQGILKPCQSPWNTPLLPVKKPGTEDYRPVQDLREVNKRVEDIHPTVPNPYNLLSTLPPSHPWYTVLDLKDAFFCLRLHSESQLLFAFEWRDPEIGLSGQLTWTRLPQGFKNSPTLFNEALHSDLADFRVRYPALVLLQYVDDLLLAAATRTECLEGTKALLETLGNKGYRASAKKAQICLQEVTYLGYSLKDGQRWLTKARKEAILSIPVPKNSRQVREFLGTAGYCRLWIPGFAELAAPLYPLTRPGTLFQWGTEQQLAFEDIKKALLSSPALGLPDITKPFELFIDENSGFAKGVLVQKLGPWKRPVAYLSKKLDTVASGWPPCLRMVAAIAILVKDAGKLTLGQPLTILTSHPVEALVRQPPNKWLSNARMTHYQAMLLDAERVHFGPTVSLNPATLLPLPSGGNHHDCLQILAETHGTRPDLTDQPLPDADLTWYTDGSSFIRNGEREAGAAVTTESEVIWAAPLPPGTSAQRAELIALTQALKMAEGKKLTVYTDSRYAFATTHVHGEIYRRRGWLTSEGKEIKNKNEILALLEALFLPKRLSIIHCPGHQKGDSPQAKGNRLADDTAKKAATETHSSLTVLPAGKRTADGSEFEKRTADGSEFESPKKKAKVE

SEQ ID NO: 7630 - protein, 2094 aa, synthetic construct
MPAAKRVKLDGGDKKYSIGLDIGTNSVGWAVITDEYKVPSKKFKVLGNTDRHSIKKNLIGALLFDSGETAEATRLKRTARRRYTRRKNRICYLQEIFSNEMAKVDDSFFHRLEESFLVEEDKKHERHPIFGNIVDEVAYHEKYPTIYHLRKKLVDSTDKADLRLIYLALAHMIKFRGHFLIEGDLNPDNSDVDKLFIQLVQTYNQLFEENPINASGVDAKAILSARLSKSRRLENLIAQLPGEKKNGLFGNLIALSLGLTPNFKSNFDLAEDAKLQLSKDTYDDDLDNLLAQIGDQYADLFLAAKNLSDAILLSDILRVNTEITKAPLSASMIKRYDEHHQDLTLLKALVRQQLPEKYKEIFFDQSKNGYAGYIDGGASQEEFYKFIKPILEKMDGTEELLVKLNREDLLRKQRTFDNGSIPHQIHLGELHAILRRQEDFYPFLKDNREKIEKILTFRIPYYVGPLARGNSRFAWMTRKSEETITPWNFEEVVDKGASAQSFIERMTNFDKNLPNEKVLPKHSLLYEYFTVYNELTKVKYVTEGMRKPAFLSGEQKKAIVDLLFKTNRKVTVKQLKEDYFKKIECFDSVEISGVEDRFNASLGTYHDLLKIIKDKDFLDNEENEDILEDIVLTLTLFEDREMIEERLKTYAHLFDDKVMKQLKRRRYTGWGRLSRKLINGIRDKQSGKTILDFLKSDGFANRNFMQLIHDDSLTFKEDIQKAQVSGQGDSLHEHIANLAGSPAIKKGILQTVKVVDELVKVMGRHKPENIVIEMARENQTTQKGQKNSRERMKRIEEGIKELGSQILKEHPVENTQLQNEKLYLYYLQNGRDMYVDQELDINRLSDYDVDHIVPQSFLKDDSIDNKVLTRSDKARGKSDNVPSEEVVKKMKNYWRQLLNAKLITQRKFDNLTKAERGGLSELDKAGFIKRQLVETRQITKHVAQILDSRMNTKYDENDKLIREVKVITLKSKLVSDFRKDFQFYKVREINNYHHAHDAYLNAVVGTALIKKYPKLESEFVYGDYKVYDVRKMIAKSEQEIGKATAKYFFYSNIMNFFKTEITLANGEIRKRPLIETNGETGEIVWDKGRDFATVRKVLSMPQVNIVKKTEVQTGGFSKESILPKRNSDKLIARKKDWDPKKYGGFDSPTVAYSVLVVAKVEKGKSKKLKSVKELLGITIMERSSFEKNPIDFLEAKGYKEVKKDLIIKLPKYSLFELENGRKRMLASAGELQKGNELALPSKYVNFLYLASHYEKLKGSPEDNEQKQLFVEQHKHYLDEIIEQISEFSKRVILADANLDKVLSAYNKHRDKPIREQAENIIHLFTLTNLGAPAAFKYFDTTIDRKRYTSTKEVLDATLIHQSITGLYETRIDLSQLGGDGGPAPGSSEAAAKGGVLNLEEEYRLHEKPVPSSIDPSWLQLFPTVWAERAGMGLANQVPPVVVELRSGASPVAVRQYPMSKEAREGIRPHIQKFLDLGVLVPCRSPWNTPLLPVKKPGTNDYRPVQDLREINKRVQDIHPTVPNPYNLLSSLPPSYTWYSVLDLKDAFFCLRLHPNSQPLFAFEWKDPEKGNTGQLTWTRLPQGFKNSPTLFNEALHRDLAPFRALNPQVVLLQYVDDLLVAAPTYEDCKKGTQKLLQELSKLGYRVSAKKAQLCQREVTYLGYLLKEGKRWLTPARKATVMKIPVPTTPRQVREFLGKAGFCRLFIPGFASLAAPLYPLTKPSIPFIWTEEHQQAFDHIKKALLSAPALALPDLTKPFTLYIDERAGVARGVLTQTLGPWRRPVAYLSKKLDPVASGWPTCLKAVAAVALLLKDADKLTLGQNVTVIASHSLESIVRQPPDRWMTNARMTHYQSLLLNERVSFAPPAVLNPATLLPVESEATPVHRCSEILAEETGTRRDLEDQPLPGVPTWYTDGSSFITEGKRRAGAPIVDGKRTVWASSLPEGTSAQKAELVALTQALRLAEGKNINIYTDSRYAFATAHIHGAIYKQRGWLTSAGKDIKNKEEILALLEAIHLPRRVAIIHCPGHQRGSNPVATGNRRADEAAKQAALSTRVLAGTTKPAGKRTADGSEFEKRTADGSEFESPKKKAKVE

SEQ ID NO: 7631 - protein, 2218 aa, synthetic construct
MPAAKRVKLDGGDKKYSIGLDIGTNSVGWAVITDEYKVPSKKFKVLGNTDRHSIKKNLIGALLFDSGETAEATRLKRTARRRYTRRKNRICYLQEIFSNEMAKVDDSFFHRLEESFLVEEDKKHERHPIFGNIVDEVAYHEKYPTIYHLRKKLVDSTDKADLRLIYLALAHMIKFRGHFLIEGDLNPDNSDVDKLFIQLVQTYNQLFEENPINASGVDAKAILSARLSKSRRLENLIAQLPGEKKNGLFGNLIALSLGLTPNFKSNFDLAEDAKLQLSKDTYDDDLDNLLAQIGDQYADLFLAAKNLSDAILLSDILRVNTEITKAPLSASMIKRYDEHHQDLTLLKALVRQQLPEKYKEIFFDQSKNGYAGYIDGGASQEEFYKFIKPILEKMDGTEELLVKLNREDLLRKQRTFDNGSIPHQIHLGELHAILRRQEDFYPFLKDNREKIEKILTFRIPYYVGPLARGNSRFAWMTRKSEETITPWNFEEVVDKGASAQSFIERMTNFDKNLPNEKVLPKHSLLYEYFTVYNELTKVKYVTEGMRKPAFLSGEQKKAIVDLLFKTNRKVTVKQLKEDYFKKIECFDSVEISGVEDRFNASLGTYHDLLKIIKDKDFLDNEENEDILEDIVLTLTLFEDREMIEERLKTYAHLFDDKVMKQLKRRRYTGWGRLSRKLINGIRDKQSGKTILDFLKSDGFANRNFMQLIHDDSLTFKEDIQKAQVSGQGDSLHEHIANLAGSPAIKKGILQTVKVVDELVKVMGRHKPENIVIEMARENQTTQKGQKNSRERMKRIEEGIKELGSQILKEHPVENTQLQNEKLYLYYLQNGRDMYVDQELDINRLSDYDVDHIVPQSFLKDDSIDNKVLTRSDKARGKSDNVPSEEVVKKMKNYWRQLLNAKLITQRKFDNLTKAERGGLSELDKAGFIKRQLVETRQITKHVAQILDSRMNTKYDENDKLIREVKVITLKSKLVSDFRKDFQFYKVREINNYHHAHDAYLNAVVGTALIKKYPKLESEFVYGDYKVYDVRKMIAKSEQEIGKATAKYFFYSNIMNFFKTEITLANGEIRKRPLIETNGETGEIVWDKGRDFATVRKVLSMPQVNIVKKTEVQTGGFSKESILPKRNSDKLIARKKDWDPKKYGGFDSPTVAYSVLVVAKVEKGKSKKLKSVKELLGITIMERSSFEKNPIDFLEAKGYKEVKKDLIIKLPKYSLFELENGRKRMLASAGELQKGNELALPSKYVNFLYLASHYEKLKGSPEDNEQKQLFVEQHKHYLDEIIEQISEFSKRVILADANLDKVLSAYNKHRDKPIREQAENIIHLFTLTNLGAPAAFKYFDTTIDRKRYTSTKEVLDATLIHQSITGLYETRIDLSQLGGDGGPAPGSSEAAAKGGTLGDQGSRGSDPLPEPRVTLTVEGIPTEFLVNTGAEHSVLTKPMGKMGSKRTVVAGATGSKVYPWTTKRLLKIGQKQVTHSFLVIPECPAPLLGRDLLTKLKAQIQFSTEGPQVTWEDRPAMCLVLNLEEEYRLHEKPVPPSIDPSWLQLFPMVWAEKAGMGLANQVPPVVVELKSDASPVAVRQYPMSKEAREGIRPHIQRFLDLGILVPCQSPWNTPLLPVKKPGTNDYRPVQDLREVNKRVQDIHPTVPNPYNLLSSLPPSHTWYSVLDLKDAFFCLKLHPNSQPLFAFEWRDPEKGNTGQLTWTRLPQGFKNSPTLFDEALHRDLASFRALNPQVVMLQYVDDLLVAAPTYRDCKEGTRRLLQELSKLGYRVSAKKAQLCREEVTYLGYLLKGGKRWLTPARKATVMKIPTPTTPRQVREFLGTAGFCRLWIPGFASLAAPLYPLTREKVPFTWTEAHQEAFGRIKEALLSAPALALPDLTKPFALYVDEKEGVARGVLTQTLGPWRRPVAYLSKKLDPVASGWPTCLKAIAAVALLLKDADKLTLGQNVLVIAPHNLESIVRQPPDRWMTNARMTHYQSLLLNERVSFAPPAILNPATLLPVESDDTPIHICSEILAEETGTRPDLRDQPLPGVPAWYTDGSSFIMDGRRQAGAAIVDNKRTVWASNLPEGTSAQKAELIALTQALRLAEGKSINIYTDSRYAFATAHVHGAIYKQRGLLTSAGKDIKNKEEILALLEAIHLPKRVAIIHCPGHQRGTDPVATGNRKADEAAKQAAQSTRILTETTKNAGKRTADGSEFEKRTADGSEFESPKKKAKVE

SEQ ID NO: 7632 - protein, 2127 aa, synthetic construct
MPAAKRVKLDGGDKKYSIGLDIGTNSVGWAVITDEYKVPSKKFKVLGNTDRHSIKKNLIGALLFDSGETAEATRLKRTARRRYTRRKNRICYLQEIFSNEMAKVDDSFFHRLEESFLVEEDKKHERHPIFGNIVDEVAYHEKYPTIYHLRKKLVDSTDKADLRLIYLALAHMIKFRGHFLIEGDLNPDNSDVDKLFIQLVQTYNQLFEENPINASGVDAKAILSARLSKSRRLENLIAQLPGEKKNGLFGNLIALSLGLTPNFKSNFDLAEDAKLQLSKDTYDDDLDNLLAQIGDQYADLFLAAKNLSDAILLSDILRVNTEITKAPLSASMIKRYDEHHQDLTLLKALVRQQLPEKYKEIFFDQSKNGYAGYIDGGASQEEFYKFIKPILEKMDGTEELLVKLNREDLLRKQRTFDNGSIPHQIHLGELHAILRRQEDFYPFLKDNREKIEKILTFRIPYYVGPLARGNSRFAWMTRKSEETITPWNFEEVVDKGASAQSFIERMTNFDKNLPNEKVLPKHSLLYEYFTVYNELTKVKYVTEGMRKPAFLSGEQKKAIVDLLFKTNRKVTVKQLKEDYFKKIECFDSVEISGVEDRFNASLGTYHDLLKIIKDKDFLDNEENEDILEDIVLTLTLFEDREMIEERLKTYAHLFDDKVMKQLKRRRYTGWGRLSRKLINGIRDKQSGKTILDFLKSDGFANRNFMQLIHDDSLTFKEDIQKAQVSGQGDSLHEHIANLAGSPAIKKGILQTVKVVDELVKVMGRHKPENIVIEMARENQTTQKGQKNSRERMKRIEEGIKELGSQILKEHPVENTQLQNEKLYLYYLQNGRDMYVDQELDINRLSDYDVDHIVPQSFLKDDSIDNKVLTRSDKARGKSDNVPSEEVVKKMKNYWRQLLNAKLITQRKFDNLTKAERGGLSELDKAGFIKRQLVETRQITKHVAQILDSRMNTKYDENDKLIREVKVITLKSKLVSDFRKDFQFYKVREINNYHHAHDAYLNAVVGTALIKKYPKLESEFVYGDYKVYDVRKMIAKSEQEIGKATAKYFFYSNIMNFFKTEITLANGEIRKRPLIETNGETGEIVWDKGRDFATVRKVLSMPQVNIVKKTEVQTGGFSKESILPKRNSDKLIARKKDWDPKKYGGFDSPTVAYSVLVVAKVEKGKSKKLKSVKELLGITIMERSSFEKNPIDFLEAKGYKEVKKDLIIKLPKYSLFELENGRKRMLASAGELQKGNELALPSKYVNFLYLASHYEKLKGSPEDNEQKQLFVEQHKHYLDEIIEQISEFSKRVILADANLDKVLSAYNKHRDKPIREQAENIIHLFTLTNLGAPAAFKYFDTTIDRKRYTSTKEVLDATLIHQSITGLYETRIDLSQLGGDGGPAPGSSEAAAKGGLLGRDLLTKLKAQIQFSTEGPQVTWEDRPAMCLVLNLEEEYRLHEKPVPPSIDPSWLQLFPMVWAEKAGMGLANQVPPVVVELKSDASPVAVRQYPMSKEAREGIRPHIQRFLDLGILVPCQSPWNTPLLPVKKPGTNDYRPVQDLREVNKRVQDIHPTVPNPYNLLSSLPPSHTWYSVLDLKDAFFCLKLHPNSQPLFAFEWRDPEKGNTGQLTWTRLPQGFKNSPTLFNEALHRDLASFRALNPQVVMLQYVDDLLVAAPTYRDCKEGTRRLLQELSKLGYRVSAKKAQLCREEVTYLGYLLKGGKRWLTPARKATVMKIPTPTTPRQVREFLGTAGFCRLWIPGFASLAAPLYPLTRPKVPFTWTEAHQEAFGRIKEALLSAPALALPDLTKPFALYVDEKEGVARGVLTQTLGPWRRPVAYLSKKLDPVASGWPTCLKAIAAVALLLKDADKLTLGQNVLVIAPHNLESIVRQPPDRWMTNARMTHYQSLLLNERVSFAPPAILNPATLLPVESDDTPIHICSEILAEETGTRPDLRDQPLPGVPAWYTDGSSFIMDGRRQAGAAIVDNKRTVWASNLPEGTSAQKAELIALTQALRLAEGKSINIYTDSRYAFATAHVHGAIYKQRGWLTSAGKDIKNKEEILALLEAIHLPKRVAIIHCPGHQRGTDPVATGNRKADEAAKQAAQSTRILTETTKNAGKRTADGSEFEKRTADGSEFESPKKKAKVE

SEQ ID NO: 7633 - protein, 2127 aa, synthetic construct
MPAAKRVKLDGGDKKYSIGLDIGTNSVGWAVITDEYKVPSKKFKVLGNTDRHSIKKNLIGALLFDSGETAEATRLKRTARRRYTRRKNRICYLQEIFSNEMAKVDDSFFHRLEESFLVEEDKKHERHPIFGNIVDEVAYHEKYPTIYHLRKKLVDSTDKADLRLIYLALAHMIKFRGHFLIEGDLNPDNSDVDKLFIQLVQTYNQLFEENPINASGVDAKAILSARLSKSRRLENLIAQLPGEKKNGLFGNLIALSLGLTPNFKSNFDLAEDAKLQLSKDTYDDDLDNLLAQIGDQYADLFLAAKNLSDAILLSDILRVNTEITKAPLSASMIKRYDEHHQDLTLLKALVRQQLPEKYKEIFFDQSKNGYAGYIDGGASQEEFYKFIKPILEKMDGTEELLVKLNREDLLRKQRTFDNGSIPHQIHLGELHAILRRQEDFYPFLKDNREKIEKILTFRIPYYVGPLARGNSRFAWMTRKSEETITPWNFEEVVDKGASAQSFIERMTNFDKNLPNEKVLPKHSLLYEYFTVYNELTKVKYVTEGMRKPAFLSGEQKKAIVDLLFKTNRKVTVKQLKEDYFKKIECFDSVEISGVEDRFNASLGTYHDLLKIIKDKDFLDNEENEDILEDIVLTLTLFEDREMIEERLKTYAHLFDDKVMKQLKRRRYTGWGRLSRKLINGIRDKQSGKTILDFLKSDGFANRNFMQLIHDDSLTFKEDIQKAQVSGQGDSLHEHIANLAGSPAIKKGILQTVKVVDELVKVMGRHKPENIVIEMARENQTTQKGQKNSRERMKRIEEGIKELGSQILKEHPVENTQLQNEKLYLYYLQNGRDMYVDQELDINRLSDYDVDHIVPQSFLKDDSIDNKVLTRSDKARGKSDNVPSEEVVKKMKNYWRQLLNAKLITQRKFDNLTKAERGGLSELDKAGFIKRQLVETRQITKHVAQILDSRMNTKYDENDKLIREVKVITLKSKLVSDFRKDFQFYKVREINNYHHAHDAYLNAVVGTALIKKYPKLESEFVYGDYKVYDVRKMIAKSEQEIGKATAKYFFYSNIMNFFKTEITLANGEIRKRPLIETNGETGEIVWDKGRDFATVRKVLSMPQVNIVKKTEVQTGGFSKESILPKRNSDKLIARKKDWDPKKYGGFDSPTVAYSVLVVAKVEKGKSKKLKSVKELLGITIMERSSFEKNPIDFLEAKGYKEVKKDLIIKLPKYSLFELENGRKRMLASAGELQKGNELALPSKYVNFLYLASHYEKLKGSPEDNEQKQLFVEQHKHYLDEIIEQISEFSKRVILADANLDKVLSAYNKHRDKPIREQAENIIHLFTLTNLGAPAAFKYFDTTIDRKRYTSTKEVLDATLIHQSITGLYETRIDLSQLGGDGGPAPGSSEAAAKGGLLGRDLLTKLKAQIQFSTEGPQVTWEDRPAMCLVLNLEEEYRLHEKPVPPSIDPSWLQLFPMVWAEKAGMGLANQVPPVVVELKSDASPVAVRQYPMSKEAREGIRPHIQRFLDLGILVPCQSPWNTPLLPVKKPGTNDYRPVQDLREVNKRVQDIHPTVPNPYNLLSSLPPSHTWYSVLDLKDAFFCLKLHPNSQPLFAFEWRDPEKGNTGQLTWTRLPQGFKNSPTLFNEALHRDLASFRALNPQVVMLQYVDDLLVAAPTYRDCKEGTRRLLQELSKLGYRVSAKKAQLCREEVTYLGYLLKGGKRWLTPARKATVMKIPTPTTPRQVREFLGKAGFCRLFIPGFASLAAPLYPLTRPKVPFTWTEAHQEAFGRIKEALLSAPALALPDLTKPFALYVDEKEGVARGVLTQTLGPWRRPVAYLSKKLDPVASGWPTCLKAIAAVALLLKDADKLTLGQNVLVIAPHNLESIVRQPPDRWMTNARMTHYQSLLLNERVSFAPPAILNPATLLPVESDDTPIHICSEILAEETGTRPDLRDQPLPGVPAWYTDGSSFIMDGRRQAGAAIVDNKRTVWASNLPEGTSAQKAELIALTQALRLAEGKSINIYTDSRYAFATAHVHGAIYKQRGWLTSAGKDIKNKEEILALLEAIHLPKRVAIIHCPGHQRGTDPVATGNRKADEAAKQAAQSTRILTETTKNAGKRTADGSEFEKRTADGSEFESPKKKAKVE

SEQ ID NO: 7634 - protein, 2218 aa, synthetic construct
MPAAKRVKLDGGDKKYSIGLDIGTNSVGWAVITDEYKVPSKKFKVLGNTDRHSIKKNLIGALLFDSGETAEATRLKRTARRRYTRRKNRICYLQEIFSNEMAKVDDSFFHRLEESFLVEEDKKHERHPIFGNIVDEVAYHEKYPTIYHLRKKLVDSTDKADLRLIYLALAHMIKFRGHFLIEGDLNPDNSDVDKLFIQLVQTYNQLFEENPINASGVDAKAILSARLSKSRRLENLIAQLPGEKKNGLFGNLIALSLGLTPNFKSNFDLAEDAKLQLSKDTYDDDLDNLLAQIGDQYADLFLAAKNLSDAILLSDILRVNTEITKAPLSASMIKRYDEHHQDLTLLKALVRQQLPEKYKEIFFDQSKNGYAGYIDGGASQEEFYKFIKPILEKMDGTEELLVKLNREDLLRKQRTFDNGSIPHQIHLGELHAILRRQEDFYPFLKDNREKIEKILTFRIPYYVGPLARGNSRFAWMTRKSEETITPWNFEEVVDKGASAQSFIERMTNFDKNLPNEKVLPKHSLLYEYFTVYNELTKVKYVTEGMRKPAFLSGEQKKAIVDLLFKTNRKVTVKQLKEDYFKKIECFDSVEISGVEDRFNASLGTYHDLLKIIKDKDFLDNEENEDILEDIVLTLTLFEDREMIEERLKTYAHLFDDKVMKQLKRRRYTGWGRLSRKLINGIRDKQSGKTILDFLKSDGFANRNFMQLIHDDSLTFKEDIQKAQVSGQGDSLHEHIANLAGSPAIKKGILQTVKVVDELVKVMGRHKPENIVIEMARENQTTQKGQKNSRERMKRIEEGIKELGSQILKEHPVENTQLQNEKLYLYYLQNGRDMYVDQELDINRLSDYDVDHIVPQSFLKDDSIDNKVLTRSDKARGKSDNVPSEEVVKKMKNYWRQLLNAKLITQRKFDNLTKAERGGLSELDKAGFIKRQLVETRQITKHVAQILDSRMNTKYDENDKLIREVKVITLKSKLVSDFRKDFQFYKVREINNYHHAHDAYLNAVVGTALIKKYPKLESEFVYGDYKVYDVRKMIAKSEQEIGKATAKYFFYSNIMNFFKTEITLANGEIRKRPLIETNGETGEIVWDKGRDFATVRKVLSMPQVNIVKKTEVQTGGFSKESILPKRNSDKLIARKKDWDPKKYGGFDSPTVAYSVLVVAKVEKGKSKKLKSVKELLGITIMERSSFEKNPIDFLEAKGYKEVKKDLIIKLPKYSLFELENGRKRMLASAGELQKGNELALPSKYVNFLYLASHYEKLKGSPEDNEQKQLFVEQHKHYLDEIIEQISEFSKRVILADANLDKVLSAYNKHRDKPIREQAENIIHLFTLTNLGAPAAFKYFDTTIDRKRYTSTKEVLDATLIHQSITGLYETRIDLSQLGGDGGPAPGSSEAAAKGGTLGDQGSRGSDPLPEPRVTLTVEGIPTEFLVNTGAEHSVLTKPMGKMGSKRTVVAGATGSKVYPWTTKRLLKIGQKQVTHSFLVIPECPAPLLGRDLLTKLKAQIQFSTEGPQVTWEDRPAMCLVLNLEEEYRLHEKPVPPSIDPSWLQLFPMVWAEKAGMGLANQVPPVVVELKSDASPVAVRQYPMSKEAREGIRPHIQRFLDLGILVPCQSPWNTPLLPVKKPGTNDYRPVQDLREVNKRVQDIHPTVPNPYNLLSSLPPSHTWYSVLDLKDAFFCLKLHPNSQPLFAFEWRDPEKGNTGQLTWTRLPQGFKNSPTLFNEALHRDLASFRALNPQVVMLQYVDDLLVAAPTYRDCKEGTRRLLQELSKLGYRVSAKKAQLCREEVTYLGYLLKGGKRWLTPARKATVMKIPTPTTPRQVREFLGTAGFCRLWIPGFASLAAPLYPLTRPKVPFTWTEAHQEAFGRIKEALLSAPALALPDLTKPFALYVDEKEGVARGVLTQTLGPWRRPVAYLSKKLDPVASGWPTCLKAIAAVALLLKDADKLTLGQNVLVIAPHNLESIVRQPPDRWMTNARMTHYQSLLLNERVSFAPPAILNPATLLPVESDDTPIHICSEILAEETGTRPDLRDQPLPGVPAWYTDGSSFIMDGRRQAGAAIVDNKRTVWASNLPEGTSAQKAELIALTQALRLAEGKSINIYTDSRYAFATAHVHGAIYKQRGWLTSAGKDIKNKEEILALLEAIHLPKRVAIIHCPGHQRGTDPVATGNRKADEAAKQAAQSTRILTETTKNAGKRTADGSEFEKRTADGSEFESPKKKAKVE

SEQ ID NO: 7635 - protein, 2218 aa, synthetic construct
MPAAKRVKLDGGDKKYSIGLDIGTNSVGWAVITDEYKVPSKKFKVLGNTDRHSIKKNLIGALLFDSGETAEATRLKRTARRRYTRRKNRICYLQEIFSNEMAKVDDSFFHRLEESFLVEEDKKHERHPIFGNIVDEVAYHEKYPTIYHLRKKLVDSTDKADLRLIYLALAHMIKFRGHFLIEGDLNPDNSDVDKLFIQLVQTYNQLFEENPINASGVDAKAILSARLSKSRRLENLIAQLPGEKKNGLFGNLIALSLGLTPNFKSNFDLAEDAKLQLSKDTYDDDLDNLLAQIGDQYADLFLAAKNLSDAILLSDILRVNTEITKAPLSASMIKRYDEHHQDLTLLKALVRQQLPEKYKEIFFDQSKNGYAGYIDGGASQEEFYKFIKPILEKMDGTEELLVKLNREDLLRKQRTFDNGSIPHQIHLGELHAILRRQEDFYPFLKDNREKIEKILTFRIPYYVGPLARGNSRFAWMTRKSEETITPWNFEEVVDKGASAQSFIERMTNFDKNLPNEKVLPKHSLLYEYFTVYNELTKVKYVTEGMRKPAFLSGEQKKAIVDLLFKTNRKVTVKQLKEDYFKKIECFDSVEISGVEDRFNASLGTYHDLLKIIKDKDFLDNEENEDILEDIVLTLTLFEDREMIEERLKTYAHLFDDKVMKQLKRRRYTGWGRLSRKLINGIRDKQSGKTILDFLKSDGFANRNFMQLIHDDSLTFKEDIQKAQVSGQGDSLHEHIANLAGSPAIKKGILQTVKVVDELVKVMGRHKPENIVIEMARENQTTQKGQKNSRERMKRIEEGIKELGSQILKEHPVENTQLQNEKLYLYYLQNGRDMYVDQELDINRLSDYDVDHIVPQSFLKDDSIDNKVLTRSDKARGKSDNVPSEEVVKKMKNYWRQLLNAKLITQRKFDNLTKAERGGLSELDKAGFIKRQLVETRQITKHVAQILDSRMNTKYDENDKLIREVKVITLKSKLVSDFRKDFQFYKVREINNYHHAHDAYLNAVVGTALIKKYPKLESEFVYGDYKVYDVRKMIAKSEQEIGKATAKYFFYSNIMNFFKTEITLANGEIRKRPLIETNGETGEIVWDKGRDFATVRKVLSMPQVNIVKKTEVQTGGFSKESILPKRNSDKLIARKKDWDPKKYGGFDSPTVAYSVLVVAKVEKGKSKKLKSVKELLGITIMERSSFEKNPIDFLEAKGYKEVKKDLIIKLPKYSLFELENGRKRMLASAGELQKGNELALPSKYVNFLYLASHYEKLKGSPEDNEQKQLFVEQHKHYLDEIIEQISEFSKRVILADANLDKVLSAYNKHRDKPIREQAENIIHLFTLTNLGAPAAFKYFDTTIDRKRYTSTKEVLDATLIHQSITGLYETRIDLSQLGGDGGPAPGSSEAAAKGGTLGDQGSRGSDPLPEPRVTLTVEGIPTEFLVNTGAEHSVLTKPMGKMGSKRTVVAGATGSKVYPWTTKRLLKIGQKQVTHSFLVIPECPAPLLGRDLLTKLKAQIQFSTEGPQVTWEDRPAMCLVLNLEEEYRLHEKPVPPSIDPSWLQLFPMVWAEKAGMGLANQVPPVVVELKSDASPVAVRQYPMSKEAREGIRPHIQRFLDLGILVPCQSPWNTPLLPVKKPGTNDYRPVQDLREVNKRVQDIHPTVPNPYNLLSSLPPSHTWYSVLDLKDAFFCLKLHPNSQPLFAFEWRDPEKGNTGQLTWTRLPQGFKNSPTLFNEALHRDLASFRALNPQVVMLQYVDDLLVAAPTYRDCKEGTRRLLQELSKLGYRVSAKKAQLCREEVTYLGYLLKGGKRWLTPARKATVMKIPTPTTPRQVREFLGKAGFCRLFIPGFASLAAPLYPLTRPKVPFTWTEAHQEAFGRIKEALLSAPALALPDLTKPFALYVDEKEGVARGVLTQTLGPWRRPVAYLSKKLDPVASGWPTCLKAIAAVALLLKDADKLTLGQNVLVIAPHNLESIVRQPPDRWMTNARMTHYQSLLLNERVSFAPPAILNPATLLPVESDDTPIHICSEILAEETGTRPDLRDQPLPGVPAWYTDGSSFIMDGRRQAGAAIVDNKRTVWASNLPEGTSAQKAELIALTQALRLAEGKSINIYTDSRYAFATAHVHGAIYKQRGWLTSAGKDIKNKEEILALLEAIHLPKRVAIIHCPGHQRGTDPVATGNRKADEAAKQAAQSTRILTETTKNAGKRTADGSEFEKRTADGSEFESPKKKAKVE

SEQ ID NO: 7636 - protein, 2096 aa, synthetic construct
MPAAKRVKLDGGDKKYSIGLDIGTNSVGWAVITDEYKVPSKKFKVLGNTDRHSIKKNLIGALLFDSGETAEATRLKRTARRRYTRRKNRICYLQEIFSNEMAKVDDSFFHRLEESFLVEEDKKHERHPIFGNIVDEVAYHEKYPTIYHLRKKLVDSTDKADLRLIYLALAHMIKFRGHFLIEGDLNPDNSDVDKLFIQLVQTYNQLFEENPINASGVDAKAILSARLSKSRRLENLIAQLPGEKKNGLFGNLIALSLGLTPNFKSNFDLAEDAKLQLSKDTYDDDLDNLLAQIGDQYADLFLAAKNLSDAILLSDILRVNTEITKAPLSASMIKRYDEHHQDLTLLKALVRQQLPEKYKEIFFDQSKNGYAGYIDGGASQEEFYKFIKPILEKMDGTEELLVKLNREDLLRKQRTFDNGSIPHQIHLGELHAILRRQEDFYPFLKDNREKIEKILTFRIPYYVGPLARGNSRFAWMTRKSEETITPWNFEEVVDKGASAQSFIERMTNFDKNLPNEKVLPKHSLLYEYFTVYNELTKVKYVTEGMRKPAFLSGEQKKAIVDLLFKTNRKVTVKQLKEDYFKKIECFDSVEISGVEDRFNASLGTYHDLLKIIKDKDFLDNEENEDILEDIVLTLTLFEDREMIEERLKTYAHLFDDKVMKQLKRRRYTGWGRLSRKLINGIRDKQSGKTILDFLKSDGFANRNFMQLIHDDSLTFKEDIQKAQVSGQGDSLHEHIANLAGSPAIKKGILQTVKVVDELVKVMGRHKPENIVIEMARENQTTQKGQKNSRERMKRIEEGIKELGSQILKEHPVENTQLQNEKLYLYYLQNGRDMYVDQELDINRLSDYDVDHIVPQSFLKDDSIDNKVLTRSDKARGKSDNVPSEEVVKKMKNYWRQLLNAKLITQRKFDNLTKAERGGLSELDKAGFIKRQLVETRQITKHVAQILDSRMNTKYDENDKLIREVKVITLKSKLVSDFRKDFQFYKVREINNYHHAHDAYLNAVVGTALIKKYPKLESEFVYGDYKVYDVRKMIAKSEQEIGKATAKYFFYSNIMNFFKTEITLANGEIRKRPLIETNGETGEIVWDKGRDFATVRKVLSMPQVNIVKKTEVQTGGFSKESILPKRNSDKLIARKKDWDPKKYGGFDSPTVAYSVLVVAKVEKGKSKKLKSVKELLGITIMERSSFEKNPIDFLEAKGYKEVKKDLIIKLPKYSLFELENGRKRMLASAGELQKGNELALPSKYVNFLYLASHYEKLKGSPEDNEQKQLFVEQHKHYLDEIIEQISEFSKRVILADANLDKVLSAYNKHRDKPIREQAENIIHLFTLTNLGAPAAFKYFDTTIDRKRYTSTKEVLDATLIHQSITGLYETRIDLSQLGGDGGPAPGSSEAAAKGGTLGIEDEYRLHETSTEPDVSLGSTWLSDFPQAWAETGGMGLAVRQAPLIIPLKATSTPVSIQQYPMSHEARLGIKPHIQRLLDQGILVPCQSPWNTPLLPVKKPGTNDYRPVQDLREVNKRVEDIHPTVPNPYNLLSGLPPSHQWYTVLDLKDAFFCLRLHPTSQPLFAFEWRDPGMGISGQLTWTRLPQGFKNSPTLFNEALHRDLADFRIQHPDLILLQYVDDILLAATSELDCQQGTRALLQTLGDLGYRASAKKAQICQKQVKYLGYLLREGQRWLTEARKETVMGQPVPKTPRQLREFLGTAGFCRLWIPGFAEMAAPLYPLTKPGTLFSWGPDQQKAYQEIKQALLTAPALGLPDLTKPFELFVDEKQGYAKGVLTQKLGPWRRPVAYLSKKLDPVAAGWPPCLRMVAAIAVLTKDAGKLTMGQPLVILAPHAVEALVKQPPDRWLSNARMTHYQAMLLDTDRVQFGPVVALNPATLLPLPEEGAPHDCLEILAETHGTRPDLTDQPIPDADHTWYTDGSSFLQEGQRKAGAAVTTETEVIWAGALPAGTSAQRAELIALTQALKMAEGKRLNVYTDSRYAFATAHIHGEIYRRRGWLTSEGREIKNKSEILALLKALFLPKRLSIIHCLGHQKGDSAEARGNRLADQAAREAAIKTPPDTSTLLAGKRTADGSEFEKRTADGSEFESPKKKAKVE

SEQ ID NO: 7637 - protein, 2096 aa, synthetic construct
MPAAKRVKLDGGDKKYSIGLDIGTNSVGWAVITDEYKVPSKKFKVLGNTDRHSIKKNLIGALLFDSGETAEATRLKRTARRRYTRRKNRICYLQEIFSNEMAKVDDSFFHRLEESFLVEEDKKHERHPIFGNIVDEVAYHEKYPTIYHLRKKLVDSTDKADLRLIYLALAHMIKFRGHFLIEGDLNPDNSDVDKLFIQLVQTYNQLFEENPINASGVDAKAILSARLSKSRRLENLIAQLPGEKKNGLFGNLIALSLGLTPNFKSNFDLAEDAKLQLSKDTYDDDLDNLLAQIGDQYADLFLAAKNLSDAILLSDILRVNTEITKAPLSASMIKRYDEHHQDLTLLKALVRQQLPEKYKEIFFDQSKNGYAGYIDGGASQEEFYKFIKPILEKMDGTEELLVKLNREDLLRKQRTFDNGSIPHQIHLGELHAILRRQEDFYPFLKDNREKIEKILTFRIPYYVGPLARGNSRFAWMTRKSEETITPWNFEEVVDKGASAQSFIERMTNFDKNLPNEKVLPKHSLLYEYFTVYNELTKVKYVTEGMRKPAFLSGEQKKAIVDLLFKTNRKVTVKQLKEDYFKKIECFDSVEISGVEDRFNASLGTYHDLLKIIKDKDFLDNEENEDILEDIVLTLTLFEDREMIEERLKTYAHLFDDKVMKQLKRRRYTGWGRLSRKLINGIRDKQSGKTILDFLKSDGFANRNFMQLIHDDSLTFKEDIQKAQVSGQGDSLHEHIANLAGSPAIKKGILQTVKVVDELVKVMGRHKPENIVIEMARENQTTQKGQKNSRERMKRIEEGIKELGSQILKEHPVENTQLQNEKLYLYYLQNGRDMYVDQELDINRLSDYDVDHIVPQSFLKDDSIDNKVLTRSDKARGKSDNVPSEEVVKKMKNYWRQLLNAKLITQRKFDNLTKAERGGLSELDKAGFIKRQLVETRQITKHVAQILDSRMNTKYDENDKLIREVKVITLKSKLVSDFRKDFQFYKVREINNYHHAHDAYLNAVVGTALIKKYPKLESEFVYGDYKVYDVRKMIAKSEQEIGKATAKYFFYSNIMNFFKTEITLANGEIRKRPLIETNGETGEIVWDKGRDFATVRKVLSMPQVNIVKKTEVQTGGFSKESILPKRNSDKLIARKKDWDPKKYGGFDSPTVAYSVLVVAKVEKGKSKKLKSVKELLGITIMERSSFEKNPIDFLEAKGYKEVKKDLIIKLPKYSLFELENGRKRMLASAGELQKGNELALPSKYVNFLYLASHYEKLKGSPEDNEQKQLFVEQHKHYLDEIIEQISEFSKRVILADANLDKVLSAYNKHRDKPIREQAENIIHLFTLTNLGAPAAFKYFDTTIDRKRYTSTKEVLDATLIHQSITGLYETRIDLSQLGGDGGPAPGSSEAAAKGGTLNIEDEYRLHETSKEPDVSLGSTWLSDFPQAWAETGGMGLAVRQAPLIIPLKATSTPVSIKQYPMSQEARLGIKPHIQRLLDQGILVPCQSPWNTPLLPVKKPGTNDYRPVQDLREVNKRVEDIHPTVPNPYNLLSGLPPSHQWYTVLDLKDAFFCLRLHPTSQPLFAFEWRDPEMGISGQLTWTRLPQGFKNSPTLFDEALHRDLAGFRIQHPDLILLQYVDDLLLAATSELDCQQGTRALLQTLGDLGYRASAKKAQICQKQVKYLGYLLKEGQRWLTEARKETVMGQPIPKTPRQLREFLGTAGFCRLWIPGFAEMAAPLYPLTKTGTLFNWGPDQQKAFQEIKQALLTAPALGLPDLTKPFELFVDEKQGYAKGVLTQKLGPWRRPVAYLSKKLDPVAAGWPPCLRMVAAIAVLTKDAGKLTMGQPLVILAPHAVEALVKQPPDRWLSNARMTHYQALLLDTDRVQFGPVVALNPATLLPLPEEGLQHDCLDILAEAHGTRSDLMDQPLPDADHTWYTDGSSFLQEGQRKAGAAVTTETEVIWARALPAGTSAQRAELIALTQALKMAEGKKLNVYTDSRYAFATAHIHGEIYRRRGLLTSEGKEIKNKDEILALLKALFLPKRLSIIHCPGHQKGNSAEARGNRMADQAAREVATRETPETSTLLAGKRTADGSEFEKRTADGSEFESPKKKAKVE

SEQ ID NO: 7638 - protein, 2096 aa, synthetic construct
MPAAKRVKLDGGDKKYSIGLDIGTNSVGWAVITDEYKVPSKKFKVLGNTDRHSIKKNLIGALLFDSGETAEATRLKRTARRRYTRRKNRICYLQEIFSNEMAKVDDSFFHRLEESFLVEEDKKHERHPIFGNIVDEVAYHEKYPTIYHLRKKLVDSTDKADLRLIYLALAHMIKFRGHFLIEGDLNPDNSDVDKLFIQLVQTYNQLFEENPINASGVDAKAILSARLSKSRRLENLIAQLPGEKKNGLFGNLIALSLGLTPNFKSNFDLAEDAKLQLSKDTYDDDLDNLLAQIGDQYADLFLAAKNLSDAILLSDILRVNTEITKAPLSASMIKRYDEHHQDLTLLKALVRQQLPEKYKEIFFDQSKNGYAGYIDGGASQEEFYKFIKPILEKMDGTEELLVKLNREDLLRKQRTFDNGSIPHQIHLGELHAILRRQEDFYPFLKDNREKIEKILTFRIPYYVGPLARGNSRFAWMTRKSEETITPWNFEEVVDKGASAQSFIERMTNFDKNLPNEKVLPKHSLLYEYFTVYNELTKVKYVTEGMRKPAFLSGEQKKAIVDLLFKTNRKVTVKQLKEDYFKKIECFDSVEISGVEDRFNASLGTYHDLLKIIKDKDFLDNEENEDILEDIVLTLTLFEDREMIEERLKTYAHLFDDKVMKQLKRRRYTGWGRLSRKLINGIRDKQSGKTILDFLKSDGFANRNFMQLIHDDSLTFKEDIQKAQVSGQGDSLHEHIANLAGSPAIKKGILQTVKVVDELVKVMGRHKPENIVIEMARENQTTQKGQKNSRERMKRIEEGIKELGSQILKEHPVENTQLQNEKLYLYYLQNGRDMYVDQELDINRLSDYDVDHIVPQSFLKDDSIDNKVLTRSDKARGKSDNVPSEEVVKKMKNYWRQLLNAKLITQRKFDNLTKAERGGLSELDKAGFIKRQLVETRQITKHVAQILDSRMNTKYDENDKLIREVKVITLKSKLVSDFRKDFQFYKVREINNYHHAHDAYLNAVVGTALIKKYPKLESEFVYGDYKVYDVRKMIAKSEQEIGKATAKYFFYSNIMNFFKTEITLANGEIRKRPLIETNGETGEIVWDKGRDFATVRKVLSMPQVNIVKKTEVQTGGFSKESILPKRNSDKLIARKKDWDPKKYGGFDSPTVAYSVLVVAKVEKGKSKKLKSVKELLGITIMERSSFEKNPIDFLEAKGYKEVKKDLIIKLPKYSLFELENGRKRMLASAGELQKGNELALPSKYVNFLYLASHYEKLKGSPEDNEQKQLFVEQHKHYLDEIIEQISEFSKRVILADANLDKVLSAYNKHRDKPIREQAENIIHLFTLTNLGAPAAFKYFDTTIDRKRYTSTKEVLDATLIHQSITGLYETRIDLSQLGGDGGPAPGSSEAAAKGGTLNIEDEHRLHETSKEPDVSLGSTWLSDFPQAWAETGGMGLAVRQAPLIIPLKATSTPVSIKQYPMSQEARLGIKPHIQRLLDQGILVPCQSPWNTPLLPVKKPGTNDYRPVQDLREVNKRVEDIHPTVPNPYNLLSGLPPSHQWYTVLDLKDAFFCLRLHPTSQPLFAFEWRDPEMGISGQLTWTRLPQGFKNSPTLFDEALHRDLADFRIQHPDLILLQYVDDLLLAATSELDCQQGTRALLQTLGNLGYRASAKKAQICQKQVKYLGYLLKEGQRWLTEARKETVMGQPTPKTPRQLREFLGTAGFCRLWIPGFAEMAAPLYPLTKTGTLFNWGPDQQKAYQEIKQALLTAPALGLPDLTKPFELFVDEKQGYAKGVLTQKLGPWRRPVAYLSKKLDPVAAGWPPCLRMVAAIAVLTKDAGKLTMGQPLVILAPHAVEALVKQPPDRWLSNARMTHYQALLLDTDRVQFGPVVALNPATLLPLPEEGLQHNCLDILAEAHGTRPDLTDQPLPDADHTWYTDGSSLLQEGQRKAGAAVTTETEVIWAKALPAGTSAQRAELIALTQALKMAEGKKLNVYTDSRYAFATAHIHGEIYRRRGLLTSEGKEIKNKDEILALLKALFLPKRLSIIHCPGHQKGHSAEARGNRMADQAARKAAITETPDTSTLLAGKRTADGSEFEKRTADGSEFESPKKKAKVE

SEQ ID NO: 7639 - protein, 2096 aa, synthetic construct
MPAAKRVKLDGGDKKYSIGLDIGTNSVGWAVITDEYKVPSKKFKVLGNTDRHSIKKNLIGALLFDSGETAEATRLKRTARRRYTRRKNRICYLQEIFSNEMAKVDDSFFHRLEESFLVEEDKKHERHPIFGNIVDEVAYHEKYPTIYHLRKKLVDSTDKADLRLIYLALAHMIKFRGHFLIEGDLNPDNSDVDKLFIQLVQTYNQLFEENPINASGVDAKAILSARLSKSRRLENLIAQLPGEKKNGLFGNLIALSLGLTPNFKSNFDLAEDAKLQLSKDTYDDDLDNLLAQIGDQYADLFLAAKNLSDAILLSDILRVNTEITKAPLSASMIKRYDEHHQDLTLLKALVRQQLPEKYKEIFFDQSKNGYAGYIDGGASQEEFYKFIKPILEKMDGTEELLVKLNREDLLRKQRTFDNGSIPHQIHLGELHAILRRQEDFYPFLKDNREKIEKILTFRIPYYVGPLARGNSRFAWMTRKSEETITPWNFEEVVDKGASAQSFIERMTNFDKNLPNEKVLPKHSLLYEYFTVYNELTKVKYVTEGMRKPAFLSGEQKKAIVDLLFKTNRKVTVKQLKEDYFKKIECFDSVEISGVEDRFNASLGTYHDLLKIIKDKDFLDNEENEDILEDIVLTLTLFEDREMIEERLKTYAHLFDDKVMKQLKRRRYTGWGRLSRKLINGIRDKQSGKTILDFLKSDGFANRNFMQLIHDDSLTFKEDIQKAQVSGQGDSLHEHIANLAGSPAIKKGILQTVKVVDELVKVMGRHKPENIVIEMARENQTTQKGQKNSRERMKRIEEGIKELGSQILKEHPVENTQLQNEKLYLYYLQNGRDMYVDQELDINRLSDYDVDHIVPQSFLKDDSIDNKVLTRSDKARGKSDNVPSEEVVKKMKNYWRQLLNAKLITQRKFDNLTKAERGGLSELDKAGFIKRQLVETRQITKHVAQILDSRMNTKYDENDKLIREVKVITLKSKLVSDFRKDFQFYKVREINNYHHAHDAYLNAVVGTALIKKYPKLESEFVYGDYKVYDVRKMIAKSEQEIGKATAKYFFYSNIMNFFKTEITLANGEIRKRPLIETNGETGEIVWDKGRDFATVRKVLSMPQVNIVKKTEVQTGGFSKESILPKRNSDKLIARKKDWDPKKYGGFDSPTVAYSVLVVAKVEKGKSKKLKSVKELLGITIMERSSFEKNPIDFLEAKGYKEVKKDLIIKLPKYSLFELENGRKRMLASAGELQKGNELALPSKYVNFLYLASHYEKLKGSPEDNEQKQLFVEQHKHYLDEIIEQISEFSKRVILADANLDKVLSAYNKHRDKPIREQAENIIHLFTLTNLGAPAAFKYFDTTIDRKRYTSTKEVLDATLIHQSITGLYETRIDLSQLGGDGGPAPGSSEAAAKGGTLNIEDEYRLHETSKEPDVPLGSTWLSDFPQAWAETGGMGLAVRQAPLIIPLKATSTPVSIKQYPMSQEARLGIKPHIQRLLDQGILVPCQSPWNTPLLPVKKPGTNDYRPVQDLREVNKRVEDIHPTVPNPYNLLSGLPPSHQWYTVLDLKDAFFCLRLHPTSQPLFAFEWRDPEMGISGQLTWTRLPQGFKNSPTLFNEALHRDLADFRIQHPDLILLQYVDDLLLAATSEQDCQRGTRALLQTLGNLGYRASAKKAQICQKQVKYLGYLLKEGQRWLTEARKETVMGQPTPKTPRQLREFLGKAGFCRLFIPGFAEMAAPLYPLTKPGTLFNWGPDQQKAYQEIKQALLTAPALGLPDLTKPFELFVDEKQGYAKGVLTQKLGPWRRPVAYLSKKLDPVAAGWPPCLRMVAAIAVLTKDAGKLTMGQPLVILAPHAVEALVKQPPDRWLSNARMTHYQAMLLDTDRVQFGPVVALNPATLLPLPEKEAPHDCLEILAETHGTRPDLTDQPIPDADYTWYTDGSSFLQEGQRRAGAAVTTETEVIWARALPAGTSAQRAELIALTQALKMAEGKKLNVYTDSRYAFATAHVHGEIYRRRGWLTSEGREIKNKNEILALLKALFLPKRLSIIHCPGHQKGNSAEARGNRMADQAAREAAMKAVLETSTLLAGKRTADGSEFEKRTADGSEFESPKKKAKVE

SEQ ID NO: 7640 - protein, 2102 aa, synthetic construct
MPAAKRVKLDGGDKKYSIGLDIGTNSVGWAVITDEYKVPSKKFKVLGNTDRHSIKKNLIGALLFDSGETAEATRLKRTARRRYTRRKNRICYLQEIFSNEMAKVDDSFFHRLEESFLVEEDKKHERHPIFGNIVDEVAYHEKYPTIYHLRKKLVDSTDKADLRLIYLALAHMIKFRGHFLIEGDLNPDNSDVDKLFIQLVQTYNQLFEENPINASGVDAKAILSARLSKSRRLENLIAQLPGEKKNGLFGNLIALSLGLTPNFKSNFDLAEDAKLQLSKDTYDDDLDNLLAQIGDQYADLFLAAKNLSDAILLSDILRVNTEITKAPLSASMIKRYDEHHQDLTLLKALVRQQLPEKYKEIFFDQSKNGYAGYIDGGASQEEFYKFIKPILEKMDGTEELLVKLNREDLLRKQRTFDNGSIPHQIHLGELHAILRRQEDFYPFLKDNREKIEKILTFRIPYYVGPLARGNSRFAWMTRKSEETITPWNFEEVVDKGASAQSFIERMTNFDKNLPNEKVLPKHSLLYEYFTVYNELTKVKYVTEGMRKPAFLSGEQKKAIVDLLFKTNRKVTVKQLKEDYFKKIECFDSVEISGVEDRFNASLGTYHDLLKIIKDKDFLDNEENEDILEDIVLTLTLFEDREMIEERLKTYAHLFDDKVMKQLKRRRYTGWGRLSRKLINGIRDKQSGKTILDFLKSDGFANRNFMQLIHDDSLTFKEDIQKAQVSGQGDSLHEHIANLAGSPAIKKGILQTVKVVDELVKVMGRHKPENIVIEMARENQTTQKGQKNSRERMKRIEEGIKELGSQILKEHPVENTQLQNEKLYLYYLQNGRDMYVDQELDINRLSDYDVDHIVPQSFLKDDSIDNKVLTRSDKARGKSDNVPSEEVVKKMKNYWRQLLNAKLITQRKFDNLTKAERGGLSELDKAGFIKRQLVETRQITKHVAQILDSRMNTKYDENDKLIREVKVITLKSKLVSDFRKDFQFYKVREINNYHHAHDAYLNAVVGTALIKKYPKLESEFVYGDYKVYDVRKMIAKSEQEIGKATAKYFFYSNIMNFFKTEITLANGEIRKRPLIETNGETGEIVWDKGRDFATVRKVLSMPQVNIVKKTEVQTGGFSKESILPKRNSDKLIARKKDWDPKKYGGFDSPTVAYSVLVVAKVEKGKSKKLKSVKELLGITIMERSSFEKNPIDFLEAKGYKEVKKDLIIKLPKYSLFELENGRKRMLASAGELQKGNELALPSKYVNFLYLASHYEKLKGSPEDNEQKQLFVEQHKHYLDEIIEQISEFSKRVILADANLDKVLSAYNKHRDKPIREQAENIIHLFTLTNLGAPAAFKYFDTTIDRKRYTSTKEVLDATLIHQSITGLYETRIDLSQLGGDGGPAPEAAAKGSSGGTVSLQDEHRLFDIPVTTSLPDVWLQDFPQAWAETGGLGRAKCQAPIIIDLKPTAVPVSIKQYPMSLEAHMGIRQHIIKFLELGVLRPCRSPWNTPLLPVKKPGTQDYRPVQDLREINKRTVDIHPTVPNPYNLLSTLKPDYSWYTVLDLKDAFFCLPLAPQSQELFAFEWKDPERGISGQLTWTRLPQGFKNSPTLFDEALHRDLTDFRTQHPEVTLLQYVDDLLLAAPTKKACTQGTRHLLQELGEKGYRASAKKAQICQTKVTYLGYILSEGKRWLTPGRIETVARIPPPRNPREVREFLGTAGFCRLWIPGFAELAAPLYALTKESTPFTWQTEHQLAFEALKKALLSAPALGLPDTSKPFTLFLDERQGIAKGVLTQKLGPWKRPVAYLSKKLDPVAAGWPPCLRIMAATAMLVKDSAKLTLGQPLTVITPHTLEAIVRQPPDRWITNARLTHYQALLLDTDRVQFGPPVTLNPATLLPVPENQPSPHDCRQVLAETHGTREDLKDQELPDADHTWYTDGSSYLDSGTRRAGAAVVDGHNTIWAQSLPPGTSAQKAELIALTKALELSKGKKANIYTDSRYAFATAHTHGSIYERRGLLTSEGKEIKNKAEIIALLKALFLPQEVAIIHCPGHQKGQDPVAVGNRQADRVARQAAMAEVLTLATEPDNTSHITAGKRTADGSEFEKRTADGSEFESPKKKAKVE

SEQ ID NO: 7641 - protein, 2095 aa, synthetic construct
MPAAKRVKLDGGDKKYSIGLDIGTNSVGWAVITDEYKVPSKKFKVLGNTDRHSIKKNLIGALLFDSGETAEATRLKRTARRRYTRRKNRICYLQEIFSNEMAKVDDSFFHRLEESFLVEEDKKHERHPIFGNIVDEVAYHEKYPTIYHLRKKLVDSTDKADLRLIYLALAHMIKFRGHFLIEGDLNPDNSDVDKLFIQLVQTYNQLFEENPINASGVDAKAILSARLSKSRRLENLIAQLPGEKKNGLFGNLIALSLGLTPNFKSNFDLAEDAKLQLSKDTYDDDLDNLLAQIGDQYADLFLAAKNLSDAILLSDILRVNTEITKAPLSASMIKRYDEHHQDLTLLKALVRQQLPEKYKEIFFDQSKNGYAGYIDGGASQEEFYKFIKPILEKMDGTEELLVKLNREDLLRKQRTFDNGSIPHQIHLGELHAILRRQEDFYPFLKDNREKIEKILTFRIPYYVGPLARGNSRFAWMTRKSEETITPWNFEEVVDKGASAQSFIERMTNFDKNLPNEKVLPKHSLLYEYFTVYNELTKVKYVTEGMRKPAFLSGEQKKAIVDLLFKTNRKVTVKQLKEDYFKKIECFDSVEISGVEDRFNASLGTYHDLLKIIKDKDFLDNEENEDILEDIVLTLTLFEDREMIEERLKTYAHLFDDKVMKQLKRRRYTGWGRLSRKLINGIRDKQSGKTILDFLKSDGFANRNFMQLIHDDSLTFKEDIQKAQVSGQGDSLHEHIANLAGSPAIKKGILQTVKVVDELVKVMGRHKPENIVIEMARENQTTQKGQKNSRERMKRIEEGIKELGSQILKEHPVENTQLQNEKLYLYYLQNGRDMYVDQELDINRLSDYDVDHIVPQSFLKDDSIDNKVLTRSDKARGKSDNVPSEEVVKKMKNYWRQLLNAKLITQRKFDNLTKAERGGLSELDKAGFIKRQLVETRQITKHVAQILDSRMNTKYDENDKLIREVKVITLKSKLVSDFRKDFQFYKVREINNYHHAHDAYLNAVVGTALIKKYPKLESEFVYGDYKVYDVRKMIAKSEQEIGKATAKYFFYSNIMNFFKTEITLANGEIRKRPLIETNGETGEIVWDKGRDFATVRKVLSMPQVNIVKKTEVQTGGFSKESILPKRNSDKLIARKKDWDPKKYGGFDSPTVAYSVLVVAKVEKGKSKKLKSVKELLGITIMERSSFEKNPIDFLEAKGYKEVKKDLIIKLPKYSLFELENGRKRMLASAGELQKGNELALPSKYVNFLYLASHYEKLKGSPEDNEQKQLFVEQHKHYLDEIIEQISEFSKRVILADANLDKVLSAYNKHRDKPIREQAENIIHLFTLTNLGAPAAFKYFDTTIDRKRYTSTKEVLDATLIHQSITGLYETRIDLSQLGGDGGPAPEAAAKGSSGGTLQLEEEYRLFEPESTQKQEMDIWLKNFPQAWAETGGMGTAHCQAPVLIQLKATATPISIRQYPMPHEAYQGIKPHIRRMLDQGILKPCQSPWNTPLLPVKKPGTEDYRPVQDLREVNKRVEDIHPTVPNPYNLLSTLPPSHPWYTVLDLKDAFFCLRLHSESQLLFAFEWRDPEIGLSGQLTWTRLPQGFKNSPTLFNEALHSDLADFRVRYPALVLLQYVDDLLLAAATRTECLEGTKALLETLGNKGYRASAKKAQICLQEVTYLGYSLKDGQRWLTKARKEAILSIPVPKNSRQVREFLGTAGYCRLWIPGFAELAAPLYPLTRPGTLFQWGTEQQLAFEDIKKALLSSPALGLPDITKPFELFIDENSGFAKGVLVQKLGPWKRPVAYLSKKLDTVASGWPPCLRMVAAIAILVKDAGKLTLGQPLTILTSHPVEALVRQPPNKWLSNARMTHYQAMLLDAERVHFGPTVSLNPATLLPLPSGGNHHDCLQILAETHGTRPDLTDQPLPDADLTWYTDGSSFIRNGEREAGAAVTTESEVIWAAPLPPGTSAQRAELIALTQALKMAEGKKLTVYTDSRYAFATTHVHGEIYRRRGWLTSEGKEIKNKNEILALLEALFLPKRLSIIHCPGHQKGDSPQAKGNRLADDTAKKAATETHSSLTVLPAGKRTADGSEFEKRTADGSEFESPKKKAKVE

SEQ ID NO: 7642 - protein, 2176 aa, synthetic construct
MPAAKRVKLDGGDKKYSIGLDIGTNSVGWAVITDEYKVPSKKFKVLGNTDRHSIKKNLIGALLFDSGETAEATRLKRTARRRYTRRKNRICYLQEIFSNEMAKVDDSFFHRLEESFLVEEDKKHERHPIFGNIVDEVAYHEKYPTIYHLRKKLVDSTDKADLRLIYLALAHMIKFRGHFLIEGDLNPDNSDVDKLFIQLVQTYNQLFEENPINASGVDAKAILSARLSKSRRLENLIAQLPGEKKNGLFGNLIALSLGLTPNFKSNFDLAEDAKLQLSKDTYDDDLDNLLAQIGDQYADLFLAAKNLSDAILLSDILRVNTEITKAPLSASMIKRYDEHHQDLTLLKALVRQQLPEKYKEIFFDQSKNGYAGYIDGGASQEEFYKFIKPILEKMDGTEELLVKLNREDLLRKQRTFDNGSIPHQIHLGELHAILRRQEDFYPFLKDNREKIEKILTFRIPYYVGPLARGNSRFAWMTRKSEETITPWNFEEVVDKGASAQSFIERMTNFDKNLPNEKVLPKHSLLYEYFTVYNELTKVKYVTEGMRKPAFLSGEQKKAIVDLLFKTNRKVTVKQLKEDYFKKIECFDSVEISGVEDRFNASLGTYHDLLKIIKDKDFLDNEENEDILEDIVLTLTLFEDREMIEERLKTYAHLFDDKVMKQLKRRRYTGWGRLSRKLINGIRDKQSGKTILDFLKSDGFANRNFMQLIHDDSLTFKEDIQKAQVSGQGDSLHEHIANLAGSPAIKKGILQTVKVVDELVKVMGRHKPENIVIEMARENQTTQKGQKNSRERMKRIEEGIKELGSQILKEHPVENTQLQNEKLYLYYLQNGRDMYVDQELDINRLSDYDVDHIVPQSFLKDDSIDNKVLTRSDKARGKSDNVPSEEVVKKMKNYWRQLLNAKLITQRKFDNLTKAERGGLSELDKAGFIKRQLVETRQITKHVAQILDSRMNTKYDENDKLIREVKVITLKSKLVSDFRKDFQFYKVREINNYHHAHDAYLNAVVGTALIKKYPKLESEFVYGDYKVYDVRKMIAKSEQEIGKATAKYFFYSNIMNFFKTEITLANGEIRKRPLIETNGETGEIVWDKGRDFATVRKVLSMPQVNIVKKTEVQTGGFSKESILPKRNSDKLIARKKDWDPKKYGGFDSPTVAYSVLVVAKVEKGKSKKLKSVKELLGITIMERSSFEKNPIDFLEAKGYKEVKKDLIIKLPKYSLFELENGRKRMLASAGELQKGNELALPSKYVNFLYLASHYEKLKGSPEDNEQKQLFVEQHKHYLDEIIEQISEFSKRVILADANLDKVLSAYNKHRDKPIREQAENIIHLFTLTNLGAPAAFKYFDTTIDRKRYTSTKEVLDATLIHQSITGLYETRIDLSQLGGDGGPAPEAAAKGSSGGMNPLQLLQPLPAEIKGTKLLAHWNSGATITCIPESFLEDEQPIKKTLIKTIHGEKQQNVYYVTFKVKGRKVEAEVIASPYEYILLSPTDVPWLTQQPLQLTILVPLQEYQEKILSKTALPEDQKQQLKTLFVKYDNLWQHWENQVGHRKIRPHNIATGDYPPRPQKQYPINPKAKPSIQIVIDDLLKQGVLTPQNSTMNTPVYPVPKPDGRWRMVLDYREVNKTIPLTAAQNQHSAGILATIVRQKYKTTLDLANGFWAHPITPESYWLTAFTWQGKQYCWTRLPQGFLNSPALFNADVVDLLKEIPNVQVYVDDIYLSHDDPKEHVQQLEKVFQILLQAGYVVSLKKSEIGQKTVEFLGFNITKEGRGLTDTFKTKLLNITPPKDLKQLQSILGLLNFARNFIPNFAELVQPLYNLIAPAKGKYIEWSEENTKQLNMVIEALNTASNLEERLPEQRLVIKVNTSPSAGYVRYYNETGKKPIMYLNYVFSKAELKFSMLEKLLTTMHKALIKAMDLAMGQEILVYSPIVSMTKIQKTPLPERKALPIRWITWMTYLEDPRIQFHYDKTLPELKHIPDVYTSSQSPVKHPSQYEGVFYTDGSAIKSPDPTKSNNAGMGIVHATYKPEYQVLNQWSIPLGNHTAQMAEIAAVEFACKKALKIPGPVLVITDSFYVAESANKELPYWKSNGFVNNKKKPLKHISKWKSIAECLSMKPDITIQHEKGISLQIPVFILKGNALADKLATQGSYVVNAGKRTADGSEFEKRTADGSEFESPKKKAKVE

SEQ ID NO: 7643 - protein, 2096 aa, synthetic construct
MPAAKRVKLDGGDKKYSIGLDIGTNSVGWAVITDEYKVPSKKFKVLGNTDRHSIKKNLIGALLFDSGETAEATRLKRTARRRYTRRKNRICYLQEIFSNEMAKVDDSFFHRLEESFLVEEDKKHERHPIFGNIVDEVAYHEKYPTIYHLRKKLVDSTDKADLRLIYLALAHMIKFRGHFLIEGDLNPDNSDVDKLFIQLVQTYNQLFEENPINASGVDAKAILSARLSKSRRLENLIAQLPGEKKNGLFGNLIALSLGLTPNFKSNFDLAEDAKLQLSKDTYDDDLDNLLAQIGDQYADLFLAAKNLSDAILLSDILRVNTEITKAPLSASMIKRYDEHHQDLTLLKALVRQQLPEKYKEIFFDQSKNGYAGYIDGGASQEEFYKFIKPILEKMDGTEELLVKLNREDLLRKQRTFDNGSIPHQIHLGELHAILRRQEDFYPFLKDNREKIEKILTFRIPYYVGPLARGNSRFAWMTRKSEETITPWNFEEVVDKGASAQSFIERMTNFDKNLPNEKVLPKHSLLYEYFTVYNELTKVKYVTEGMRKPAFLSGEQKKAIVDLLFKTNRKVTVKQLKEDYFKKIECFDSVEISGVEDRFNASLGTYHDLLKIIKDKDFLDNEENEDILEDIVLTLTLFEDREMIEERLKTYAHLFDDKVMKQLKRRRYTGWGRLSRKLINGIRDKQSGKTILDFLKSDGFANRNFMQLIHDDSLTFKEDIQKAQVSGQGDSLHEHIANLAGSPAIKKGILQTVKVVDELVKVMGRHKPENIVIEMARENQTTQKGQKNSRERMKRIEEGIKELGSQILKEHPVENTQLQNEKLYLYYLQNGRDMYVDQELDINRLSDYDVDHIVPQSFLKDDSIDNKVLTRSDKARGKSDNVPSEEVVKKMKNYWRQLLNAKLITQRKFDNLTKAERGGLSELDKAGFIKRQLVETRQITKHVAQILDSRMNTKYDENDKLIREVKVITLKSKLVSDFRKDFQFYKVREINNYHHAHDAYLNAVVGTALIKKYPKLESEFVYGDYKVYDVRKMIAKSEQEIGKATAKYFFYSNIMNFFKTEITLANGEIRKRPLIETNGETGEIVWDKGRDFATVRKVLSMPQVNIVKKTEVQTGGFSKESILPKRNSDKLIARKKDWDPKKYGGFDSPTVAYSVLVVAKVEKGKSKKLKSVKELLGITIMERSSFEKNPIDFLEAKGYKEVKKDLIIKLPKYSLFELENGRKRMLASAGELQKGNELALPSKYVNFLYLASHYEKLKGSPEDNEQKQLFVEQHKHYLDEIIEQISEFSKRVILADANLDKVLSAYNKHRDKPIREQAENIIHLFTLTNLGAPAAFKYFDTTIDRKRYTSTKEVLDATLIHQSITGLYETRIDLSQLGGDGGPAPEAAAKGSSGGTLGIEDEYRLHETSTEPDVSLGSTWLSDFPQAWAETGGMGLAVRQAPLIIPLKATSTPVSIQQYPMSHEARLGIKPHIQRLLDQGILVPCQSPWNTPLLPVKKPGTNDYRPVQDLREVNKRVEDIHPTVPNPYNLLSGLPPSHQWYTVLDLKDAFFCLRLHPTSQPLFAFEWRDPGMGISGQLTWTRLPQGFKNSPTLFNEALHRDLADFRIQHPDLILLQYVDDILLAATSELDCQQGTRALLQTLGDLGYRASAKKAQICQKQVKYLGYLLREGQRWLTEARKETVMGQPVPKTPRQLREFLGTAGFCRLWIPGFAEMAAPLYPLTKPGTLFSWGPDQQKAYQEIKQALLTAPALGLPDLTKPFELFVDEKQGYAKGVLTQKLGPWRRPVAYLSKKLDPVAAGWPPCLRMVAAIAVLTKDAGKLTMGQPLVILAPHAVEALVKQPPDRWLSNARMTHYQAMLLDTDRVQFGPVVALNPATLLPLPEEGAPHDCLEILAETHGTRPDLTDQPIPDADHTWYTDGSSFLQEGQRKAGAAVTTETEVIWAGALPAGTSAQRAELIALTQALKMAEGKRLNVYTDSRYAFATAHIHGEIYRRRGWLTSEGREIKNKSEILALLKALFLPKRLSIIHCLGHQKGDSAEARGNRLADQAAREAAIKTPPDTSTLLAGKRTADGSEFEKRTADGSEFESPKKKAKVE

SEQ ID NO: 7644 - protein, 2096 aa, synthetic construct; identical to SEQ ID NO: 7643

SEQ ID NO: 7645 - protein, 2096 aa, synthetic construct
MPAAKRVKLDGGDKKYSIGLDIGTNSVGWAVITDEYKVPSKKFKVLGNTDRHSIKKNLIGALLFDSGETAEATRLKRTARRRYTRRKNRICYLQEIFSNEMAKVDDSFFHRLEESFLVEEDKKHERHPIFGNIVDEVAYHEKYPTIYHLRKKLVDSTDKADLRLIYLALAHMIKFRGHFLIEGDLNPDNSDVDKLFIQLVQTYNQLFEENPINASGVDAKAILSARLSKSRRLENLIAQLPGEKKNGLFGNLIALSLGLTPNFKSNFDLAEDAKLQLSKDTYDDDLDNLLAQIGDQYADLFLAAKNLSDAILLSDILRVNTEITKAPLSASMIKRYDEHHQDLTLLKALVRQQLPEKYKEIFFDQSKNGYAGYIDGGASQEEFYKFIKPILEKMDGTEELLVKLNREDLLRKQRTFDNGSIPHQIHLGELHAILRRQEDFYPFLKDNREKIEKILTFRIPYYVGPLARGNSRFAWMTRKSEETITPWNFEEVVDKGASAQSFIERMTNFDKNLPNEKVLPKHSLLYEYFTVYNELTKVKYVTEGMRKPAFLSGEQKKAIVDLLFKTNRKVTVKQLKEDYFKKIECFDSVEISGVEDRFNASLGTYHDLLKIIKDKDFLDNEENEDILEDIVLTLTLFEDREMIEERLKTYAHLFDDKVMKQLKRRRYTGWGRLSRKLINGIRDKQSGKTILDFLKSDGFANRNFMQLIHDDSLTFKEDIQKAQVSGQGDSLHEHIANLAGSPAIKKGILQTVKVVDELVKVMGRHKPENIVIEMARENQTTQKGQKNSRERMKRIEEGIKELGSQILKEHPVENTQLQNEKLYLYYLQNGRDMYVDQELDINRLSDYDVDHIVPQSFLKDDSIDNKVLTRSDKARGKSDNVPSEEVVKKMKNYWRQLLNAKLITQRKFDNLTKAERGGLSELDKAGFIKRQLVETRQITKHVAQILDSRMNTKYDENDKLIREVKVITLKSKLVSDFRKDFQFYKVREINNYHHAHDAYLNAVVGTALIKKYPKLESEFVYGDYKVYDVRKMIAKSEQEIGKATAKYFFYSNIMNFFKTEITLANGEIRKRPLIETNGETGEIVWDKGRDFATVRKVLSMPQVNIVKKTEVQTGGFSKESILPKRNSDKLIARKKDWDPKKYGGFDSPTVAYSVLVVAKVEKGKSKKLKSVKELLGITIMERSSFEKNPIDFLEAKGYKEVKKDLIIKLPKYSLFELENGRKRMLASAGELQKGNELALPSKYVNFLYLASHYEKLKGSPEDNEQKQLFVEQHKHYLDEIIEQISEFSKRVILADANLDKVLSAYNKHRDKPIREQAENIIHLFTLTNLGAPAAFKYFDTTIDRKRYTSTKEVLDATLIHQSITGLYETRIDLSQLGGDGGPAPEAAAKGSSGGTLNIEDEYRLHETSKGPDVPLGSTWLSDFPQAWAETGGMGLAVRQAPLIIPLKATSTPVSIKQYPMSQEARLGIKPHIQRLLDQGILVPCQSPWNTPLLPVKKPGTNDYRPVQDLREVNKRVEDIHPTVPNPYNLLSGLPPSHQWYTVLDLKDAFFCLRLHPTSQSLFAFEWRDPEMGISGQLTWTRLPQGFKNSPTLFDEALHRDLADFRIQHPDLILLQYVDDLLLAATSELDCQQGTRALLQTLGDLGYRASAKKAQICQKQVKYLGYLLKEGQRWLTEARKETVMGQPTPKTPRQLREFLGTAGFCRLWIPGFAEMAAPLYPLTKTGTLFEWGPDQQKAYQEIKQALLTAPALGLPDLTKPFELFVDEKQGYAKGVLTQKLGPWRRPVAYLSKKLDPVAAGWPPCLRMVAAIAVLTKDAGKLTMGQPLVILAPHAVEALVKQPPDRWLSNARMTHYQALLLDTDRVQFGPIVALNPATLLPLPEEGLQHDCLDILAEAHGTRPDLTDQPLPDADHTWYTDGSSFLQEGQRKAGAAVTTETEVVWAKALPAGTSAQRAELIALTQALKMAEGKKLNVYTDSRYAFATAHIHGEIYRRRGLLTSEGKEIKNKDEILALLKALFLPKRLSIIHCPGHQKGNRAEARGNRMADQAAREVATRETPETSTLLAGKRTADGSEFEKRTADGSEFESPKKKAKVE

SEQ ID NO: 7646 - protein, 2090 aa, synthetic construct
MPAAKRVKLDGGDKKYSIGLDIGTNSVGWAVITDEYKVPSKKFKVLGNTDRHSIKKNLIGALLFDSGETAEATRLKRTARRRYTRRKNRICYLQEIFSNEMAKVDDSFFHRLEESFLVEEDKKHERHPIFGNIVDEVAYHEKYPTIYHLRKKLVDSTDKADLRLIYLALAHMIKFRGHFLIEGDLNPDNSDVDKLFIQLVQTYNQLFEENPINASGVDAKAILSARLSKSRRLENLIAQLPGEKKNGLFGNLIALSLGLTPNFKSNFDLAEDAKLQLSKDTYDDDLDNLLAQIGDQYADLFLAAKNLSDAILLSDILRVNTEITKAPLSASMIKRYDEHHQDLTLLKALVRQQLPEKYKEIFFDQSKNGYAGYIDGGASQEEFYKFIKPILEKMDGTEELLVKLNREDLLRKQRTFDNGSIPHQIHLGELHAILRRQEDFYPFLKDNREKIEKILTFRIPYYVGPLARGNSRFAWMTRKSEETITPWNFEEVVDKGASAQSFIERMTNFDKNLPNEKVLPKHSLLYEYFTVYNELTKVKYVTEGMRKPAFLSGEQKKAIVDLLFKTNRKVTVKQLKEDYFKKIECFDSVEISGVEDRFNASLGTYHDLLKIIKDKDFLDNEENEDILEDIVLTLTLFEDREMIEERLKTYAHLFDDKVMKQLKRRRYTGWGRLSRKLINGIRDKQSGKTILDFLKSDGFANRNFMQLIHDDSLTFKEDIQKAQVSGQGDSLHEHIANLAGSPAIKKGILQTVKVVDELVKVMGRHKPENIVIEMARENQTTQKGQKNSRERMKRIEEGIKELGSQILKEHPVENTQLQNEKLYLYYLQNGRDMYVDQELDINRLSDYDVDHIVPQSFLKDDSIDNKVLTRSDKARGKSDNVPSEEVVKKMKNYWRQLLNAKLITQRKFDNLTKAERGGLSELDKAGFIKRQLVETRQITKHVAQILDSRMNTKYDENDKLIREVKVITLKSKLVSDFRKDFQFYKVREINNYHHAHDAYLNAVVGTALIKKYPKLESEFVYGDYKVYDVRKMIAKSEQEIGKATAKYFFYSNIMNFFKTEITLANGEIRKRPLIETNGETGEIVWDKGRDFATVRKVLSMPQVNIVKKTEVQTGGFSKESILPKRNSDKLIARKKDWDPKKYGGFDSPTVAYSVLVVAKVEKGKSKKLKSVKELLGITIMERSSFEKNPIDFLEAKGYKEVKKDLIIKLPKYSLFELENGRKRMLASAGELQKGNELALPSKYVNFLYLASHYEKLKGSPEDNEQKQLFVEQHKHYLDEIIEQISEFSKRVILADANLDKVLSAYNKHRDKPIREQAENIIHLFTLTNLGAPAAFKYFDTTIDRKRYTSTKEVLDATLIHQSITGLYETRIDLSQLGGDGGPAPEAAAKGSSGGTLQLDDEYRLYSPLVKPDQNIQFWLEQFPQAWAETAGMGLAKQVPPQVIQLKASATPVSVRQYPLSKEAQEGIRPHVQRLIQQGILVPVQSPWNTPLLPVRKPGTNDYRPVQDLREVNKRVQDIHPTVPNPYNLLCALPPQRSWYTVLDLKDAFFCLRLHPTSQPLFAFEWRDPGTGRTGQLTWTRLPQGFKNSPTIFDEALHRDLANFRIQHPQVTLLQYVDDLLLAGATKQDCLEGTKALLLELSDLGYRASAKKAQICRREVTYLGYSLRDGQRWLTEARKKTVVQIPAPTTAKQVREFLGTAGFCRLWIPGFATLAAPLYPLTKEKGEFSWAPEHQKAFDAIKKALLSAPALALPDVTKPFTLYVDERKGVARGVLTQTLGPWRRPVAYLSKKLDPVASGWPVCLKAIAAVAILVKDADKLTLGQNITVIAPHALENIVRQPPDRWMTNARMTHYQSLLLTERVTFAPPAALNPATLLPEETDEPVTHDCHQLLIEETGVRKDLTDIPLTGEVLTWFTDGSSYVVEGKRMAGAAVVDGTRTIWASSLPEGTSAQKAELMALTQALRLAEGKSINIYTDSRYAFATAHVHGAIYKQRGLLTSAGREIKNKEEILSLLEALHLPKRLAIIHCPGHQKAKDPISRGNQMADRVAKQAAQGVNLLAGKRTADGSEFEKRTADGSEFESPKKKAKVE

SEQ ID NO: 7647 - protein, 2087 aa, synthetic construct
MPAAKRVKLDGGDKKYSIGLDIGTNSVGWAVITDEYKVPSKKFKVLGNTDRHSIKKNLIGALLFDSGETAEATRLKRTARRRYTRRKNRICYLQEIFSNEMAKVDDSFFHRLEESFLVEEDKKHERHPIFGNIVDEVAYHEKYPTIYHLRKKLVDSTDKADLRLIYLALAHMIKFRGHFLIEGDLNPDNSDVDKLFIQLVQTYNQLFEENPINASGVDAKAILSARLSKSRRLENLIAQLPGEKKNGLFGNLIALSLGLTPNFKSNFDLAEDAKLQLSKDTYDDDLDNLLAQIGDQYADLFLAAKNLSDAILLSDILRVNTEITKAPLSASMIKRYDEHHQDLTLLKALVRQQLPEKYKEIFFDQSKNGYAGYIDGGASQEEFYKFIKPILEKMDGTEELLVKLNREDLLRKQRTFDNGSIPHQIHLGELHAILRRQEDFYPFLKDNREKIEKILTFRIPYYVGPLARGNSRFAWMTRKSEETITPWNFEEVVDKGASAQSFIERMTNFDKNLPNEKVLPKHSLLYEYFTVYNELTKVKYVTEGMRKPAFLSGEQKKAIVDLLFKTNRKVTVKQLKEDYFKKIECFDSVEISGVEDRFNASLGTYHDLLKIIKDKDFLDNEENEDILEDIVLTLTLFEDREMIEERLKTYAHLFDDKVMKQLKRRRYTGWGRLSRKLINGIRDKQSGKTILDFLKSDGFANRNFMQLIHDDSLTFKEDIQKAQVSGQGDSLHEHIANLAGSPAIKKGILQTVKVVDELVKVMGRHKPENIVIEMARENQTTQKGQKNSRERMKRIEEGIKELGSQILKEHPVENTQLQNEKLYLYYLQNGRDMYVDQELDINRLSDYDVDHIVPQSFLKDDSIDNKVLTRSDKARGKSDNVPSEEVVKKMKNYWRQLLNAKLITQRKFDNLTKAERGGLSELDKAGFIKRQLVETRQITKHVAQILDSRMNTKYDENDKLIREVKVITLKSKLVSDFRKDFQFYKVREINNYHHAHDAYLNAVVGTALIKKYPKLESEFVYGDYKVYDVRKMIAKSEQEIGKATAKYFFYSNIMNFFKTEITLANGEIRKRPLIETNGETGEIVWDKGRDFATVRKVLSMPQVNIVKKTEVQTGGFSKESILPKRNSDKLIARKKDWDPKKYGGFDSPTVAYSVLVVAKVEKGKSKKLKSVKELLGITIMERSSFEKNPIDFLEAKGYKEVKKDLIIKLPKYSLFELENGRKRMLASAGELQKGNELALPSKYVNFLYLASHYEKLKGSPEDNEQKQLFVEQHKHYLDEIIEQISEFSKRVILADANLDKVLSAYNKHRDKPIREQAENIIHLFTLTNLGAPAAFKYFDTTIDRKRYTSTKEVLDATLIHQSITGLYETRIDLSQLGGDGGPAPEAAAKGSSGGIPWLMKKPLQLTTLVPLQEYEERLLKQTMLTGSYKEKLQSLFLKYDALWQHWENQVGHRRIKPHHIATGTVNPRPQKQYPINPKAKASIQTVINDLLKQGVLIQQNSIMNTPVYPVPKPDGKWRMVLDYREVNKTIPLIAAQNQHSAGILSSIFRGKYKTTLDLSNGFWAHSITPESYWLTAFTWLGQQYCWTRLPQGFLNSPALFNADVVDLLKEVPNVQVYVDDIYISHDDPREHLEQLEKVFSLLLNAGYVVSLKKSEIAQHEVEFLGFNITKEGRGLTETFKQKLLNITPPRDLKQLQSILGLLNFARNFIPNFSELVKPLYNIIATAPGKYITWTTDNSQQLQNIISMLNSAENLEERNPEVRLIMKVNTSPSAGYIRFYNEFAKRPIMYLNYVYTKAEVKFTNTEKLLTTIHKGLIKALDLGMGQEILVYSPIVSMTKIQKTPLPERKALPIRWITWMSYLEDPRIQFHYDKTLPELQQVPTVTDDIIAKIKHPSEFSMVFYTDGSAIKHPNVNKSHNAGMGIAQVQFKPEFTVINTWSIPLGDHTAQLAEVAAVEFACKKALKIDGPVLIVTDSFYVAESVNKELPYWQSNGFFNNKKKPLKHVSKWKSIADCIQLKPDIIIIHEKGHQPTASTFHTEGNNLADKLATQGSYVVNAGKRTADGSEFEKRTADGSEFESPKKKAKVE

SEQ ID NO: 7648 - protein, 2176 aa, synthetic construct
MPAAKRVKLDGGDKKYSIGLDIGTNSVGWAVITDEYKVPSKKFKVLGNTDRHSIKKNLIGALLFDSGETAEATRLKRTARRRYTRRKNRICYLQEIFSNEMAKVDDSFFHRLEESFLVEEDKKHERHPIFGNIVDEVAYHEKYPTIYHLRKKLVDSTDKADLRLIYLALAHMIKFRGHFLIEGDLNPDNSDVDKLFIQLVQTYNQLFEENPINASGVDAKAILSARLSKSRRLENLIAQLPGEKKNGLFGNLIALSLGLTPNFKSNFDLAEDAKLQLSKDTYDDDLDNLLAQIGDQYADLFLAAKNLSDAILLSDILRVNTEITKAPLSASMIKRYDEHHQDLTLLKALVRQQLPEKYKEIFFDQSKNGYAGYIDGGASQEEFYKFIKPILEKMDGTEELLVKLNREDLLRKQRTFDNGSIPHQIHLGELHAILRRQEDFYPFLKDNREKIEKILTFRIPYYVGPLARGNSRFAWMTRKSEETITPWNFEEVVDKGASAQSFIERMTNFDKNLPNEKVLPKHSLLYEYFTVYNELTKVKYVTEGMRKPAFLSGEQKKAIVDLLFKTNRKVTVKQLKEDYFKKIECFDSVEISGVEDRFNASLGTYHDLLKIIKDKDFLDNEENEDILEDIVLTLTLFEDREMIEERLKTYAHLFDDKVMKQLKRRRYTGWGRLSRKLINGIRDKQSGKTILDFLKSDGFANRNFMQLIHDDSLTFKEDIQKAQVSGQGDSLHEHIANLAGSPAIKKGILQTVKVVDELVKVMGRHKPENIVIEMARENQTTQKGQKNSRERMKRIEEGIKELGSQILKEHPVENTQLQNEKLYLYYLQNGRDMYVDQELDINRLSDYDVDHIVPQSFLKDDSIDNKVLTRSDKARGKSDNVPSEEVVKKMKNYWRQLLNAKLITQRKFDNLTKAERGGLSELDKAGFIKRQLVETRQITKHVAQILDSRMNTKYDENDKLIREVKVITLKSKLVSDFRKDFQFYKVREINNYHHAHDAYLNAVVGTALIKKYPKLESEFVYGDYKVYDVRKMIAKSEQEIGKATAKYFFYSNIMNFFKTEITLANGEIRKRPLIETNGETGEIVWDKGRDFATVRKVLSMPQVNIVKKTEVQTGGFSKESILPKRNSDKLIARKKDWDPKKYGGFDSPTVAYSVLVVAKVEKGKSKKLKSVKELLGITIMERSSFEKNPIDFLEAKGYKEVKKDLIIKLPKYSLFELENGRKRMLASAGELQKGNELALPSKYVNFLYLASHYEKLKGSPEDNEQKQLFVEQHKHYLDEIIEQISEFSKRVILADANLDKVLSAYNKHRDKPIREQAENIIHLFTLTNLGAPAAFKYFDTTIDRKRYTSTKEVLDATLIHQSITGLYETRIDLSQLGGDGGPAPEAAAKGSSGGMNPLQLLQPLPAEVKGTKLLAHWNSGATITCIPESFLEDEQPIKQTLIKTIHGEKQQNVYYLTFKVKGRKVEAEVIASPYEYILLSPTDVPWLTQQPLQLTILVPLQEYQDRILNKTALPEEQKQQLKALFTKYDNLWQHWENQVGHRKIRPHNIATGDYPPRPQKQYPINPKAKPSIQIVIDDLLKQGVLTPQNSTMNTPVYPVPKPDGRWRMVLDYREVNKTIPLTAAQNQHSAGILATIVRQKYKTTLDLANGFWAHPITPDSYWLTAFTWQGKQYCWTRLPQGFLNSPALFNADAVDLLKEVPNVQVYVDDIYLSHDNPHEHIQQLEKVFQILLQAGYVVSLKKSEIGQRTVEFLGFNITKEGRGLTDTFKTKLLNVTPPKDLKQLQSILGKLNFARNFIPNFAELVQTLYNLIASSPGKYIEWTEDNTKQLNKVIEALNTASNLEERLPDQRLVIKVNTSPSAGYVRYYNESGKKPIMYLNYVFSKAELKFSMLEKLLTTMHKALIKAMDLAMGQEILVYSPIVSMTKIQKTPLPERKALPIRWITWMTYLEDPRIQFHYDKTLPELKHIPDVYTSSIPPLKHPSQYEGVFCTDGSAIKSPDPTKSNNAGMGIVHAIYNPEYKILNQWSIPLGHHTAQMAEIAAVEFACKKALKVPGPVLVITDSFYVAESANKELPYWKSNGFVNNKKEPLKHISKWKSIAECLSIKPDITIQHEKGHQPINTSIHTEGNALADKLATQGSYVVNAGKRTADGSEFEKRTADGSEFESPKKKAKVE

SEQ ID NO: 7649 - protein, 2096 aa, synthetic construct
MPAAKRVKLDGGDKKYSIGLDIGTNSVGWAVITDEYKVPSKKFKVLGNTDRHSIKKNLIGALLFDSGETAEATRLKRTARRRYTRRKNRICYLQEIFSNEMAKVDDSFFHRLEESFLVEEDKKHERHPIFGNIVDEVAYHEKYPTIYHLRKKLVDSTDKADLRLIYLALAHMIKFRGHFLIEGDLNPDNSDVDKLFIQLVQTYNQLFEENPINASGVDAKAILSARLSKSRRLENLIAQLPGEKKNGLFGNLIALSLGLTPNFKSNFDLAEDAKLQLSKDTYDDDLDNLLAQIGDQYADLFLAAKNLSDAILLSDILRVNTEITKAPLSASMIKRYDEHHQDLTLLKALVRQQLPEKYKEIFFDQSKNGYAGYIDGGASQEEFYKFIKPILEKMDGTEELLVKLNREDLLRKQRTFDNGSIPHQIHLGELHAILRRQEDFYPFLKDNREKIEKILTFRIPYYVGPLARGNSRFAWMTRKSEETITPWNFEEVVDKGASAQSFIERMTNFDKNLPNEKVLPKHSLLYEYFTVYNELTKVKYVTEGMRKPAFLSGEQKKAIVDLLFKTNRKVTVKQLKEDYFKKIECFDSVEISGVEDRFNASLGTYHDLLKIIKDKDFLDNEENEDILEDIVLTLTLFEDREMIEERLKTYAHLFDDKVMKQLKRRRYTGWGRLSRKLINGIRDKQSGKTILDFLKSDGFANRNFMQLIHDDSLTFKEDIQKAQVSGQGDSLHEHIANLAGSPAIKKGILQTVKVVDELVKVMGRHKPENIVIEMARENQTTQKGQKNSRERMKRIEEGIKELGSQILKEHPVENTQLQNEKLYLYYLQNGRDMYVDQELDINRLSDYDVDHIVPQSFLKDDSIDNKVLTRSDKARGKSDNVPSEEVVKKMKNYWRQLLNAKLITQRKFDNLTKAERGGLSELDKAGFIKRQLVETRQITKHVAQILDSRMNTKYDENDKLIREVKVITLKSKLVSDFRKDFQFYKVREINNYHHAHDAYLNAVVGTALIKKYPKLESEFVYGDYKVYDVRKMIAKSEQEIGKATAKYFFYSNIMNFFKTEITLANGEIRKRPLIETNGETGEIVWDKGRDFATVRKVLSMPQVNIVKKTEVQTGGFSKESILPKRNSDKLIARKKDWDPKKYGGFDSPTVAYSVLVVAKVEKGKSKKLKSVKELLGITIMERSSFEKNPIDFLEAKGYKEVKKDLIIKLPKYSLFELENGRKRMLASAGELQKGNELALPSKYVNFLYLASHYEKLKGSPEDNEQKQLFVEQHKHYLDEIIEQISEFSKRVILADANLDKVLSAYNKHRDKPIREQAENIIHLFTLTNLGAPAAFKYFDTTIDRKRYTSTKEVLDATLIHQSITGLYETRIDLSQLGGDGGPAPEAAAKGSSGGTLNIEDEYRLHETSKEPDVPLGSTWLSDFPQAWAETGGMGLAVRQAPLIIPLKATSTPVSIKQYPMSQEARLGIKPHIQRLLDQGILVPCQSPWNTPLLPVKKPGTNDYRPVQDLREVNKRVEDIHPTVPNPYNLLSGLPPSHQWYTVLDLKDAFFCLRLHPTSQPLFAFEWRDPEMGISGQLTWTRLPQGFKNSPTLFNEALHRDLADFRIQHPDLILLQYVDDLLLAATSEQDCQRGTRALLQTLGNLGYRASAKKAQICQKQVKYLGYLLKEGQRWLTEARKETVMGQPTPKTPRQLREFLGTAGFCRLWIPGFAEMAAPLYPLTKPGTLFNWGPDQQKAYQEIKQALLTAPALGLPDLTKPFELFVDEKQGYAKGVLTQKLGPWRRPVAYLSKKLDPVAAGWPPCLRMVAAIAVLTKDAGKLTMGQPLVILAPHAVEALVKQPPDRWLSNARMTHYQAMLLDTDRVQFGPVVALNPATLLPLPEKEAPHDCLEILAETHGTRPDLTDQPIPDADYTWYTDGSSFLQEGQRRAGAAVTTETEVIWARALPAGTSAQRAELIALTQALKMAEGKKLNVYTDSRYAFATAHVHGEIYRRRGWLTSEGREIKNKNEILALLKALFLPKRLSIIHCPGHQKGNSAEARGNRMADQAAREAAMKAVLETSTLLAGKRTADGSEFEKRTADGSEFESPKKKAKVE

SEQ ID NO: 7650 - protein, 2122 aa, synthetic construct
MPAAKRVKLDGGDKKYSIGLDIGTNSVGWAVITDEYKVPSKKFKVLGNTDRHSIKKNLIGALLFDSGETAEATRLKRTARRRYTRRKNRICYLQEIFSNEMAKVDDSFFHRLEESFLVEEDKKHERHPIFGNIVDEVAYHEKYPTIYHLRKKLVDSTDKADLRLIYLALAHMIKFRGHFLIEGDLNPDNSDVDKLFIQLVQTYNQLFEENPINASGVDAKAILSARLSKSRRLENLIAQLPGEKKNGLFGNLIALSLGLTPNFKSNFDLAEDAKLQLSKDTYDDDLDNLLAQIGDQYADLFLAAKNLSDAILLSDILRVNTEITKAPLSASMIKRYDEHHQDLTLLKALVRQQLPEKYKEIFFDQSKNGYAGYIDGGASQEEFYKFIKPILEKMDGTEELLVKLNREDLLRKQRTFDNGSIPHQIHLGELHAILRRQEDFYPFLKDNREKIEKILTFRIPYYVGPLARGNSRFAWMTRKSEETITPWNFEEVVDKGASAQSFIERMTNFDKNLPNEKVLPKHSLLYEYFTVYNELTKVKYVTEGMRKPAFLSGEQKKAIVDLLFKTNRKVTVKQLKEDYFKKIECFDSVEISGVEDRFNASLGTYHDLLKIIKDKDFLDNEENEDILEDIVLTLTLFEDREMIEERLKTYAHLFDDKVMKQLKRRRYTGWGRLSRKLINGIRDKQSGKTILDFLKSDGFANRNFMQLIHDDSLTFKEDIQKAQVSGQGDSLHEHIANLAGSPAIKKGILQTVKVVDELVKVMGRHKPENIVIEMARENQTTQKGQKNSRERMKRIEEGIKELGSQILKEHPVENTQLQNEKLYLYYLQNGRDMYVDQELDINRLSDYDVDHIVPQSFLKDDSIDNKVLTRSDKARGKSDNVPSEEVVKKMKNYWRQLLNAKLITQRKFDNLTKAERGGLSELDKAGFIKRQLVETRQITKHVAQILDSRMNTKYDENDKLIREVKVITLKSKLVSDFRKDFQFYKVREINNYHHAHDAYLNAVVGTALIKKYPKLESEFVYGDYKVYDVRKMIAKSEQEIGKATAKYFFYSNIMNFFKTEITLANGEIRKRPLIETNGETGEIVWDKGRDFATVRKVLSMPQVNIVKKTEVQTGGFSKESILPKRNSDKLIARKKDWDPKKYGGFDSPTVAYSVLVVAKVEKGKSKKLKSVKELLGITIMERSSFEKNPIDFLEAKGYKEVKKDLIIKLPKYSLFELENGRKRMLASAGELQKGNELALPSKYVNFLYLASHYEKLKGSPEDNEQKQLFVEQHKHYLDEIIEQISEFSKRVILADANLDKVLSAYNKHRDKPIREQAENIIHLFTLTNLGAPAAFKYFDTTIDRKRYTSTKEVLDATLIHQSITGLYETRIDLSQLGGDGGAEAAAKEAAAKEAAAKEAAAKALEAEAAAKEAAAKEAAAKEAAAKAGGVPWILKKPLELTIKLDLEEQQGTLLNNSILSKKGKEELKQLFEKYSALWQSWENQVGHRRIRPHKIATGTVKPTPQKQYHINPKAKPDIQIVINDLLKQGVLIQKESTMNTPVYPVPKPNGRWRMVLDYRAVNKVTPLIAVQNQHSYGILGSLFKGRYKTTIDLSNGFWAHPIVPEDYWITAFTWQGKQYCWTVLPQGFLNSPGLFTGDVVDLLQGIPNVEVYVDDVYISHDSEKEHLEYLDILFNRLKEAGYIISLKKSNIANSIVDFLGFQITNEGRGLTDTFKEKLENITAPTTLKQLQSILGLLNFARNFIPDFTELIAPLYALIPKSTKNYVPWQIEHSTTLETLITKLNGAEYLQGRKGDKTLIMKVNASYTTGYIRYYNEGEKKPISYVSIVFSKTELKFTELEKLLTTVHKGLLKALDLSMGQNIHVYSPIVSMQNIQKTPQTAKKALASRWLSWLSYLEDPRIRFFYDPQMPALKDLPAVDTGKDNKKHPSNFQHIFYTDGSAITSPTKEGHLNAGMGIVYFINKDGNLQKQQEWSISLGNHTAQFAEIAAFEFALKKCLPLGGNILVVTDSNYVAKAYNEELDVWASNGFVNNRKKPLKHISKWKSVADLKRLRPDVVVTHEPGHQKLDSSPHAYGNNLADQLATQASFKVHAGKRTADGSEFEKRTADGSEFESPKKKAKVE

SEQ ID NO: 7651 - protein, 2122 aa, synthetic construct
MPAAKRVKLDGGDKKYSIGLDIGTNSVGWAVITDEYKVPSKKFKVLGNTDRHSIKKNLIGALLFDSGETAEATRLKRTARRRYTRRKNRICYLQEIFSNEMAKVDDSFFHRLEESFLVEEDKKHERHPIFGNIVDEVAYHEKYPTIYHLRKKLVDSTDKADLRLIYLALAHMIKFRGHFLIEGDLNPDNSDVDKLFIQLVQTYNQLFEENPINASGVDAKAILSARLSKSRRLENLIAQLPGEKKNGLFGNLIALSLGLTPNFKSNFDLAEDAKLQLSKDTYDDDLDNLLAQIGDQYADLFLAAKNLSDAILLSDILRVNTEITKAPLSASMIKRYDEHHQDLTLLKALVRQQLPEKYKEIFFDQSKNGYAGYIDGGASQEEFYKFIKPILEKMDGTEELLVKLNREDLLRKQRTFDNGSIPHQIHLGELHAILRRQEDFYPFLKDNREKIEKILTFRIPYYVGPLARGNSRFAWMTRKSEETITPWNFEEVVDKGASAQSFIERMTNFDKNLPNEKVLPKHSLLYEYFTVYNELTKVKYVTEGMRKPAFLSGEQKKAIVDLLFKTNRKVTVKQLKEDYFKKIECFDSVEISGVEDRFNASLGTYHDLLKIIKDKDFLDNEENEDILEDIVLTLTLFEDREMIEERLKTYAHLFDDKVMKQLKRRRYTGWGRLSRKLINGIRDKQSGKTILDFLKSDGFANRNFMQLIHDDSLTFKEDIQKAQVSGQGDSLHEHIANLAGSPAIKKGILQTVKVVDELVKVMGRHKPENIVIEMARENQTTQKGQKNSRERMKRIEEGIKELGSQILKEHPVENTQLQNEKLYLYYLQNGRDMYVDQELDINRLSDYDVDHIVPQSFLKDDSIDNKVLTRSDKARGKSDNVPSEEVVKKMKNYWRQLLNAKLITQRKFDNLTKAERGGLSELDKAGFIKRQLVETRQITKHVAQILDSRMNTKYDENDKLIREVKVITLKSKLVSDFRKDFQFYKVREINNYHHAHDAYLNAVVGTALIKKYPKLESEFVYGDYKVYDVRKMIAKSEQEIGKATAKYFFYSNIMNFFKTEITLANGEIRKRPLIETNGETGEIVWDKGRDFATVRKVLSMPQVNIVKKTEVQTGGFSKESILPKRNSDKLIARKKDWDPKKYGGFDSPTVAYSVLVVAKVEKGKSKKLKSVKELLGITIMERSSFEKNPIDFLEAKGYKEVKKDLIIKLPKYSLFELENGRKRMLASAGELQKGNELALPSKYVNFLYLASHYEKLKGSPEDNEQKQLFVEQHKHYLDEIIEQISEFSKRVILADANLDKVLSAYNKHRDKPIREQAENIIHLFTLTNLGAPAAFKYFDTTIDRKRYTSTKEVLDATLIHQSITGLYETRIDLSQLGGDGGAEAAAKEAAAKEAAAKEAAAKALEAEAAAKEAAAKEAAAKEAAAKAGGVPWILKKPLELTIKLDLEEQQGTLLNNSILSKKGKEELKQLFEKYSALWQSWENQVGHRRIRPHKIATGTVKPTPQKQYHINPKAKPDIQIVINDLLKQGVLIQKESTMNTPVYPVPKPNGRWRMVLDYRAVNKVTPLIAVQNQHSYGILGSLFKGRYKTTIDLSNGFWAHPIVPEDYWITAFTWQGKQYCWTVLPQGFLNSPGLFNGDVVDLLQGIPNVEVYVDDVYISHDSEKEHLEYLDILFNRLKEAGYIISLKKSNIANSIVDFLGFQITNEGRGLTDTFKEKLENITAPTTLKQLQSILGKLNFARNFIPDFTELIAPLYALIPKSPKNYVPWQIEHSTTLETLITKLNGAEYLQGRKGDKTLIMKVNASYTTGYIRYYNEGEKKPISYVSIVFSKTELKFTELEKLLTTVHKGLLKALDLSMGQNIHVYSPIVSMQNIQKTPQTAKKALASRWLSWLSYLEDPRIRFFYDPQMPALKDLPAVDTGKDNKKHPSNFQHIFYTDGSAITSPTKEGHLNAGMGIVYFINKDGNLQKQQEWSISLGNHTAQFAEIAAFEFALKKCLPLGGNILVVTDSNYVAKAYNEELDVWASNGFVNNRKKPLKHISKWKSVADLKRLRPDVVVTHEPGHQKLDSSPHAYGNNLADQLATQASFKVHAGKRTADGSEFEKRTADGSEFESPKKKAKVE

SEQ ID NO: 7652 - protein, 2122 aa, synthetic construct
MPAAKRVKLDGGDKKYSIGLDIGTNSVGWAVITDEYKVPSKKFKVLGNTDRHSIKKNLIGALLFDSGETAEATRLKRTARRRYTRRKNRICYLQEIFSNEMAKVDDSFFHRLEESFLVEEDKKHERHPIFGNIVDEVAYHEKYPTIYHLRKKLVDSTDKADLRLIYLALAHMIKFRGHFLIEGDLNPDNSDVDKLFIQLVQTYNQLFEENPINASGVDAKAILSARLSKSRRLENLIAQLPGEKKNGLFGNLIALSLGLTPNFKSNFDLAEDAKLQLSKDTYDDDLDNLLAQIGDQYADLFLAAKNLSDAILLSDILRVNTEITKAPLSASMIKRYDEHHQDLTLLKALVRQQLPEKYKEIFFDQSKNGYAGYIDGGASQEEFYKFIKPILEKMDGTEELLVKLNREDLLRKQRTFDNGSIPHQIHLGELHAILRRQEDFYPFLKDNREKIEKILTFRIPYYVGPLARGNSRFAWMTRKSEETITPWNFEEVVDKGASAQSFIERMTNFDKNLPNEKVLPKHSLLYEYFTVYNELTKVKYVTEGMRKPAFLSGEQKKAIVDLLFKTNRKVTVKQLKEDYFKKIECFDSVEISGVEDRFNASLGTYHDLLKIIKDKDFLDNEENEDILEDIVLTLTLFEDREMIEERLKTYAHLFDDKVMKQLKRRRYTGWGRLSRKLINGIRDKQSGKTILDFLKSDGFANRNFMQLIHDDSLTFKEDIQKAQVSGQGDSLHEHIANLAGSPAIKKGILQTVKVVDELVKVMGRHKPENIVIEMARENQTTQKGQKNSRERMKRIEEGIKELGSQILKEHPVENTQLQNEKLYLYYLQNGRDMYVDQELDINRLSDYDVDHIVPQSFLKDDSIDNKVLTRSDKARGKSDNVPSEEVVKKMKNYWRQLLNAKLITQRKFDNLTKAERGGLSELDKAGFIKRQLVETRQITKHVAQILDSRMNTKYDENDKLIREVKVITLKSKLVSDFRKDFQFYKVREINNYHHAHDAYLNAVVGTALIKKYPKLESEFVYGDYKVYDVRKMIAKSEQEIGKATAKYFFYSNIMNFFKTEITLANGEIRKRPLIETNGETGEIVWDKGRDFATVRKVLSMPQVNIVKKTEVQTGGFSKESILPKRNSDKLIARKKDWDPKKYGGFDSPTVAYSVLVVAKVEKGKSKKLKSVKELLGITIMERSSFEKNPIDFLEAKGYKEVKKDLIIKLPKYSLFELENGRKRMLASAGELQKGNELALPSKYVNFLYLASHYEKLKGSPEDNEQKQLFVEQHKHYLDEIIEQISEFSKRVILADANLDKVLSAYNKHRDKPIREQAENIIHLFTLTNLGAPAAFKYFDTTIDRKRYTSTKEVLDATLIHQSITGLYETRIDLSQLGGDGGAEAAAKEAAAKEAAAKEAAAKALEAEAAAKEAAAKEAAAKEAAAKAGGVPWLTQQPLQLTILVPLQEYQEKILSKTALPEDQKQQLKTLFVKYDNLWQHWENQVGHRKIRPHNIATGDYPPRPQKQYPINPKAKPSIQIVIDDLLKQGVLTPQNSTMNTPVYPVPKPDGRWRMVLDYREVNKTIPLTAAQNQHSAGILATIVRQKYKTTLDLANGFWAHPITPESYWLTAFTWQGKQYCWTRLPQGFLNSPALFTADVVDLLKEIPNVQVYVDDIYLSHDDPKEHVQQLEKVFQILLQAGYVVSLKKSEIGQKTVEFLGFNITKEGRGLTDTFKTKLLNITPPKDLKQLQSILGLLNFARNFIPNFAELVQPLYNLIASAKGKYIEWSEENTKQLNMVIEALNTASNLEERLPEQRLVIKVNTSPSAGYVRYYNETGKKPIMYLNYVFSKAELKFSMLEKLLTTMHKALIKAMDLAMGQEILVYSPIVSMTKIQKTPLPERKALPIRWITWMTYLEDPRIQFHYDKTLPELKHIPDVYTSSQSPVKHPSQYEGVFYTDGSAIKSPDPTKSNNAGMGIVHATYKPEYQVLNQWSIPLGNHTAQMAEIAAVEFACKKALKIPGPVLVITDSFYVAESANKELPYWKSNGFVNNKKKPLKHISKWKSIAECLSMKPDITIQHEKGISLQIPVFILKGNALADKLATQGSYVVNAGKRTADGSEFEKRTADGSEFESPKKKAKVE

SEQ ID NO: 7653 - protein, 2211 aa, synthetic construct
MPAAKRVKLDGGDKKYSIGLDIGTNSVGWAVITDEYKVPSKKFKVLGNTDRHSIKKNLIGALLFDSGETAEATRLKRTARRRYTRRKNRICYLQEIFSNEMAKVDDSFFHRLEESFLVEEDKKHERHPIFGNIVDEVAYHEKYPTIYHLRKKLVDSTDKADLRLIYLALAHMIKFRGHFLIEGDLNPDNSDVDKLFIQLVQTYNQLFEENPINASGVDAKAILSARLSKSRRLENLIAQLPGEKKNGLFGNLIALSLGLTPNFKSNFDLAEDAKLQLSKDTYDDDLDNLLAQIGDQYADLFLAAKNLSDAILLSDILRVNTEITKAPLSASMIKRYDEHHQDLTLLKALVRQQLPEKYKEIFFDQSKNGYAGYIDGGASQEEFYKFIKPILEKMDGTEELLVKLNREDLLRKQRTFDNGSIPHQIHLGELHAILRRQEDFYPFLKDNREKIEKILTFRIPYYVGPLARGNSRFAWMTRKSEETITPWNFEEVVDKGASAQSFIERMTNFDKNLPNEKVLPKHSLLYEYFTVYNELTKVKYVTEGMRKPAFLSGEQKKAIVDLLFKTNRKVTVKQLKEDYFKKIECFDSVEISGVEDRFNASLGTYHDLLKIIKDKDFLDNEENEDILEDIVLTLTLFEDREMIEERLKTYAHLFDDKVMKQLKRRRYTGWGRLSRKLINGIRDKQSGKTILDFLKSDGFANRNFMQLIHDDSLTFKEDIQKAQVSGQGDSLHEHIANLAGSPAIKKGILQTVKVVDELVKVMGRHKPENIVIEMARENQTTQKGQKNSRERMKRIEEGIKELGSQILKEHPVENTQLQNEKLYLYYLQNGRDMYVDQELDINRLSDYDVDHIVPQSFLKDDSIDNKVLTRSDKARGKSDNVPSEEVVKKMKNYWRQLLNAKLITQRKFDNLTKAERGGLSELDKAGFIKRQLVETRQITKHVAQILDSRMNTKYDENDKLIREVKVITLKSKLVSDFRKDFQFYKVREINNYHHAHDAYLNAVVGTALIKKYPKLESEFVYGDYKVYDVRKMIAKSEQEIGKATAKYFFYSNIMNFFKTEITLANGEIRKRPLIETNGETGEIVWDKGRDFATVRKVLSMPQVNIVKKTEVQTGGFSKESILPKRNSDKLIARKKDWDPKKYGGFDSPTVAYSVLVVAKVEKGKSKKLKSVKELLGITIMERSSFEKNPIDFLEAKGYKEVKKDLIIKLPKYSLFELENGRKRMLASAGELQKGNELALPSKYVNFLYLASHYEKLKGSPEDNEQKQLFVEQHKHYLDEIIEQISEFSKRVILADANLDKVLSAYNKHRDKPIREQAENIIHLFTLTNLGAPAAFKYFDTTIDRKRYTSTKEVLDATLIHQSITGLYETRIDLSQLGGDGGAEAAAKEAAAKEAAAKEAAAKALEAEAAAKEAAAKEAAAKEAAAKAGGMNPLQLLQPLPAEIKGTKLLAHWNSGATITCIPESFLEDEQPIKKTLIKTIHGEKQQNVYYVTFKVKGRKVEAEVIASPYEYILLSPTDVPWLTQQPLQLTILVPLQEYQEKILSKTALPEDQKQQLKTLFVKYDNLWQHWENQVGHRKIRPHNIATGDYPPRPQKQYPINPKAKPSIQIVIDDLLKQGVLTPQNSTMNTPVYPVPKPDGRWRMVLDYREVNKTIPLTAAQNQHSAGILATIVRQKYKTTLDLANGFWAHPITPESYWLTAFTWQGKQYCWTRLPQGFLNSPALFNADVVDLLKEIPNVQVYVDDIYLSHDDPKEHVQQLEKVFQILLQAGYVVSLKKSEIGQKTVEFLGFNITKEGRGLTDTFKTKLLNITPPKDLKQLQSILGLLNFARNFIPNFAELVQPLYNLIAPAKGKYIEWSEENTKQLNMVIEALNTASNLEERLPEQRLVIKVNTSPSAGYVRYYNETGKKPIMYLNYVFSKAELKFSMLEKLLTTMHKALIKAMDLAMGQEILVYSPIVSMTKIQKTPLPERKALPIRWITWMTYLEDPRIQFHYDKTLPELKHIPDVYTSSQSPVKHPSQYEGVFYTDGSAIKSPDPTKSNNAGMGIVHATYKPEYQVLNQWSIPLGNHTAQMAEIAAVEFACKKALKIPGPVLVITDSFYVAESANKELPYWKSNGFVNNKKKPLKHISKWKSIAECLSMKPDITIQHEKGISLQIPVFILKGNALADKLATQGSYVVNAGKRTADGSEFEKRTADGSEFESPKKKAKVE

SEQ ID NO: 7654 - protein, 2211 aa, synthetic construct
MPAAKRVKLDGGDKKYSIGLDIGTNSVGWAVITDEYKVPSKKFKVLGNTDRHSIKKNLIGALLFDSGETAEATRLKRTARRRYTRRKNRICYLQEIFSNEMAKVDDSFFHRLEESFLVEEDKKHERHPIFGNIVDEVAYHEKYPTIYHLRKKLVDSTDKADLRLIYLALAHMIKFRGHFLIEGDLNPDNSDVDKLFIQLVQTYNQLFEENPINASGVDAKAILSARLSKSRRLENLIAQLPGEKKNGLFGNLIALSLGLTPNFKSNFDLAEDAKLQLSKDTYDDDLDNLLAQIGDQYADLFLAAKNLSDAILLSDILRVNTEITKAPLSASMIKRYDEHHQDLTLLKALVRQQLPEKYKEIFFDQSKNGYAGYIDGGASQEEFYKFIKPILEKMDGTEELLVKLNREDLLRKQRTFDNGSIPHQIHLGELHAILRRQEDFYPFLKDNREKIEKILTFRIPYYVGPLARGNSRFAWMTRKSEETITPWNFEEVVDKGASAQSFIERMTNFDKNLPNEKVLPKHSLLYEYFTVYNELTKVKYVTEGMRKPAFLSGEQKKAIVDLLFKTNRKVTVKQLKEDYFKKIECFDSVEISGVEDRFNASLGTYHDLLKIIKDKDFLDNEENEDILEDIVLTLTLFEDREMIEERLKTYAHLFDDKVMKQLKRRRYTGWGRLSRKLINGIRDKQSGKTILDFLKSDGFANRNFMQLIHDDSLTFKEDIQKAQVSGQGDSLHEHIANLAGSPAIKKGILQTVKVVDELVKVMGRHKPENIVIEMARENQTTQKGQKNSRERMKRIEEGIKELGSQILKEHPVENTQLQNEKLYLYYLQNGRDMYVDQELDINRLSDYDVDHIVPQSFLKDDSIDNKVLTRSDKARGKSDNVPSEEVVKKMKNYWRQLLNAKLITQRKFDNLTKAERGGLSELDKAGFIKRQLVETRQITKHVAQILDSRMNTKYDENDKLIREVKVITLKSKLVSDFRKDFQFYKVREINNYHHAHDAYLNAVVGTALIKKYPKLESEFVYGDYKVYDVRKMIAKSEQEIGKATAKYFFYSNIMNFFKTEITLANGEIRKRPLIETNGETGEIVWDKGRDFATVRKVLSMPQVNIVKKTEVQTGGFSKESILPKRNSDKLIARKKDWDPKKYGGFDSPTVAYSVLVVAKVEKGKSKKLKSVKELLGITIMERSSFEKNPIDFLEAKGYKEVKKDLIIKLPKYSLFELENGRKRMLASAGELQKGNELALPSKYVNFLYLASHYEKLKGSPEDNEQKQLFVEQHKHYLDEIIEQISEFSKRVILADANLDKVLSAYNKHRDKPIREQAENIIHLFTLTNLGAPAAFKYFDTTIDRKRYTSTKEVLDATLIHQSITGLYETRIDLSQLGGDGGAEAAAKEAAAKEAAAKEAAAKALEAEAAAKEAAAKEAAAKEAAAKAGGMNPLQLLQPLPAEIKGTKLLAHWNSGATITCIPESFLEDEQPIKKTLIKTIHGEKQQNVYYVTFKVKGRKVEAEVIASPYEYILLSPTDVPWLTQQPLQLTILVPLQEYQEKILSKTALPEDQKQQLKTLFVKYDNLWQHWENQVGHRKIRPHNIATGDYPPRPQKQYPINPKAKPSIQIVIDDLLKQGVLTPQNSTMNTPVYPVPKPDGRWRMVLDYREVNKTIPLTAAQNQHSAGILATIVRQKYKTTLDLANGFWAHPITPESYWLTAFTWQGKQYCWTRLPQGFLNSPALFNADVVDLLKEIPNVQVYVDDIYLSHDDPKEHVQQLEKVFQILLQAGYVVSLKKSEIGQKTVEFLGFNITKEGRGLTDTFKTKLLNITPPKDLKQLQSILGKLNFARNFIPNFAELVQPLYNLIAPAKGKYIEWSEENTKQLNMVIEALNTASNLEERLPEQRLVIKVNTSPSAGYVRYYNETGKKPIMYLNYVFSKAELKFSMLEKLLTTMHKALIKAMDLAMGQEILVYSPIVSMTKIQKTPLPERKALPIRWITWMTYLEDPRIQFHYDKTLPELKHIPDVYTSSQSPVKHPSQYEGVFYTDGSAIKSPDPTKSNNAGMGIVHATYKPEYQVLNQWSIPLGNHTAQMAEIAAVEFACKKALKIPGPVLVITDSFYVAESANKELPYWKSNGFVNNKKKPLKHISKWKSIAECLSMKPDITIQHEKGISLQIPVFILKGNALADKLATQGSYVVNAGKRTADGSEFEKRTADGSEFESPKKKAKVE

SEQ ID NO: 7655 - protein, 2162 aa, synthetic construct
MPAAKRVKLDGGDKKYSIGLDIGTNSVGWAVITDEYKVPSKKFKVLGNTDRHSIKKNLIGALLFDSGETAEATRLKRTARRRYTRRKNRICYLQEIFSNEMAKVDDSFFHRLEESFLVEEDKKHERHPIFGNIVDEVAYHEKYPTIYHLRKKLVDSTDKADLRLIYLALAHMIKFRGHFLIEGDLNPDNSDVDKLFIQLVQTYNQLFEENPINASGVDAKAILSARLSKSRRLENLIAQLPGEKKNGLFGNLIALSLGLTPNFKSNFDLAEDAKLQLSKDTYDDDLDNLLAQIGDQYADLFLAAKNLSDAILLSDILRVNTEITKAPLSASMIKRYDEHHQDLTLLKALVRQQLPEKYKEIFFDQSKNGYAGYIDGGASQEEFYKFIKPILEKMDGTEELLVKLNREDLLRKQRTFDNGSIPHQIHLGELHAILRRQEDFYPFLKDNREKIEKILTFRIPYYVGPLARGNSRFAWMTRKSEETITPWNFEEVVDKGASAQSFIERMTNFDKNLPNEKVLPKHSLLYEYFTVYNELTKVKYVTEGMRKPAFLSGEQKKAIVDLLFKTNRKVTVKQLKEDYFKKIECFDSVEISGVEDRFNASLGTYHDLLKIIKDKDFLDNEENEDILEDIVLTLTLFEDREMIEERLKTYAHLFDDKVMKQLKRRRYTGWGRLSRKLINGIRDKQSGKTILDFLKSDGFANRNFMQLIHDDSLTFKEDIQKAQVSGQGDSLHEHIANLAGSPAIKKGILQTVKVVDELVKVMGRHKPENIVIEMARENQTTQKGQKNSRERMKRIEEGIKELGSQILKEHPVENTQLQNEKLYLYYLQNGRDMYVDQELDINRLSDYDVDHIVPQSFLKDDSIDNKVLTRSDKARGKSDNVPSEEVVKKMKNYWRQLLNAKLITQRKFDNLTKAERGGLSELDKAGFIKRQLVETRQITKHVAQILDSRMNTKYDENDKLIREVKVITLKSKLVSDFRKDFQFYKVREINNYHHAHDAYLNAVVGTALIKKYPKLESEFVYGDYKVYDVRKMIAKSEQEIGKATAKYFFYSNIMNFFKTEITLANGEIRKRPLIETNGETGEIVWDKGRDFATVRKVLSMPQVNIVKKTEVQTGGFSKESILPKRNSDKLIARKKDWDPKKYGGFDSPTVAYSVLVVAKVEKGKSKKLKSVKELLGITIMERSSFEKNPIDFLEAKGYKEVKKDLIIKLPKYSLFELENGRKRMLASAGELQKGNELALPSKYVNFLYLASHYEKLKGSPEDNEQKQLFVEQHKHYLDEIIEQISEFSKRVILADANLDKVLSAYNKHRDKPIREQAENIIHLFTLTNLGAPAAFKYFDTTIDRKRYTSTKEVLDATLIHQSITGLYETRIDLSQLGGDGGAEAAAKEAAAKEAAAKEAAAKALEAEAAAKEAAAKEAAAKEAAAKAGGLLGRDLLTKLKAQIQFSTEGPQVTWEDRPAMCLVLNLEEEYRLHEKPVPPSIDPSWLQLFPMVWAEKAGMGLANQVPPVVVELKSDASPVAVRQYPMSKEAREGIRPHIQRFLDLGILVPCQSPWNTPLLPVKKPGTNDYRPVQDLREVNKRVQDIHPTVPNPYNLLSSLPPSHTWYSVLDLKDAFFCLKLHPNSQPLFAFEWRDPEKGNTGQLTWTRLPQGFKNSPTLFDEALHRDLASFRALNPQVVMLQYVDDLLVAAPTYRDCKEGTRRLLQELSKLGYRVSAKKAQLCREEVTYLGYLLKGGKRWLTPARKATVMKIPTPTTPRQVREFLGTAGFCRLWIPGFASLAAPLYPLTREKVPFTWTEAHQEAFGRIKEALLSAPALALPDLTKPFALYVDEKEGVARGVLTQTLGPWRRPVAYLSKKLDPVASGWPTCLKAIAAVALLLKDADKLTLGQNVLVIAPHNLESIVRQPPDRWMTNARMTHYQSLLLNERVSFAPPAILNPATLLPVESDDTPIHICSEILAEETGTRPDLRDQPLPGVPAWYTDGSSFIMDGRRQAGAAIVDNKRTVWASNLPEGTSAQKAELIALTQALRLAEGKSINIYTDSRYAFATAHVHGAIYKQRGLLTSAGKDIKNKEEILALLEAIHLPKRVAIIHCPGHQRGTDPVATGNRKADEAAKQAAQSTRILTETTKNAGKRTADGSEFEKRTADGSEFESPKKKAKVE

SEQ ID NO: 7656 - protein, 2253 aa, synthetic construct
MPAAKRVKLDGGDKKYSIGLDIGTNSVGWAVITDEYKVPSKKFKVLGNTDRHSIKKNLIGALLFDSGETAEATRLKRTARRRYTRRKNRICYLQEIFSNEMAKVDDSFFHRLEESFLVEEDKKHERHPIFGNIVDEVAYHEKYPTIYHLRKKLVDSTDKADLRLIYLALAHMIKFRGHFLIEGDLNPDNSDVDKLFIQLVQTYNQLFEENPINASGVDAKAILSARLSKSRRLENLIAQLPGEKKNGLFGNLIALSLGLTPNFKSNFDLAEDAKLQLSKDTYDDDLDNLLAQIGDQYADLFLAAKNLSDAILLSDILRVNTEITKAPLSASMIKRYDEHHQDLTLLKALVRQQLPEKYKEIFFDQSKNGYAGYIDGGASQEEFYKFIKPILEKMDGTEELLVKLNREDLLRKQRTFDNGSIPHQIHLGELHAILRRQEDFYPFLKDNREKIEKILTFRIPYYVGPLARGNSRFAWMTRKSEETITPWNFEEVVDKGASAQSFIERMTNFDKNLPNEKVLPKHSLLYEYFTVYNELTKVKYVTEGMRKPAFLSGEQKKAIVDLLFKTNRKVTVKQLKEDYFKKIECFDSVEISGVEDRFNASLGTYHDLLKIIKDKDFLDNEENEDILEDIVLTLTLFEDREMIEERLKTYAHLFDDKVMKQLKRRRYTGWGRLSRKLINGIRDKQSGKTILDFLKSDGFANRNFMQLIHDDSLTFKEDIQKAQVSGQGDSLHEHIANLAGSPAIKKGILQTVKVVDELVKVMGRHKPENIVIEMARENQTTQKGQKNSRERMKRIEEGIKELGSQILKEHPVENTQLQNEKLYLYYLQNGRDMYVDQELDINRLSDYDVDHIVPQSFLKDDSIDNKVLTRSDKARGKSDNVPSEEVVKKMKNYWRQLLNAKLITQRKFDNLTKAERGGLSELDKAGFIKRQLVETRQITKHVAQILDSRMNTKYDENDKLIREVKVITLKSKLVSDFRKDFQFYKVREINNYHHAHDAYLNAVVGTALIKKYPKLESEFVYGDYKVYDVRKMIAKSEQEIGKATAKYFFYSNIMNFFKTEITLANGEIRKRPLIETNGETGEIVWDKGRDFATVRKVLSMPQVNIVKKTEVQTGGFSKESILPKRNSDKLIARKKDWDPKKYGGFDSPTVAYSVLVVAKVEKGKSKKLKSVKELLGITIMERSSFEKNPIDFLEAKGYKEVKKDLIIKLPKYSLFELENGRKRMLASAGELQKGNELALPSKYVNFLYLASHYEKLKGSPEDNEQKQLFVEQHKHYLDEIIEQISEFSKRVILADANLDKVLSAYNKHRDKPIREQAENIIHLFTLTNLGAPAAFKYFDTTIDRKRYTSTKEVLDATLIHQSITGLYETRIDLSQLGGDGGAEAAAKEAAAKEAAAKEAAAKALEAEAAAKEAAAKEAAAKEAAAKAGGTLGDQGSRGSDPLPEPRVTLTVEGIPTEFLVNTGAEHSVLTKPMGKMGSKRTVVAGATGSKVYPWTTKRLLKIGQKQVTHSFLVIPECPAPLLGRDLLTKLKAQIQFSTEGPQVTWEDRPAMCLVLNLEEEYRLHEKPVPPSIDPSWLQLFPMVWAEKAGMGLANQVPPVVVELKSDASPVAVRQYPMSKEAREGIRPHIQRFLDLGILVPCQSPWNTPLLPVKKPGTNDYRPVQDLREVNKRVQDIHPTVPNPYNLLSSLPPSHTWYSVLDLKDAFFCLKLHPNSQPLFAFEWRDPEKGNTGQLTWTRLPQGFKNSPTLFNEALHRDLASFRALNPQVVMLQYVDDLLVAAPTYRDCKEGTRRLLQELSKLGYRVSAKKAQLCREEVTYLGYLLKGGKRWLTPARKATVMKIPTPTTPRQVREFLGTAGFCRLWIPGFASLAAPLYPLTRPKVPFTWTEAHQEAFGRIKEALLSAPALALPDLTKPFALYVDEKEGVARGVLTQTLGPWRRPVAYLSKKLDPVASGWPTCLKAIAAVALLLKDADKLTLGQNVLVIAPHNLESIVRQPPDRWMTNARMTHYQSLLLNERVSFAPPAILNPATLLPVESDDTPIHICSEILAEETGTRPDLRDQPLPGVPAWYTDGSSFIMDGRRQAGAAIVDNKRTVWASNLPEGTSAQKAELIALTQALRLAEGKSINIYTDSRYAFATAHVHGAIYKQRGWLTSAGKDIKNKEEILALLEAIHLPKRVAIIHCPGHQRGTDPVATGNRKADEAAKQAAQSTRILTETTKNAGKRTADGSEFEKRTADGSEFESPKKKAKVE

SEQ ID NO: 7657 - protein, 2131 aa, synthetic construct
MPAAKRVKLDGGDKKYSIGLDIGTNSVGWAVITDEYKVPSKKFKVLGNTDRHSIKKNLIGALLFDSGETAEATRLKRTARRRYTRRKNRICYLQEIFSNEMAKVDDSFFHRLEESFLVEEDKKHERHPIFGNIVDEVAYHEKYPTIYHLRKKLVDSTDKADLRLIYLALAHMIKFRGHFLIEGDLNPDNSDVDKLFIQLVQTYNQLFEENPINASGVDAKAILSARLSKSRRLENLIAQLPGEKKNGLFGNLIALSLGLTPNFKSNFDLAEDAKLQLSKDTYDDDLDNLLAQIGDQYADLFLAAKNLSDAILLSDILRVNTEITKAPLSASMIKRYDEHHQDLTLLKALVRQQLPEKYKEIFFDQSKNGYAGYIDGGASQEEFYKFIKPILEKMDGTEELLVKLNREDLLRKQRTFDNGSIPHQIHLGELHAILRRQEDFYPFLKDNREKIEKILTFRIPYYVGPLARGNSRFAWMTRKSEETITPWNFEEVVDKGASAQSFIERMTNFDKNLPNEKVLPKHSLLYEYFTVYNELTKVKYVTEGMRKPAFLSGEQKKAIVDLLFKTNRKVTVKQLKEDYFKKIECFDSVEISGVEDRFNASLGTYHDLLKIIKDKDFLDNEENEDILEDIVLTLTLFEDREMIEERLKTYAHLFDDKVMKQLKRRRYTGWGRLSRKLINGIRDKQSGKTILDFLKSDGFANRNFMQLIHDDSLTFKEDIQKAQVSGQGDSLHEHIANLAGSPAIKKGILQTVKVVDELVKVMGRHKPENIVIEMARENQTTQKGQKNSRERMKRIEEGIKELGSQILKEHPVENTQLQNEKLYLYYLQNGRDMYVDQELDINRLSDYDVDHIVPQSFLKDDSIDNKVLTRSDKARGKSDNVPSEEVVKKMKNYWRQLLNAKLITQRKFDNLTKAERGGLSELDKAGFIKRQLVETRQITKHVAQILDSRMNTKYDENDKLIREVKVITLKSKLVSDFRKDFQFYKVREINNYHHAHDAYLNAVVGTALIKKYPKLESEFVYGDYKVYDVRKMIAKSEQEIGKATAKYFFYSNIMNFFKTEITLANGEIRKRPLIETNGETGEIVWDKGRDFATVRKVLSMPQVNIVKKTEVQTGGFSKESILPKRNSDKLIARKKDWDPKKYGGFDSPTVAYSVLVVAKVEKGKSKKLKSVKELLGITIMERSSFEKNPIDFLEAKGYKEVKKDLIIKLPKYSLFELENGRKRMLASAGELQKGNELALPSKYVNFLYLASHYEKLKGSPEDNEQKQLFVEQHKHYLDEIIEQISEFSKRVILADANLDKVLSAYNKHRDKPIREQAENIIHLFTLTNLGAPAAFKYFDTTIDRKRYTSTKEVLDATLIHQSITGLYETRIDLSQLGGDGGAEAAAKEAAAKEAAAKEAAAKALEAEAAAKEAAAKEAAAKEAAAKAGGTLNLEDEYRLYETSAEPEVSPGSTWLSDFPQAWAETGGMGLAVRQAPLIIPLKATSTPVSIKQYPMSQEAKLGIKPHIQRLLDQGILVPCQSPWNTPLLPVKKPGTNDYRPVQDLREVNKRVEDIHPTVPNPYNLLSGLPPSHRWYTVLDLKDAFFCLRLHPTSQPLFAFEWRDPGMGISGQLTWTRLPQGFKNSPTLFNEALHRDLADFRIQHPDLILLQYVDDILLAATSELDCQQGTRALLLTLGNLGYRASAKKAQLCQKQVKYLGYLLKEGQRWLTEARKETVMGQPTPKTPRQLREFLGTAGFCRLWIPGFAEMAAPLYPLTKPGTLFNWGPDQQKAYQEIKQALLTAPALGLPDLTKPFELFVDEKQGYAKGVLTQKLGPWRRPVAYLSKKLDPVAAGWPPCLRMVAAIAVLRKDAGKLTMGQPLVILAPHAVEALVKQPPDRWLSNARMTHYQAMLLDTDRVQFGPVVALNPATLLPLPEEGAPHDCLEILAETHGTRPDLTDQPIPDADHTWYTDGSSFLQEGQRKAGAAVTTETEVIWARALPAGTSAQRAELIALTQALKMAEGKRLNVYTDSRYAFATAHIHGEIYRRRGWLTSEGREIKNKSEILALLKALFLPKRLSIIHCLGHQKGDSAEARGNRLADQAAREAAIKTPPDTSTLLAGKRTADGSEFEKRTADGSEFESPKKKAKVE

SEQ ID NO: 7658 - protein, 2131 aa, synthetic construct
MPAAKRVKLDGGDKKYSIGLDIGTNSVGWAVITDEYKVPSKKFKVLGNTDRHSIKKNLIGALLFDSGETAEATRLKRTARRRYTRRKNRICYLQEIFSNEMAKVDDSFFHRLEESFLVEEDKKHERHPIFGNIVDEVAYHEKYPTIYHLRKKLVDSTDKADLRLIYLALAHMIKFRGHFLIEGDLNPDNSDVDKLFIQLVQTYNQLFEENPINASGVDAKAILSARLSKSRRLENLIAQLPGEKKNGLFGNLIALSLGLTPNFKSNFDLAEDAKLQLSKDTYDDDLDNLLAQIGDQYADLFLAAKNLSDAILLSDILRVNTEITKAPLSASMIKRYDEHHQDLTLLKALVRQQLPEKYKEIFFDQSKNGYAGYIDGGASQEEFYKFIKPILEKMDGTEELLVKLNREDLLRKQRTFDNGSIPHQIHLGELHAILRRQEDFYPFLKDNREKIEKILTFRIPYYVGPLARGNSRFAWMTRKSEETITPWNFEEVVDKGASAQSFIERMTNFDKNLPNEKVLPKHSLLYEYFTVYNELTKVKYVTEGMRKPAFLSGEQKKAIVDLLFKTNRKVTVKQLKEDYFKKIECFDSVEISGVEDRFNASLGTYHDLLKIIKDKDFLDNEENEDILEDIVLTLTLFEDREMIEERLKTYAHLFDDKVMKQLKRRRYTGWGRLSRKLINGIRDKQSGKTILDFLKSDGFANRNFMQLIHDDSLTFKEDIQKAQVSGQGDSLHEHIANLAGSPAIKKGILQTVKVVDELVKVMGRHKPENIVIEMARENQTTQKGQKNSRERMKRIEEGIKELGSQILKEHPVENTQLQNEKLYLYYLQNGRDMYVDQELDINRLSDYDVDHIVPQSFLKDDSIDNKVLTRSDKARGKSDNVPSEEVVKKMKNYWRQLLNAKLITQRKFDNLTKAERGGLSELDKAGFIKRQLVETRQITKHVAQILDSRMNTKYDENDKLIREVKVITLKSKLVSDFRKDFQFYKVREINNYHHAHDAYLNAVVGTALIKKYPKLESEFVYGDYKVYDVRKMIAKSEQEIGKATAKYFFYSNIMNFFKTEITLANGEIRKRPLIETNGETGEIVWDKGRDFATVRKVLSMPQVNIVKKTEVQTGGFSKESILPKRNSDKLIARKKDWDPKKYGGFDSPTVAYSVLVVAKVEKGKSKKLKSVKELLGITIMERSSFEKNPIDFLEAKGYKEVKKDLIIKLPKYSLFELENGRKRMLASAGELQKGNELALPSKYVNFLYLASHYEKLKGSPEDNEQKQLFVEQHKHYLDEIIEQISEFSKRVILADANLDKVLSAYNKHRDKPIREQAENIIHLFTLTNLGAPAAFKYFDTTIDRKRYTSTKEVLDATLIHQSITGLYETRIDLSQLGGDGGAEAAAKEAAAKEAAAKEAAAKALEAEAAAKEAAAKEAAAKEAAAKAGGTLNIEDEYRLHETSKEPDVSLGSTWLSDFPQAWAETGGMGLAVRQAPLIIPLKATSTPVSIKQYPMSQEARLGIKPHIQRLLDQGILVPCQSPWNTPLLPVKKPGTNDYRPVQDLREVNKRVEDIHPTVPNPYNLLSGLPPSHQWYTVLDLKDAFFCLRLHPTSQPLFAFEWRDPEMGISGQLTWTRLPQGFKNSPTLFNEALHRDLAGFRIQHPDLILLQYVDDLLLAATSELDCQQGTRALLQTLGDLGYRASAKKAQICQKQVKYLGYLLKEGQRWLTEARKETVMGQPIPKTPRQLREFLGTAGFCRLWIPGFAEMAAPLYPLTKPGTLFNWGPDQQKAFQEIKQALLTAPALGLPDLTKPFELFVDEKQGYAKGVLTQKLGPWRRPVAYLSKKLDPVAAGWPPCLRMVAAIAVLTKDAGKLTMGQPLVILAPHAVEALVKQPPDRWLSNARMTHYQALLLDTDRVQFGPVVALNPATLLPLPEEGLQHDCLDILAEAHGTRSDLMDQPLPDADHTWYTDGSSFLQEGQRKAGAAVTTETEVIWARALPAGTSAQRAELIALTQALKMAEGKKLNVYTDSRYAFATAHIHGEIYRRRGWLTSEGKEIKNKDEILALLKALFLPKRLSIIHCPGHQKGNSAEARGNRMADQAAREVATRETPETSTLLAGKRTADGSEFEKRTADGSEFESPKKKAKVE

SEQ ID NO: 7659 - protein, 2131 aa, synthetic construct
MPAAKRVKLDGGDKKYSIGLDIGTNSVGWAVITDEYKVPSKKFKVLGNTDRHSIKKNLIGALLFDSGETAEATRLKRTARRRYTRRKNRICYLQEIFSNEMAKVDDSFFHRLEESFLVEEDKKHERHPIFGNIVDEVAYHEKYPTIYHLRKKLVDSTDKADLRLIYLALAHMIKFRGHFLIEGDLNPDNSDVDKLFIQLVQTYNQLFEENPINASGVDAKAILSARLSKSRRLENLIAQLPGEKKNGLFGNLIALSLGLTPNFKSNFDLAEDAKLQLSKDTYDDDLDNLLAQIGDQYADLFLAAKNLSDAILLSDILRVNTEITKAPLSASMIKRYDEHHQDLTLLKALVRQQLPEKYKEIFFDQSKNGYAGYIDGGASQEEFYKFIKPILEKMDGTEELLVKLNREDLLRKQRTFDNGSIPHQIHLGELHAILRRQEDFYPFLKDNREKIEKILTFRIPYYVGPLARGNSRFAWMTRKSEETITPWNFEEVVDKGASAQSFIERMTNFDKNLPNEKVLPKHSLLYEYFTVYNELTKVKYVTEGMRKPAFLSGEQKKAIVDLLFKTNRKVTVKQLKEDYFKKIECFDSVEISGVEDRFNASLGTYHDLLKIIKDKDFLDNEENEDILEDIVLTLTLFEDREMIEERLKTYAHLFDDKVMKQLKRRRYTGWGRLSRKLINGIRDKQSGKTILDFLKSDGFANRNFMQLIHDDSLTFKEDIQKAQVSGQGDSLHEHIANLAGSPAIKKGILQTVKVVDELVKVMGRHKPENIVIEMARENQTTQKGQKNSRERMKRIEEGIKELGSQILKEHPVENTQLQNEKLYLYYLQNGRDMYVDQELDINRLSDYDVDHIVPQSFLKDDSIDNKVLTRSDKARGKSDNVPSEEVVKKMKNYWRQLLNAKLITQRKFDNLTKAERGGLSELDKAGFIKRQLVETRQITKHVAQILDSRMNTKYDENDKLIREVKVITLKSKLVSDFRKDFQFYKVREINNYHHAHDAYLNAVVGTALIKKYPKLESEFVYGDYKVYDVRKMIAKSEQEIGKATAKYFFYSNIMNFFKTEITLANGEIRKRPLIETNGETGEIVWDKGRDFATVRKVLSMPQVNIVKKTEVQTGGFSKESILPKRNSDKLIARKKDWDPKKYGGFDSPTVAYSVLVVAKVEKGKSKKLKSVKELLGITIMERSSFEKNPIDFLEAKGYKEVKKDLIIKLPKYSLFELENGRKRMLASAGELQKGNELALPSKYVNFLYLASHYEKLKGSPEDNEQKQLFVEQHKHYLDEIIEQISEFSKRVILADANLDKVLSAYNKHRDKPIREQAENIIHLFTLTNLGAPAAFKYFDTTIDRKRYTSTKEVLDATLIHQSITGLYETRIDLSQLGGDGGAEAAAKEAAAKEAAAKEAAAKALEAEAAAKEAAAKEAAAKEAAAKAGGTLNIEDEYRLHETSKGPDVPLGSTWLSDFPQAWAETGGMGLAFRQAPLIISLKATSTPVSIKQYPMSQEARLGIKPHIQRLLDQGILVPCQSPWNTPLLPVKKPGTNDYRPVQDLREVNKRVEDIHPTVPNPYNLLSGLPPSHQWYTVLDLKDAFFCLRLHPTSQSLFAFEWKDPEMGISGQLTWTRLPQGFKNSPTLFNEALHRDLADFRIQHPDLILLQYVDDLLLAATSELDCQQGTRALLQTLGDLGYRASAKKAQICQKQVKYLGYLLKEGQRWLTEARKETVMGQPTPKTPRQLREFLGKAGLCRLFIPGFAEMAAPLYPLTKPGTLFKWGPDQQKAYQEIKQALLTAPALGLPDLTKPFELFVDEKQGYAKGVLTQKLGPWRRPVAYLSKKLDPVAAGWPPCLRMVAAIAVLTKDVGKLTMGQPLVILAPHAVEALVKQPPDRWLSNARMTHYQALLLDTDRVQFGPIVALNPATLLPLPEEGLQHDCLDILAEAHGTRPDLTDQPLPDADHTWYTDGSSFLQEGQRRAGAAVTTETEVIWAKALPAGTSAQRAELIALTQALKMAAGKKLNVYTDSRYAFATAHIHGEIYRRRGWLTSEGKEIKNKDEILALLKALFLPKRLSIIHCPGHQKGNHAEARGNRMADQAAREVATRETPETSTLLAGKRTADGSEFEKRTADGSEFESPKKKAKVE

SEQ ID NO: 7660 - protein, 2131 aa, synthetic construct; identical to SEQ ID NO: 4540

SEQ ID NO: 7661 - protein, 2151 aa, synthetic construct
MPAAKRVKLDGGDKKYSIGLDIGTNSVGWAVITDEYKVPSKKFKVLGNTDRHSIKKNLIGALLFDSGETAEATRLKRTARRRYTRRKNRICYLQEIFSNEMAKVDDSFFHRLEESFLVEEDKKHERHPIFGNIVDEVAYHEKYPTIYHLRKKLVDSTDKADLRLIYLALAHMIKFRGHFLIEGDLNPDNSDVDKLFIQLVQTYNQLFEENPINASGVDAKAILSARLSKSRRLENLIAQLPGEKKNGLFGNLIALSLGLTPNFKSNFDLAEDAKLQLSKDTYDDDLDNLLAQIGDQYADLFLAAKNLSDAILLSDILRVNTEITKAPLSASMIKRYDEHHQDLTLLKALVRQQLPEKYKEIFFDQSKNGYAGYIDGGASQEEFYKFIKPILEKMDGTEELLVKLNREDLLRKQRTFDNGSIPHQIHLGELHAILRRQEDFYPFLKDNREKIEKILTFRIPYYVGPLARGNSRFAWMTRKSEETITPWNFEEVVDKGASAQSFIERMTNFDKNLPNEKVLPKHSLLYEYFTVYNELTKVKYVTEGMRKPAFLSGEQKKAIVDLLFKTNRKVTVKQLKEDYFKKIECFDSVEISGVEDRFNASLGTYHDLLKIIKDKDFLDNEENEDILEDIVLTLTLFEDREMIEERLKTYAHLFDDKVMKQLKRRRYTGWGRLSRKLINGIRDKQSGKTILDFLKSDGFANRNFMQLIHDDSLTFKEDIQKAQVSGQGDSLHEHIANLAGSPAIKKGILQTVKVVDELVKVMGRHKPENIVIEMARENQTTQKGQKNSRERMKRIEEGIKELGSQILKEHPVENTQLQNEKLYLYYLQNGRDMYVDQELDINRLSDYDVDHIVPQSFLKDDSIDNKVLTRSDKARGKSDNVPSEEVVKKMKNYWRQLLNAKLITQRKFDNLTKAERGGLSELDKAGFIKRQLVETRQITKHVAQILDSRMNTKYDENDKLIREVKVITLKSKLVSDFRKDFQFYKVREINNYHHAHDAYLNAVVGTALIKKYPKLESEFVYGDYKVYDVRKMIAKSEQEIGKATAKYFFYSNIMNFFKTEITLANGEIRKRPLIETNGETGEIVWDKGRDFATVRKVLSMPQVNIVKKTEVQTGGFSKESILPKRNSDKLIARKKDWDPKKYGGFDSPTVAYSVLVVAKVEKGKSKKLKSVKELLGITIMERSSFEKNPIDFLEAKGYKEVKKDLIIKLPKYSLFELENGRKRMLASAGELQKGNELALPSKYVNFLYLASHYEKLKGSPEDNEQKQLFVEQHKHYLDEIIEQISEFSKRVILADANLDKVLSAYNKHRDKPIREQAENIIHLFTLTNLGAPAAFKYFDTTIDRKRYTSTKEVLDATLIHQSITGLYETRIDLSQLGGDGGAEAAAKEAAAKEAAAKEAAAKALEAEAAAKEAAAKEAAAKEAAAKAGGWVQEISDSRPMLHIYLNGRRFLGLLNTGADKTCIAGRDWPANWPIHQTESSLQGLGMACGVARSSQPLRWQHEDKSGIIHPFVIPTLPFTLWGRDIMKDIKVRLMTDSPDDSQDLMIGAIESNLFADQISWKSDQPVWLNQWPLKQEKLQALQQLVTEQLQLGHLEESNSPWNTPVFVIKKKSGKWRLLQDLRAVNATMHDMGALQPGLPSPVAVPKGWEIIIIDLQDCFFNIKLHPEDCKRFAFSVPSPNFKRPYQRFQWKVLPQGMKNSPTLCQKFVDKAILTVRDKYQDSYIVHYMDDILLAHPSRSIVDEILTSMIQALNKHGLVVSTEKIQKYDNLKYLGTHIQGDSVSYQKLQIRTDKLRTLNDFQKLLGNINWIRPFLKLTTGELKPLFEILNPDSNPISTRKLTPEACKALQLMNERLSTARVKRLDLSQPWSLCILKTEYTPTACLWQDGVVEWIHLPHISPKVITPYDIFCTQLIIKGRHRSKELFSKDPDYIVVPYTKVQFDLLLQEKEDWPISLLGFLGEVHFHLPKDPLLTFTLQTAIIFPHMTSTTPLEKGIVIFTDGSANGRSVTYIQGREPIIKENTQNTAQQAEIVAVITAFEEVSQPFNLYTDSKYVTGLFPEIETATLSPRTKIYTELKHLQRLIHKRQEKFYIGHIRGHTGLPGPLAQGNAYADSLTRILTAGKRTADGSEFEKRTADGSEFESPKKKAKVE

SEQ ID NO: 7662 - protein, 2122 aa, synthetic construct
MPAAKRVKLDGGDKKYSIGLDIGTNSVGWAVITDEYKVPSKKFKVLGNTDRHSIKKNLIGALLFDSGETAEATRLKRTARRRYTRRKNRICYLQEIFSNEMAKVDDSFFHRLEESFLVEEDKKHERHPIFGNIVDEVAYHEKYPTIYHLRKKLVDSTDKADLRLIYLALAHMIKFRGHFLIEGDLNPDNSDVDKLFIQLVQTYNQLFEENPINASGVDAKAILSARLSKSRRLENLIAQLPGEKKNGLFGNLIALSLGLTPNFKSNFDLAEDAKLQLSKDTYDDDLDNLLAQIGDQYADLFLAAKNLSDAILLSDILRVNTEITKAPLSASMIKRYDEHHQDLTLLKALVRQQLPEKYKEIFFDQSKNGYAGYIDGGASQEEFYKFIKPILEKMDGTEELLVKLNREDLLRKQRTFDNGSIPHQIHLGELHAILRRQEDFYPFLKDNREKIEKILTFRIPYYVGPLARGNSRFAWMTRKSEETITPWNFEEVVDKGASAQSFIERMTNFDKNLPNEKVLPKHSLLYEYFTVYNELTKVKYVTEGMRKPAFLSGEQKKAIVDLLFKTNRKVTVKQLKEDYFKKIECFDSVEISGVEDRFNASLGTYHDLLKIIKDKDFLDNEENEDILEDIVLTLTLFEDREMIEERLKTYAHLFDDKVMKQLKRRRYTGWGRLSRKLINGIRDKQSGKTILDFLKSDGFANRNFMQLIHDDSLTFKEDIQKAQVSGQGDSLHEHIANLAGSPAIKKGILQTVKVVDELVKVMGRHKPENIVIEMARENQTTQKGQKNSRERMKRIEEGIKELGSQILKEHPVENTQLQNEKLYLYYLQNGRDMYVDQELDINRLSDYDVDHIVPQSFLKDDSIDNKVLTRSDKARGKSDNVPSEEVVKKMKNYWRQLLNAKLITQRKFDNLTKAERGGLSELDKAGFIKRQLVETRQITKHVAQILDSRMNTKYDENDKLIREVKVITLKSKLVSDFRKDFQFYKVREINNYHHAHDAYLNAVVGTALIKKYPKLESEFVYGDYKVYDVRKMIAKSEQEIGKATAKYFFYSNIMNFFKTEITLANGEIRKRPLIETNGETGEIVWDKGRDFATVRKVLSMPQVNIVKKTEVQTGGFSKESILPKRNSDKLIARKKDWDPKKYGGFDSPTVAYSVLVVAKVEKGKSKKLKSVKELLGITIMERSSFEKNPIDFLEAKGYKEVKKDLIIKLPKYSLFELENGRKRMLASAGELQKGNELALPSKYVNFLYLASHYEKLKGSPEDNEQKQLFVEQHKHYLDEIIEQISEFSKRVILADANLDKVLSAYNKHRDKPIREQAENIIHLFTLTNLGAPAAFKYFDTTIDRKRYTSTKEVLDATLIHQSITGLYETRIDLSQLGGDGGAEAAAKEAAAKEAAAKEAAAKALEAEAAAKEAAAKEAAAKEAAAKAGGVPWLMKKPLQLTVLVPLHEYQERLLQQTALPKEQKELLQKLFLKYDALWQHWENQVGHRRIKPHNIATGTLAPRPQKQYPINPKAKPSIQIVIDDLLKQGVLIQQNSTMNTPVYPVPKPDGKWRMVLDYREVNKTIPLIAAQNQHSAGILSSIYRGKYKTTLDLTNGFWAHPITPESYWLTAFTWQGKQYCWTRLPQGFLNSPALFTADVVDLLKEIPNVQAYVDDIYISHDDPQEHLEQLEKIFSILLNAGYVVSLKKSEIAQREVEFLGFNITKEGRGLTDTFKQKLLNITPPKDLKQLQSILGLLNFARNFIPNYSELVKPLYTIVANANGKFISWTEDNSNQLQHIISVLNQADNLEERNPETRLIIKVNSSPSAGYIRYYNEGSKRPIMYVNYIFSKAEAKFTQTEKLLTTMHKGLIKAMDLAMGQEILVYSPIVSMTKIQRTPLPERKALPVRWITWMTYLEDPRIQFHYDKSLPELQQIPNVTEDVIAKTKHPSEFAMVFYTDGSAIKHPDVNKSHSAGMGIAQVQFIPEYKIVHQWSIPLGDHTAQLAEIAAVEFACKKALKISGPVLIVTDSFYVAESANKELPYWKSNGFLNNKKKPLRHVSKWKSIAECLQLKPDIIIMHEKGHQQPMTTLHTEGNNLADKLATQGSYVVHAGKRTADGSEFEKRTADGSEFESPKKKAKVE

SEQ ID NO: 7663 - protein, 2122 aa, synthetic construct
MPAAKRVKLDGGDKKYSIGLDIGTNSVGWAVITDEYKVPSKKFKVLGNTDRHSIKKNLIGALLFDSGETAEATRLKRTARRRYTRRKNRICYLQEIFSNEMAKVDDSFFHRLEESFLVEEDKKHERHPIFGNIVDEVAYHEKYPTIYHLRKKLVDSTDKADLRLIYLALAHMIKFRGHFLIEGDLNPDNSDVDKLFIQLVQTYNQLFEENPINASGVDAKAILSARLSKSRRLENLIAQLPGEKKNGLFGNLIALSLGLTPNFKSNFDLAEDAKLQLSKDTYDDDLDNLLAQIGDQYADLFLAAKNLSDAILLSDILRVNTEITKAPLSASMIKRYDEHHQDLTLLKALVRQQLPEKYKEIFFDQSKNGYAGYIDGGASQEEFYKFIKPILEKMDGTEELLVKLNREDLLRKQRTFDNGSIPHQIHLGELHAILRRQEDFYPFLKDNREKIEKILTFRIPYYVGPLARGNSRFAWMTRKSEETITPWNFEEVVDKGASAQSFIERMTNFDKNLPNEKVLPKHSLLYEYFTVYNELTKVKYVTEGMRKPAFLSGEQKKAIVDLLFKTNRKVTVKQLKEDYFKKIECFDSVEISGVEDRFNASLGTYHDLLKIIKDKDFLDNEENEDILEDIVLTLTLFEDREMIEERLKTYAHLFDDKVMKQLKRRRYTGWGRLSRKLINGIRDKQSGKTILDFLKSDGFANRNFMQLIHDDSLTFKEDIQKAQVSGQGDSLHEHIANLAGSPAIKKGILQTVKVVDELVKVMGRHKPENIVIEMARENQTTQKGQKNSRERMKRIEEGIKELGSQILKEHPVENTQLQNEKLYLYYLQNGRDMYVDQELDINRLSDYDVDHIVPQSFLKDDSIDNKVLTRSDKARGKSDNVPSEEVVKKMKNYWRQLLNAKLITQRKFDNLTKAERGGLSELDKAGFIKRQLVETRQITKHVAQILDSRMNTKYDENDKLIREVKVITLKSKLVSDFRKDFQFYKVREINNYHHAHDAYLNAVVGTALIKKYPKLESEFVYGDYKVYDVRKMIAKSEQEIGKATAKYFFYSNIMNFFKTEITLANGEIRKRPLIETNGETGEIVWDKGRDFATVRKVLSMPQVNIVKKTEVQTGGFSKESILPKRNSDKLIARKKDWDPKKYGGFDSPTVAYSVLVVAKVEKGKSKKLKSVKELLGITIMERSSFEKNPIDFLEAKGYKEVKKDLIIKLPKYSLFELENGRKRMLASAGELQKGNELALPSKYVNFLYLASHYEKLKGSPEDNEQKQLFVEQHKHYLDEIIEQISEFSKRVILADANLDKVLSAYNKHRDKPIREQAENIIHLFTLTNLGAPAAFKYFDTTIDRKRYTSTKEVLDATLIHQSITGLYETRIDLSQLGGDGGAEAAAKEAAAKEAAAKEAAAKALEAEAAAKEAAAKEAAAKEAAAKAGGVPWLMKKPLQLTVLVPLHEYQERLLQQTALPKEQKELLQKLFLKYDALWQHWENQVGHRRIKPHNIATGTLAPRPQKQYPINPKAKPSIQIVIDDLLKQGVLIQQNSTMNTPVYPVPKPDGKWRMVLDYREVNKTIPLIAAQNQHSAGILSSIYRGKYKTTLDLTNGFWAHPITPESYWLTAFTWQGKQYCWTRLPQGFLNSPALFNADVVDLLKEIPNVQAYVDDIYISHDDPQEHLEQLEKIFSILLNAGYVVSLKKSEIAQREVEFLGFNITKEGRGLTDTFKQKLLNITPPKDLKQLQSILGLLNFARNFIPNYSELVKPLYTIVAPANGKFISWTEDNSNQLQHIISVLNQADNLEERNPETRLIIKVNSSPSAGYIRYYNEGSKRPIMYVNYIFSKAEAKFTQTEKLLTTMHKGLIKAMDLAMGQEILVYSPIVSMTKIQRTPLPERKALPVRWITWMTYLEDPRIQFHYDKSLPELQQIPNVTEDVIAKTKHPSEFAMVFYTDGSAIKHPDVNKSHSAGMGIAQVQFIPEYKIVHQWSIPLGDHTAQLAEIAAVEFACKKALKISGPVLIVTDSFYVAESANKELPYWKSNGFLNNKKKPLRHVSKWKSIAECLQLKPDIIIMHEKGHQQPMTTLHTEGNNLADKLATQGSYVVHAGKRTADGSEFEKRTADGSEFESPKKKAKVE

SEQ ID NO: 7664 - protein, 2122 aa, synthetic construct
MPAAKRVKLDGGDKKYSIGLDIGTNSVGWAVITDEYKVPSKKFKVLGNTDRHSIKKNLIGALLFDSGETAEATRLKRTARRRYTRRKNRICYLQEIFSNEMAKVDDSFFHRLEESFLVEEDKKHERHPIFGNIVDEVAYHEKYPTIYHLRKKLVDSTDKADLRLIYLALAHMIKFRGHFLIEGDLNPDNSDVDKLFIQLVQTYNQLFEENPINASGVDAKAILSARLSKSRRLENLIAQLPGEKKNGLFGNLIALSLGLTPNFKSNFDLAEDAKLQLSKDTYDDDLDNLLAQIGDQYADLFLAAKNLSDAILLSDILRVNTEITKAPLSASMIKRYDEHHQDLTLLKALVRQQLPEKYKEIFFDQSKNGYAGYIDGGASQEEFYKFIKPILEKMDGTEELLVKLNREDLLRKQRTFDNGSIPHQIHLGELHAILRRQEDFYPFLKDNREKIEKILTFRIPYYVGPLARGNSRFAWMTRKSEETITPWNFEEVVDKGASAQSFIERMTNFDKNLPNEKVLPKHSLLYEYFTVYNELTKVKYVTEGMRKPAFLSGEQKKAIVDLLFKTNRKVTVKQLKEDYFKKIECFDSVEISGVEDRFNASLGTYHDLLKIIKDKDFLDNEENEDILEDIVLTLTLFEDREMIEERLKTYAHLFDDKVMKQLKRRRYTGWGRLSRKLINGIRDKQSGKTILDFLKSDGFANRNFMQLIHDDSLTFKEDIQKAQVSGQGDSLHEHIANLAGSPAIKKGILQTVKVVDELVKVMGRHKPENIVIEMARENQTTQKGQKNSRERMKRIEEGIKELGSQILKEHPVENTQLQNEKLYLYYLQNGRDMYVDQELDINRLSDYDVDHIVPQSFLKDDSIDNKVLTRSDKARGKSDNVPSEEVVKKMKNYWRQLLNAKLITQRKFDNLTKAERGGLSELDKAGFIKRQLVETRQITKHVAQILDSRMNTKYDENDKLIREVKVITLKSKLVSDFRKDFQFYKVREINNYHHAHDAYLNAVVGTALIKKYPKLESEFVYGDYKVYDVRKMIAKSEQEIGKATAKYFFYSNIMNFFKTEITLANGEIRKRPLIETNGETGEIVWDKGRDFATVRKVLSMPQVNIVKKTEVQTGGFSKESILPKRNSDKLIARKKDWDPKKYGGFDSPTVAYSVLVVAKVEKGKSKKLKSVKELLGITIMERSSFEKNPIDFLEAKGYKEVKKDLIIKLPKYSLFELENGRKRMLASAGELQKGNELALPSKYVNFLYLASHYEKLKGSPEDNEQKQLFVEQHKHYLDEIIEQISEFSKRVILADANLDKVLSAYNKHRDKPIREQAENIIHLFTLTNLGAPAAFKYFDTTIDRKRYTSTKEVLDATLIHQSITGLYETRIDLSQLGGDGGAEAAAKEAAAKEAAAKEAAAKALEAEAAAKEAAAKEAAAKEAAAKAGGVPWLMKKPLQLTVLVPLHEYQERLLQQTALPKEQKELLQKLFLKYDALWQHWENQVGHRRIKPHNIATGTLAPRPQKQYPINPKAKPSIQIVIDDLLKQGVLIQQNSTMNTPVYPVPKPDGKWRMVLDYREVNKTIPLIAAQNQHSAGILSSIYRGKYKTTLDLTNGFWAHPITPESYWLTAFTWQGKQYCWTRLPQGFLNSPALFNADVVDLLKEIPNVQAYVDDIYISHDDPQEHLEQLEKIFSILLNAGYVVSLKKSEIAQREVEFLGFNITKEGRGLTDTFKQKLLNITPPKDLKQLQSILGKLNFARNFIPNYSELVKPLYTIVAPANGKFISWTEDNSNQLQHIISVLNQADNLEERNPETRLIIKVNSSPSAGYIRYYNEGSKRPIMYVNYIFSKAEAKFTQTEKLLTTMHKGLIKAMDLAMGQEILVYSPIVSMTKIQRTPLPERKALPVRWITWMTYLEDPRIQFHYDKSLPELQQIPNVTEDVIAKTKHPSEFAMVFYTDGSAIKHPDVNKSHSAGMGIAQVQFIPEYKIVHQWSIPLGDHTAQLAEIAAVEFACKKALKISGPVLIVTDSFYVAESANKELPYWKSNGFLNNKKKPLRHVSKWKSIAECLQLKPDIIIMHEKGHQQPMTTLHTEGNNLADKLATQGSYVVHAGKRTADGSEFEKRTADGSEFESPKKKAKVE

SEQ ID NO: 7665 - protein, 2211 aa, synthetic construct
MPAAKRVKLDGGDKKYSIGLDIGTNSVGWAVITDEYKVPSKKFKVLGNTDRHSIKKNLIGALLFDSGETAEATRLKRTARRRYTRRKNRICYLQEIFSNEMAKVDDSFFHRLEESFLVEEDKKHERHPIFGNIVDEVAYHEKYPTIYHLRKKLVDSTDKADLRLIYLALAHMIKFRGHFLIEGDLNPDNSDVDKLFIQLVQTYNQLFEENPINASGVDAKAILSARLSKSRRLENLIAQLPGEKKNGLFGNLIALSLGLTPNFKSNFDLAEDAKLQLSKDTYDDDLDNLLAQIGDQYADLFLAAKNLSDAILLSDILRVNTEITKAPLSASMIKRYDEHHQDLTLLKALVRQQLPEKYKEIFFDQSKNGYAGYIDGGASQEEFYKFIKPILEKMDGTEELLVKLNREDLLRKQRTFDNGSIPHQIHLGELHAILRRQEDFYPFLKDNREKIEKILTFRIPYYVGPLARGNSRFAWMTRKSEETITPWNFEEVVDKGASAQSFIERMTNFDKNLPNEKVLPKHSLLYEYFTVYNELTKVKYVTEGMRKPAFLSGEQKKAIVDLLFKTNRKVTVKQLKEDYFKKIECFDSVEISGVEDRFNASLGTYHDLLKIIKDKDFLDNEENEDILEDIVLTLTLFEDREMIEERLKTYAHLFDDKVMKQLKRRRYTGWGRLSRKLINGIRDKQSGKTILDFLKSDGFANRNFMQLIHDDSLTFKEDIQKAQVSGQGDSLHEHIANLAGSPAIKKGILQTVKVVDELVKVMGRHKPENIVIEMARENQTTQKGQKNSRERMKRIEEGIKELGSQILKEHPVENTQLQNEKLYLYYLQNGRDMYVDQELDINRLSDYDVDHIVPQSFLKDDSIDNKVLTRSDKARGKSDNVPSEEVVKKMKNYWRQLLNAKLITQRKFDNLTKAERGGLSELDKAGFIKRQLVETRQITKHVAQILDSRMNTKYDENDKLIREVKVITLKSKLVSDFRKDFQFYKVREINNYHHAHDAYLNAVVGTALIKKYPKLESEFVYGDYKVYDVRKMIAKSEQEIGKATAKYFFYSNIMNFFKTEITLANGEIRKRPLIETNGETGEIVWDKGRDFATVRKVLSMPQVNIVKKTEVQTGGFSKESILPKRNSDKLIARKKDWDPKKYGGFDSPTVAYSVLVVAKVEKGKSKKLKSVKELLGITIMERSSFEKNPIDFLEAKGYKEVKKDLIIKLPKYSLFELENGRKRMLASAGELQKGNELALPSKYVNFLYLASHYEKLKGSPEDNEQKQLFVEQHKHYLDEIIEQISEFSKRVILADANLDKVLSAYNKHRDKPIREQAENIIHLFTLTNLGAPAAFKYFDTTIDRKRYTSTKEVLDATLIHQSITGLYETRIDLSQLGGDGGAEAAAKEAAAKEAAAKEAAAKALEAEAAAKEAAAKEAAAKEAAAKAGGMDPLQLLQPLEAEIKGTKLKAHWNSGATITCVPEAFLEDERPIQTMLIKTIHGEKQQDVYYLTFKVQGRKVEAEVLASPYDYILLNPSDVPWLMKKPLQLTVLVPLHEYQERLLQQTALPKEQKELLQKLFLKYDALWQHWENQVGHRRIKPHNIATGTLAPRPQKQYPINPKAKPSIQIVIDDLLKQGVLIQQNSTMNTPVYPVPKPDGKWRMVLDYREVNKTIPLIAAQNQHSAGILSSIYRGKYKTTLDLTNGFWAHPITPESYWLTAFTWQGKQYCWTRLPQGFLNSPALFNADVVDLLKEIPNVQAYVDDIYISHDDPQEHLEQLEKIFSILLNAGYVVSLKKSEIAQREVEFLGFNITKEGRGLTDTFKQKLLNITPPKDLKQLQSILGLLNFARNFIPNYSELVKPLYTIVAPANGKFISWTEDNSNQLQHIISVLNQADNLEERNPETRLIIKVNSSPSAGYIRYYNEGSKRPIMYVNYIFSKAEAKFTQTEKLLTTMHKGLIKAMDLAMGQEILVYSPIVSMTKIQRTPLPERKALPVRWITWMTYLEDPRIQFHYDKSLPELQQIPNVTEDVIAKTKHPSEFAMVFYTDGSAIKHPDVNKSHSAGMGIAQVQFIPEYKIVHQWSIPLGDHTAQLAEIAAVEFACKKALKISGPVLIVTDSFYVAESANKELPYWKSNGFLNNKKKPLRHVSKWKSIAECLQLKPDIIIMHEKGHQQPMTTLHTEGNNLADKLATQGSYVVHAGKRTADGSEFEKRTADGSEFESPKKKAKVE

SEQ ID NO: 7666 - protein, 2122 aa, synthetic construct
MPAAKRVKLDGGDKKYSIGLDIGTNSVGWAVITDEYKVPSKKFKVLGNTDRHSIKKNLIGALLFDSGETAEATRLKRTARRRYTRRKNRICYLQEIFSNEMAKVDDSFFHRLEESFLVEEDKKHERHPIFGNIVDEVAYHEKYPTIYHLRKKLVDSTDKADLRLIYLALAHMIKFRGHFLIEGDLNPDNSDVDKLFIQLVQTYNQLFEENPINASGVDAKAILSARLSKSRRLENLIAQLPGEKKNGLFGNLIALSLGLTPNFKSNFDLAEDAKLQLSKDTYDDDLDNLLAQIGDQYADLFLAAKNLSDAILLSDILRVNTEITKAPLSASMIKRYDEHHQDLTLLKALVRQQLPEKYKEIFFDQSKNGYAGYIDGGASQEEFYKFIKPILEKMDGTEELLVKLNREDLLRKQRTFDNGSIPHQIHLGELHAILRRQEDFYPFLKDNREKIEKILTFRIPYYVGPLARGNSRFAWMTRKSEETITPWNFEEVVDKGASAQSFIERMTNFDKNLPNEKVLPKHSLLYEYFTVYNELTKVKYVTEGMRKPAFLSGEQKKAIVDLLFKTNRKVTVKQLKEDYFKKIECFDSVEISGVEDRFNASLGTYHDLLKIIKDKDFLDNEENEDILEDIVLTLTLFEDREMIEERLKTYAHLFDDKVMKQLKRRRYTGWGRLSRKLINGIRDKQSGKTILDFLKSDGFANRNFMQLIHDDSLTFKEDIQKAQVSGQGDSLHEHIANLAGSPAIKKGILQTVKVVDELVKVMGRHKPENIVIEMARENQTTQKGQKNSRERMKRIEEGIKELGSQILKEHPVENTQLQNEKLYLYYLQNGRDMYVDQELDINRLSDYDVDHIVPQSFLKDDSIDNKVLTRSDKARGKSDNVPSEEVVKKMKNYWRQLLNAKLITQRKFDNLTKAERGGLSELDKAGFIKRQLVETRQITKHVAQILDSRMNTKYDENDKLIREVKVITLKSKLVSDFRKDFQFYKVREINNYHHAHDAYLNAVVGTALIKKYPKLESEFVYGDYKVYDVRKMIAKSEQEIGKATAKYFFYSNIMNFFKTEITLANGEIRKRPLIETNGETGEIVWDKGRDFATVRKVLSMPQVNIVKKTEVQTGGFSKESILPKRNSDKLIARKKDWDPKKYGGFDSPTVAYSVLVVAKVEKGKSKKLKSVKELLGITIMERSSFEKNPIDFLEAKGYKEVKKDLIIKLPKYSLFELENGRKRMLASAGELQKGNELALPSKYVNFLYLASHYEKLKGSPEDNEQKQLFVEQHKHYLDEIIEQISEFSKRVILADANLDKVLSAYNKHRDKPIREQAENIIHLFTLTNLGAPAAFKYFDTTIDRKRYTSTKEVLDATLIHQSITGLYETRIDLSQLGGDGGAEAAAKEAAAKEAAAKEAAAKALEAEAAAKEAAAKEAAAKEAAAKAGGIPWLMKKPLQLTTLVPLQEYEERLLKQTMLTGSYKEKLQSLFLKYDALWQHWENQVGHRRIKPHHIATGTVNPRPQKQYPINPKAKASIQTVINDLLKQGVLIQQNSIMNTPVYPVPKPDGKWRMVLDYREVNKTIPLIAAQNQHSAGILSSIFRGKYKTTLDLSNGFWAHSITPESYWLTAFTWLGQQYCWTRLPQGFLNSPALFNADVVDLLKEVPNVQVYVDDIYISHDDPREHLEQLEKVFSLLLNAGYVVSLKKSEIAQHEVEFLGFNITKEGRGLTETFKQKLLNITPPRDLKQLQSILGLLNFARNFIPNFSELVKPLYNIIATAPGKYITWTTDNSQQLQNIISMLNSAENLEERNPEVRLIMKVNTSPSAGYIRFYNEFAKRPIMYLNYVYTKAEVKFTNTEKLLTTIHKGLIKALDLGMGQEILVYSPIVSMTKIQKTPLPERKALPIRWITWMSYLEDPRIQFHYDKTLPELQQVPTVTDDIIAKIKHPSEFSMVFYTDGSAIKHPNVNKSHNAGMGIAQVQFKPEFTVINTWSIPLGDHTAQLAEVAAVEFACKKALKIDGPVLIVTDSFYVAESVNKELPYWQSNGFFNNKKKPLKHVSKWKSIADCIQLKPDIIIIHEKGHQPTASTFHTEGNNLADKLATQGSYVVNAGKRTADGSEFEKRTADGSEFESPKKKAKVE

SEQ ID NO: 7667 - protein, 2122 aa, synthetic construct; identical to SEQ ID NO: 4541

SEQ ID NO: 7668 - protein, 2102 aa, synthetic construct
MPAAKRVKLDGGDKKYSIGLDIGTNSVGWAVITDEYKVPSKKFKVLGNTDRHSIKKNLIGALLFDSGETAEATRLKRTARRRYTRRKNRICYLQEIFSNEMAKVDDSFFHRLEESFLVEEDKKHERHPIFGNIVDEVAYHEKYPTIYHLRKKLVDSTDKADLRLIYLALAHMIKFRGHFLIEGDLNPDNSDVDKLFIQLVQTYNQLFEENPINASGVDAKAILSARLSKSRRLENLIAQLPGEKKNGLFGNLIALSLGLTPNFKSNFDLAEDAKLQLSKDTYDDDLDNLLAQIGDQYADLFLAAKNLSDAILLSDILRVNTEITKAPLSASMIKRYDEHHQDLTLLKALVRQQLPEKYKEIFFDQSKNGYAGYIDGGASQEEFYKFIKPILEKMDGTEELLVKLNREDLLRKQRTFDNGSIPHQIHLGELHAILRRQEDFYPFLKDNREKIEKILTFRIPYYVGPLARGNSRFAWMTRKSEETITPWNFEEVVDKGASAQSFIERMTNFDKNLPNEKVLPKHSLLYEYFTVYNELTKVKYVTEGMRKPAFLSGEQKKAIVDLLFKTNRKVTVKQLKEDYFKKIECFDSVEISGVEDRFNASLGTYHDLLKIIKDKDFLDNEENEDILEDIVLTLTLFEDREMIEERLKTYAHLFDDKVMKQLKRRRYTGWGRLSRKLINGIRDKQSGKTILDFLKSDGFANRNFMQLIHDDSLTFKEDIQKAQVSGQGDSLHEHIANLAGSPAIKKGILQTVKVVDELVKVMGRHKPENIVIEMARENQTTQKGQKNSRERMKRIEEGIKELGSQILKEHPVENTQLQNEKLYLYYLQNGRDMYVDQELDINRLSDYDVDHIVPQSFLKDDSIDNKVLTRSDKARGKSDNVPSEEVVKKMKNYWRQLLNAKLITQRKFDNLTKAERGGLSELDKAGFIKRQLVETRQITKHVAQILDSRMNTKYDENDKLIREVKVITLKSKLVSDFRKDFQFYKVREINNYHHAHDAYLNAVVGTALIKKYPKLESEFVYGDYKVYDVRKMIAKSEQEIGKATAKYFFYSNIMNFFKTEITLANGEIRKRPLIETNGETGEIVWDKGRDFATVRKVLSMPQVNIVKKTEVQTGGFSKESILPKRNSDKLIARKKDWDPKKYGGFDSPTVAYSVLVVAKVEKGKSKKLKSVKELLGITIMERSSFEKNPIDFLEAKGYKEVKKDLIIKLPKYSLFELENGRKRMLASAGELQKGNELALPSKYVNFLYLASHYEKLKGSPEDNEQKQLFVEQHKHYLDEIIEQISEFSKRVILADANLDKVLSAYNKHRDKPIREQAENIIHLFTLTNLGAPAAFKYFDTTIDRKRYTSTKEVLDATLIHQSITGLYETRIDLSQLGGDGGGGGGSEAAAKGGGGSGGTAPLEEEYRLFLEAPIQNVTLLEQWKREIPKVWAEINPPGLASTQAPIHVQLLSTALPVRVRQYPITLEAKRSLRETIRKFRAAGILRPVHSPWNTPLLPVRKSGTSEYRMVQDLREVNKRVETIHPTVPNPYTLLSLLPPDRIWYSVLDLKDAFFCIPLAPESQLIFAFEWADAEEGESGQLTWTRLPQGFKNSPTLFDEALNRDLQGFRLDHPSVSLLQYVDDLLIAADTQAACLSATRDLLMTLAELGYRVSGKKAQLCQEEVTYLGFKIHKGSRSLSNSRTQAILQIPVPKTKRQVREFLGTIGYCRLWIPGFAELAQPLYAATRGGNDPLVWGEKEEEAFQSLKLALTQPPALALPSLDKPFQLFVEETSGAAKGVLTQALGPWKRPVAYLSKRLDPVAAGWPRCLRAIAAAALLTREASKLTFGQDIEITSSHNLESLLRSPPDKWLTNARITQYQVLLLDPPRVRFKQTAALNPATLLPETDDTLPIHHCLDTLDSLTSTRPDLTDQPLAQAEATLFTDGSSYIRDGKRYAGAAVVTLDSVIWAEPLPIGTSAQKAELIALTKALEWSKDKSVNIYTDSRYAFATLHVHGMIYRERGLLTAGGKAIKNAPEILALLTAVWLPKRVAVMHCKGHQKDDAPTSTGNRRADEVAREVAIRPLSTQATISAGKRTADGSEFEKRTADGSEFESPKKKAKVE

SEQ ID NO: 7669 - protein, 2177 aa, synthetic construct
MPAAKRVKLDGGDKKYSIGLDIGTNSVGWAVITDEYKVPSKKFKVLGNTDRHSIKKNLIGALLFDSGETAEATRLKRTARRRYTRRKNRICYLQEIFSNEMAKVDDSFFHRLEESFLVEEDKKHERHPIFGNIVDEVAYHEKYPTIYHLRKKLVDSTDKADLRLIYLALAHMIKFRGHFLIEGDLNPDNSDVDKLFIQLVQTYNQLFEENPINASGVDAKAILSARLSKSRRLENLIAQLPGEKKNGLFGNLIALSLGLTPNFKSNFDLAEDAKLQLSKDTYDDDLDNLLAQIGDQYADLFLAAKNLSDAILLSDILRVNTEITKAPLSASMIKRYDEHHQDLTLLKALVRQQLPEKYKEIFFDQSKNGYAGYIDGGASQEEFYKFIKPILEKMDGTEELLVKLNREDLLRKQRTFDNGSIPHQIHLGELHAILRRQEDFYPFLKDNREKIEKILTFRIPYYVGPLARGNSRFAWMTRKSEETITPWNFEEVVDKGASAQSFIERMTNFDKNLPNEKVLPKHSLLYEYFTVYNELTKVKYVTEGMRKPAFLSGEQKKAIVDLLFKTNRKVTVKQLKEDYFKKIECFDSVEISGVEDRFNASLGTYHDLLKIIKDKDFLDNEENEDILEDIVLTLTLFEDREMIEERLKTYAHLFDDKVMKQLKRRRYTGWGRLSRKLINGIRDKQSGKTILDFLKSDGFANRNFMQLIHDDSLTFKEDIQKAQVSGQGDSLHEHIANLAGSPAIKKGILQTVKVVDELVKVMGRHKPENIVIEMARENQTTQKGQKNSRERMKRIEEGIKELGSQILKEHPVENTQLQNEKLYLYYLQNGRDMYVDQELDINRLSDYDVDHIVPQSFLKDDSIDNKVLTRSDKARGKSDNVPSEEVVKKMKNYWRQLLNAKLITQRKFDNLTKAERGGLSELDKAGFIKRQLVETRQITKHVAQILDSRMNTKYDENDKLIREVKVITLKSKLVSDFRKDFQFYKVREINNYHHAHDAYLNAVVGTALIKKYPKLESEFVYGDYKVYDVRKMIAKSEQEIGKATAKYFFYSNIMNFFKTEITLANGEIRKRPLIETNGETGEIVWDKGRDFATVRKVLSMPQVNIVKKTEVQTGGFSKESILPKRNSDKLIARKKDWDPKKYGGFDSPTVAYSVLVVAKVEKGKSKKLKSVKELLGITIMERSSFEKNPIDFLEAKGYKEVKKDLIIKLPKYSLFELENGRKRMLASAGELQKGNELALPSKYVNFLYLASHYEKLKGSPEDNEQKQLFVEQHKHYLDEIIEQISEFSKRVILADANLDKVLSAYNKHRDKPIREQAENIIHLFTLTNLGAPAAFKYFDTTIDRKRYTSTKEVLDATLIHQSITGLYETRIDLSQLGGDGGGGGGSEAAAKGGGGSGGMDLLKPLTVERKGVKIKGYWNSQADITCVPKDLLQGEEPVRQQNVTTIHGTQEGDVYYVNLKIDGRRINTEVIGTTLDYAIITPGDVPWILKKPLELTIKLDLEEQQGTLLNNSILSKKGKEELKQLFEKYSALWQSWENQVGHRRIRPHKIATGTVKPTPQKQYHINPKAKPDIQIVINDLLKQGVLIQKESTMNTPVYPVPKPNGRWRMVLDYRAVNKVTPLIAVQNQHSYGILGSLFKGRYKTTIDLSNGFWAHPIVPEDYWITAFTWQGKQYCWTVLPQGFLNSPGLFNGDVVDLLQGIPNVEVYVDDVYISHDSEKEHLEYLDILFNRLKEAGYIISLKKSNIANSIVDFLGFQITNEGRGLTDTFKEKLENITAPTTLKQLQSILGLLNFARNFIPDFTELIAPLYALIPKSPKNYVPWQIEHSTTLETLITKLNGAEYLQGRKGDKTLIMKVNASYTTGYIRYYNEGEKKPISYVSIVFSKTELKFTELEKLLTTVHKGLLKALDLSMGQNIHVYSPIVSMQNIQKTPQTAKKALASRWLSWLSYLEDPRIRFFYDPQMPALKDLPAVDTGKDNKKHPSNFQHIFYTDGSAITSPTKEGHLNAGMGIVYFINKDGNLQKQQEWSISLGNHTAQFAEIAAFEFALKKCLPLGGNILVVTDSNYVAKAYNEELDVWASNGFVNNRKKPLKHISKWKSVADLKRLRPDVVVTHEPGHQKLDSSPHAYGNNLADQLATQASFKVHAGKRTADGSEFEKRTADGSEFESPKKKAKVE

SEQ ID NO: 7670 - protein, 2099 aa, synthetic construct
MPAAKRVKLDGGDKKYSIGLDIGTNSVGWAVITDEYKVPSKKFKVLGNTDRHSIKKNLIGALLFDSGETAEATRLKRTARRRYTRRKNRICYLQEIFSNEMAKVDDSFFHRLEESFLVEEDKKHERHPIFGNIVDEVAYHEKYPTIYHLRKKLVDSTDKADLRLIYLALAHMIKFRGHFLIEGDLNPDNSDVDKLFIQLVQTYNQLFEENPINASGVDAKAILSARLSKSRRLENLIAQLPGEKKNGLFGNLIALSLGLTPNFKSNFDLAEDAKLQLSKDTYDDDLDNLLAQIGDQYADLFLAAKNLSDAILLSDILRVNTEITKAPLSASMIKRYDEHHQDLTLLKALVRQQLPEKYKEIFFDQSKNGYAGYIDGGASQEEFYKFIKPILEKMDGTEELLVKLNREDLLRKQRTFDNGSIPHQIHLGELHAILRRQEDFYPFLKDNREKIEKILTFRIPYYVGPLARGNSRFAWMTRKSEETITPWNFEEVVDKGASAQSFIERMTNFDKNLPNEKVLPKHSLLYEYFTVYNELTKVKYVTEGMRKPAFLSGEQKKAIVDLLFKTNRKVTVKQLKEDYFKKIECFDSVEISGVEDRFNASLGTYHDLLKIIKDKDFLDNEENEDILEDIVLTLTLFEDREMIEERLKTYAHLFDDKVMKQLKRRRYTGWGRLSRKLINGIRDKQSGKTILDFLKSDGFANRNFMQLIHDDSLTFKEDIQKAQVSGQGDSLHEHIANLAGSPAIKKGILQTVKVVDELVKVMGRHKPENIVIEMARENQTTQKGQKNSRERMKRIEEGIKELGSQILKEHPVENTQLQNEKLYLYYLQNGRDMYVDQELDINRLSDYDVDHIVPQSFLKDDSIDNKVLTRSDKARGKSDNVPSEEVVKKMKNYWRQLLNAKLITQRKFDNLTKAERGGLSELDKAGFIKRQLVETRQITKHVAQILDSRMNTKYDENDKLIREVKVITLKSKLVSDFRKDFQFYKVREINNYHHAHDAYLNAVVGTALIKKYPKLESEFVYGDYKVYDVRKMIAKSEQEIGKATAKYFFYSNIMNFFKTEITLANGEIRKRPLIETNGETGEIVWDKGRDFATVRKVLSMPQVNIVKKTEVQTGGFSKESILPKRNSDKLIARKKDWDPKKYGGFDSPTVAYSVLVVAKVEKGKSKKLKSVKELLGITIMERSSFEKNPIDFLEAKGYKEVKKDLIIKLPKYSLFELENGRKRMLASAGELQKGNELALPSKYVNFLYLASHYEKLKGSPEDNEQKQLFVEQHKHYLDEIIEQISEFSKRVILADANLDKVLSAYNKHRDKPIREQAENIIHLFTLTNLGAPAAFKYFDTTIDRKRYTSTKEVLDATLIHQSITGLYETRIDLSQLGGDGGGGGGSEAAAKGGGGSGGTLQLEEEYRLFEPESTQKQEMDIWLKNFPQAWAETGGMGTAHCQAPVLIQLKATATPISIRQYPMPHEAYQGIKPHIRRMLDQGILKPCQSPWNTPLLPVKKPGTEDYRPVQDLREVNKRVEDIHPTVPNPYNLLSTLPPSHPWYTVLDLKDAFFCLRLHSESQLLFAFEWRDPEIGLSGQLTWTRLPQGFKNSPTLFNEALHSDLADFRVRYPALVLLQYVDDLLLAAATRTECLEGTKALLETLGNKGYRASAKKAQICLQEVTYLGYSLKDGQRWLTKARKEAILSIPVPKNSRQVREFLGTAGYCRLWIPGFAELAAPLYPLTRPGTLFQWGTEQQLAFEDIKKALLSSPALGLPDITKPFELFIDENSGFAKGVLVQKLGPWKRPVAYLSKKLDTVASGWPPCLRMVAAIAILVKDAGKLTLGQPLTILTSHPVEALVRQPPNKWLSNARMTHYQAMLLDAERVHFGPTVSLNPATLLPLPSGGNHHDCLQILAETHGTRPDLTDQPLPDADLTWYTDGSSFIRNGEREAGAAVTTESEVIWAAPLPPGTSAQRAELIALTQALKMAEGKKLTVYTDSRYAFATTHVHGEIYRRRGWLTSEGKEIKNKNEILALLEALFLPKRLSIIHCPGHQKGDSPQAKGNRLADDTAKKAATETHSSLTVLPAGKRTADGSEFEKRTADGSEFESPKKKAKVE

SEQ ID NO: 7671 - protein, 2180 aa, synthetic construct
MPAAKRVKLDGGDKKYSIGLDIGTNSVGWAVITDEYKVPSKKFKVLGNTDRHSIKKNLIGALLFDSGETAEATRLKRTARRRYTRRKNRICYLQEIFSNEMAKVDDSFFHRLEESFLVEEDKKHERHPIFGNIVDEVAYHEKYPTIYHLRKKLVDSTDKADLRLIYLALAHMIKFRGHFLIEGDLNPDNSDVDKLFIQLVQTYNQLFEENPINASGVDAKAILSARLSKSRRLENLIAQLPGEKKNGLFGNLIALSLGLTPNFKSNFDLAEDAKLQLSKDTYDDDLDNLLAQIGDQYADLFLAAKNLSDAILLSDILRVNTEITKAPLSASMIKRYDEHHQDLTLLKALVRQQLPEKYKEIFFDQSKNGYAGYIDGGASQEEFYKFIKPILEKMDGTEELLVKLNREDLLRKQRTFDNGSIPHQIHLGELHAILRRQEDFYPFLKDNREKIEKILTFRIPYYVGPLARGNSRFAWMTRKSEETITPWNFEEVVDKGASAQSFIERMTNFDKNLPNEKVLPKHSLLYEYFTVYNELTKVKYVTEGMRKPAFLSGEQKKAIVDLLFKTNRKVTVKQLKEDYFKKIECFDSVEISGVEDRFNASLGTYHDLLKIIKDKDFLDNEENEDILEDIVLTLTLFEDREMIEERLKTYAHLFDDKVMKQLKRRRYTGWGRLSRKLINGIRDKQSGKTILDFLKSDGFANRNFMQLIHDDSLTFKEDIQKAQVSGQGDSLHEHIANLAGSPAIKKGILQTVKVVDELVKVMGRHKPENIVIEMARENQTTQKGQKNSRERMKRIEEGIKELGSQILKEHPVENTQLQNEKLYLYYLQNGRDMYVDQELDINRLSDYDVDHIVPQSFLKDDSIDNKVLTRSDKARGKSDNVPSEEVVKKMKNYWRQLLNAKLITQRKFDNLTKAERGGLSELDKAGFIKRQLVETRQITKHVAQILDSRMNTKYDENDKLIREVKVITLKSKLVSDFRKDFQFYKVREINNYHHAHDAYLNAVVGTALIKKYPKLESEFVYGDYKVYDVRKMIAKSEQEIGKATAKYFFYSNIMNFFKTEITLANGEIRKRPLIETNGETGEIVWDKGRDFATVRKVLSMPQVNIVKKTEVQTGGFSKESILPKRNSDKLIARKKDWDPKKYGGFDSPTVAYSVLVVAKVEKGKSKKLKSVKELLGITIMERSSFEKNPIDFLEAKGYKEVKKDLIIKLPKYSLFELENGRKRMLASAGELQKGNELALPSKYVNFLYLASHYEKLKGSPEDNEQKQLFVEQHKHYLDEIIEQISEFSKRVILADANLDKVLSAYNKHRDKPIREQAENIIHLFTLTNLGAPAAFKYFDTTIDRKRYTSTKEVLDATLIHQSITGLYETRIDLSQLGGDGGGGGGSEAAAKGGGGSGGMNPLQLLQPLPAEIKGTKLLAHWNSGATITCIPESFLEDEQPIKKTLIKTIHGEKQQNVYYVTFKVKGRKVEAEVIASPYEYILLSPTDVPWLTQQPLQLTILVPLQEYQEKILSKTALPEDQKQQLKTLFVKYDNLWQHWENQVGHRKIRPHNIATGDYPPRPQKQYPINPKAKPSIQIVIDDLLKQGVLTPQNSTMNTPVYPVPKPDGRWRMVLDYREVNKTIPLTAAQNQHSAGILATIVRQKYKTTLDLANGFWAHPITPESYWLTAFTWQGKQYCWTRLPQGFLNSPALFNADVVDLLKEIPNVQVYVDDIYLSHDDPKEHVQQLEKVFQILLQAGYVVSLKKSEIGQKTVEFLGFNITKEGRGLTDTFKTKLLNITPPKDLKQLQSILGKLNFARNFIPNFAELVQPLYNLIAPAKGKYIEWSEENTKQLNMVIEALNTASNLEERLPEQRLVIKVNTSPSAGYVRYYNETGKKPIMYLNYVFSKAELKFSMLEKLLTTMHKALIKAMDLAMGQEILVYSPIVSMTKIQKTPLPERKALPIRWITWMTYLEDPRIQFHYDKTLPELKHIPDVYTSSQSPVKHPSQYEGVFYTDGSAIKSPDPTKSNNAGMGIVHATYKPEYQVLNQWSIPLGNHTAQMAEIAAVEFACKKALKIPGPVLVITDSFYVAESANKELPYWKSNGFVNNKKKPLKHISKWKSIAECLSMKPDITIQHEKGISLQIPVFILKGNALADKLATQGSYVVNAGKRTADGSEFEKRTADGSEFESPKKKAKVE

SEQ ID NO: 7672 - protein, 2098 aa, synthetic construct
MPAAKRVKLDGGDKKYSIGLDIGTNSVGWAVITDEYKVPSKKFKVLGNTDRHSIKKNLIGALLFDSGETAEATRLKRTARRRYTRRKNRICYLQEIFSNEMAKVDDSFFHRLEESFLVEEDKKHERHPIFGNIVDEVAYHEKYPTIYHLRKKLVDSTDKADLRLIYLALAHMIKFRGHFLIEGDLNPDNSDVDKLFIQLVQTYNQLFEENPINASGVDAKAILSARLSKSRRLENLIAQLPGEKKNGLFGNLIALSLGLTPNFKSNFDLAEDAKLQLSKDTYDDDLDNLLAQIGDQYADLFLAAKNLSDAILLSDILRVNTEITKAPLSASMIKRYDEHHQDLTLLKALVRQQLPEKYKEIFFDQSKNGYAGYIDGGASQEEFYKFIKPILEKMDGTEELLVKLNREDLLRKQRTFDNGSIPHQIHLGELHAILRRQEDFYPFLKDNREKIEKILTFRIPYYVGPLARGNSRFAWMTRKSEETITPWNFEEVVDKGASAQSFIERMTNFDKNLPNEKVLPKHSLLYEYFTVYNELTKVKYVTEGMRKPAFLSGEQKKAIVDLLFKTNRKVTVKQLKEDYFKKIECFDSVEISGVEDRFNASLGTYHDLLKIIKDKDFLDNEENEDILEDIVLTLTLFEDREMIEERLKTYAHLFDDKVMKQLKRRRYTGWGRLSRKLINGIRDKQSGKTILDFLKSDGFANRNFMQLIHDDSLTFKEDIQKAQVSGQGDSLHEHIANLAGSPAIKKGILQTVKVVDELVKVMGRHKPENIVIEMARENQTTQKGQKNSRERMKRIEEGIKELGSQILKEHPVENTQLQNEKLYLYYLQNGRDMYVDQELDINRLSDYDVDHIVPQSFLKDDSIDNKVLTRSDKARGKSDNVPSEEVVKKMKNYWRQLLNAKLITQRKFDNLTKAERGGLSELDKAGFIKRQLVETRQITKHVAQILDSRMNTKYDENDKLIREVKVITLKSKLVSDFRKDFQFYKVREINNYHHAHDAYLNAVVGTALIKKYPKLESEFVYGDYKVYDVRKMIAKSEQEIGKATAKYFFYSNIMNFFKTEITLANGEIRKRPLIETNGETGEIVWDKGRDFATVRKVLSMPQVNIVKKTEVQTGGFSKESILPKRNSDKLIARKKDWDPKKYGGFDSPTVAYSVLVVAKVEKGKSKKLKSVKELLGITIMERSSFEKNPIDFLEAKGYKEVKKDLIIKLPKYSLFELENGRKRMLASAGELQKGNELALPSKYVNFLYLASHYEKLKGSPEDNEQKQLFVEQHKHYLDEIIEQISEFSKRVILADANLDKVLSAYNKHRDKPIREQAENIIHLFTLTNLGAPAAFKYFDTTIDRKRYTSTKEVLDATLIHQSITGLYETRIDLSQLGGDGGGGGGSEAAAKGGGGSGGVLNLEEEYRLHEKPVPSSIDPSWLQLFPTVWAERAGMGLANQVPPVVVELRSGASPVAVRQYPMSKEAREGIRPHIQKFLDLGVLVPCRSPWNTPLLPVKKPGTNDYRPVQDLREINKRVQDIHPTVPNPYNLLSSLPPSYTWYSVLDLKDAFFCLRLHPNSQPLFAFEWKDPEKGNTGQLTWTRLPQGFKNSPTLFNEALHRDLAPFRALNPQVVLLQYVDDLLVAAPTYEDCKKGTQKLLQELSKLGYRVSAKKAQLCQREVTYLGYLLKEGKRWLTPARKATVMKIPVPTTPRQVREFLGKAGFCRLFIPGFASLAAPLYPLTKPSIPFIWTEEHQQAFDHIKKALLSAPALALPDLTKPFTLYIDERAGVARGVLTQTLGPWRRPVAYLSKKLDPVASGWPTCLKAVAAVALLLKDADKLTLGQNVTVIASHSLESIVRQPPDRWMTNARMTHYQSLLLNERVSFAPPAVLNPATLLPVESEATPVHRCSEILAEETGTRRDLEDQPLPGVPTWYTDGSSFITEGKRRAGAPIVDGKRTVWASSLPEGTSAQKAELVALTQALRLAEGKNINIYTDSRYAFATAHIHGAIYKQRGWLTSAGKDIKNKEEILALLEAIHLPRRVAIIHCPGHQRGSNPVATGNRRADEAAKQAALSTRVLAGTTKPAGKRTADGSEFEKRTADGSEFESPKKKAKVE

SEQ ID NO: 7673 - protein, 2017 aa, synthetic construct
MPAAKRVKLDGGDKKYSIGLDIGTNSVGWAVITDEYKVPSKKFKVLGNTDRHSIKKNLIGALLFDSGETAEATRLKRTARRRYTRRKNRICYLQEIFSNEMAKVDDSFFHRLEESFLVEEDKKHERHPIFGNIVDEVAYHEKYPTIYHLRKKLVDSTDKADLRLIYLALAHMIKFRGHFLIEGDLNPDNSDVDKLFIQLVQTYNQLFEENPINASGVDAKAILSARLSKSRRLENLIAQLPGEKKNGLFGNLIALSLGLTPNFKSNFDLAEDAKLQLSKDTYDDDLDNLLAQIGDQYADLFLAAKNLSDAILLSDILRVNTEITKAPLSASMIKRYDEHHQDLTLLKALVRQQLPEKYKEIFFDQSKNGYAGYIDGGASQEEFYKFIKPILEKMDGTEELLVKLNREDLLRKQRTFDNGSIPHQIHLGELHAILRRQEDFYPFLKDNREKIEKILTFRIPYYVGPLARGNSRFAWMTRKSEETITPWNFEEVVDKGASAQSFIERMTNFDKNLPNEKVLPKHSLLYEYFTVYNELTKVKYVTEGMRKPAFLSGEQKKAIVDLLFKTNRKVTVKQLKEDYFKKIECFDSVEISGVEDRFNASLGTYHDLLKIIKDKDFLDNEENEDILEDIVLTLTLFEDREMIEERLKTYAHLFDDKVMKQLKRRRYTGWGRLSRKLINGIRDKQSGKTILDFLKSDGFANRNFMQLIHDDSLTFKEDIQKAQVSGQGDSLHEHIANLAGSPAIKKGILQTVKVVDELVKVMGRHKPENIVIEMARENQTTQKGQKNSRERMKRIEEGIKELGSQILKEHPVENTQLQNEKLYLYYLQNGRDMYVDQELDINRLSDYDVDHIVPQSFLKDDSIDNKVLTRSDKARGKSDNVPSEEVVKKMKNYWRQLLNAKLITQRKFDNLTKAERGGLSELDKAGFIKRQLVETRQITKHVAQILDSRMNTKYDENDKLIREVKVITLKSKLVSDFRKDFQFYKVREINNYHHAHDAYLNAVVGTALIKKYPKLESEFVYGDYKVYDVRKMIAKSEQEIGKATAKYFFYSNIMNFFKTEITLANGEIRKRPLIETNGETGEIVWDKGRDFATVRKVLSMPQVNIVKKTEVQTGGFSKESILPKRNSDKLIARKKDWDPKKYGGFDSPTVAYSVLVVAKVEKGKSKKLKSVKELLGITIMERSSFEKNPIDFLEAKGYKEVKKDLIIKLPKYSLFELENGRKRMLASAGELQKGNELALPSKYVNFLYLASHYEKLKGSPEDNEQKQLFVEQHKHYLDEIIEQISEFSKRVILADANLDKVLSAYNKHRDKPIREQAENIIHLFTLTNLGAPAAFKYFDTTIDRKRYTSTKEVLDATLIHQSITGLYETRIDLSQLGGDGGGGGGSEAAAKGGGGSGGAVLGLEHLPRPPEISQFPLNPERLQALQHLVRKALEAGHIEPYTGPGNNPVFPVKKANGTWRFIHDLRATNSLTIDLSSSSPGPPDLSSLPTTLAHLQTIDLKDAFFQIPLPKQFQPYFAFTVPQQCNYGPGTRYAWRVLPQGFKNSPTLFQMQLAHILQPIRQAFPQCTILQYMDDILLASPSHADLQLLSEATMASLISHGLPVSENKTQQTPGTIKFLGQIISPNHLTYDAVPKVPIRSRWALPELQALLGEIQWVSKGTPTLRQPLHSLYCALQPHTDPRDQIYLNPSQVQSLVQLRQALSQNCRSRLVQTLPLLGAIMLTLTGTTTVVFQSKQQWPLVWLHAPLPHTSQCPWGQLLASAVLLLDKYTLQSYGLLCQTIHHNISTQTFNQFIQTSDHPSVPILLHHSHRFKNLGAQTGELWNTFLKTTAPLAPVKALMPVFTLSPVIINTAPCLFSDGSTSQAAYILWDKHILSQRSFPLPPPHKSAQRAELLGLLHGLSSARSWRCLNIFLDSKYLYHYLRTLALGTFQGRSSQAPFQALLPRLLSRKVVYLHHVRSHTNLPDPISRLNALTDALLITPVLQLAGKRTADGSEFEKRTADGSEFESPKKKAKVE

SEQ ID NO: 7674 - protein, 2100 aa, synthetic construct
MPAAKRVKLDGGDKKYSIGLDIGTNSVGWAVITDEYKVPSKKFKVLGNTDRHSIKKNLIGALLFDSGETAEATRLKRTARRRYTRRKNRICYLQEIFSNEMAKVDDSFFHRLEESFLVEEDKKHERHPIFGNIVDEVAYHEKYPTIYHLRKKLVDSTDKADLRLIYLALAHMIKFRGHFLIEGDLNPDNSDVDKLFIQLVQTYNQLFEENPINASGVDAKAILSARLSKSRRLENLIAQLPGEKKNGLFGNLIALSLGLTPNFKSNFDLAEDAKLQLSKDTYDDDLDNLLAQIGDQYADLFLAAKNLSDAILLSDILRVNTEITKAPLSASMIKRYDEHHQDLTLLKALVRQQLPEKYKEIFFDQSKNGYAGYIDGGASQEEFYKFIKPILEKMDGTEELLVKLNREDLLRKQRTFDNGSIPHQIHLGELHAILRRQEDFYPFLKDNREKIEKILTFRIPYYVGPLARGNSRFAWMTRKSEETITPWNFEEVVDKGASAQSFIERMTNFDKNLPNEKVLPKHSLLYEYFTVYNELTKVKYVTEGMRKPAFLSGEQKKAIVDLLFKTNRKVTVKQLKEDYFKKIECFDSVEISGVEDRFNASLGTYHDLLKIIKDKDFLDNEENEDILEDIVLTLTLFEDREMIEERLKTYAHLFDDKVMKQLKRRRYTGWGRLSRKLINGIRDKQSGKTILDFLKSDGFANRNFMQLIHDDSLTFKEDIQKAQVSGQGDSLHEHIANLAGSPAIKKGILQTVKVVDELVKVMGRHKPENIVIEMARENQTTQKGQKNSRERMKRIEEGIKELGSQILKEHPVENTQLQNEKLYLYYLQNGRDMYVDQELDINRLSDYDVDHIVPQSFLKDDSIDNKVLTRSDKARGKSDNVPSEEVVKKMKNYWRQLLNAKLITQRKFDNLTKAERGGLSELDKAGFIKRQLVETRQITKHVAQILDSRMNTKYDENDKLIREVKVITLKSKLVSDFRKDFQFYKVREINNYHHAHDAYLNAVVGTALIKKYPKLESEFVYGDYKVYDVRKMIAKSEQEIGKATAKYFFYSNIMNFFKTEITLANGEIRKRPLIETNGETGEIVWDKGRDFATVRKVLSMPQVNIVKKTEVQTGGFSKESILPKRNSDKLIARKKDWDPKKYGGFDSPTVAYSVLVVAKVEKGKSKKLKSVKELLGITIMERSSFEKNPIDFLEAKGYKEVKKDLIIKLPKYSLFELENGRKRMLASAGELQKGNELALPSKYVNFLYLASHYEKLKGSPEDNEQKQLFVEQHKHYLDEIIEQISEFSKRVILADANLDKVLSAYNKHRDKPIREQAENIIHLFTLTNLGAPAAFKYFDTTIDRKRYTSTKEVLDATLIHQSITGLYETRIDLSQLGGDGGGGGGSEAAAKGGGGSGGTLNLEDEYRLYETSAEPEVSPGSTWLSDFPQAWAETGGMGLAVRQAPLIIPLKATSTPVSIKQYPMSQEAKLGIKPHIQRLLDQGILVPCQSPWNTPLLPVKKPGTNDYRPVQDLREVNKRVEDIHPTVPNPYNLLSGLPPSHRWYTVLDLKDAFFCLRLHPTSQPLFAFEWRDPGMGISGQLTWTRLPQGFKNSPTLFNEALHRDLADFRIQHPDLILLQYVDDILLAATSELDCQQGTRALLLTLGNLGYRASAKKAQLCQKQVKYLGYLLKEGQRWLTEARKETVMGQPTPKTPRQLREFLGKAGFCRLFIPGFAEMAAPLYPLTKPGTLFNWGPDQQKAYQEIKQALLTAPALGLPDLTKPFELFVDEKQGYAKGVLTQKLGPWRRPVAYLSKKLDPVAAGWPPCLRMVAAIAVLRKDAGKLTMGQPLVILAPHAVEALVKQPPDRWLSNARMTHYQAMLLDTDRVQFGPVVALNPATLLPLPEEGAPHDCLEILAETHGTRPDLTDQPIPDADHTWYTDGSSFLQEGQRKAGAAVTTETEVIWARALPAGTSAQRAELIALTQALKMAEGKRLNVYTDSRYAFATAHIHGEIYRRRGWLTSEGREIKNKSEILALLKALFLPKRLSIIHCLGHQKGDSAEARGNRLADQAAREAAIKTPPDTSTLLAGKRTADGSEFEKRTADGSEFESPKKKAKVE

SEQ ID NO: 7675 - protein, 2100 aa, synthetic construct
MPAAKRVKLDGGDKKYSIGLDIGTNSVGWAVITDEYKVPSKKFKVLGNTDRHSIKKNLIGALLFDSGETAEATRLKRTARRRYTRRKNRICYLQEIFSNEMAKVDDSFFHRLEESFLVEEDKKHERHPIFGNIVDEVAYHEKYPTIYHLRKKLVDSTDKADLRLIYLALAHMIKFRGHFLIEGDLNPDNSDVDKLFIQLVQTYNQLFEENPINASGVDAKAILSARLSKSRRLENLIAQLPGEKKNGLFGNLIALSLGLTPNFKSNFDLAEDAKLQLSKDTYDDDLDNLLAQIGDQYADLFLAAKNLSDAILLSDILRVNTEITKAPLSASMIKRYDEHHQDLTLLKALVRQQLPEKYKEIFFDQSKNGYAGYIDGGASQEEFYKFIKPILEKMDGTEELLVKLNREDLLRKQRTFDNGSIPHQIHLGELHAILRRQEDFYPFLKDNREKIEKILTFRIPYYVGPLARGNSRFAWMTRKSEETITPWNFEEVVDKGASAQSFIERMTNFDKNLPNEKVLPKHSLLYEYFTVYNELTKVKYVTEGMRKPAFLSGEQKKAIVDLLFKTNRKVTVKQLKEDYFKKIECFDSVEISGVEDRFNASLGTYHDLLKIIKDKDFLDNEENEDILEDIVLTLTLFEDREMIEERLKTYAHLFDDKVMKQLKRRRYTGWGRLSRKLINGIRDKQSGKTILDFLKSDGFANRNFMQLIHDDSLTFKEDIQKAQVSGQGDSLHEHIANLAGSPAIKKGILQTVKVVDELVKVMGRHKPENIVIEMARENQTTQKGQKNSRERMKRIEEGIKELGSQILKEHPVENTQLQNEKLYLYYLQNGRDMYVDQELDINRLSDYDVDHIVPQSFLKDDSIDNKVLTRSDKARGKSDNVPSEEVVKKMKNYWRQLLNAKLITQRKFDNLTKAERGGLSELDKAGFIKRQLVETRQITKHVAQILDSRMNTKYDENDKLIREVKVITLKSKLVSDFRKDFQFYKVREINNYHHAHDAYLNAVVGTALIKKYPKLESEFVYGDYKVYDVRKMIAKSEQEIGKATAKYFFYSNIMNFFKTEITLANGEIRKRPLIETNGETGEIVWDKGRDFATVRKVLSMPQVNIVKKTEVQTGGFSKESILPKRNSDKLIARKKDWDPKKYGGFDSPTVAYSVLVVAKVEKGKSKKLKSVKELLGITIMERSSFEKNPIDFLEAKGYKEVKKDLIIKLPKYSLFELENGRKRMLASAGELQKGNELALPSKYVNFLYLASHYEKLKGSPEDNEQKQLFVEQHKHYLDEIIEQISEFSKRVILADANLDKVLSAYNKHRDKPIREQAENIIHLFTLTNLGAPAAFKYFDTTIDRKRYTSTKEVLDATLIHQSITGLYETRIDLSQLGGDGGGGGGSEAAAKGGGGSGGTLGIEDEYRLHETSTEPDVSLGSTWLSDFPQAWAETGGMGLAVRQAPLIIPLKATSTPVSIQQYPMSHEARLGIKPHIQRLLDQGILVPCQSPWNTPLLPVKKPGTNDYRPVQDLREVNKRVEDIHPTVPNPYNLLSGLPPSHQWYTVLDLKDAFFCLRLHPTSQPLFAFEWRDPGMGISGQLTWTRLPQGFKNSPTLFNEALHRDLADFRIQHPDLILLQYVDDILLAATSELDCQQGTRALLQTLGDLGYRASAKKAQICQKQVKYLGYLLREGQRWLTEARKETVMGQPVPKTPRQLREFLGTAGFCRLWIPGFAEMAAPLYPLTKPGTLFSWGPDQQKAYQEIKQALLTAPALGLPDLTKPFELFVDEKQGYAKGVLTQKLGPWRRPVAYLSKKLDPVAAGWPPCLRMVAAIAVLTKDAGKLTMGQPLVILAPHAVEALVKQPPDRWLSNARMTHYQAMLLDTDRVQFGPVVALNPATLLPLPEEGAPHDCLEILAETHGTRPDLTDQPIPDADHTWYTDGSSFLQEGQRKAGAAVTTETEVIWAGALPAGTSAQRAELIALTQALKMAEGKRLNVYTDSRYAFATAHIHGEIYRRRGWLTSEGREIKNKSEILALLKALFLPKRLSIIHCLGHQKGDSAEARGNRLADQAAREAAIKTPPDTSTLLAGKRTADGSEFEKRTADGSEFESPKKKAKVE

SEQ ID NO: 7676 - protein, 2100 aa, synthetic construct
MPAAKRVKLDGGDKKYSIGLDIGTNSVGWAVITDEYKVPSKKFKVLGNTDRHSIKKNLIGALLFDSGETAEATRLKRTARRRYTRRKNRICYLQEIFSNEMAKVDDSFFHRLEESFLVEEDKKHERHPIFGNIVDEVAYHEKYPTIYHLRKKLVDSTDKADLRLIYLALAHMIKFRGHFLIEGDLNPDNSDVDKLFIQLVQTYNQLFEENPINASGVDAKAILSARLSKSRRLENLIAQLPGEKKNGLFGNLIALSLGLTPNFKSNFDLAEDAKLQLSKDTYDDDLDNLLAQIGDQYADLFLAAKNLSDAILLSDILRVNTEITKAPLSASMIKRYDEHHQDLTLLKALVRQQLPEKYKEIFFDQSKNGYAGYIDGGASQEEFYKFIKPILEKMDGTEELLVKLNREDLLRKQRTFDNGSIPHQIHLGELHAILRRQEDFYPFLKDNREKIEKILTFRIPYYVGPLARGNSRFAWMTRKSEETITPWNFEEVVDKGASAQSFIERMTNFDKNLPNEKVLPKHSLLYEYFTVYNELTKVKYVTEGMRKPAFLSGEQKKAIVDLLFKTNRKVTVKQLKEDYFKKIECFDSVEISGVEDRFNASLGTYHDLLKIIKDKDFLDNEENEDILEDIVLTLTLFEDREMIEERLKTYAHLFDDKVMKQLKRRRYTGWGRLSRKLINGIRDKQSGKTILDFLKSDGFANRNFMQLIHDDSLTFKEDIQKAQVSGQGDSLHEHIANLAGSPAIKKGILQTVKVVDELVKVMGRHKPENIVIEMARENQTTQKGQKNSRERMKRIEEGIKELGSQILKEHPVENTQLQNEKLYLYYLQNGRDMYVDQELDINRLSDYDVDHIVPQSFLKDDSIDNKVLTRSDKARGKSDNVPSEEVVKKMKNYWRQLLNAKLITQRKFDNLTKAERGGLSELDKAGFIKRQLVETRQITKHVAQILDSRMNTKYDENDKLIREVKVITLKSKLVSDFRKDFQFYKVREINNYHHAHDAYLNAVVGTALIKKYPKLESEFVYGDYKVYDVRKMIAKSEQEIGKATAKYFFYSNIMNFFKTEITLANGEIRKRPLIETNGETGEIVWDKGRDFATVRKVLSMPQVNIVKKTEVQTGGFSKESILPKRNSDKLIARKKDWDPKKYGGFDSPTVAYSVLVVAKVEKGKSKKLKSVKELLGITIMERSSFEKNPIDFLEAKGYKEVKKDLIIKLPKYSLFELENGRKRMLASAGELQKGNELALPSKYVNFLYLASHYEKLKGSPEDNEQKQLFVEQHKHYLDEIIEQISEFSKRVILADANLDKVLSAYNKHRDKPIREQAENIIHLFTLTNLGAPAAFKYFDTTIDRKRYTSTKEVLDATLIHQSITGLYETRIDLSQLGGDGGGGGGSEAAAKGGGGSGGTLNIEDEYRLHETSKEPDVSLGSTWLSDFPQAWAETGGMGLAVRQAPLIIPLKATSTPVSIKQYPMSQEARLGIKPHIQRLLDQGILVPCQSPWNTPLLPVKKPGTNDYRPVQDLREVNKRVEDIHPTVPNPYNLLSGLPPSHQWYTVLDLKDAFFCLRLHPTSQPLFAFEWRDPEMGISGQLTWTRLPQGFKNSPTLFNEALHRDLAGFRIQHPDLILLQYVDDLLLAATSELDCQQGTRALLQTLGDLGYRASAKKAQICQKQVKYLGYLLKEGQRWLTEARKETVMGQPIPKTPRQLREFLGTAGFCRLWIPGFAEMAAPLYPLTKPGTLFNWGPDQQKAFQEIKQALLTAPALGLPDLTKPFELFVDEKQGYAKGVLTQKLGPWRRPVAYLSKKLDPVAAGWPPCLRMVAAIAVLTKDAGKLTMGQPLVILAPHAVEALVKQPPDRWLSNARMTHYQALLLDTDRVQFGPVVALNPATLLPLPEEGLQHDCLDILAEAHGTRSDLMDQPLPDADHTWYTDGSSFLQEGQRKAGAAVTTETEVIWARALPAGTSAQRAELIALTQALKMAEGKKLNVYTDSRYAFATAHIHGEIYRRRGWLTSEGKEIKNKDEILALLKALFLPKRLSIIHCPGHQKGNSAEARGNRMADQAAREVATRETPETSTLLAGKRTADGSEFEKRTADGSEFESPKKKAKVE

SEQ ID NO: 7677 - protein, 2100 aa, synthetic construct
MPAAKRVKLDGGDKKYSIGLDIGTNSVGWAVITDEYKVPSKKFKVLGNTDRHSIKKNLIGALLFDSGETAEATRLKRTARRRYTRRKNRICYLQEIFSNEMAKVDDSFFHRLEESFLVEEDKKHERHPIFGNIVDEVAYHEKYPTIYHLRKKLVDSTDKADLRLIYLALAHMIKFRGHFLIEGDLNPDNSDVDKLFIQLVQTYNQLFEENPINASGVDAKAILSARLSKSRRLENLIAQLPGEKKNGLFGNLIALSLGLTPNFKSNFDLAEDAKLQLSKDTYDDDLDNLLAQIGDQYADLFLAAKNLSDAILLSDILRVNTEITKAPLSASMIKRYDEHHQDLTLLKALVRQQLPEKYKEIFFDQSKNGYAGYIDGGASQEEFYKFIKPILEKMDGTEELLVKLNREDLLRKQRTFDNGSIPHQIHLGELHAILRRQEDFYPFLKDNREKIEKILTFRIPYYVGPLARGNSRFAWMTRKSEETITPWNFEEVVDKGASAQSFIERMTNFDKNLPNEKVLPKHSLLYEYFTVYNELTKVKYVTEGMRKPAFLSGEQKKAIVDLLFKTNRKVTVKQLKEDYFKKIECFDSVEISGVEDRFNASLGTYHDLLKIIKDKDFLDNEENEDILEDIVLTLTLFEDREMIEERLKTYAHLFDDKVMKQLKRRRYTGWGRLSRKLINGIRDKQSGKTILDFLKSDGFANRNFMQLIHDDSLTFKEDIQKAQVSGQGDSLHEHIANLAGSPAIKKGILQTVKVVDELVKVMGRHKPENIVIEMARENQTTQKGQKNSRERMKRIEEGIKELGSQILKEHPVENTQLQNEKLYLYYLQNGRDMYVDQELDINRLSDYDVDHIVPQSFLKDDSIDNKVLTRSDKARGKSDNVPSEEVVKKMKNYWRQLLNAKLITQRKFDNLTKAERGGLSELDKAGFIKRQLVETRQITKHVAQILDSRMNTKYDENDKLIREVKVITLKSKLVSDFRKDFQFYKVREINNYHHAHDAYLNAVVGTALIKKYPKLESEFVYGDYKVYDVRKMIAKSEQEIGKATAKYFFYSNIMNFFKTEITLANGEIRKRPLIETNGETGEIVWDKGRDFATVRKVLSMPQVNIVKKTEVQTGGFSKESILPKRNSDKLIARKKDWDPKKYGGFDSPTVAYSVLVVAKVEKGKSKKLKSVKELLGITIMERSSFEKNPIDFLEAKGYKEVKKDLIIKLPKYSLFELENGRKRMLASAGELQKGNELALPSKYVNFLYLASHYEKLKGSPEDNEQKQLFVEQHKHYLDEIIEQISEFSKRVILADANLDKVLSAYNKHRDKPIREQAENIIHLFTLTNLGAPAAFKYFDTTIDRKRYTSTKEVLDATLIHQSITGLYETRIDLSQLGGDGGGGGGSEAAAKGGGGSGGTLNIEDEYRLHETSKGPDVPLGSTWLSDFPQAWAETGGMGLAVRQAPLIIPLKATSTPVSIKQYPMSQEARLGIKPHIQRLLDQGILVPCQSPWNTPLLPVKKPGTNDYRPVQDLREVNKRVEDIHPTVPNPYNLLSGLPPSHQWYTVLDLKDAFFCLRLHPTSQSLFAFEWRDPEMGISGQLTWTRLPQGFKNSPTLFNEALHRDLADFRIQHPDLILLQYVDDLLLAATSELDCQQGTRALLQTLGDLGYRASAKKAQICQKQVKYLGYLLKEGQRWLTEARKETVMGQPTPKTPRQLREFLGTAGFCRLWIPGFAEMAAPLYPLTKPGTLFEWGPDQQKAYQEIKQALLTAPALGLPDLTKPFELFVDEKQGYAKGVLTQKLGPWRRPVAYLSKKLDPVAAGWPPCLRMVAAIAVLTKDAGKLTMGQPLVILAPHAVEALVKQPPDRWLSNARMTHYQALLLDTDRVQFGPIVALNPATLLPLPEEGLQHDCLDILAEAHGTRPDLTDQPLPDADHTWYTDGSSFLQEGQRKAGAAVTTETEVVWAKALPAGTSAQRAELIALTQALKMAEGKKLNVYTDSRYAFATAHIHGEIYRRRGWLTSEGKEIKNKDEILALLKALFLPKRLSIIHCPGHQKGNRAEARGNRMADQAAREVATRETPETSTLLAGKRTADGSEFEKRTADGSEFESPKKKAKVE

SEQ ID NO: 7678 - protein, 2120 aa, synthetic construct
MPAAKRVKLDGGDKKYSIGLDIGTNSVGWAVITDEYKVPSKKFKVLGNTDRHSIKKNLIGALLFDSGETAEATRLKRTARRRYTRRKNRICYLQEIFSNEMAKVDDSFFHRLEESFLVEEDKKHERHPIFGNIVDEVAYHEKYPTIYHLRKKLVDSTDKADLRLIYLALAHMIKFRGHFLIEGDLNPDNSDVDKLFIQLVQTYNQLFEENPINASGVDAKAILSARLSKSRRLENLIAQLPGEKKNGLFGNLIALSLGLTPNFKSNFDLAEDAKLQLSKDTYDDDLDNLLAQIGDQYADLFLAAKNLSDAILLSDILRVNTEITKAPLSASMIKRYDEHHQDLTLLKALVRQQLPEKYKEIFFDQSKNGYAGYIDGGASQEEFYKFIKPILEKMDGTEELLVKLNREDLLRKQRTFDNGSIPHQIHLGELHAILRRQEDFYPFLKDNREKIEKILTFRIPYYVGPLARGNSRFAWMTRKSEETITPWNFEEVVDKGASAQSFIERMTNFDKNLPNEKVLPKHSLLYEYFTVYNELTKVKYVTEGMRKPAFLSGEQKKAIVDLLFKTNRKVTVKQLKEDYFKKIECFDSVEISGVEDRFNASLGTYHDLLKIIKDKDFLDNEENEDILEDIVLTLTLFEDREMIEERLKTYAHLFDDKVMKQLKRRRYTGWGRLSRKLINGIRDKQSGKTILDFLKSDGFANRNFMQLIHDDSLTFKEDIQKAQVSGQGDSLHEHIANLAGSPAIKKGILQTVKVVDELVKVMGRHKPENIVIEMARENQTTQKGQKNSRERMKRIEEGIKELGSQILKEHPVENTQLQNEKLYLYYLQNGRDMYVDQELDINRLSDYDVDHIVPQSFLKDDSIDNKVLTRSDKARGKSDNVPSEEVVKKMKNYWRQLLNAKLITQRKFDNLTKAERGGLSELDKAGFIKRQLVETRQITKHVAQILDSRMNTKYDENDKLIREVKVITLKSKLVSDFRKDFQFYKVREINNYHHAHDAYLNAVVGTALIKKYPKLESEFVYGDYKVYDVRKMIAKSEQEIGKATAKYFFYSNIMNFFKTEITLANGEIRKRPLIETNGETGEIVWDKGRDFATVRKVLSMPQVNIVKKTEVQTGGFSKESILPKRNSDKLIARKKDWDPKKYGGFDSPTVAYSVLVVAKVEKGKSKKLKSVKELLGITIMERSSFEKNPIDFLEAKGYKEVKKDLIIKLPKYSLFELENGRKRMLASAGELQKGNELALPSKYVNFLYLASHYEKLKGSPEDNEQKQLFVEQHKHYLDEIIEQISEFSKRVILADANLDKVLSAYNKHRDKPIREQAENIIHLFTLTNLGAPAAFKYFDTTIDRKRYTSTKEVLDATLIHQSITGLYETRIDLSQLGGDGGGGGGSEAAAKGGGGSGGVQEISDSRPMLHIYLNGRRFLGLLDTGADKTCIAGRDWPANWPIHQTESSLQGLGMACGVARSSQPLRWQHEDKSGIIHPFVIPTLPFTLWGRDIMKDIKVRLMTDSPDDSQDLMIGAIESNLFADQISWKSDQPVWLNQWPLKQEKLQALQQLVTEQLQLGHLEESNSPWNTPVFVIKKKSGKWRLLQDLRAVNATMHDMGALQPGLPSPPAVPKGWEIIIIDLQDCFFNIKLHPEDCKRFAFSVPSPNFKRPYQRFQWKVLPQGMKNSPTLCQKFVDKAILTVRDKYQDSYIVHYMDDILLAHPSRSIVDEILTSMIQALNKHGLVVSTEKIQKYDNLKYLGTHIQGDSVSYQKLQIRTDKLRTLNDFQKLLGNINWIRPFLKLTTGELKPLFEILNPDSNPISTRKLTPEACKALQLMNERLSTARVKRLDLSQPWSLCILKTEYTPTACLWQDGVVEWIHLPHISPKVITPYDIFCTQLIIKGRHRSKELFSKDPDYIVVPYTKVQFDLLLQEKEDWPISLLGFLGEVHFHLPKDPLLTFTLQTAIIFPHMTSTTPLEKGIVIFTDGSANGRSVTYIQGREPIIKENTQNTAQQAEIVAVITAFEEVSQPFNLYTDSKYVTGLFPEIETATLSPRTKIYTELKHLQRLIHKRQEKFYIGHIRGHTGLPGPLAQGNAYADSLTRILTAAGKRTADGSEFEKRTADGSEFESPKKKAKVE

SEQ ID NO: 7679 - protein, 2098 aa, synthetic construct
MPAAKRVKLDGGDKKYSIGLDIGTNSVGWAVITDEYKVPSKKFKVLGNTDRHSIKKNLIGALLFDSGETAEATRLKRTARRRYTRRKNRICYLQEIFSNEMAKVDDSFFHRLEESFLVEEDKKHERHPIFGNIVDEVAYHEKYPTIYHLRKKLVDSTDKADLRLIYLALAHMIKFRGHFLIEGDLNPDNSDVDKLFIQLVQTYNQLFEENPINASGVDAKAILSARLSKSRRLENLIAQLPGEKKNGLFGNLIALSLGLTPNFKSNFDLAEDAKLQLSKDTYDDDLDNLLAQIGDQYADLFLAAKNLSDAILLSDILRVNTEITKAPLSASMIKRYDEHHQDLTLLKALVRQQLPEKYKEIFFDQSKNGYAGYIDGGASQEEFYKFIKPILEKMDGTEELLVKLNREDLLRKQRTFDNGSIPHQIHLGELHAILRRQEDFYPFLKDNREKIEKILTFRIPYYVGPLARGNSRFAWMTRKSEETITPWNFEEVVDKGASAQSFIERMTNFDKNLPNEKVLPKHSLLYEYFTVYNELTKVKYVTEGMRKPAFLSGEQKKAIVDLLFKTNRKVTVKQLKEDYFKKIECFDSVEISGVEDRFNASLGTYHDLLKIIKDKDFLDNEENEDILEDIVLTLTLFEDREMIEERLKTYAHLFDDKVMKQLKRRRYTGWGRLSRKLINGIRDKQSGKTILDFLKSDGFANRNFMQLIHDDSLTFKEDIQKAQVSGQGDSLHEHIANLAGSPAIKKGILQTVKVVDELVKVMGRHKPENIVIEMARENQTTQKGQKNSRERMKRIEEGIKELGSQILKEHPVENTQLQNEKLYLYYLQNGRDMYVDQELDINRLSDYDVDHIVPQSFLKDDSIDNKVLTRSDKARGKSDNVPSEEVVKKMKNYWRQLLNAKLITQRKFDNLTKAERGGLSELDKAGFIKRQLVETRQITKHVAQILDSRMNTKYDENDKLIREVKVITLKSKLVSDFRKDFQFYKVREINNYHHAHDAYLNAVVGTALIKKYPKLESEFVYGDYKVYDVRKMIAKSEQEIGKATAKYFFYSNIMNFFKTEITLANGEIRKRPLIETNGETGEIVWDKGRDFATVRKVLSMPQVNIVKKTEVQTGGFSKESILPKRNSDKLIARKKDWDPKKYGGFDSPTVAYSVLVVAKVEKGKSKKLKSVKELLGITIMERSSFEKNPIDFLEAKGYKEVKKDLIIKLPKYSLFELENGRKRMLASAGELQKGNELALPSKYVNFLYLASHYEKLKGSPEDNEQKQLFVEQHKHYLDEIIEQISEFSKRVILADANLDKVLSAYNKHRDKPIREQAENIIHLFTLTNLGAPAAFKYFDTTIDRKRYTSTKEVLDATLIHQSITGLYETRIDLSQLGGDGGGGGGSEAAAKGGGGSGGVLNLEEEYRLHEKPVPSSIDPSWLQLFPTVWAERAGMGLANQVPPVVVELRSGASPVAVRQYPMSKEAREGIRPHIQRFLDLGVLVPCQSPWNTPLLPVKKPGTNDYRPVQDLREINKRVQDIHPTVPNPYNLLSSLPPSHTWYSVLDLKDAFFCLKLHPNSQPLFAFEWRDPEKGNTGQLTWTRLPQGFKNSPTLFNEALHRDLAPFRALNPQVVLLQYVDDLLVAAPTYRDCKEGTQKLLQELSKLGYRVSAKKAQLCQKEVTYLGYLLKEGKRWLTPARKATVMKIPPPTTPRQVREFLGTAGFCRLWIPGFASLAAPLYPLTKPSIPFIWTEEHQKAFDRIKEALLSAPALALPDLTKPFTLYVDERAGVARGVLTQTLGPWRRPVAYLSKKLDPVASGWPTCLKAVAAVALLLKDADKLTLGQNVTVIASHSLESIVRQPPDRWMTNARMTHYQSLLLNERVSFAPPAVLNPATLLPVESEATPVHRCSEILAEETGTRRDLKDQPLPGVPAWYTDGSSFIAEGKRRAGAAIVDGKRTVWASSLPEGTSAQKAELVALTQALRLAEGKDINIYTDSRYAFATAHIHGAIYKQRGWLTSAGKDIKNKEEILALLEAIHLPKRVAIIHCPGHQKGNDPVATGNRRADEAAKQAALSTRVLAETTKPAGKRTADGSEFEKRTADGSEFESPKKKAKVE

SEQ ID NO: 7680 - protein, 2102 aa, synthetic construct
MPAAKRVKLDGGDKKYSIGLDIGTNSVGWAVITDEYKVPSKKFKVLGNTDRHSIKKNLIGALLFDSGETAEATRLKRTARRRYTRRKNRICYLQEIFSNEMAKVDDSFFHRLEESFLVEEDKKHERHPIFGNIVDEVAYHEKYPTIYHLRKKLVDSTDKADLRLIYLALAHMIKFRGHFLIEGDLNPDNSDVDKLFIQLVQTYNQLFEENPINASGVDAKAILSARLSKSRRLENLIAQLPGEKKNGLFGNLIALSLGLTPNFKSNFDLAEDAKLQLSKDTYDDDLDNLLAQIGDQYADLFLAAKNLSDAILLSDILRVNTEITKAPLSASMIKRYDEHHQDLTLLKALVRQQLPEKYKEIFFDQSKNGYAGYIDGGASQEEFYKFIKPILEKMDGTEELLVKLNREDLLRKQRTFDNGSIPHQIHLGELHAILRRQEDFYPFLKDNREKIEKILTFRIPYYVGPLARGNSRFAWMTRKSEETITPWNFEEVVDKGASAQSFIERMTNFDKNLPNEKVLPKHSLLYEYFTVYNELTKVKYVTEGMRKPAFLSGEQKKAIVDLLFKTNRKVTVKQLKEDYFKKIECFDSVEISGVEDRFNASLGTYHDLLKIIKDKDFLDNEENEDILEDIVLTLTLFEDREMIEERLKTYAHLFDDKVMKQLKRRRYTGWGRLSRKLINGIRDKQSGKTILDFLKSDGFANRNFMQLIHDDSLTFKEDIQKAQVSGQGDSLHEHIANLAGSPAIKKGILQTVKVVDELVKVMGRHKPENIVIEMARENQTTQKGQKNSRERMKRIEEGIKELGSQILKEHPVENTQLQNEKLYLYYLQNGRDMYVDQELDINRLSDYDVDHIVPQSFLKDDSIDNKVLTRSDKARGKSDNVPSEEVVKKMKNYWRQLLNAKLITQRKFDNLTKAERGGLSELDKAGFIKRQLVETRQITKHVAQILDSRMNTKYDENDKLIREVKVITLKSKLVSDFRKDFQFYKVREINNYHHAHDAYLNAVVGTALIKKYPKLESEFVYGDYKVYDVRKMIAKSEQEIGKATAKYFFYSNIMNFFKTEITLANGEIRKRPLIETNGETGEIVWDKGRDFATVRKVLSMPQVNIVKKTEVQTGGFSKESILPKRNSDKLIARKKDWDPKKYGGFDSPTVAYSVLVVAKVEKGKSKKLKSVKELLGITIMERSSFEKNPIDFLEAKGYKEVKKDLIIKLPKYSLFELENGRKRMLASAGELQKGNELALPSKYVNFLYLASHYEKLKGSPEDNEQKQLFVEQHKHYLDEIIEQISEFSKRVILADANLDKVLSAYNKHRDKPIREQAENIIHLFTLTNLGAPAAFKYFDTTIDRKRYTSTKEVLDATLIHQSITGLYETRIDLSQLGGDGGEAAAKGGGGSEAAAKGGTAPLEEEYRLFLEAPIQNVTLLEQWKREIPKVWAEINPPGLASTQAPIHVQLLSTALPVRVRQYPITLEAKRSLRETIRKFRAAGILRPVHSPWNTPLLPVRKSGTSEYRMVQDLREVNKRVETIHPTVPNPYTLLSLLPPDRIWYSVLDLKDAFFCIPLAPESQLIFAFEWADAEEGESGQLTWTRLPQGFKNSPTLFDEALNRDLQGFRLDHPSVSLLQYVDDLLIAADTQAACLSATRDLLMTLAELGYRVSGKKAQLCQEEVTYLGFKIHKGSRSLSNSRTQAILQIPVPKTKRQVREFLGTIGYCRLWIPGFAELAQPLYAATRGGNDPLVWGEKEEEAFQSLKLALTQPPALALPSLDKPFQLFVEETSGAAKGVLTQALGPWKRPVAYLSKRLDPVAAGWPRCLRAIAAAALLTREASKLTFGQDIEITSSHNLESLLRSPPDKWLTNARITQYQVLLLDPPRVRFKQTAALNPATLLPETDDTLPIHHCLDTLDSLTSTRPDLTDQPLAQAEATLFTDGSSYIRDGKRYAGAAVVTLDSVIWAEPLPIGTSAQKAELIALTKALEWSKDKSVNIYTDSRYAFATLHVHGMIYRERGLLTAGGKAIKNAPEILALLTAVWLPKRVAVMHCKGHQKDDAPTSTGNRRADEVAREVAIRPLSTQATISAGKRTADGSEFEKRTADGSEFESPKKKAKVE

SEQ ID NO: 7681 - protein, 2098 aa, synthetic construct
MPAAKRVKLDGGDKKYSIGLDIGTNSVGWAVITDEYKVPSKKFKVLGNTDRHSIKKNLIGALLFDSGETAEATRLKRTARRRYTRRKNRICYLQEIFSNEMAKVDDSFFHRLEESFLVEEDKKHERHPIFGNIVDEVAYHEKYPTIYHLRKKLVDSTDKADLRLIYLALAHMIKFRGHFLIEGDLNPDNSDVDKLFIQLVQTYNQLFEENPINASGVDAKAILSARLSKSRRLENLIAQLPGEKKNGLFGNLIALSLGLTPNFKSNFDLAEDAKLQLSKDTYDDDLDNLLAQIGDQYADLFLAAKNLSDAILLSDILRVNTEITKAPLSASMIKRYDEHHQDLTLLKALVRQQLPEKYKEIFFDQSKNGYAGYIDGGASQEEFYKFIKPILEKMDGTEELLVKLNREDLLRKQRTFDNGSIPHQIHLGELHAILRRQEDFYPFLKDNREKIEKILTFRIPYYVGPLARGNSRFAWMTRKSEETITPWNFEEVVDKGASAQSFIERMTNFDKNLPNEKVLPKHSLLYEYFTVYNELTKVKYVTEGMRKPAFLSGEQKKAIVDLLFKTNRKVTVKQLKEDYFKKIECFDSVEISGVEDRFNASLGTYHDLLKIIKDKDFLDNEENEDILEDIVLTLTLFEDREMIEERLKTYAHLFDDKVMKQLKRRRYTGWGRLSRKLINGIRDKQSGKTILDFLKSDGFANRNFMQLIHDDSLTFKEDIQKAQVSGQGDSLHEHIANLAGSPAIKKGILQTVKVVDELVKVMGRHKPENIVIEMARENQTTQKGQKNSRERMKRIEEGIKELGSQILKEHPVENTQLQNEKLYLYYLQNGRDMYVDQELDINRLSDYDVDHIVPQSFLKDDSIDNKVLTRSDKARGKSDNVPSEEVVKKMKNYWRQLLNAKLITQRKFDNLTKAERGGLSELDKAGFIKRQLVETRQITKHVAQILDSRMNTKYDENDKLIREVKVITLKSKLVSDFRKDFQFYKVREINNYHHAHDAYLNAVVGTALIKKYPKLESEFVYGDYKVYDVRKMIAKSEQEIGKATAKYFFYSNIMNFFKTEITLANGEIRKRPLIETNGETGEIVWDKGRDFATVRKVLSMPQVNIVKKTEVQTGGFSKESILPKRNSDKLIARKKDWDPKKYGGFDSPTVAYSVLVVAKVEKGKSKKLKSVKELLGITIMERSSFEKNPIDFLEAKGYKEVKKDLIIKLPKYSLFELENGRKRMLASAGELQKGNELALPSKYVNFLYLASHYEKLKGSPEDNEQKQLFVEQHKHYLDEIIEQISEFSKRVILADANLDKVLSAYNKHRDKPIREQAENIIHLFTLTNLGAPAAFKYFDTTIDRKRYTSTKEVLDATLIHQSITGLYETRIDLSQLGGDGGEAAAKGGGGSEAAAKGGVLNLEEEYRLHEKPVPSSIDPSWLQLFPTVWAERAGMGLANQVPPVVVELRSGASPVAVRQYPMSKEAREGIRPHIQKFLDLGVLVPCRSPWNTPLLPVKKPGTNDYRPVQDLREINKRVQDIHPTVPNPYNLLSSLPPSYTWYSVLDLKDAFFCLRLHPNSQPLFAFEWKDPEKGNTGQLTWTRLPQGFKNSPTLFNEALHRDLAPFRALNPQVVLLQYVDDLLVAAPTYEDCKKGTQKLLQELSKLGYRVSAKKAQLCQREVTYLGYLLKEGKRWLTPARKATVMKIPVPTTPRQVREFLGTAGFCRLWIPGFASLAAPLYPLTKPSIPFIWTEEHQQAFDHIKKALLSAPALALPDLTKPFTLYIDERAGVARGVLTQTLGPWRRPVAYLSKKLDPVASGWPTCLKAVAAVALLLKDADKLTLGQNVTVIASHSLESIVRQPPDRWMTNARMTHYQSLLLNERVSFAPPAVLNPATLLPVESEATPVHRCSEILAEETGTRRDLEDQPLPGVPTWYTDGSSFITEGKRRAGAPIVDGKRTVWASSLPEGTSAQKAELVALTQALRLAEGKNINIYTDSRYAFATAHIHGAIYKQRGWLTSAGKDIKNKEEILALLEAIHLPRRVAIIHCPGHQRGSNPVATGNRRADEAAKQAALSTRVLAGTTKPAGKRTADGSEFEKRTADGSEFESPKKKAKVE

SEQ ID NO: 7682 - protein, 2222 aa, synthetic construct
MPAAKRVKLDGGDKKYSIGLDIGTNSVGWAVITDEYKVPSKKFKVLGNTDRHSIKKNLIGALLFDSGETAEATRLKRTARRRYTRRKNRICYLQEIFSNEMAKVDDSFFHRLEESFLVEEDKKHERHPIFGNIVDEVAYHEKYPTIYHLRKKLVDSTDKADLRLIYLALAHMIKFRGHFLIEGDLNPDNSDVDKLFIQLVQTYNQLFEENPINASGVDAKAILSARLSKSRRLENLIAQLPGEKKNGLFGNLIALSLGLTPNFKSNFDLAEDAKLQLSKDTYDDDLDNLLAQIGDQYADLFLAAKNLSDAILLSDILRVNTEITKAPLSASMIKRYDEHHQDLTLLKALVRQQLPEKYKEIFFDQSKNGYAGYIDGGASQEEFYKFIKPILEKMDGTEELLVKLNREDLLRKQRTFDNGSIPHQIHLGELHAILRRQEDFYPFLKDNREKIEKILTFRIPYYVGPLARGNSRFAWMTRKSEETITPWNFEEVVDKGASAQSFIERMTNFDKNLPNEKVLPKHSLLYEYFTVYNELTKVKYVTEGMRKPAFLSGEQKKAIVDLLFKTNRKVTVKQLKEDYFKKIECFDSVEISGVEDRFNASLGTYHDLLKIIKDKDFLDNEENEDILEDIVLTLTLFEDREMIEERLKTYAHLFDDKVMKQLKRRRYTGWGRLSRKLINGIRDKQSGKTILDFLKSDGFANRNFMQLIHDDSLTFKEDIQKAQVSGQGDSLHEHIANLAGSPAIKKGILQTVKVVDELVKVMGRHKPENIVIEMARENQTTQKGQKNSRERMKRIEEGIKELGSQILKEHPVENTQLQNEKLYLYYLQNGRDMYVDQELDINRLSDYDVDHIVPQSFLKDDSIDNKVLTRSDKARGKSDNVPSEEVVKKMKNYWRQLLNAKLITQRKFDNLTKAERGGLSELDKAGFIKRQLVETRQITKHVAQILDSRMNTKYDENDKLIREVKVITLKSKLVSDFRKDFQFYKVREINNYHHAHDAYLNAVVGTALIKKYPKLESEFVYGDYKVYDVRKMIAKSEQEIGKATAKYFFYSNIMNFFKTEITLANGEIRKRPLIETNGETGEIVWDKGRDFATVRKVLSMPQVNIVKKTEVQTGGFSKESILPKRNSDKLIARKKDWDPKKYGGFDSPTVAYSVLVVAKVEKGKSKKLKSVKELLGITIMERSSFEKNPIDFLEAKGYKEVKKDLIIKLPKYSLFELENGRKRMLASAGELQKGNELALPSKYVNFLYLASHYEKLKGSPEDNEQKQLFVEQHKHYLDEIIEQISEFSKRVILADANLDKVLSAYNKHRDKPIREQAENIIHLFTLTNLGAPAAFKYFDTTIDRKRYTSTKEVLDATLIHQSITGLYETRIDLSQLGGDGGEAAAKGGGGSEAAAKGGTLGDQGSRGSDPLPEPRVTLTVEGIPTEFLVNTGAEHSVLTKPMGKMGSKRTVVAGATGSKVYPWTTKRLLKIGQKQVTHSFLVIPECPAPLLGRDLLTKLKAQIQFSTEGPQVTWEDRPAMCLVLNLEEEYRLHEKPVPPSIDPSWLQLFPMVWAEKAGMGLANQVPPVVVELKSDASPVAVRQYPMSKEAREGIRPHIQRFLDLGILVPCQSPWNTPLLPVKKPGTNDYRPVQDLREVNKRVQDIHPTVPNPYNLLSSLPPSHTWYSVLDLKDAFFCLKLHPNSQPLFAFEWRDPEKGNTGQLTWTRLPQGFKNSPTLFNEALHRDLASFRALNPQVVMLQYVDDLLVAAPTYRDCKEGTRRLLQELSKLGYRVSAKKAQLCREEVTYLGYLLKGGKRWLTPARKATVMKIPTPTTPRQVREFLGTAGFCRLWIPGFASLAAPLYPLTRPKVPFTWTEAHQEAFGRIKEALLSAPALALPDLTKPFALYVDEKEGVARGVLTQTLGPWRRPVAYLSKKLDPVASGWPTCLKAIAAVALLLKDADKLTLGQNVLVIAPHNLESIVRQPPDRWMTNARMTHYQSLLLNERVSFAPPAILNPATLLPVESDDTPIHICSEILAEETGTRPDLRDQPLPGVPAWYTDGSSFIMDGRRQAGAAIVDNKRTVWASNLPEGTSAQKAELIALTQALRLAEGKSINIYTDSRYAFATAHVHGAIYKQRGWLTSAGKDIKNKEEILALLEAIHLPKRVAIIHCPGHQRGTDPVATGNRKADEAAKQAAQSTRILTETTKNAGKRTADGSEFEKRTADGSEFESPKKKAKVE

SEQ ID NO: 7683 - protein, 2100 aa, synthetic construct
MPAAKRVKLDGGDKKYSIGLDIGTNSVGWAVITDEYKVPSKKFKVLGNTDRHSIKKNLIGALLFDSGETAEATRLKRTARRRYTRRKNRICYLQEIFSNEMAKVDDSFFHRLEESFLVEEDKKHERHPIFGNIVDEVAYHEKYPTIYHLRKKLVDSTDKADLRLIYLALAHMIKFRGHFLIEGDLNPDNSDVDKLFIQLVQTYNQLFEENPINASGVDAKAILSARLSKSRRLENLIAQLPGEKKNGLFGNLIALSLGLTPNFKSNFDLAEDAKLQLSKDTYDDDLDNLLAQIGDQYADLFLAAKNLSDAILLSDILRVNTEITKAPLSASMIKRYDEHHQDLTLLKALVRQQLPEKYKEIFFDQSKNGYAGYIDGGASQEEFYKFIKPILEKMDGTEELLVKLNREDLLRKQRTFDNGSIPHQIHLGELHAILRRQEDFYPFLKDNREKIEKILTFRIPYYVGPLARGNSRFAWMTRKSEETITPWNFEEVVDKGASAQSFIERMTNFDKNLPNEKVLPKHSLLYEYFTVYNELTKVKYVTEGMRKPAFLSGEQKKAIVDLLFKTNRKVTVKQLKEDYFKKIECFDSVEISGVEDRFNASLGTYHDLLKIIKDKDFLDNEENEDILEDIVLTLTLFEDREMIEERLKTYAHLFDDKVMKQLKRRRYTGWGRLSRKLINGIRDKQSGKTILDFLKSDGFANRNFMQLIHDDSLTFKEDIQKAQVSGQGDSLHEHIANLAGSPAIKKGILQTVKVVDELVKVMGRHKPENIVIEMARENQTTQKGQKNSRERMKRIEEGIKELGSQILKEHPVENTQLQNEKLYLYYLQNGRDMYVDQELDINRLSDYDVDHIVPQSFLKDDSIDNKVLTRSDKARGKSDNVPSEEVVKKMKNYWRQLLNAKLITQRKFDNLTKAERGGLSELDKAGFIKRQLVETRQITKHVAQILDSRMNTKYDENDKLIREVKVITLKSKLVSDFRKDFQFYKVREINNYHHAHDAYLNAVVGTALIKKYPKLESEFVYGDYKVYDVRKMIAKSEQEIGKATAKYFFYSNIMNFFKTEITLANGEIRKRPLIETNGETGEIVWDKGRDFATVRKVLSMPQVNIVKKTEVQTGGFSKESILPKRNSDKLIARKKDWDPKKYGGFDSPTVAYSVLVVAKVEKGKSKKLKSVKELLGITIMERSSFEKNPIDFLEAKGYKEVKKDLIIKLPKYSLFELENGRKRMLASAGELQKGNELALPSKYVNFLYLASHYEKLKGSPEDNEQKQLFVEQHKHYLDEIIEQISEFSKRVILADANLDKVLSAYNKHRDKPIREQAENIIHLFTLTNLGAPAAFKYFDTTIDRKRYTSTKEVLDATLIHQSITGLYETRIDLSQLGGDGGEAAAKGGGGSEAAAKGGTLNLEDEYRLYETSAEPEVSPGSTWLSDFPQAWAETGGMGLAVRQAPLIIPLKATSTPVSIKQYPMSQEAKLGIKPHIQRLLDQGILVPCQSPWNTPLLPVKKPGTNDYRPVQDLREVNKRVEDIHPTVPNPYNLLSGLPPSHRWYTVLDLKDAFFCLRLHPTSQPLFAFEWRDPGMGISGQLTWTRLPQGFKNSPTLFNEALHRDLADFRIQHPDLILLQYVDDILLAATSELDCQQGTRALLLTLGNLGYRASAKKAQLCQKQVKYLGYLLKEGQRWLTEARKETVMGQPTPKTPRQLREFLGTAGFCRLWIPGFAEMAAPLYPLTKPGTLFNWGPDQQKAYQEIKQALLTAPALGLPDLTKPFELFVDEKQGYAKGVLTQKLGPWRRPVAYLSKKLDPVAAGWPPCLRMVAAIAVLRKDAGKLTMGQPLVILAPHAVEALVKQPPDRWLSNARMTHYQAMLLDTDRVQFGPVVALNPATLLPLPEEGAPHDCLEILAETHGTRPDLTDQPIPDADHTWYTDGSSFLQEGQRKAGAAVTTETEVIWARALPAGTSAQRAELIALTQALKMAEGKRLNVYTDSRYAFATAHIHGEIYRRRGWLTSEGREIKNKSEILALLKALFLPKRLSIIHCLGHQKGDSAEARGNRLADQAAREAAIKTPPDTSTLLAGKRTADGSEFEKRTADGSEFESPKKKAKVE

SEQ ID NO: 7684 - protein, 2100 aa, synthetic construct
MPAAKRVKLDGGDKKYSIGLDIGTNSVGWAVITDEYKVPSKKFKVLGNTDRHSIKKNLIGALLFDSGETAEATRLKRTARRRYTRRKNRICYLQEIFSNEMAKVDDSFFHRLEESFLVEEDKKHERHPIFGNIVDEVAYHEKYPTIYHLRKKLVDSTDKADLRLIYLALAHMIKFRGHFLIEGDLNPDNSDVDKLFIQLVQTYNQLFEENPINASGVDAKAILSARLSKSRRLENLIAQLPGEKKNGLFGNLIALSLGLTPNFKSNFDLAEDAKLQLSKDTYDDDLDNLLAQIGDQYADLFLAAKNLSDAILLSDILRVNTEITKAPLSASMIKRYDEHHQDLTLLKALVRQQLPEKYKEIFFDQSKNGYAGYIDGGASQEEFYKFIKPILEKMDGTEELLVKLNREDLLRKQRTFDNGSIPHQIHLGELHAILRRQEDFYPFLKDNREKIEKILTFRIPYYVGPLARGNSRFAWMTRKSEETITPWNFEEVVDKGASAQSFIERMTNFDKNLPNEKVLPKHSLLYEYFTVYNELTKVKYVTEGMRKPAFLSGEQKKAIVDLLFKTNRKVTVKQLKEDYFKKIECFDSVEISGVEDRFNASLGTYHDLLKIIKDKDFLDNEENEDILEDIVLTLTLFEDREMIEERLKTYAHLFDDKVMKQLKRRRYTGWGRLSRKLINGIRDKQSGKTILDFLKSDGFANRNFMQLIHDDSLTFKEDIQKAQVSGQGDSLHEHIANLAGSPAIKKGILQTVKVVDELVKVMGRHKPENIVIEMARENQTTQKGQKNSRERMKRIEEGIKELGSQILKEHPVENTQLQNEKLYLYYLQNGRDMYVDQELDINRLSDYDVDHIVPQSFLKDDSIDNKVLTRSDKARGKSDNVPSEEVVKKMKNYWRQLLNAKLITQRKFDNLTKAERGGLSELDKAGFIKRQLVETRQITKHVAQILDSRMNTKYDENDKLIREVKVITLKSKLVSDFRKDFQFYKVREINNYHHAHDAYLNAVVGTALIKKYPKLESEFVYGDYKVYDVRKMIAKSEQEIGKATAKYFFYSNIMNFFKTEITLANGEIRKRPLIETNGETGEIVWDKGRDFATVRKVLSMPQVNIVKKTEVQTGGFSKESILPKRNSDKLIARKKDWDPKKYGGFDSPTVAYSVLVVAKVEKGKSKKLKSVKELLGITIMERSSFEKNPIDFLEAKGYKEVKKDLIIKLPKYSLFELENGRKRMLASAGELQKGNELALPSKYVNFLYLASHYEKLKGSPEDNEQKQLFVEQHKHYLDEIIEQISEFSKRVILADANLDKVLSAYNKHRDKPIREQAENIIHLFTLTNLGAPAAFKYFDTTIDRKRYTSTKEVLDATLIHQSITGLYETRIDLSQLGGDGGEAAAKGGGGSEAAAKGGTLGIEDEYRLHETSTEPDVSLGSTWLSDFPQAWAETGGMGLAVRQAPLIIPLKATSTPVSIQQYPMSHEARLGIKPHIQRLLDQGILVPCQSPWNTPLLPVKKPGTNDYRPVQDLREVNKRVEDIHPTVPNPYNLLSGLPPSHQWYTVLDLKDAFFCLRLHPTSQPLFAFEWRDPGMGISGQLTWTRLPQGFKNSPTLFNEALHRDLADFRIQHPDLILLQYVDDILLAATSELDCQQGTRALLQTLGDLGYRASAKKAQICQKQVKYLGYLLREGQRWLTEARKETVMGQPVPKTPRQLREFLGTAGFCRLWIPGFAEMAAPLYPLTKPGTLFSWGPDQQKAYQEIKQALLTAPALGLPDLTKPFELFVDEKQGYAKGVLTQKLGPWRRPVAYLSKKLDPVAAGWPPCLRMVAAIAVLTKDAGKLTMGQPLVILAPHAVEALVKQPPDRWLSNARMTHYQAMLLDTDRVQFGPVVALNPATLLPLPEEGAPHDCLEILAETHGTRPDLTDQPIPDADHTWYTDGSSFLQEGQRKAGAAVTTETEVIWAGALPAGTSAQRAELIALTQALKMAEGKRLNVYTDSRYAFATAHIHGEIYRRRGWLTSEGREIKNKSEILALLKALFLPKRLSIIHCLGHQKGDSAEARGNRLADQAAREAAIKTPPDTSTLLAGKRTADGSEFEKRTADGSEFESPKKKAKVE

SEQ ID NO: 7685 - protein, 2100 aa, synthetic construct
MPAAKRVKLDGGDKKYSIGLDIGTNSVGWAVITDEYKVPSKKFKVLGNTDRHSIKKNLIGALLFDSGETAEATRLKRTARRRYTRRKNRICYLQEIFSNEMAKVDDSFFHRLEESFLVEEDKKHERHPIFGNIVDEVAYHEKYPTIYHLRKKLVDSTDKADLRLIYLALAHMIKFRGHFLIEGDLNPDNSDVDKLFIQLVQTYNQLFEENPINASGVDAKAILSARLSKSRRLENLIAQLPGEKKNGLFGNLIALSLGLTPNFKSNFDLAEDAKLQLSKDTYDDDLDNLLAQIGDQYADLFLAAKNLSDAILLSDILRVNTEITKAPLSASMIKRYDEHHQDLTLLKALVRQQLPEKYKEIFFDQSKNGYAGYIDGGASQEEFYKFIKPILEKMDGTEELLVKLNREDLLRKQRTFDNGSIPHQIHLGELHAILRRQEDFYPFLKDNREKIEKILTFRIPYYVGPLARGNSRFAWMTRKSEETITPWNFEEVVDKGASAQSFIERMTNFDKNLPNEKVLPKHSLLYEYFTVYNELTKVKYVTEGMRKPAFLSGEQKKAIVDLLFKTNRKVTVKQLKEDYFKKIECFDSVEISGVEDRFNASLGTYHDLLKIIKDKDFLDNEENEDILEDIVLTLTLFEDREMIEERLKTYAHLFDDKVMKQLKRRRYTGWGRLSRKLINGIRDKQSGKTILDFLKSDGFANRNFMQLIHDDSLTFKEDIQKAQVSGQGDSLHEHIANLAGSPAIKKGILQTVKVVDELVKVMGRHKPENIVIEMARENQTTQKGQKNSRERMKRIEEGIKELGSQILKEHPVENTQLQNEKLYLYYLQNGRDMYVDQELDINRLSDYDVDHIVPQSFLKDDSIDNKVLTRSDKARGKSDNVPSEEVVKKMKNYWRQLLNAKLITQRKFDNLTKAERGGLSELDKAGFIKRQLVETRQITKHVAQILDSRMNTKYDENDKLIREVKVITLKSKLVSDFRKDFQFYKVREINNYHHAHDAYLNAVVGTALIKKYPKLESEFVYGDYKVYDVRKMIAKSEQEIGKATAKYFFYSNIMNFFKTEITLANGEIRKRPLIETNGETGEIVWDKGRDFATVRKVLSMPQVNIVKKTEVQTGGFSKESILPKRNSDKLIARKKDWDPKKYGGFDSPTVAYSVLVVAKVEKGKSKKLKSVKELLGITIMERSSFEKNPIDFLEAKGYKEVKKDLIIKLPKYSLFELENGRKRMLASAGELQKGNELALPSKYVNFLYLASHYEKLKGSPEDNEQKQLFVEQHKHYLDEIIEQISEFSKRVILADANLDKVLSAYNKHRDKPIREQAENIIHLFTLTNLGAPAAFKYFDTTIDRKRYTSTKEVLDATLIHQSITGLYETRIDLSQLGGDGGEAAAKGGGGSEAAAKGGTLNIEDEYRLHETSKGPDVPLGSTWLSDFPQAWAETGGMGLAVRQAPLIIPLKATSTPVSIKQYPMSQEARLGIKPHIQRLLDQGILVPCQSPWNTPLLPVKKPGTNDYRPVQDLREVNKRVEDIHPTVPNPYNLLSGLPPSHQWYTVLDLKDAFFCLRLHPTSQSLFAFEWRDPEMGISGQLTWTRLPQGFKNSPTLFNEALHRDLADFRIQHPDLILLQYVDDLLLAATSELDCQQGTRALLQTLGDLGYRASAKKAQICQKQVKYLGYLLKEGQRWLTEARKETVMGQPTPKTPRQLREFLGTAGFCRLWIPGFAEMAAPLYPLTKPGTLFEWGPDQQKAYQEIKQALLTAPALGLPDLTKPFELFVDEKQGYAKGVLTQKLGPWRRPVAYLSKKLDPVAAGWPPCLRMVAAIAVLTKDAGKLTMGQPLVILAPHAVEALVKQPPDRWLSNARMTHYQALLLDTDRVQFGPIVALNPATLLPLPEEGLQHDCLDILAEAHGTRPDLTDQPLPDADHTWYTDGSSFLQEGQRKAGAAVTTETEVVWAKALPAGTSAQRAELIALTQALKMAEGKKLNVYTDSRYAFATAHIHGEIYRRRGWLTSEGKEIKNKDEILALLKALFLPKRLSIIHCPGHQKGNRAEARGNRMADQAAREVATRETPETSTLLAGKRTADGSEFEKRTADGSEFESPKKKAKVE

SEQ ID NO: 7686 - protein, 2100 aa, synthetic construct
MPAAKRVKLDGGDKKYSIGLDIGTNSVGWAVITDEYKVPSKKFKVLGNTDRHSIKKNLIGALLFDSGETAEATRLKRTARRRYTRRKNRICYLQEIFSNEMAKVDDSFFHRLEESFLVEEDKKHERHPIFGNIVDEVAYHEKYPTIYHLRKKLVDSTDKADLRLIYLALAHMIKFRGHFLIEGDLNPDNSDVDKLFIQLVQTYNQLFEENPINASGVDAKAILSARLSKSRRLENLIAQLPGEKKNGLFGNLIALSLGLTPNFKSNFDLAEDAKLQLSKDTYDDDLDNLLAQIGDQYADLFLAAKNLSDAILLSDILRVNTEITKAPLSASMIKRYDEHHQDLTLLKALVRQQLPEKYKEIFFDQSKNGYAGYIDGGASQEEFYKFIKPILEKMDGTEELLVKLNREDLLRKQRTFDNGSIPHQIHLGELHAILRRQEDFYPFLKDNREKIEKILTFRIPYYVGPLARGNSRFAWMTRKSEETITPWNFEEVVDKGASAQSFIERMTNFDKNLPNEKVLPKHSLLYEYFTVYNELTKVKYVTEGMRKPAFLSGEQKKAIVDLLFKTNRKVTVKQLKEDYFKKIECFDSVEISGVEDRFNASLGTYHDLLKIIKDKDFLDNEENEDILEDIVLTLTLFEDREMIEERLKTYAHLFDDKVMKQLKRRRYTGWGRLSRKLINGIRDKQSGKTILDFLKSDGFANRNFMQLIHDDSLTFKEDIQKAQVSGQGDSLHEHIANLAGSPAIKKGILQTVKVVDELVKVMGRHKPENIVIEMARENQTTQKGQKNSRERMKRIEEGIKELGSQILKEHPVENTQLQNEKLYLYYLQNGRDMYVDQELDINRLSDYDVDHIVPQSFLKDDSIDNKVLTRSDKARGKSDNVPSEEVVKKMKNYWRQLLNAKLITQRKFDNLTKAERGGLSELDKAGFIKRQLVETRQITKHVAQILDSRMNTKYDENDKLIREVKVITLKSKLVSDFRKDFQFYKVREINNYHHAHDAYLNAVVGTALIKKYPKLESEFVYGDYKVYDVRKMIAKSEQEIGKATAKYFFYSNIMNFFKTEITLANGEIRKRPLIETNGETGEIVWDKGRDFATVRKVLSMPQVNIVKKTEVQTGGFSKESILPKRNSDKLIARKKDWDPKKYGGFDSPTVAYSVLVVAKVEKGKSKKLKSVKELLGITIMERSSFEKNPIDFLEAKGYKEVKKDLIIKLPKYSLFELENGRKRMLASAGELQKGNELALPSKYVNFLYLASHYEKLKGSPEDNEQKQLFVEQHKHYLDEIIEQISEFSKRVILADANLDKVLSAYNKHRDKPIREQAENIIHLFTLTNLGAPAAFKYFDTTIDRKRYTSTKEVLDATLIHQSITGLYETRIDLSQLGGDGGEAAAKGGGGSEAAAKGGTLNIEDEYRLHEISTEPDVSPGSTWLSDFPQAWAETGGMGLAVRQAPLIIPLKATSTPVSIKQYPMSQEAKLGIKPHIQRLLDQGILVPCQSPWNTPLLPVKKPGTNDYRPVQGLREVNKRVEDIHPTVPNPYNLLSGLPTSHRWYTVLDLKDAFFCLRLHPTSQPLFASEWRDPGMGISGQLTWTRLPQGFKNSPTLFNEALHRGLADFRIQHPDLILLQYVDDLLLAATSELDCQQGTRALLKTLGNLGYRASAKKAQICQKQVKYLGYLLREGQRWLTEARKETVMGQPTPKTPRQLREFLGKAGFCRLFIPRFAEMAAPLYPLTKPGTLFNWGPDQQKAYHEIKQALLTAPALGLPDLTKPFELFVDEKQGYAKGVLTQKLGPWRRPVAYLSKKLDPVAAGWPPCLRMVAAIAVLTKDAGKLTMGQPLVILAPHAVEALVKQPPDRWLSNARMTHYQAMLLDTDRVQFGPVVALNPATLLPLPEEGAPHDCLEILAETHGTEPDLTDQPIPDADHTWYTDGSSFLQEGQRKAGAAVTTETEVIWARALPAGTSAQRAELIALTQALKMAEGKRLNVYTDSRYAFATAHIHGEIYKRRGWLTSEGREIKNKSEILALLKALFLPKRLSIIHCLGHQKGDSAEARGNRLADQAAREAAIKTPPDTSTLLAGKRTADGSEFEKRTADGSEFESPKKKAKVE

SEQ ID NO: 7687 - protein, 2098 aa, synthetic construct
MPAAKRVKLDGGDKKYSIGLDIGTNSVGWAVITDEYKVPSKKFKVLGNTDRHSIKKNLIGALLFDSGETAEATRLKRTARRRYTRRKNRICYLQEIFSNEMAKVDDSFFHRLEESFLVEEDKKHERHPIFGNIVDEVAYHEKYPTIYHLRKKLVDSTDKADLRLIYLALAHMIKFRGHFLIEGDLNPDNSDVDKLFIQLVQTYNQLFEENPINASGVDAKAILSARLSKSRRLENLIAQLPGEKKNGLFGNLIALSLGLTPNFKSNFDLAEDAKLQLSKDTYDDDLDNLLAQIGDQYADLFLAAKNLSDAILLSDILRVNTEITKAPLSASMIKRYDEHHQDLTLLKALVRQQLPEKYKEIFFDQSKNGYAGYIDGGASQEEFYKFIKPILEKMDGTEELLVKLNREDLLRKQRTFDNGSIPHQIHLGELHAILRRQEDFYPFLKDNREKIEKILTFRIPYYVGPLARGNSRFAWMTRKSEETITPWNFEEVVDKGASAQSFIERMTNFDKNLPNEKVLPKHSLLYEYFTVYNELTKVKYVTEGMRKPAFLSGEQKKAIVDLLFKTNRKVTVKQLKEDYFKKIECFDSVEISGVEDRFNASLGTYHDLLKIIKDKDFLDNEENEDILEDIVLTLTLFEDREMIEERLKTYAHLFDDKVMKQLKRRRYTGWGRLSRKLINGIRDKQSGKTILDFLKSDGFANRNFMQLIHDDSLTFKEDIQKAQVSGQGDSLHEHIANLAGSPAIKKGILQTVKVVDELVKVMGRHKPENIVIEMARENQTTQKGQKNSRERMKRIEEGIKELGSQILKEHPVENTQLQNEKLYLYYLQNGRDMYVDQELDINRLSDYDVDHIVPQSFLKDDSIDNKVLTRSDKARGKSDNVPSEEVVKKMKNYWRQLLNAKLITQRKFDNLTKAERGGLSELDKAGFIKRQLVETRQITKHVAQILDSRMNTKYDENDKLIREVKVITLKSKLVSDFRKDFQFYKVREINNYHHAHDAYLNAVVGTALIKKYPKLESEFVYGDYKVYDVRKMIAKSEQEIGKATAKYFFYSNIMNFFKTEITLANGEIRKRPLIETNGETGEIVWDKGRDFATVRKVLSMPQVNIVKKTEVQTGGFSKESILPKRNSDKLIARKKDWDPKKYGGFDSPTVAYSVLVVAKVEKGKSKKLKSVKELLGITIMERSSFEKNPIDFLEAKGYKEVKKDLIIKLPKYSLFELENGRKRMLASAGELQKGNELALPSKYVNFLYLASHYEKLKGSPEDNEQKQLFVEQHKHYLDEIIEQISEFSKRVILADANLDKVLSAYNKHRDKPIREQAENIIHLFTLTNLGAPAAFKYFDTTIDRKRYTSTKEVLDATLIHQSITGLYETRIDLSQLGGDGGEAAAKGGGGSEAAAKGGVLNLEEEYRLHEKPVPSSIDPSWLQLFPTVWAERAGMGLANQVPPVVVELRSGASPVAVRQYPMSKEAREGIRPHIQRFLDLGVLVPCQSPWNTPLLPVKKPGTNDYRPVQDLREINKRVQDIHPTVPNPYNLLSSLPPSHTWYSVLDLKDAFFCLKLHPNSQPLFAFEWRDPEKGNTGQLTWTRLPQGFKNSPTLFNEALHRDLAPFRALNPQVVLLQYVDDLLVAAPTYRDCKEGTQKLLQELSKLGYRVSAKKAQLCQKEVTYLGYLLKEGKRWLTPARKATVMKIPPPTTPRQVREFLGTAGFCRLWIPGFASLAAPLYPLTKPSIPFIWTEEHQKAFDRIKEALLSAPALALPDLTKPFTLYVDERAGVARGVLTQTLGPWRRPVAYLSKKLDPVASGWPTCLKAVAAVALLLKDADKLTLGQNVTVIASHSLESIVRQPPDRWMTNARMTHYQSLLLNERVSFAPPAVLNPATLLPVESEATPVHRCSEILAEETGTRRDLKDQPLPGVPAWYTDGSSFIAEGKRRAGAAIVDGKRTVWASSLPEGTSAQKAELVALTQALRLAEGKDINIYTDSRYAFATAHIHGAIYKQRGWLTSAGKDIKNKEEILALLEAIHLPKRVAIIHCPGHQKGNDPVATGNRRADEAAKQAALSTRVLAETTKPAGKRTADGSEFEKRTADGSEFESPKKKAKVE

SEQ ID NO: 7688 - protein, 2100 aa, synthetic construct
MPAAKRVKLDGGDKKYSIGLDIGTNSVGWAVITDEYKVPSKKFKVLGNTDRHSIKKNLIGALLFDSGETAEATRLKRTARRRYTRRKNRICYLQEIFSNEMAKVDDSFFHRLEESFLVEEDKKHERHPIFGNIVDEVAYHEKYPTIYHLRKKLVDSTDKADLRLIYLALAHMIKFRGHFLIEGDLNPDNSDVDKLFIQLVQTYNQLFEENPINASGVDAKAILSARLSKSRRLENLIAQLPGEKKNGLFGNLIALSLGLTPNFKSNFDLAEDAKLQLSKDTYDDDLDNLLAQIGDQYADLFLAAKNLSDAILLSDILRVNTEITKAPLSASMIKRYDEHHQDLTLLKALVRQQLPEKYKEIFFDQSKNGYAGYIDGGASQEEFYKFIKPILEKMDGTEELLVKLNREDLLRKQRTFDNGSIPHQIHLGELHAILRRQEDFYPFLKDNREKIEKILTFRIPYYVGPLARGNSRFAWMTRKSEETITPWNFEEVVDKGASAQSFIERMTNFDKNLPNEKVLPKHSLLYEYFTVYNELTKVKYVTEGMRKPAFLSGEQKKAIVDLLFKTNRKVTVKQLKEDYFKKIECFDSVEISGVEDRFNASLGTYHDLLKIIKDKDFLDNEENEDILEDIVLTLTLFEDREMIEERLKTYAHLFDDKVMKQLKRRRYTGWGRLSRKLINGIRDKQSGKTILDFLKSDGFANRNFMQLIHDDSLTFKEDIQKAQVSGQGDSLHEHIANLAGSPAIKKGILQTVKVVDELVKVMGRHKPENIVIEMARENQTTQKGQKNSRERMKRIEEGIKELGSQILKEHPVENTQLQNEKLYLYYLQNGRDMYVDQELDINRLSDYDVDHIVPQSFLKDDSIDNKVLTRSDKARGKSDNVPSEEVVKKMKNYWRQLLNAKLITQRKFDNLTKAERGGLSELDKAGFIKRQLVETRQITKHVAQILDSRMNTKYDENDKLIREVKVITLKSKLVSDFRKDFQFYKVREINNYHHAHDAYLNAVVGTALIKKYPKLESEFVYGDYKVYDVRKMIAKSEQEIGKATAKYFFYSNIMNFFKTEITLANGEIRKRPLIETNGETGEIVWDKGRDFATVRKVLSMPQVNIVKKTEVQTGGFSKESILPKRNSDKLIARKKDWDPKKYGGFDSPTVAYSVLVVAKVEKGKSKKLKSVKELLGITIMERSSFEKNPIDFLEAKGYKEVKKDLIIKLPKYSLFELENGRKRMLASAGELQKGNELALPSKYVNFLYLASHYEKLKGSPEDNEQKQLFVEQHKHYLDEIIEQISEFSKRVILADANLDKVLSAYNKHRDKPIREQAENIIHLFTLTNLGAPAAFKYFDTTIDRKRYTSTKEVLDATLIHQSITGLYETRIDLSQLGGDGGEAAAKGGGGSEAAAKGGTLNIEDEYRLHETSKEPDVPLGSTWLSDFPQAWAETGGMGLAVRQAPLIIPLKATSTPVSIKQYPMSQEARLGIKPHIQRLLDQGILVPCQSPWNTPLLPVKKPGTNDYRPVQDLREVNKRVEDIHPTVPNPYNLLSGLPPSHQWYTVLDLKDAFFCLRLHPTSQPLFAFEWRDPEMGISGQLTWTRLPQGFKNSPTLFDEALHRDLADFRIQHPDLILLQYVDDLLLAATSEQDCQRGTRALLQTLGNLGYRASAKKAQICQKQVKYLGYLLKEGQRWLTEARKETVMGQPTPKTPRQLREFLGTAGFCRLWIPGFAEMAAPLYPLTKTGTLFNWGPDQQKAYQEIKQALLTAPALGLPDLTKPFELFVDEKQGYAKGVLTQKLGPWRRPVAYLSKKLDPVAAGWPPCLRMVAAIAVLTKDAGKLTMGQPLVILAPHAVEALVKQPPDRWLSNARMTHYQAMLLDTDRVQFGPVVALNPATLLPLPEKEAPHDCLEILAETHGTRPDLTDQPIPDADYTWYTDGSSFLQEGQRRAGAAVTTETEVIWARALPAGTSAQRAELIALTQALKMAEGKKLNVYTDSRYAFATAHVHGEIYRRRGLLTSEGREIKNKNEILALLKALFLPKRLSIIHCPGHQKGNSAEARGNRMADQAAREAAMKAVLETSTLLAGKRTADGSEFEKRTADGSEFESPKKKAKVE

SEQ ID NO: 7689 - protein, 2103 aa, synthetic construct
MPAAKRVKLDGGDKKYSIGLDIGTNSVGWAVITDEYKVPSKKFKVLGNTDRHSIKKNLIGALLFDSGETAEATRLKRTARRRYTRRKNRICYLQEIFSNEMAKVDDSFFHRLEESFLVEEDKKHERHPIFGNIVDEVAYHEKYPTIYHLRKKLVDSTDKADLRLIYLALAHMIKFRGHFLIEGDLNPDNSDVDKLFIQLVQTYNQLFEENPINASGVDAKAILSARLSKSRRLENLIAQLPGEKKNGLFGNLIALSLGLTPNFKSNFDLAEDAKLQLSKDTYDDDLDNLLAQIGDQYADLFLAAKNLSDAILLSDILRVNTEITKAPLSASMIKRYDEHHQDLTLLKALVRQQLPEKYKEIFFDQSKNGYAGYIDGGASQEEFYKFIKPILEKMDGTEELLVKLNREDLLRKQRTFDNGSIPHQIHLGELHAILRRQEDFYPFLKDNREKIEKILTFRIPYYVGPLARGNSRFAWMTRKSEETITPWNFEEVVDKGASAQSFIERMTNFDKNLPNEKVLPKHSLLYEYFTVYNELTKVKYVTEGMRKPAFLSGEQKKAIVDLLFKTNRKVTVKQLKEDYFKKIECFDSVEISGVEDRFNASLGTYHDLLKIIKDKDFLDNEENEDILEDIVLTLTLFEDREMIEERLKTYAHLFDDKVMKQLKRRRYTGWGRLSRKLINGIRDKQSGKTILDFLKSDGFANRNFMQLIHDDSLTFKEDIQKAQVSGQGDSLHEHIANLAGSPAIKKGILQTVKVVDELVKVMGRHKPENIVIEMARENQTTQKGQKNSRERMKRIEEGIKELGSQILKEHPVENTQLQNEKLYLYYLQNGRDMYVDQELDINRLSDYDVDHIVPQSFLKDDSIDNKVLTRSDKARGKSDNVPSEEVVKKMKNYWRQLLNAKLITQRKFDNLTKAERGGLSELDKAGFIKRQLVETRQITKHVAQILDSRMNTKYDENDKLIREVKVITLKSKLVSDFRKDFQFYKVREINNYHHAHDAYLNAVVGTALIKKYPKLESEFVYGDYKVYDVRKMIAKSEQEIGKATAKYFFYSNIMNFFKTEITLANGEIRKRPLIETNGETGEIVWDKGRDFATVRKVLSMPQVNIVKKTEVQTGGFSKESILPKRNSDKLIARKKDWDPKKYGGFDSPTVAYSVLVVAKVEKGKSKKLKSVKELLGITIMERSSFEKNPIDFLEAKGYKEVKKDLIIKLPKYSLFELENGRKRMLASAGELQKGNELALPSKYVNFLYLASHYEKLKGSPEDNEQKQLFVEQHKHYLDEIIEQISEFSKRVILADANLDKVLSAYNKHRDKPIREQAENIIHLFTLTNLGAPAAFKYFDTTIDRKRYTSTKEVLDATLIHQSITGLYETRIDLSQLGGDGGSGSETPGTSESATPESGGTAPLEEEYRLFLEAPIQNVTLLEQWKREIPKVWAEINPPGLASTQAPIHVQLLSTALPVRVRQYPITLEAKRSLRETIRKFRAAGILRPVHSPWNTPLLPVRKSGTSEYRMVQDLREVNKRVETIHPTVPNPYTLLSLLPPDRIWYSVLDLKDAFFCIPLAPESQLIFAFEWADAEEGESGQLTWTRLPQGFKNSPTLFNEALNRDLQGFRLDHPSVSLLQYVDDLLIAADTQAACLSATRDLLMTLAELGYRVSGKKAQLCQEEVTYLGFKIHKGSRSLSNSRTQAILQIPVPKTKRQVREFLGTIGYCRLWIPGFAELAQPLYAATRPGNDPLVWGEKEEEAFQSLKLALTQPPALALPSLDKPFQLFVEETSGAAKGVLTQALGPWKRPVAYLSKRLDPVAAGWPRCLRAIAAAALLTREASKLTFGQDIEITSSHNLESLLRSPPDKWLTNARITQYQVLLLDPPRVRFKQTAALNPATLLPETDDTLPIHHCLDTLDSLTSTRPDLTDQPLAQAEATLFTDGSSYIRDGKRYAGAAVVTLDSVIWAEPLPIGTSAQKAELIALTKALEWSKDKSVNIYTDSRYAFATLHVHGMIYRERGWLTAGGKAIKNAPEILALLTAVWLPKRVAVMHCKGHQKDDAPTSTGNRRADEVAREVAIRPLSTQATISAGKRTADGSEFEKRTADGSEFESPKKKAKVE

SEQ ID NO: 7690 - protein, 2178 aa, synthetic construct
MPAAKRVKLDGGDKKYSIGLDIGTNSVGWAVITDEYKVPSKKFKVLGNTDRHSIKKNLIGALLFDSGETAEATRLKRTARRRYTRRKNRICYLQEIFSNEMAKVDDSFFHRLEESFLVEEDKKHERHPIFGNIVDEVAYHEKYPTIYHLRKKLVDSTDKADLRLIYLALAHMIKFRGHFLIEGDLNPDNSDVDKLFIQLVQTYNQLFEENPINASGVDAKAILSARLSKSRRLENLIAQLPGEKKNGLFGNLIALSLGLTPNFKSNFDLAEDAKLQLSKDTYDDDLDNLLAQIGDQYADLFLAAKNLSDAILLSDILRVNTEITKAPLSASMIKRYDEHHQDLTLLKALVRQQLPEKYKEIFFDQSKNGYAGYIDGGASQEEFYKFIKPILEKMDGTEELLVKLNREDLLRKQRTFDNGSIPHQIHLGELHAILRRQEDFYPFLKDNREKIEKILTFRIPYYVGPLARGNSRFAWMTRKSEETITPWNFEEVVDKGASAQSFIERMTNFDKNLPNEKVLPKHSLLYEYFTVYNELTKVKYVTEGMRKPAFLSGEQKKAIVDLLFKTNRKVTVKQLKEDYFKKIECFDSVEISGVEDRFNASLGTYHDLLKIIKDKDFLDNEENEDILEDIVLTLTLFEDREMIEERLKTYAHLFDDKVMKQLKRRRYTGWGRLSRKLINGIRDKQSGKTILDFLKSDGFANRNFMQLIHDDSLTFKEDIQKAQVSGQGDSLHEHIANLAGSPAIKKGILQTVKVVDELVKVMGRHKPENIVIEMARENQTTQKGQKNSRERMKRIEEGIKELGSQILKEHPVENTQLQNEKLYLYYLQNGRDMYVDQELDINRLSDYDVDHIVPQSFLKDDSIDNKVLTRSDKARGKSDNVPSEEVVKKMKNYWRQLLNAKLITQRKFDNLTKAERGGLSELDKAGFIKRQLVETRQITKHVAQILDSRMNTKYDENDKLIREVKVITLKSKLVSDFRKDFQFYKVREINNYHHAHDAYLNAVVGTALIKKYPKLESEFVYGDYKVYDVRKMIAKSEQEIGKATAKYFFYSNIMNFFKTEITLANGEIRKRPLIETNGETGEIVWDKGRDFATVRKVLSMPQVNIVKKTEVQTGGFSKESILPKRNSDKLIARKKDWDPKKYGGFDSPTVAYSVLVVAKVEKGKSKKLKSVKELLGITIMERSSFEKNPIDFLEAKGYKEVKKDLIIKLPKYSLFELENGRKRMLASAGELQKGNELALPSKYVNFLYLASHYEKLKGSPEDNEQKQLFVEQHKHYLDEIIEQISEFSKRVILADANLDKVLSAYNKHRDKPIREQAENIIHLFTLTNLGAPAAFKYFDTTIDRKRYTSTKEVLDATLIHQSITGLYETRIDLSQLGGDGGSGSETPGTSESATPESGGMDLLKPLTVERKGVKIKGYWNSQADITCVPKDLLQGEEPVRQQNVTTIHGTQEGDVYYVNLKIDGRRINTEVIGTTLDYAIITPGDVPWILKKPLELTIKLDLEEQQGTLLNNSILSKKGKEELKQLFEKYSALWQSWENQVGHRRIRPHKIATGTVKPTPQKQYHINPKAKPDIQIVINDLLKQGVLIQKESTMNTPVYPVPKPNGRWRMVLDYRAVNKVTPLIAVQNQHSYGILGSLFKGRYKTTIDLSNGFWAHPIVPEDYWITAFTWQGKQYCWTVLPQGFLNSPGLFTGDVVDLLQGIPNVEVYVDDVYISHDSEKEHLEYLDILFNRLKEAGYIISLKKSNIANSIVDFLGFQITNEGRGLTDTFKEKLENITAPTTLKQLQSILGLLNFARNFIPDFTELIAPLYALIPKSTKNYVPWQIEHSTTLETLITKLNGAEYLQGRKGDKTLIMKVNASYTTGYIRYYNEGEKKPISYVSIVFSKTELKFTELEKLLTTVHKGLLKALDLSMGQNIHVYSPIVSMQNIQKTPQTAKKALASRWLSWLSYLEDPRIRFFYDPQMPALKDLPAVDTGKDNKKHPSNFQHIFYTDGSAITSPTKEGHLNAGMGIVYFINKDGNLQKQQEWSISLGNHTAQFAEIAAFEFALKKCLPLGGNILVVTDSNYVAKAYNEELDVWASNGFVNNRKKPLKHISKWKSVADLKRLRPDVVVTHEPGHQKLDSSPHAYGNNLADQLATQASFKVHAGKRTADGSEFEKRTADGSEFESPKKKAKVE

SEQ ID NO: 7691 - protein, 2100 aa, synthetic construct
MPAAKRVKLDGGDKKYSIGLDIGTNSVGWAVITDEYKVPSKKFKVLGNTDRHSIKKNLIGALLFDSGETAEATRLKRTARRRYTRRKNRICYLQEIFSNEMAKVDDSFFHRLEESFLVEEDKKHERHPIFGNIVDEVAYHEKYPTIYHLRKKLVDSTDKADLRLIYLALAHMIKFRGHFLIEGDLNPDNSDVDKLFIQLVQTYNQLFEENPINASGVDAKAILSARLSKSRRLENLIAQLPGEKKNGLFGNLIALSLGLTPNFKSNFDLAEDAKLQLSKDTYDDDLDNLLAQIGDQYADLFLAAKNLSDAILLSDILRVNTEITKAPLSASMIKRYDEHHQDLTLLKALVRQQLPEKYKEIFFDQSKNGYAGYIDGGASQEEFYKFIKPILEKMDGTEELLVKLNREDLLRKQRTFDNGSIPHQIHLGELHAILRRQEDFYPFLKDNREKIEKILTFRIPYYVGPLARGNSRFAWMTRKSEETITPWNFEEVVDKGASAQSFIERMTNFDKNLPNEKVLPKHSLLYEYFTVYNELTKVKYVTEGMRKPAFLSGEQKKAIVDLLFKTNRKVTVKQLKEDYFKKIECFDSVEISGVEDRFNASLGTYHDLLKIIKDKDFLDNEENEDILEDIVLTLTLFEDREMIEERLKTYAHLFDDKVMKQLKRRRYTGWGRLSRKLINGIRDKQSGKTILDFLKSDGFANRNFMQLIHDDSLTFKEDIQKAQVSGQGDSLHEHIANLAGSPAIKKGILQTVKVVDELVKVMGRHKPENIVIEMARENQTTQKGQKNSRERMKRIEEGIKELGSQILKEHPVENTQLQNEKLYLYYLQNGRDMYVDQELDINRLSDYDVDHIVPQSFLKDDSIDNKVLTRSDKARGKSDNVPSEEVVKKMKNYWRQLLNAKLITQRKFDNLTKAERGGLSELDKAGFIKRQLVETRQITKHVAQILDSRMNTKYDENDKLIREVKVITLKSKLVSDFRKDFQFYKVREINNYHHAHDAYLNAVVGTALIKKYPKLESEFVYGDYKVYDVRKMIAKSEQEIGKATAKYFFYSNIMNFFKTEITLANGEIRKRPLIETNGETGEIVWDKGRDFATVRKVLSMPQVNIVKKTEVQTGGFSKESILPKRNSDKLIARKKDWDPKKYGGFDSPTVAYSVLVVAKVEKGKSKKLKSVKELLGITIMERSSFEKNPIDFLEAKGYKEVKKDLIIKLPKYSLFELENGRKRMLASAGELQKGNELALPSKYVNFLYLASHYEKLKGSPEDNEQKQLFVEQHKHYLDEIIEQISEFSKRVILADANLDKVLSAYNKHRDKPIREQAENIIHLFTLTNLGAPAAFKYFDTTIDRKRYTSTKEVLDATLIHQSITGLYETRIDLSQLGGDGGSGSETPGTSESATPESGGTLQLEEEYRLFEPESTQKQEMDIWLKNFPQAWAETGGMGTAHCQAPVLIQLKATATPISIRQYPMPHEAYQGIKPHIRRMLDQGILKPCQSPWNTPLLPVKKPGTEDYRPVQDLREVNKRVEDIHPTVPNPYNLLSTLPPSHPWYTVLDLKDAFFCLRLHSESQLLFAFEWRDPEIGLSGQLTWTRLPQGFKNSPTLFNEALHSDLADFRVRYPALVLLQYVDDLLLAAATRTECLEGTKALLETLGNKGYRASAKKAQICLQEVTYLGYSLKDGQRWLTKARKEAILSIPVPKNSRQVREFLGTAGYCRLWIPGFAELAAPLYPLTRPGTLFQWGTEQQLAFEDIKKALLSSPALGLPDITKPFELFIDENSGFAKGVLVQKLGPWKRPVAYLSKKLDTVASGWPPCLRMVAAIAILVKDAGKLTLGQPLTILTSHPVEALVRQPPNKWLSNARMTHYQAMLLDAERVHFGPTVSLNPATLLPLPSGGNHHDCLQILAETHGTRPDLTDQPLPDADLTWYTDGSSFIRNGEREAGAAVTTESEVIWAAPLPPGTSAQRAELIALTQALKMAEGKKLTVYTDSRYAFATTHVHGEIYRRRGWLTSEGKEIKNKNEILALLEALFLPKRLSIIHCPGHQKGDSPQAKGNRLADDTAKKAATETHSSLTVLPAGKRTADGSEFEKRTADGSEFESPKKKAKVE

SEQ ID NO: 7692 - protein, 2011 aa, synthetic construct
MPAAKRVKLDGGDKKYSIGLDIGTNSVGWAVITDEYKVPSKKFKVLGNTDRHSIKKNLIGALLFDSGETAEATRLKRTARRRYTRRKNRICYLQEIFSNEMAKVDDSFFHRLEESFLVEEDKKHERHPIFGNIVDEVAYHEKYPTIYHLRKKLVDSTDKADLRLIYLALAHMIKFRGHFLIEGDLNPDNSDVDKLFIQLVQTYNQLFEENPINASGVDAKAILSARLSKSRRLENLIAQLPGEKKNGLFGNLIALSLGLTPNFKSNFDLAEDAKLQLSKDTYDDDLDNLLAQIGDQYADLFLAAKNLSDAILLSDILRVNTEITKAPLSASMIKRYDEHHQDLTLLKALVRQQLPEKYKEIFFDQSKNGYAGYIDGGASQEEFYKFIKPILEKMDGTEELLVKLNREDLLRKQRTFDNGSIPHQIHLGELHAILRRQEDFYPFLKDNREKIEKILTFRIPYYVGPLARGNSRFAWMTRKSEETITPWNFEEVVDKGASAQSFIERMTNFDKNLPNEKVLPKHSLLYEYFTVYNELTKVKYVTEGMRKPAFLSGEQKKAIVDLLFKTNRKVTVKQLKEDYFKKIECFDSVEISGVEDRFNASLGTYHDLLKIIKDKDFLDNEENEDILEDIVLTLTLFEDREMIEERLKTYAHLFDDKVMKQLKRRRYTGWGRLSRKLINGIRDKQSGKTILDFLKSDGFANRNFMQLIHDDSLTFKEDIQKAQVSGQGDSLHEHIANLAGSPAIKKGILQTVKVVDELVKVMGRHKPENIVIEMARENQTTQKGQKNSRERMKRIEEGIKELGSQILKEHPVENTQLQNEKLYLYYLQNGRDMYVDQELDINRLSDYDVDHIVPQSFLKDDSIDNKVLTRSDKARGKSDNVPSEEVVKKMKNYWRQLLNAKLITQRKFDNLTKAERGGLSELDKAGFIKRQLVETRQITKHVAQILDSRMNTKYDENDKLIREVKVITLKSKLVSDFRKDFQFYKVREINNYHHAHDAYLNAVVGTALIKKYPKLESEFVYGDYKVYDVRKMIAKSEQEIGKATAKYFFYSNIMNFFKTEITLANGEIRKRPLIETNGETGEIVWDKGRDFATVRKVLSMPQVNIVKKTEVQTGGFSKESILPKRNSDKLIARKKDWDPKKYGGFDSPTVAYSVLVVAKVEKGKSKKLKSVKELLGITIMERSSFEKNPIDFLEAKGYKEVKKDLIIKLPKYSLFELENGRKRMLASAGELQKGNELALPSKYVNFLYLASHYEKLKGSPEDNEQKQLFVEQHKHYLDEIIEQISEFSKRVILADANLDKVLSAYNKHRDKPIREQAENIIHLFTLTNLGAPAAFKYFDTTIDRKRYTSTKEVLDATLIHQSITGLYETRIDLSQLGGDGGSGSETPGTSESATPESGGPLGTSDSPVTHADPIDWKSEEPVWVDQWPLTQEKLSAAQQLVQEQLRLGHIEPSTSAWNSPIFVIKKKSGKWRLLQDLRKVNETMMHMGALQPGLPTPSPIPDKSYIIVIDLKDCFYTIPLAPQDCKRFAFSLPSVNFKEPMQRYQWRVLPQGMTNSPTLCQKFVATAIAPVRQRFPQLYLVHYMDDILLAHTDEHLLYQAFSILKQHLSLNGLVIADEKIQTHFPYNYLGFSLYPRVYNTQLVKLQTDHLKTLNDFQKLLGDINWIRPYLKLPTYTLQPLFDILKGDSDPASPRTLSLEGRTALQSIEEAIRQQQITYCDYQRSWGLYILPTPRAPTGVLYQDKPLRWIYLSATPTKHLLPYYELVAKIIAKGRHEAIQYFGMEPPFICVPYALEQQDWLFQFSDNWSIAFANYPGQITHHYPSDKLLQFASSHAFIFPKIVRRQPIPEATLIFTDGSSNGTAALIINHQTYYAQTSFSSAQVVELFAVHQALLTVPTSFNLFTDSSYVVGALQMIETVPIIGTTSPEVLNLFTLIQQVLHCRQHPCFFGHIRAHSTLPGALVQGNHTADVLTKQVFFQSAGKRTADGSEFEKRTADGSEFESPKKKAKVE

SEQ ID NO: 7693 - protein, 2223 aa, synthetic construct
MPAAKRVKLDGGDKKYSIGLDIGTNSVGWAVITDEYKVPSKKFKVLGNTDRHSIKKNLIGALLFDSGETAEATRLKRTARRRYTRRKNRICYLQEIFSNEMAKVDDSFFHRLEESFLVEEDKKHERHPIFGNIVDEVAYHEKYPTIYHLRKKLVDSTDKADLRLIYLALAHMIKFRGHFLIEGDLNPDNSDVDKLFIQLVQTYNQLFEENPINASGVDAKAILSARLSKSRRLENLIAQLPGEKKNGLFGNLIALSLGLTPNFKSNFDLAEDAKLQLSKDTYDDDLDNLLAQIGDQYADLFLAAKNLSDAILLSDILRVNTEITKAPLSASMIKRYDEHHQDLTLLKALVRQQLPEKYKEIFFDQSKNGYAGYIDGGASQEEFYKFIKPILEKMDGTEELLVKLNREDLLRKQRTFDNGSIPHQIHLGELHAILRRQEDFYPFLKDNREKIEKILTFRIPYYVGPLARGNSRFAWMTRKSEETITPWNFEEVVDKGASAQSFIERMTNFDKNLPNEKVLPKHSLLYEYFTVYNELTKVKYVTEGMRKPAFLSGEQKKAIVDLLFKTNRKVTVKQLKEDYFKKIECFDSVEISGVEDRFNASLGTYHDLLKIIKDKDFLDNEENEDILEDIVLTLTLFEDREMIEERLKTYAHLFDDKVMKQLKRRRYTGWGRLSRKLINGIRDKQSGKTILDFLKSDGFANRNFMQLIHDDSLTFKEDIQKAQVSGQGDSLHEHIANLAGSPAIKKGILQTVKVVDELVKVMGRHKPENIVIEMARENQTTQKGQKNSRERMKRIEEGIKELGSQILKEHPVENTQLQNEKLYLYYLQNGRDMYVDQELDINRLSDYDVDHIVPQSFLKDDSIDNKVLTRSDKARGKSDNVPSEEVVKKMKNYWRQLLNAKLITQRKFDNLTKAERGGLSELDKAGFIKRQLVETRQITKHVAQILDSRMNTKYDENDKLIREVKVITLKSKLVSDFRKDFQFYKVREINNYHHAHDAYLNAVVGTALIKKYPKLESEFVYGDYKVYDVRKMIAKSEQEIGKATAKYFFYSNIMNFFKTEITLANGEIRKRPLIETNGETGEIVWDKGRDFATVRKVLSMPQVNIVKKTEVQTGGFSKESILPKRNSDKLIARKKDWDPKKYGGFDSPTVAYSVLVVAKVEKGKSKKLKSVKELLGITIMERSSFEKNPIDFLEAKGYKEVKKDLIIKLPKYSLFELENGRKRMLASAGELQKGNELALPSKYVNFLYLASHYEKLKGSPEDNEQKQLFVEQHKHYLDEIIEQISEFSKRVILADANLDKVLSAYNKHRDKPIREQAENIIHLFTLTNLGAPAAFKYFDTTIDRKRYTSTKEVLDATLIHQSITGLYETRIDLSQLGGDGGSGSETPGTSESATPESGGTLGDQGSRGSDPLPEPRVTLTVEGIPTEFLVNTGAEHSVLTKPMGKMGSKRTVVAGATGSKVYPWTTKRLLKIGQKQVTHSFLVIPECPAPLLGRDLLTKLKAQIQFSTEGPQVTWEDRPAMCLVLNLEEEYRLHEKPVPPSIDPSWLQLFPMVWAEKAGMGLANQVPPVVVELKSDASPVAVRQYPMSKEAREGIRPHIQRFLDLGILVPCQSPWNTPLLPVKKPGTNDYRPVQDLREVNKRVQDIHPTVPNPYNLLSSLPPSHTWYSVLDLKDAFFCLKLHPNSQPLFAFEWRDPEKGNTGQLTWTRLPQGFKNSPTLFDEALHRDLASFRALNPQVVMLQYVDDLLVAAPTYRDCKEGTRRLLQELSKLGYRVSAKKAQLCREEVTYLGYLLKGGKRWLTPARKATVMKIPTPTTPRQVREFLGTAGFCRLWIPGFASLAAPLYPLTREKVPFTWTEAHQEAFGRIKEALLSAPALALPDLTKPFALYVDEKEGVARGVLTQTLGPWRRPVAYLSKKLDPVASGWPTCLKAIAAVALLLKDADKLTLGQNVLVIAPHNLESIVRQPPDRWMTNARMTHYQSLLLNERVSFAPPAILNPATLLPVESDDTPIHICSEILAEETGTRPDLRDQPLPGVPAWYTDGSSFIMDGRRQAGAAIVDNKRTVWASNLPEGTSAQKAELIALTQALRLAEGKSINIYTDSRYAFATAHVHGAIYKQRGLLTSAGKDIKNKEEILALLEAIHLPKRVAIIHCPGHQRGTDPVATGNRKADEAAKQAAQSTRILTETTKNAGKRTADGSEFEKRTADGSEFESPKKKAKVE

SEQ ID NO: 7694 - protein, 2132 aa, synthetic construct
MPAAKRVKLDGGDKKYSIGLDIGTNSVGWAVITDEYKVPSKKFKVLGNTDRHSIKKNLIGALLFDSGETAEATRLKRTARRRYTRRKNRICYLQEIFSNEMAKVDDSFFHRLEESFLVEEDKKHERHPIFGNIVDEVAYHEKYPTIYHLRKKLVDSTDKADLRLIYLALAHMIKFRGHFLIEGDLNPDNSDVDKLFIQLVQTYNQLFEENPINASGVDAKAILSARLSKSRRLENLIAQLPGEKKNGLFGNLIALSLGLTPNFKSNFDLAEDAKLQLSKDTYDDDLDNLLAQIGDQYADLFLAAKNLSDAILLSDILRVNTEITKAPLSASMIKRYDEHHQDLTLLKALVRQQLPEKYKEIFFDQSKNGYAGYIDGGASQEEFYKFIKPILEKMDGTEELLVKLNREDLLRKQRTFDNGSIPHQIHLGELHAILRRQEDFYPFLKDNREKIEKILTFRIPYYVGPLARGNSRFAWMTRKSEETITPWNFEEVVDKGASAQSFIERMTNFDKNLPNEKVLPKHSLLYEYFTVYNELTKVKYVTEGMRKPAFLSGEQKKAIVDLLFKTNRKVTVKQLKEDYFKKIECFDSVEISGVEDRFNASLGTYHDLLKIIKDKDFLDNEENEDILEDIVLTLTLFEDREMIEERLKTYAHLFDDKVMKQLKRRRYTGWGRLSRKLINGIRDKQSGKTILDFLKSDGFANRNFMQLIHDDSLTFKEDIQKAQVSGQGDSLHEHIANLAGSPAIKKGILQTVKVVDELVKVMGRHKPENIVIEMARENQTTQKGQKNSRERMKRIEEGIKELGSQILKEHPVENTQLQNEKLYLYYLQNGRDMYVDQELDINRLSDYDVDHIVPQSFLKDDSIDNKVLTRSDKARGKSDNVPSEEVVKKMKNYWRQLLNAKLITQRKFDNLTKAERGGLSELDKAGFIKRQLVETRQITKHVAQILDSRMNTKYDENDKLIREVKVITLKSKLVSDFRKDFQFYKVREINNYHHAHDAYLNAVVGTALIKKYPKLESEFVYGDYKVYDVRKMIAKSEQEIGKATAKYFFYSNIMNFFKTEITLANGEIRKRPLIETNGETGEIVWDKGRDFATVRKVLSMPQVNIVKKTEVQTGGFSKESILPKRNSDKLIARKKDWDPKKYGGFDSPTVAYSVLVVAKVEKGKSKKLKSVKELLGITIMERSSFEKNPIDFLEAKGYKEVKKDLIIKLPKYSLFELENGRKRMLASAGELQKGNELALPSKYVNFLYLASHYEKLKGSPEDNEQKQLFVEQHKHYLDEIIEQISEFSKRVILADANLDKVLSAYNKHRDKPIREQAENIIHLFTLTNLGAPAAFKYFDTTIDRKRYTSTKEVLDATLIHQSITGLYETRIDLSQLGGDGGSGSETPGTSESATPESGGLLGRDLLTKLKAQIQFSTEGPQVTWEDRPAMCLVLNLEEEYRLHEKPVPPSIDPSWLQLFPMVWAEKAGMGLANQVPPVVVELKSDASPVAVRQYPMSKEAREGIRPHIQRFLDLGILVPCQSPWNTPLLPVKKPGTNDYRPVQDLREVNKRVQDIHPTVPNPYNLLSSLPPSHTWYSVLDLKDAFFCLKLHPNSQPLFAFEWRDPEKGNTGQLTWTRLPQGFKNSPTLFNEALHRDLASFRALNPQVVMLQYVDDLLVAAPTYRDCKEGTRRLLQELSKLGYRVSAKKAQLCREEVTYLGYLLKGGKRWLTPARKATVMKIPTPTTPRQVREFLGKAGFCRLFIPGFASLAAPLYPLTRPKVPFTWTEAHQEAFGRIKEALLSAPALALPDLTKPFALYVDEKEGVARGVLTQTLGPWRRPVAYLSKKLDPVASGWPTCLKAIAAVALLLKDADKLTLGQNVLVIAPHNLESIVRQPPDRWMTNARMTHYQSLLLNERVSFAPPAILNPATLLPVESDDTPIHICSEILAEETGTRPDLRDQPLPGVPAWYTDGSSFIMDGRRQAGAAIVDNKRTVWASNLPEGTSAQKAELIALTQALRLAEGKSINIYTDSRYAFATAHVHGAIYKQRGWLTSAGKDIKNKEEILALLEAIHLPKRVAIIHCPGHQRGTDPVATGNRKADEAAKQAAQSTRILTETTKNAGKRTADGSEFEKRTADGSEFESPKKKAKVE

SEQ ID NO: 7695 - protein, 2223 aa, synthetic construct
MPAAKRVKLDGGDKKYSIGLDIGTNSVGWAVITDEYKVPSKKFKVLGNTDRHSIKKNLIGALLFDSGETAEATRLKRTARRRYTRRKNRICYLQEIFSNEMAKVDDSFFHRLEESFLVEEDKKHERHPIFGNIVDEVAYHEKYPTIYHLRKKLVDSTDKADLRLIYLALAHMIKFRGHFLIEGDLNPDNSDVDKLFIQLVQTYNQLFEENPINASGVDAKAILSARLSKSRRLENLIAQLPGEKKNGLFGNLIALSLGLTPNFKSNFDLAEDAKLQLSKDTYDDDLDNLLAQIGDQYADLFLAAKNLSDAILLSDILRVNTEITKAPLSASMIKRYDEHHQDLTLLKALVRQQLPEKYKEIFFDQSKNGYAGYIDGGASQEEFYKFIKPILEKMDGTEELLVKLNREDLLRKQRTFDNGSIPHQIHLGELHAILRRQEDFYPFLKDNREKIEKILTFRIPYYVGPLARGNSRFAWMTRKSEETITPWNFEEVVDKGASAQSFIERMTNFDKNLPNEKVLPKHSLLYEYFTVYNELTKVKYVTEGMRKPAFLSGEQKKAIVDLLFKTNRKVTVKQLKEDYFKKIECFDSVEISGVEDRFNASLGTYHDLLKIIKDKDFLDNEENEDILEDIVLTLTLFEDREMIEERLKTYAHLFDDKVMKQLKRRRYTGWGRLSRKLINGIRDKQSGKTILDFLKSDGFANRNFMQLIHDDSLTFKEDIQKAQVSGQGDSLHEHIANLAGSPAIKKGILQTVKVVDELVKVMGRHKPENIVIEMARENQTTQKGQKNSRERMKRIEEGIKELGSQILKEHPVENTQLQNEKLYLYYLQNGRDMYVDQELDINRLSDYDVDHIVPQSFLKDDSIDNKVLTRSDKARGKSDNVPSEEVVKKMKNYWRQLLNAKLITQRKFDNLTKAERGGLSELDKAGFIKRQLVETRQITKHVAQILDSRMNTKYDENDKLIREVKVITLKSKLVSDFRKDFQFYKVREINNYHHAHDAYLNAVVGTALIKKYPKLESEFVYGDYKVYDVRKMIAKSEQEIGKATAKYFFYSNIMNFFKTEITLANGEIRKRPLIETNGETGEIVWDKGRDFATVRKVLSMPQVNIVKKTEVQTGGFSKESILPKRNSDKLIARKKDWDPKKYGGFDSPTVAYSVLVVAKVEKGKSKKLKSVKELLGITIMERSSFEKNPIDFLEAKGYKEVKKDLIIKLPKYSLFELENGRKRMLASAGELQKGNELALPSKYVNFLYLASHYEKLKGSPEDNEQKQLFVEQHKHYLDEIIEQISEFSKRVILADANLDKVLSAYNKHRDKPIREQAENIIHLFTLTNLGAPAAFKYFDTTIDRKRYTSTKEVLDATLIHQSITGLYETRIDLSQLGGDGGSGSETPGTSESATPESGGTLGDQGSRGSDPLPEPRVTLTVEGIPTEFLVNTGAEHSVLTKPMGKMGSKRTVVAGATGSKVYPWTTKRLLKIGQKQVTHSFLVIPECPAPLLGRDLLTKLKAQIQFSTEGPQVTWEDRPAMCLVLNLEEEYRLHEKPVPPSIDPSWLQLFPMVWAEKAGMGLANQVPPVVVELKSDASPVAVRQYPMSKEAREGIRPHIQRFLDLGILVPCQSPWNTPLLPVKKPGTNDYRPVQDLREVNKRVQDIHPTVPNPYNLLSSLPPSHTWYSVLDLKDAFFCLKLHPNSQPLFAFEWRDPEKGNTGQLTWTRLPQGFKNSPTLFNEALHRDLASFRALNPQVVMLQYVDDLLVAAPTYRDCKEGTRRLLQELSKLGYRVSAKKAQLCREEVTYLGYLLKGGKRWLTPARKATVMKIPTPTTPRQVREFLGTAGFCRLWIPGFASLAAPLYPLTRPKVPFTWTEAHQEAFGRIKEALLSAPALALPDLTKPFALYVDEKEGVARGVLTQTLGPWRRPVAYLSKKLDPVASGWPTCLKAIAAVALLLKDADKLTLGQNVLVIAPHNLESIVRQPPDRWMTNARMTHYQSLLLNERVSFAPPAILNPATLLPVESDDTPIHICSEILAEETGTRPDLRDQPLPGVPAWYTDGSSFIMDGRRQAGAAIVDNKRTVWASNLPEGTSAQKAELIALTQALRLAEGKSINIYTDSRYAFATAHVHGAIYKQRGWLTSAGKDIKNKEEILALLEAIHLPKRVAIIHCPGHQRGTDPVATGNRKADEAAKQAAQSTRILTETTKNAGKRTADGSEFEKRTADGSEFESPKKKAKVE

SEQ ID NO: 7696 - protein, 2101 aa, synthetic construct
MPAAKRVKLDGGDKKYSIGLDIGTNSVGWAVITDEYKVPSKKFKVLGNTDRHSIKKNLIGALLFDSGETAEATRLKRTARRRYTRRKNRICYLQEIFSNEMAKVDDSFFHRLEESFLVEEDKKHERHPIFGNIVDEVAYHEKYPTIYHLRKKLVDSTDKADLRLIYLALAHMIKFRGHFLIEGDLNPDNSDVDKLFIQLVQTYNQLFEENPINASGVDAKAILSARLSKSRRLENLIAQLPGEKKNGLFGNLIALSLGLTPNFKSNFDLAEDAKLQLSKDTYDDDLDNLLAQIGDQYADLFLAAKNLSDAILLSDILRVNTEITKAPLSASMIKRYDEHHQDLTLLKALVRQQLPEKYKEIFFDQSKNGYAGYIDGGASQEEFYKFIKPILEKMDGTEELLVKLNREDLLRKQRTFDNGSIPHQIHLGELHAILRRQEDFYPFLKDNREKIEKILTFRIPYYVGPLARGNSRFAWMTRKSEETITPWNFEEVVDKGASAQSFIERMTNFDKNLPNEKVLPKHSLLYEYFTVYNELTKVKYVTEGMRKPAFLSGEQKKAIVDLLFKTNRKVTVKQLKEDYFKKIECFDSVEISGVEDRFNASLGTYHDLLKIIKDKDFLDNEENEDILEDIVLTLTLFEDREMIEERLKTYAHLFDDKVMKQLKRRRYTGWGRLSRKLINGIRDKQSGKTILDFLKSDGFANRNFMQLIHDDSLTFKEDIQKAQVSGQGDSLHEHIANLAGSPAIKKGILQTVKVVDELVKVMGRHKPENIVIEMARENQTTQKGQKNSRERMKRIEEGIKELGSQILKEHPVENTQLQNEKLYLYYLQNGRDMYVDQELDINRLSDYDVDHIVPQSFLKDDSIDNKVLTRSDKARGKSDNVPSEEVVKKMKNYWRQLLNAKLITQRKFDNLTKAERGGLSELDKAGFIKRQLVETRQITKHVAQILDSRMNTKYDENDKLIREVKVITLKSKLVSDFRKDFQFYKVREINNYHHAHDAYLNAVVGTALIKKYPKLESEFVYGDYKVYDVRKMIAKSEQEIGKATAKYFFYSNIMNFFKTEITLANGEIRKRPLIETNGETGEIVWDKGRDFATVRKVLSMPQVNIVKKTEVQTGGFSKESILPKRNSDKLIARKKDWDPKKYGGFDSPTVAYSVLVVAKVEKGKSKKLKSVKELLGITIMERSSFEKNPIDFLEAKGYKEVKKDLIIKLPKYSLFELENGRKRMLASAGELQKGNELALPSKYVNFLYLASHYEKLKGSPEDNEQKQLFVEQHKHYLDEIIEQISEFSKRVILADANLDKVLSAYNKHRDKPIREQAENIIHLFTLTNLGAPAAFKYFDTTIDRKRYTSTKEVLDATLIHQSITGLYETRIDLSQLGGDGGSGSETPGTSESATPESGGTLNLEDEYRLYETSAEPEVSPGSTWLSDFPQAWAETGGMGLAVRQAPLIIPLKATSTPVSIKQYPMSQEAKLGIKPHIQRLLDQGILVPCQSPWNTPLLPVKKPGTNDYRPVQDLREVNKRVEDIHPTVPNPYNLLSGLPPSHRWYTVLDLKDAFFCLRLHPTSQPLFAFEWRDPGMGISGQLTWTRLPQGFKNSPTLFNEALHRDLADFRIQHPDLILLQYVDDILLAATSELDCQQGTRALLLTLGNLGYRASAKKAQLCQKQVKYLGYLLKEGQRWLTEARKETVMGQPTPKTPRQLREFLGTAGFCRLWIPGFAEMAAPLYPLTKPGTLFNWGPDQQKAYQEIKQALLTAPALGLPDLTKPFELFVDEKQGYAKGVLTQKLGPWRRPVAYLSKKLDPVAAGWPPCLRMVAAIAVLRKDAGKLTMGQPLVILAPHAVEALVKQPPDRWLSNARMTHYQAMLLDTDRVQFGPVVALNPATLLPLPEEGAPHDCLEILAETHGTRPDLTDQPIPDADHTWYTDGSSFLQEGQRKAGAAVTTETEVIWARALPAGTSAQRAELIALTQALKMAEGKRLNVYTDSRYAFATAHIHGEIYRRRGWLTSEGREIKNKSEILALLKALFLPKRLSIIHCLGHQKGDSAEARGNRLADQAAREAAIKTPPDTSTLLAGKRTADGSEFEKRTADGSEFESPKKKAKVE

SEQ ID NO: 7697 - protein, 2101 aa, synthetic construct
MPAAKRVKLDGGDKKYSIGLDIGTNSVGWAVITDEYKVPSKKFKVLGNTDRHSIKKNLIGALLFDSGETAEATRLKRTARRRYTRRKNRICYLQEIFSNEMAKVDDSFFHRLEESFLVEEDKKHERHPIFGNIVDEVAYHEKYPTIYHLRKKLVDSTDKADLRLIYLALAHMIKFRGHFLIEGDLNPDNSDVDKLFIQLVQTYNQLFEENPINASGVDAKAILSARLSKSRRLENLIAQLPGEKKNGLFGNLIALSLGLTPNFKSNFDLAEDAKLQLSKDTYDDDLDNLLAQIGDQYADLFLAAKNLSDAILLSDILRVNTEITKAPLSASMIKRYDEHHQDLTLLKALVRQQLPEKYKEIFFDQSKNGYAGYIDGGASQEEFYKFIKPILEKMDGTEELLVKLNREDLLRKQRTFDNGSIPHQIHLGELHAILRRQEDFYPFLKDNREKIEKILTFRIPYYVGPLARGNSRFAWMTRKSEETITPWNFEEVVDKGASAQSFIERMTNFDKNLPNEKVLPKHSLLYEYFTVYNELTKVKYVTEGMRKPAFLSGEQKKAIVDLLFKTNRKVTVKQLKEDYFKKIECFDSVEISGVEDRFNASLGTYHDLLKIIKDKDFLDNEENEDILEDIVLTLTLFEDREMIEERLKTYAHLFDDKVMKQLKRRRYTGWGRLSRKLINGIRDKQSGKTILDFLKSDGFANRNFMQLIHDDSLTFKEDIQKAQVSGQGDSLHEHIANLAGSPAIKKGILQTVKVVDELVKVMGRHKPENIVIEMARENQTTQKGQKNSRERMKRIEEGIKELGSQILKEHPVENTQLQNEKLYLYYLQNGRDMYVDQELDINRLSDYDVDHIVPQSFLKDDSIDNKVLTRSDKARGKSDNVPSEEVVKKMKNYWRQLLNAKLITQRKFDNLTKAERGGLSELDKAGFIKRQLVETRQITKHVAQILDSRMNTKYDENDKLIREVKVITLKSKLVSDFRKDFQFYKVREINNYHHAHDAYLNAVVGTALIKKYPKLESEFVYGDYKVYDVRKMIAKSEQEIGKATAKYFFYSNIMNFFKTEITLANGEIRKRPLIETNGETGEIVWDKGRDFATVRKVLSMPQVNIVKKTEVQTGGFSKESILPKRNSDKLIARKKDWDPKKYGGFDSPTVAYSVLVVAKVEKGKSKKLKSVKELLGITIMERSSFEKNPIDFLEAKGYKEVKKDLIIKLPKYSLFELENGRKRMLASAGELQKGNELALPSKYVNFLYLASHYEKLKGSPEDNEQKQLFVEQHKHYLDEIIEQISEFSKRVILADANLDKVLSAYNKHRDKPIREQAENIIHLFTLTNLGAPAAFKYFDTTIDRKRYTSTKEVLDATLIHQSITGLYETRIDLSQLGGDGGSGSETPGTSESATPESGGTLNLEDEYRLYETSAEPEVSPGSTWLSDFPQAWAETGGMGLAVRQAPLIIPLKATSTPVSIKQYPMSQEAKLGIKPHIQRLLDQGILVPCQSPWNTPLLPVKKPGTNDYRPVQDLREVNKRVEDIHPTVPNPYNLLSGLPPSHRWYTVLDLKDAFFCLRLHPTSQPLFAFEWRDPGMGISGQLTWTRLPQGFKNSPTLFNEALHRDLADFRIQHPDLILLQYVDDILLAATSELDCQQGTRALLLTLGNLGYRASAKKAQLCQKQVKYLGYLLKEGQRWLTEARKETVMGQPTPKTPRQLREFLGKAGFCRLFIPGFAEMAAPLYPLTKPGTLFNWGPDQQKAYQEIKQALLTAPALGLPDLTKPFELFVDEKQGYAKGVLTQKLGPWRRPVAYLSKKLDPVAAGWPPCLRMVAAIAVLRKDAGKLTMGQPLVILAPHAVEALVKQPPDRWLSNARMTHYQAMLLDTDRVQFGPVVALNPATLLPLPEEGAPHDCLEILAETHGTRPDLTDQPIPDADHTWYTDGSSFLQEGQRKAGAAVTTETEVIWARALPAGTSAQRAELIALTQALKMAEGKRLNVYTDSRYAFATAHIHGEIYRRRGWLTSEGREIKNKSEILALLKALFLPKRLSIIHCLGHQKGDSAEARGNRLADQAAREAAIKTPPDTSTLLAGKRTADGSEFEKRTADGSEFESPKKKAKVE

SEQ ID NO: 7698 - protein, 2101 aa, synthetic construct
MPAAKRVKLDGGDKKYSIGLDIGTNSVGWAVITDEYKVPSKKFKVLGNTDRHSIKKNLIGALLFDSGETAEATRLKRTARRRYTRRKNRICYLQEIFSNEMAKVDDSFFHRLEESFLVEEDKKHERHPIFGNIVDEVAYHEKYPTIYHLRKKLVDSTDKADLRLIYLALAHMIKFRGHFLIEGDLNPDNSDVDKLFIQLVQTYNQLFEENPINASGVDAKAILSARLSKSRRLENLIAQLPGEKKNGLFGNLIALSLGLTPNFKSNFDLAEDAKLQLSKDTYDDDLDNLLAQIGDQYADLFLAAKNLSDAILLSDILRVNTEITKAPLSASMIKRYDEHHQDLTLLKALVRQQLPEKYKEIFFDQSKNGYAGYIDGGASQEEFYKFIKPILEKMDGTEELLVKLNREDLLRKQRTFDNGSIPHQIHLGELHAILRRQEDFYPFLKDNREKIEKILTFRIPYYVGPLARGNSRFAWMTRKSEETITPWNFEEVVDKGASAQSFIERMTNFDKNLPNEKVLPKHSLLYEYFTVYNELTKVKYVTEGMRKPAFLSGEQKKAIVDLLFKTNRKVTVKQLKEDYFKKIECFDSVEISGVEDRFNASLGTYHDLLKIIKDKDFLDNEENEDILEDIVLTLTLFEDREMIEERLKTYAHLFDDKVMKQLKRRRYTGWGRLSRKLINGIRDKQSGKTILDFLKSDGFANRNFMQLIHDDSLTFKEDIQKAQVSGQGDSLHEHIANLAGSPAIKKGILQTVKVVDELVKVMGRHKPENIVIEMARENQTTQKGQKNSRERMKRIEEGIKELGSQILKEHPVENTQLQNEKLYLYYLQNGRDMYVDQELDINRLSDYDVDHIVPQSFLKDDSIDNKVLTRSDKARGKSDNVPSEEVVKKMKNYWRQLLNAKLITQRKFDNLTKAERGGLSELDKAGFIKRQLVETRQITKHVAQILDSRMNTKYDENDKLIREVKVITLKSKLVSDFRKDFQFYKVREINNYHHAHDAYLNAVVGTALIKKYPKLESEFVYGDYKVYDVRKMIAKSEQEIGKATAKYFFYSNIMNFFKTEITLANGEIRKRPLIETNGETGEIVWDKGRDFATVRKVLSMPQVNIVKKTEVQTGGFSKESILPKRNSDKLIARKKDWDPKKYGGFDSPTVAYSVLVVAKVEKGKSKKLKSVKELLGITIMERSSFEKNPIDFLEAKGYKEVKKDLIIKLPKYSLFELENGRKRMLASAGELQKGNELALPSKYVNFLYLASHYEKLKGSPEDNEQKQLFVEQHKHYLDEIIEQISEFSKRVILADANLDKVLSAYNKHRDKPIREQAENIIHLFTLTNLGAPAAFKYFDTTIDRKRYTSTKEVLDATLIHQSITGLYETRIDLSQLGGDGGSGSETPGTSESATPESGGTLGIEDEYRLHETSTEPDVSLGSTWLSDFPQAWAETGGMGLAVRQAPLIIPLKATSTPVSIQQYPMSHEARLGIKPHIQRLLDQGILVPCQSPWNTPLLPVKKPGTNDYRPVQDLREVNKRVEDIHPTVPNPYNLLSGLPPSHQWYTVLDLKDAFFCLRLHPTSQPLFAFEWRDPGMGISGQLTWTRLPQGFKNSPTLFNEALHRDLADFRIQHPDLILLQYVDDILLAATSELDCQQGTRALLQTLGDLGYRASAKKAQICQKQVKYLGYLLREGQRWLTEARKETVMGQPVPKTPRQLREFLGTAGFCRLWIPGFAEMAAPLYPLTKPGTLFSWGPDQQKAYQEIKQALLTAPALGLPDLTKPFELFVDEKQGYAKGVLTQKLGPWRRPVAYLSKKLDPVAAGWPPCLRMVAAIAVLTKDAGKLTMGQPLVILAPHAVEALVKQPPDRWLSNARMTHYQAMLLDTDRVQFGPVVALNPATLLPLPEEGAPHDCLEILAETHGTRPDLTDQPIPDADHTWYTDGSSFLQEGQRKAGAAVTTETEVIWAGALPAGTSAQRAELIALTQALKMAEGKRLNVYTDSRYAFATAHIHGEIYRRRGWLTSEGREIKNKSEILALLKALFLPKRLSIIHCLGHQKGDSAEARGNRLADQAAREAAIKTPPDTSTLLAGKRTADGSEFEKRTADGSEFESPKKKAKVE

SEQ ID NO: 7699 - protein, 2101 aa, synthetic construct
MPAAKRVKLDGGDKKYSIGLDIGTNSVGWAVITDEYKVPSKKFKVLGNTDRHSIKKNLIGALLFDSGETAEATRLKRTARRRYTRRKNRICYLQEIFSNEMAKVDDSFFHRLEESFLVEEDKKHERHPIFGNIVDEVAYHEKYPTIYHLRKKLVDSTDKADLRLIYLALAHMIKFRGHFLIEGDLNPDNSDVDKLFIQLVQTYNQLFEENPINASGVDAKAILSARLSKSRRLENLIAQLPGEKKNGLFGNLIALSLGLTPNFKSNFDLAEDAKLQLSKDTYDDDLDNLLAQIGDQYADLFLAAKNLSDAILLSDILRVNTEITKAPLSASMIKRYDEHHQDLTLLKALVRQQLPEKYKEIFFDQSKNGYAGYIDGGASQEEFYKFIKPILEKMDGTEELLVKLNREDLLRKQRTFDNGSIPHQIHLGELHAILRRQEDFYPFLKDNREKIEKILTFRIPYYVGPLARGNSRFAWMTRKSEETITPWNFEEVVDKGASAQSFIERMTNFDKNLPNEKVLPKHSLLYEYFTVYNELTKVKYVTEGMRKPAFLSGEQKKAIVDLLFKTNRKVTVKQLKEDYFKKIECFDSVEISGVEDRFNASLGTYHDLLKIIKDKDFLDNEENEDILEDIVLTLTLFEDREMIEERLKTYAHLFDDKVMKQLKRRRYTGWGRLSRKLINGIRDKQSGKTILDFLKSDGFANRNFMQLIHDDSLTFKEDIQKAQVSGQGDSLHEHIANLAGSPAIKKGILQTVKVVDELVKVMGRHKPENIVIEMARENQTTQKGQKNSRERMKRIEEGIKELGSQILKEHPVENTQLQNEKLYLYYLQNGRDMYVDQELDINRLSDYDVDHIVPQSFLKDDSIDNKVLTRSDKARGKSDNVPSEEVVKKMKNYWRQLLNAKLITQRKFDNLTKAERGGLSELDKAGFIKRQLVETRQITKHVAQILDSRMNTKYDENDKLIREVKVITLKSKLVSDFRKDFQFYKVREINNYHHAHDAYLNAVVGTALIKKYPKLESEFVYGDYKVYDVRKMIAKSEQEIGKATAKYFFYSNIMNFFKTEITLANGEIRKRPLIETNGETGEIVWDKGRDFATVRKVLSMPQVNIVKKTEVQTGGFSKESILPKRNSDKLIARKKDWDPKKYGGFDSPTVAYSVLVVAKVEKGKSKKLKSVKELLGITIMERSSFEKNPIDFLEAKGYKEVKKDLIIKLPKYSLFELENGRKRMLASAGELQKGNELALPSKYVNFLYLASHYEKLKGSPEDNEQKQLFVEQHKHYLDEIIEQISEFSKRVILADANLDKVLSAYNKHRDKPIREQAENIIHLFTLTNLGAPAAFKYFDTTIDRKRYTSTKEVLDATLIHQSITGLYETRIDLSQLGGDGGSGSETPGTSESATPESGGTLNIEDEYRLHETSKEPDVSLGSTWLSDFPQAWAETGGMGLAVRQAPLIIPLKATSTPVSIKQYPMSQEARLGIKPHIQRLLDQGILVPCQSPWNTPLLPVKKPGTNDYRPVQDLREVNKRVEDIHPTVPNPYNLLSGLPPSHQWYTVLDLKDAFFCLRLHPTSQPLFAFEWRDPEMGISGQLTWTRLPQGFKNSPTLFNEALHRDLAGFRIQHPDLILLQYVDDLLLAATSELDCQQGTRALLQTLGDLGYRASAKKAQICQKQVKYLGYLLKEGQRWLTEARKETVMGQPIPKTPRQLREFLGTAGFCRLWIPGFAEMAAPLYPLTKPGTLFNWGPDQQKAFQEIKQALLTAPALGLPDLTKPFELFVDEKQGYAKGVLTQKLGPWRRPVAYLSKKLDPVAAGWPPCLRMVAAIAVLTKDAGKLTMGQPLVILAPHAVEALVKQPPDRWLSNARMTHYQALLLDTDRVQFGPVVALNPATLLPLPEEGLQHDCLDILAEAHGTRSDLMDQPLPDADHTWYTDGSSFLQEGQRKAGAAVTTETEVIWARALPAGTSAQRAELIALTQALKMAEGKKLNVYTDSRYAFATAHIHGEIYRRRGWLTSEGKEIKNKDEILALLKALFLPKRLSIIHCPGHQKGNSAEARGNRMADQAAREVATRETPETSTLLAGKRTADGSEFEKRTADGSEFESPKKKAKVE

SEQ ID NO: 7700 - protein, 2101 aa, synthetic construct
MPAAKRVKLDGGDKKYSIGLDIGTNSVGWAVITDEYKVPSKKFKVLGNTDRHSIKKNLIGALLFDSGETAEATRLKRTARRRYTRRKNRICYLQEIFSNEMAKVDDSFFHRLEESFLVEEDKKHERHPIFGNIVDEVAYHEKYPTIYHLRKKLVDSTDKADLRLIYLALAHMIKFRGHFLIEGDLNPDNSDVDKLFIQLVQTYNQLFEENPINASGVDAKAILSARLSKSRRLENLIAQLPGEKKNGLFGNLIALSLGLTPNFKSNFDLAEDAKLQLSKDTYDDDLDNLLAQIGDQYADLFLAAKNLSDAILLSDILRVNTEITKAPLSASMIKRYDEHHQDLTLLKALVRQQLPEKYKEIFFDQSKNGYAGYIDGGASQEEFYKFIKPILEKMDGTEELLVKLNREDLLRKQRTFDNGSIPHQIHLGELHAILRRQEDFYPFLKDNREKIEKILTFRIPYYVGPLARGNSRFAWMTRKSEETITPWNFEEVVDKGASAQSFIERMTNFDKNLPNEKVLPKHSLLYEYFTVYNELTKVKYVTEGMRKPAFLSGEQKKAIVDLLFKTNRKVTVKQLKEDYFKKIECFDSVEISGVEDRFNASLGTYHDLLKIIKDKDFLDNEENEDILEDIVLTLTLFEDREMIEERLKTYAHLFDDKVMKQLKRRRYTGWGRLSRKLINGIRDKQSGKTILDFLKSDGFANRNFMQLIHDDSLTFKEDIQKAQVSGQGDSLHEHIANLAGSPAIKKGILQTVKVVDELVKVMGRHKPENIVIEMARENQTTQKGQKNSRERMKRIEEGIKELGSQILKEHPVENTQLQNEKLYLYYLQNGRDMYVDQELDINRLSDYDVDHIVPQSFLKDDSIDNKVLTRSDKARGKSDNVPSEEVVKKMKNYWRQLLNAKLITQRKFDNLTKAERGGLSELDKAGFIKRQLVETRQITKHVAQILDSRMNTKYDENDKLIREVKVITLKSKLVSDFRKDFQFYKVREINNYHHAHDAYLNAVVGTALIKKYPKLESEFVYGDYKVYDVRKMIAKSEQEIGKATAKYFFYSNIMNFFKTEITLANGEIRKRPLIETNGETGEIVWDKGRDFATVRKVLSMPQVNIVKKTEVQTGGFSKESILPKRNSDKLIARKKDWDPKKYGGFDSPTVAYSVLVVAKVEKGKSKKLKSVKELLGITIMERSSFEKNPIDFLEAKGYKEVKKDLIIKLPKYSLFELENGRKRMLASAGELQKGNELALPSKYVNFLYLASHYEKLKGSPEDNEQKQLFVEQHKHYLDEIIEQISEFSKRVILADANLDKVLSAYNKHRDKPIREQAENIIHLFTLTNLGAPAAFKYFDTTIDRKRYTSTKEVLDATLIHQSITGLYETRIDLSQLGGDGGSGSETPGTSESATPESGGTLNIEDEYRLHETSKGPDVPLGSTWLSDFPQAWAETGGMGLAVRQAPLIIPLKATSTPVSIKQYPMSQEARLGIKPHIQRLLDQGILVPCQSPWNTPLLPVKKPGTNDYRPVQDLREVNKRVEDIHPTVPNPYNLLSGLPPSHQWYTVLDLKDAFFCLRLHPTSQSLFAFEWRDPEMGISGQLTWTRLPQGFKNSPTLFDEALHRDLADFRIQHPDLILLQYVDDLLLAATSELDCQQGTRALLQTLGDLGYRASAKKAQICQKQVKYLGYLLKEGQRWLTEARKETVMGQPTPKTPRQLREFLGTAGFCRLWIPGFAEMAAPLYPLTKTGTLFEWGPDQQKAYQEIKQALLTAPALGLPDLTKPFELFVDEKQGYAKGVLTQKLGPWRRPVAYLSKKLDPVAAGWPPCLRMVAAIAVLTKDAGKLTMGQPLVILAPHAVEALVKQPPDRWLSNARMTHYQALLLDTDRVQFGPIVALNPATLLPLPEEGLQHDCLDILAEAHGTRPDLTDQPLPDADHTWYTDGSSFLQEGQRKAGAAVTTETEVVWAKALPAGTSAQRAELIALTQALKMAEGKKLNVYTDSRYAFATAHIHGEIYRRRGLLTSEGKEIKNKDEILALLKALFLPKRLSIIHCPGHQKGNRAEARGNRMADQAAREVATRETPETSTLLAGKRTADGSEFEKRTADGSEFESPKKKAKVE

SEQ ID NO: 7701 - protein, 2095 aa, synthetic construct
MPAAKRVKLDGGDKKYSIGLDIGTNSVGWAVITDEYKVPSKKFKVLGNTDRHSIKKNLIGALLFDSGETAEATRLKRTARRRYTRRKNRICYLQEIFSNEMAKVDDSFFHRLEESFLVEEDKKHERHPIFGNIVDEVAYHEKYPTIYHLRKKLVDSTDKADLRLIYLALAHMIKFRGHFLIEGDLNPDNSDVDKLFIQLVQTYNQLFEENPINASGVDAKAILSARLSKSRRLENLIAQLPGEKKNGLFGNLIALSLGLTPNFKSNFDLAEDAKLQLSKDTYDDDLDNLLAQIGDQYADLFLAAKNLSDAILLSDILRVNTEITKAPLSASMIKRYDEHHQDLTLLKALVRQQLPEKYKEIFFDQSKNGYAGYIDGGASQEEFYKFIKPILEKMDGTEELLVKLNREDLLRKQRTFDNGSIPHQIHLGELHAILRRQEDFYPFLKDNREKIEKILTFRIPYYVGPLARGNSRFAWMTRKSEETITPWNFEEVVDKGASAQSFIERMTNFDKNLPNEKVLPKHSLLYEYFTVYNELTKVKYVTEGMRKPAFLSGEQKKAIVDLLFKTNRKVTVKQLKEDYFKKIECFDSVEISGVEDRFNASLGTYHDLLKIIKDKDFLDNEENEDILEDIVLTLTLFEDREMIEERLKTYAHLFDDKVMKQLKRRRYTGWGRLSRKLINGIRDKQSGKTILDFLKSDGFANRNFMQLIHDDSLTFKEDIQKAQVSGQGDSLHEHIANLAGSPAIKKGILQTVKVVDELVKVMGRHKPENIVIEMARENQTTQKGQKNSRERMKRIEEGIKELGSQILKEHPVENTQLQNEKLYLYYLQNGRDMYVDQELDINRLSDYDVDHIVPQSFLKDDSIDNKVLTRSDKARGKSDNVPSEEVVKKMKNYWRQLLNAKLITQRKFDNLTKAERGGLSELDKAGFIKRQLVETRQITKHVAQILDSRMNTKYDENDKLIREVKVITLKSKLVSDFRKDFQFYKVREINNYHHAHDAYLNAVVGTALIKKYPKLESEFVYGDYKVYDVRKMIAKSEQEIGKATAKYFFYSNIMNFFKTEITLANGEIRKRPLIETNGETGEIVWDKGRDFATVRKVLSMPQVNIVKKTEVQTGGFSKESILPKRNSDKLIARKKDWDPKKYGGFDSPTVAYSVLVVAKVEKGKSKKLKSVKELLGITIMERSSFEKNPIDFLEAKGYKEVKKDLIIKLPKYSLFELENGRKRMLASAGELQKGNELALPSKYVNFLYLASHYEKLKGSPEDNEQKQLFVEQHKHYLDEIIEQISEFSKRVILADANLDKVLSAYNKHRDKPIREQAENIIHLFTLTNLGAPAAFKYFDTTIDRKRYTSTKEVLDATLIHQSITGLYETRIDLSQLGGDGGSGSETPGTSESATPESGGTLQLDDEYRLYSPLVKPDQNIQFWLEQFPQAWAETAGMGLAKQVPPQVIQLKASATPVSVRQYPLSKEAQEGIRPHVQRLIQQGILVPVQSPWNTPLLPVRKPGTNDYRPVQDLREVNKRVQDIHPTVPNPYNLLCALPPQRSWYTVLDLKDAFFCLRLHPTSQPLFAFEWRDPGTGRTGQLTWTRLPQGFKNSPTIFDEALHRDLANFRIQHPQVTLLQYVDDLLLAGATKQDCLEGTKALLLELSDLGYRASAKKAQICRREVTYLGYSLRDGQRWLTEARKKTVVQIPAPTTAKQVREFLGTAGFCRLWIPGFATLAAPLYPLTKEKGEFSWAPEHQKAFDAIKKALLSAPALALPDVTKPFTLYVDERKGVARGVLTQTLGPWRRPVAYLSKKLDPVASGWPVCLKAIAAVAILVKDADKLTLGQNITVIAPHALENIVRQPPDRWMTNARMTHYQSLLLTERVTFAPPAALNPATLLPEETDEPVTHDCHQLLIEETGVRKDLTDIPLTGEVLTWFTDGSSYVVEGKRMAGAAVVDGTRTIWASSLPEGTSAQKAELMALTQALRLAEGKSINIYTDSRYAFATAHVHGAIYKQRGLLTSAGREIKNKEEILSLLEALHLPKRLAIIHCPGHQKAKDPISRGNQMADRVAKQAAQGVNLLAGKRTADGSEFEKRTADGSEFESPKKKAKVE

SEQ ID NO: 7702 - protein, 2095 aa, synthetic construct; identical to SEQ ID NO: 7701

SEQ ID NO: 7703 - protein, 2181 aa, synthetic construct
MPAAKRVKLDGGDKKYSIGLDIGTNSVGWAVITDEYKVPSKKFKVLGNTDRHSIKKNLIGALLFDSGETAEATRLKRTARRRYTRRKNRICYLQEIFSNEMAKVDDSFFHRLEESFLVEEDKKHERHPIFGNIVDEVAYHEKYPTIYHLRKKLVDSTDKADLRLIYLALAHMIKFRGHFLIEGDLNPDNSDVDKLFIQLVQTYNQLFEENPINASGVDAKAILSARLSKSRRLENLIAQLPGEKKNGLFGNLIALSLGLTPNFKSNFDLAEDAKLQLSKDTYDDDLDNLLAQIGDQYADLFLAAKNLSDAILLSDILRVNTEITKAPLSASMIKRYDEHHQDLTLLKALVRQQLPEKYKEIFFDQSKNGYAGYIDGGASQEEFYKFIKPILEKMDGTEELLVKLNREDLLRKQRTFDNGSIPHQIHLGELHAILRRQEDFYPFLKDNREKIEKILTFRIPYYVGPLARGNSRFAWMTRKSEETITPWNFEEVVDKGASAQSFIERMTNFDKNLPNEKVLPKHSLLYEYFTVYNELTKVKYVTEGMRKPAFLSGEQKKAIVDLLFKTNRKVTVKQLKEDYFKKIECFDSVEISGVEDRFNASLGTYHDLLKIIKDKDFLDNEENEDILEDIVLTLTLFEDREMIEERLKTYAHLFDDKVMKQLKRRRYTGWGRLSRKLINGIRDKQSGKTILDFLKSDGFANRNFMQLIHDDSLTFKEDIQKAQVSGQGDSLHEHIANLAGSPAIKKGILQTVKVVDELVKVMGRHKPENIVIEMARENQTTQKGQKNSRERMKRIEEGIKELGSQILKEHPVENTQLQNEKLYLYYLQNGRDMYVDQELDINRLSDYDVDHIVPQSFLKDDSIDNKVLTRSDKARGKSDNVPSEEVVKKMKNYWRQLLNAKLITQRKFDNLTKAERGGLSELDKAGFIKRQLVETRQITKHVAQILDSRMNTKYDENDKLIREVKVITLKSKLVSDFRKDFQFYKVREINNYHHAHDAYLNAVVGTALIKKYPKLESEFVYGDYKVYDVRKMIAKSEQEIGKATAKYFFYSNIMNFFKTEITLANGEIRKRPLIETNGETGEIVWDKGRDFATVRKVLSMPQVNIVKKTEVQTGGFSKESILPKRNSDKLIARKKDWDPKKYGGFDSPTVAYSVLVVAKVEKGKSKKLKSVKELLGITIMERSSFEKNPIDFLEAKGYKEVKKDLIIKLPKYSLFELENGRKRMLASAGELQKGNELALPSKYVNFLYLASHYEKLKGSPEDNEQKQLFVEQHKHYLDEIIEQISEFSKRVILADANLDKVLSAYNKHRDKPIREQAENIIHLFTLTNLGAPAAFKYFDTTIDRKRYTSTKEVLDATLIHQSITGLYETRIDLSQLGGDGGSGSETPGTSESATPESGGMDPLQLLQPLEAEIKGTKLKAHWNSGATITCVPEAFLEDERPIQTMLIKTIHGEKQQDVYYLTFKVQGRKVEAEVLASPYDYILLNPSDVPWLMKKPLQLTVLVPLHEYQERLLQQTALPKEQKELLQKLFLKYDALWQHWENQVGHRRIKPHNIATGTLAPRPQKQYPINPKAKPSIQIVIDDLLKQGVLIQQNSTMNTPVYPVPKPDGKWRMVLDYREVNKTIPLIAAQNQHSAGILSSIYRGKYKTTLDLTNGFWAHPITPESYWLTAFTWQGKQYCWTRLPQGFLNSPALFNADVVDLLKEIPNVQAYVDDIYISHDDPQEHLEQLEKIFSILLNAGYVVSLKKSEIAQREVEFLGFNITKEGRGLTDTFKQKLLNITPPKDLKQLQSILGLLNFARNFIPNYSELVKPLYTIVAPANGKFISWTEDNSNQLQHIISVLNQADNLEERNPETRLIIKVNSSPSAGYIRYYNEGSKRPIMYVNYIFSKAEAKFTQTEKLLTTMHKGLIKAMDLAMGQEILVYSPIVSMTKIQRTPLPERKALPVRWITWMTYLEDPRIQFHYDKSLPELQQIPNVTEDVIAKTKHPSEFAMVFYTDGSAIKHPDVNKSHSAGMGIAQVQFIPEYKIVHQWSIPLGDHTAQLAEIAAVEFACKKALKISGPVLIVTDSFYVAESANKELPYWKSNGFLNNKKKPLRHVSKWKSIAECLQLKPDIIIMHEKGHQQPMTTLHTEGNNLADKLATQGSYVVHAGKRTADGSEFEKRTADGSEFESPKKKAKVE

SEQ ID NO: 7704 - protein, 2092 aa, synthetic construct
MPAAKRVKLDGGDKKYSIGLDIGTNSVGWAVITDEYKVPSKKFKVLGNTDRHSIKKNLIGALLFDSGETAEATRLKRTARRRYTRRKNRICYLQEIFSNEMAKVDDSFFHRLEESFLVEEDKKHERHPIFGNIVDEVAYHEKYPTIYHLRKKLVDSTDKADLRLIYLALAHMIKFRGHFLIEGDLNPDNSDVDKLFIQLVQTYNQLFEENPINASGVDAKAILSARLSKSRRLENLIAQLPGEKKNGLFGNLIALSLGLTPNFKSNFDLAEDAKLQLSKDTYDDDLDNLLAQIGDQYADLFLAAKNLSDAILLSDILRVNTEITKAPLSASMIKRYDEHHQDLTLLKALVRQQLPEKYKEIFFDQSKNGYAGYIDGGASQEEFYKFIKPILEKMDGTEELLVKLNREDLLRKQRTFDNGSIPHQIHLGELHAILRRQEDFYPFLKDNREKIEKILTFRIPYYVGPLARGNSRFAWMTRKSEETITPWNFEEVVDKGASAQSFIERMTNFDKNLPNEKVLPKHSLLYEYFTVYNELTKVKYVTEGMRKPAFLSGEQKKAIVDLLFKTNRKVTVKQLKEDYFKKIECFDSVEISGVEDRFNASLGTYHDLLKIIKDKDFLDNEENEDILEDIVLTLTLFEDREMIEERLKTYAHLFDDKVMKQLKRRRYTGWGRLSRKLINGIRDKQSGKTILDFLKSDGFANRNFMQLIHDDSLTFKEDIQKAQVSGQGDSLHEHIANLAGSPAIKKGILQTVKVVDELVKVMGRHKPENIVIEMARENQTTQKGQKNSRERMKRIEEGIKELGSQILKEHPVENTQLQNEKLYLYYLQNGRDMYVDQELDINRLSDYDVDHIVPQSFLKDDSIDNKVLTRSDKARGKSDNVPSEEVVKKMKNYWRQLLNAKLITQRKFDNLTKAERGGLSELDKAGFIKRQLVETRQITKHVAQILDSRMNTKYDENDKLIREVKVITLKSKLVSDFRKDFQFYKVREINNYHHAHDAYLNAVVGTALIKKYPKLESEFVYGDYKVYDVRKMIAKSEQEIGKATAKYFFYSNIMNFFKTEITLANGEIRKRPLIETNGETGEIVWDKGRDFATVRKVLSMPQVNIVKKTEVQTGGFSKESILPKRNSDKLIARKKDWDPKKYGGFDSPTVAYSVLVVAKVEKGKSKKLKSVKELLGITIMERSSFEKNPIDFLEAKGYKEVKKDLIIKLPKYSLFELENGRKRMLASAGELQKGNELALPSKYVNFLYLASHYEKLKGSPEDNEQKQLFVEQHKHYLDEIIEQISEFSKRVILADANLDKVLSAYNKHRDKPIREQAENIIHLFTLTNLGAPAAFKYFDTTIDRKRYTSTKEVLDATLIHQSITGLYETRIDLSQLGGDGGSGSETPGTSESATPESGGIPWLMKKPLQLTTLVPLQEYEERLLKQTMLTGSYKEKLQSLFLKYDALWQHWENQVGHRRIKPHHIATGTVNPRPQKQYPINPKAKASIQTVINDLLKQGVLIQQNSIMNTPVYPVPKPDGKWRMVLDYREVNKTIPLIAAQNQHSAGILSSIFRGKYKTTLDLSNGFWAHSITPESYWLTAFTWLGQQYCWTRLPQGFLNSPALFTADVVDLLKEVPNVQVYVDDIYISHDDPREHLEQLEKVFSLLLNAGYVVSLKKSEIAQHEVEFLGFNITKEGRGLTETFKQKLLNITPPRDLKQLQSILGLLNFARNFIPNFSELVKPLYNIIATANGKYITWTTDNSQQLQNIISMLNSAENLEERNPEVRLIMKVNTSPSAGYIRFYNEFAKRPIMYLNYVYTKAEVKFTNTEKLLTTIHKGLIKALDLGMGQEILVYSPIVSMTKIQKTPLPERKALPIRWITWMSYLEDPRIQFHYDKTLPELQQVPTVTDDIIAKIKHPSEFSMVFYTDGSAIKHPNVNKSHNAGMGIAQVQFKPEFTVINTWSIPLGDHTAQLAEVAAVEFACKKALKIDGPVLIVTDSFYVAESVNKELPYWQSNGFFNNKKKPLKHVSKWKSIADCIQLKPDIIIIHEKGHQPTASTFHTEGNNLADKLATQGSYVVNAGKRTADGSEFEKRTADGSEFESPKKKAKVE

SEQ ID NO: 7705 - protein, 2181 aa, synthetic construct
MPAAKRVKLDGGDKKYSIGLDIGTNSVGWAVITDEYKVPSKKFKVLGNTDRHSIKKNLIGALLFDSGETAEATRLKRTARRRYTRRKNRICYLQEIFSNEMAKVDDSFFHRLEESFLVEEDKKHERHPIFGNIVDEVAYHEKYPTIYHLRKKLVDSTDKADLRLIYLALAHMIKFRGHFLIEGDLNPDNSDVDKLFIQLVQTYNQLFEENPINASGVDAKAILSARLSKSRRLENLIAQLPGEKKNGLFGNLIALSLGLTPNFKSNFDLAEDAKLQLSKDTYDDDLDNLLAQIGDQYADLFLAAKNLSDAILLSDILRVNTEITKAPLSASMIKRYDEHHQDLTLLKALVRQQLPEKYKEIFFDQSKNGYAGYIDGGASQEEFYKFIKPILEKMDGTEELLVKLNREDLLRKQRTFDNGSIPHQIHLGELHAILRRQEDFYPFLKDNREKIEKILTFRIPYYVGPLARGNSRFAWMTRKSEETITPWNFEEVVDKGASAQSFIERMTNFDKNLPNEKVLPKHSLLYEYFTVYNELTKVKYVTEGMRKPAFLSGEQKKAIVDLLFKTNRKVTVKQLKEDYFKKIECFDSVEISGVEDRFNASLGTYHDLLKIIKDKDFLDNEENEDILEDIVLTLTLFEDREMIEERLKTYAHLFDDKVMKQLKRRRYTGWGRLSRKLINGIRDKQSGKTILDFLKSDGFANRNFMQLIHDDSLTFKEDIQKAQVSGQGDSLHEHIANLAGSPAIKKGILQTVKVVDELVKVMGRHKPENIVIEMARENQTTQKGQKNSRERMKRIEEGIKELGSQILKEHPVENTQLQNEKLYLYYLQNGRDMYVDQELDINRLSDYDVDHIVPQSFLKDDSIDNKVLTRSDKARGKSDNVPSEEVVKKMKNYWRQLLNAKLITQRKFDNLTKAERGGLSELDKAGFIKRQLVETRQITKHVAQILDSRMNTKYDENDKLIREVKVITLKSKLVSDFRKDFQFYKVREINNYHHAHDAYLNAVVGTALIKKYPKLESEFVYGDYKVYDVRKMIAKSEQEIGKATAKYFFYSNIMNFFKTEITLANGEIRKRPLIETNGETGEIVWDKGRDFATVRKVLSMPQVNIVKKTEVQTGGFSKESILPKRNSDKLIARKKDWDPKKYGGFDSPTVAYSVLVVAKVEKGKSKKLKSVKELLGITIMERSSFEKNPIDFLEAKGYKEVKKDLIIKLPKYSLFELENGRKRMLASAGELQKGNELALPSKYVNFLYLASHYEKLKGSPEDNEQKQLFVEQHKHYLDEIIEQISEFSKRVILADANLDKVLSAYNKHRDKPIREQAENIIHLFTLTNLGAPAAFKYFDTTIDRKRYTSTKEVLDATLIHQSITGLYETRIDLSQLGGDGGSGSETPGTSESATPESGGMDPLQLLQPLEAEIKGTKLKAHWNSGATITCVPQAFLEEEVPIKNIWIKTIHGEKEQPVYYLTFKIQGRKVEAEVISSPYDYILVSPSDIPWLMKKPLQLTTLVPLQEYEERLLKQTMLTGSYKEKLQSLFLKYDALWQHWENQVGHRRIKPHHIATGTVNPRPQKQYPINPKAKASIQTVINDLLKQGVLIQQNSIMNTPVYPVPKPDGKWRMVLDYREVNKTIPLIAAQNQHSAGILSSIFRGKYKTTLDLSNGFWAHSITPESYWLTAFTWLGQQYCWTRLPQGFLNSPALFNADVVDLLKEVPNVQVYVDDIYISHDDPREHLEQLEKVFSLLLNAGYVVSLKKSEIAQHEVEFLGFNITKEGRGLTETFKQKLLNITPPRDLKQLQSILGLLNFARNFIPNFSELVKPLYNIIATAPGKYITWTTDNSQQLQNIISMLNSAENLEERNPEVRLIMKVNTSPSAGYIRFYNEFAKRPIMYLNYVYTKAEVKFTNTEKLLTTIHKGLIKALDLGMGQEILVYSPIVSMTKIQKTPLPERKALPIRWITWMSYLEDPRIQFHYDKTLPELQQVPTVTDDIIAKIKHPSEFSMVFYTDGSAIKHPNVNKSHNAGMGIAQVQFKPEFTVINTWSIPLGDHTAQLAEVAAVEFACKKALKIDGPVLIVTDSFYVAESVNKELPYWQSNGFFNNKKKPLKHVSKWKSIADCIQLKPDIIIIHEKGHQPTASTFHTEGNNLADKLATQGSYVVNAGKRTADGSEFEKRTADGSEFESPKKKAKVE

SEQ ID NO: 7706 - protein, 2101 aa, synthetic construct
MPAAKRVKLDGGDKKYSIGLDIGTNSVGWAVITDEYKVPSKKFKVLGNTDRHSIKKNLIGALLFDSGETAEATRLKRTARRRYTRRKNRICYLQEIFSNEMAKVDDSFFHRLEESFLVEEDKKHERHPIFGNIVDEVAYHEKYPTIYHLRKKLVDSTDKADLRLIYLALAHMIKFRGHFLIEGDLNPDNSDVDKLFIQLVQTYNQLFEENPINASGVDAKAILSARLSKSRRLENLIAQLPGEKKNGLFGNLIALSLGLTPNFKSNFDLAEDAKLQLSKDTYDDDLDNLLAQIGDQYADLFLAAKNLSDAILLSDILRVNTEITKAPLSASMIKRYDEHHQDLTLLKALVRQQLPEKYKEIFFDQSKNGYAGYIDGGASQEEFYKFIKPILEKMDGTEELLVKLNREDLLRKQRTFDNGSIPHQIHLGELHAILRRQEDFYPFLKDNREKIEKILTFRIPYYVGPLARGNSRFAWMTRKSEETITPWNFEEVVDKGASAQSFIERMTNFDKNLPNEKVLPKHSLLYEYFTVYNELTKVKYVTEGMRKPAFLSGEQKKAIVDLLFKTNRKVTVKQLKEDYFKKIECFDSVEISGVEDRFNASLGTYHDLLKIIKDKDFLDNEENEDILEDIVLTLTLFEDREMIEERLKTYAHLFDDKVMKQLKRRRYTGWGRLSRKLINGIRDKQSGKTILDFLKSDGFANRNFMQLIHDDSLTFKEDIQKAQVSGQGDSLHEHIANLAGSPAIKKGILQTVKVVDELVKVMGRHKPENIVIEMARENQTTQKGQKNSRERMKRIEEGIKELGSQILKEHPVENTQLQNEKLYLYYLQNGRDMYVDQELDINRLSDYDVDHIVPQSFLKDDSIDNKVLTRSDKARGKSDNVPSEEVVKKMKNYWRQLLNAKLITQRKFDNLTKAERGGLSELDKAGFIKRQLVETRQITKHVAQILDSRMNTKYDENDKLIREVKVITLKSKLVSDFRKDFQFYKVREINNYHHAHDAYLNAVVGTALIKKYPKLESEFVYGDYKVYDVRKMIAKSEQEIGKATAKYFFYSNIMNFFKTEITLANGEIRKRPLIETNGETGEIVWDKGRDFATVRKVLSMPQVNIVKKTEVQTGGFSKESILPKRNSDKLIARKKDWDPKKYGGFDSPTVAYSVLVVAKVEKGKSKKLKSVKELLGITIMERSSFEKNPIDFLEAKGYKEVKKDLIIKLPKYSLFELENGRKRMLASAGELQKGNELALPSKYVNFLYLASHYEKLKGSPEDNEQKQLFVEQHKHYLDEIIEQISEFSKRVILADANLDKVLSAYNKHRDKPIREQAENIIHLFTLTNLGAPAAFKYFDTTIDRKRYTSTKEVLDATLIHQSITGLYETRIDLSQLGGDGGSGSETPGTSESATPESGGTLNIEDEYRLHETSKEPDVPLGSTWLSDFPQAWAETGGMGLAVRQAPLIIPLKATSTPVSIKQYPMSQEARLGIKPHIQRLLDQGILVPCQSPWNTPLLPVKKPGTNDYRPVQDLREVNKRVEDIHPTVPNPYNLLSGLPPSHQWYTVLDLKDAFFCLRLHPTSQPLFAFEWRDPEMGISGQLTWTRLPQGFKNSPTLFNEALHRDLADFRIQHPDLILLQYVDDLLLAATSEQDCQRGTRALLQTLGNLGYRASAKKAQICQKQVKYLGYLLKEGQRWLTEARKETVMGQPTPKTPRQLREFLGTAGFCRLWIPGFAEMAAPLYPLTKPGTLFNWGPDQQKAYQEIKQALLTAPALGLPDLTKPFELFVDEKQGYAKGVLTQKLGPWRRPVAYLSKKLDPVAAGWPPCLRMVAAIAVLTKDAGKLTMGQPLVILAPHAVEALVKQPPDRWLSNARMTHYQAMLLDTDRVQFGPVVALNPATLLPLPEKEAPHDCLEILAETHGTRPDLTDQPIPDADYTWYTDGSSFLQEGQRRAGAAVTTETEVIWARALPAGTSAQRAELIALTQALKMAEGKKLNVYTDSRYAFATAHVHGEIYRRRGWLTSEGREIKNKNEILALLKALFLPKRLSIIHCPGHQKGNSAEARGNRMADQAAREAAMKAVLETSTLLAGKRTADGSEFEKRTADGSEFESPKKKAKVE

SEQ ID NO: 7707 - protein, 2099 aa, synthetic construct
MPAAKRVKLDGGDKKYSIGLDIGTNSVGWAVITDEYKVPSKKFKVLGNTDRHSIKKNLIGALLFDSGETAEATRLKRTARRRYTRRKNRICYLQEIFSNEMAKVDDSFFHRLEESFLVEEDKKHERHPIFGNIVDEVAYHEKYPTIYHLRKKLVDSTDKADLRLIYLALAHMIKFRGHFLIEGDLNPDNSDVDKLFIQLVQTYNQLFEENPINASGVDAKAILSARLSKSRRLENLIAQLPGEKKNGLFGNLIALSLGLTPNFKSNFDLAEDAKLQLSKDTYDDDLDNLLAQIGDQYADLFLAAKNLSDAILLSDILRVNTEITKAPLSASMIKRYDEHHQDLTLLKALVRQQLPEKYKEIFFDQSKNGYAGYIDGGASQEEFYKFIKPILEKMDGTEELLVKLNREDLLRKQRTFDNGSIPHQIHLGELHAILRRQEDFYPFLKDNREKIEKILTFRIPYYVGPLARGNSRFAWMTRKSEETITPWNFEEVVDKGASAQSFIERMTNFDKNLPNEKVLPKHSLLYEYFTVYNELTKVKYVTEGMRKPAFLSGEQKKAIVDLLFKTNRKVTVKQLKEDYFKKIECFDSVEISGVEDRFNASLGTYHDLLKIIKDKDFLDNEENEDILEDIVLTLTLFEDREMIEERLKTYAHLFDDKVMKQLKRRRYTGWGRLSRKLINGIRDKQSGKTILDFLKSDGFANRNFMQLIHDDSLTFKEDIQKAQVSGQGDSLHEHIANLAGSPAIKKGILQTVKVVDELVKVMGRHKPENIVIEMARENQTTQKGQKNSRERMKRIEEGIKELGSQILKEHPVENTQLQNEKLYLYYLQNGRDMYVDQELDINRLSDYDVDHIVPQSFLKDDSIDNKVLTRSDKARGKSDNVPSEEVVKKMKNYWRQLLNAKLITQRKFDNLTKAERGGLSELDKAGFIKRQLVETRQITKHVAQILDSRMNTKYDENDKLIREVKVITLKSKLVSDFRKDFQFYKVREINNYHHAHDAYLNAVVGTALIKKYPKLESEFVYGDYKVYDVRKMIAKSEQEIGKATAKYFFYSNIMNFFKTEITLANGEIRKRPLIETNGETGEIVWDKGRDFATVRKVLSMPQVNIVKKTEVQTGGFSKESILPKRNSDKLIARKKDWDPKKYGGFDSPTVAYSVLVVAKVEKGKSKKLKSVKELLGITIMERSSFEKNPIDFLEAKGYKEVKKDLIIKLPKYSLFELENGRKRMLASAGELQKGNELALPSKYVNFLYLASHYEKLKGSPEDNEQKQLFVEQHKHYLDEIIEQISEFSKRVILADANLDKVLSAYNKHRDKPIREQAENIIHLFTLTNLGAPAAFKYFDTTIDRKRYTSTKEVLDATLIHQSITGLYETRIDLSQLGGDGGGSAGSAAGSGEFGGTAPLEEEYRLFLEAPIQNVTLLEQWKREIPKVWAEINPPGLASTQAPIHVQLLSTALPVRVRQYPITLEAKRSLRETIRKFRAAGILRPVHSPWNTPLLPVRKSGTSEYRMVQDLREVNKRVETIHPTVPNPYTLLSLLPPDRIWYSVLDLKDAFFCIPLAPESQLIFAFEWADAEEGESGQLTWTRLPQGFKNSPTLFNEALNRDLQGFRLDHPSVSLLQYVDDLLIAADTQAACLSATRDLLMTLAELGYRVSGKKAQLCQEEVTYLGFKIHKGSRSLSNSRTQAILQIPVPKTKRQVREFLGTIGYCRLWIPGFAELAQPLYAATRPGNDPLVWGEKEEEAFQSLKLALTQPPALALPSLDKPFQLFVEETSGAAKGVLTQALGPWKRPVAYLSKRLDPVAAGWPRCLRAIAAAALLTREASKLTFGQDIEITSSHNLESLLRSPPDKWLTNARITQYQVLLLDPPRVRFKQTAALNPATLLPETDDTLPIHHCLDTLDSLTSTRPDLTDQPLAQAEATLFTDGSSYIRDGKRYAGAAVVTLDSVIWAEPLPIGTSAQKAELIALTKALEWSKDKSVNIYTDSRYAFATLHVHGMIYRERGWLTAGGKAIKNAPEILALLTAVWLPKRVAVMHCKGHQKDDAPTSTGNRRADEVAREVAIRPLSTQATISAGKRTADGSEFEKRTADGSEFESPKKKAKVE

SEQ ID NO: 7708 - protein, 2002 aa, synthetic construct
MPAAKRVKLDGGDKKYSIGLDIGTNSVGWAVITDEYKVPSKKFKVLGNTDRHSIKKNLIGALLFDSGETAEATRLKRTARRRYTRRKNRICYLQEIFSNEMAKVDDSFFHRLEESFLVEEDKKHERHPIFGNIVDEVAYHEKYPTIYHLRKKLVDSTDKADLRLIYLALAHMIKFRGHFLIEGDLNPDNSDVDKLFIQLVQTYNQLFEENPINASGVDAKAILSARLSKSRRLENLIAQLPGEKKNGLFGNLIALSLGLTPNFKSNFDLAEDAKLQLSKDTYDDDLDNLLAQIGDQYADLFLAAKNLSDAILLSDILRVNTEITKAPLSASMIKRYDEHHQDLTLLKALVRQQLPEKYKEIFFDQSKNGYAGYIDGGASQEEFYKFIKPILEKMDGTEELLVKLNREDLLRKQRTFDNGSIPHQIHLGELHAILRRQEDFYPFLKDNREKIEKILTFRIPYYVGPLARGNSRFAWMTRKSEETITPWNFEEVVDKGASAQSFIERMTNFDKNLPNEKVLPKHSLLYEYFTVYNELTKVKYVTEGMRKPAFLSGEQKKAIVDLLFKTNRKVTVKQLKEDYFKKIECFDSVEISGVEDRFNASLGTYHDLLKIIKDKDFLDNEENEDILEDIVLTLTLFEDREMIEERLKTYAHLFDDKVMKQLKRRRYTGWGRLSRKLINGIRDKQSGKTILDFLKSDGFANRNFMQLIHDDSLTFKEDIQKAQVSGQGDSLHEHIANLAGSPAIKKGILQTVKVVDELVKVMGRHKPENIVIEMARENQTTQKGQKNSRERMKRIEEGIKELGSQILKEHPVENTQLQNEKLYLYYLQNGRDMYVDQELDINRLSDYDVDHIVPQSFLKDDSIDNKVLTRSDKARGKSDNVPSEEVVKKMKNYWRQLLNAKLITQRKFDNLTKAERGGLSELDKAGFIKRQLVETRQITKHVAQILDSRMNTKYDENDKLIREVKVITLKSKLVSDFRKDFQFYKVREINNYHHAHDAYLNAVVGTALIKKYPKLESEFVYGDYKVYDVRKMIAKSEQEIGKATAKYFFYSNIMNFFKTEITLANGEIRKRPLIETNGETGEIVWDKGRDFATVRKVLSMPQVNIVKKTEVQTGGFSKESILPKRNSDKLIARKKDWDPKKYGGFDSPTVAYSVLVVAKVEKGKSKKLKSVKELLGITIMERSSFEKNPIDFLEAKGYKEVKKDLIIKLPKYSLFELENGRKRMLASAGELQKGNELALPSKYVNFLYLASHYEKLKGSPEDNEQKQLFVEQHKHYLDEIIEQISEFSKRVILADANLDKVLSAYNKHRDKPIREQAENIIHLFTLTNLGAPAAFKYFDTTIDRKRYTSTKEVLDATLIHQSITGLYETRIDLSQLGGDGGGSAGSAAGSGEFGGGVLDTPPSHIGLEHLPPPPEVPQFPLNLERLQALQDLVHRSLEAGYISPWDGPGNNPVFPVRKPNGAWRFVHDLRATNALTKPIPALSPGPPDLTAPPTHPPHIICLDLKDAFFQIPVEDRFRFYLSFTLPSPGGLQPHRRFAWRVLPQGFINSPALFQRALQEPLRQVSAAFSQSLLVSYMDDILYASPTEEQRSQCYQALAARLRDLGFQVASEKTSQTPSPVPFLGQMVHEQIVTYQSLPTLQISSPISLHQLQAVLGDLQWVSRGTPTTRRPLQLLYSSLKRHHDPRAIIQLSPEQLQGIAELRQALSHNARSRYNEQEPLLAYVHLTRAGSTLVLFQKGAQFPLAYFQTPLTDNQASPWGLLLLLGCQYLQTQALSSYAKPILKYYHNLPKTSLDNWIQSSEDPRVQELLQLWPQISSQGIQPPGPWKTLITRAEVFLTPQFSPDPIPAALCLFSDGATGRGAYCLWKDHLLDFQAVPAPESAQKGELAGLLAGLAAAPPEPVNIWVDSKYLYSLLRTWVLGAWLQPDPVPSYALLYKSLLRHPAIVVGHVRSHSSASHPIASLNNYVDQLAGKRTADGSEFEKRTADGSEFESPKKKAKVE

SEQ ID NO: 7709 - protein, 2088 aa, synthetic construct
MPAAKRVKLDGGDKKYSIGLDIGTNSVGWAVITDEYKVPSKKFKVLGNTDRHSIKKNLIGALLFDSGETAEATRLKRTARRRYTRRKNRICYLQEIFSNEMAKVDDSFFHRLEESFLVEEDKKHERHPIFGNIVDEVAYHEKYPTIYHLRKKLVDSTDKADLRLIYLALAHMIKFRGHFLIEGDLNPDNSDVDKLFIQLVQTYNQLFEENPINASGVDAKAILSARLSKSRRLENLIAQLPGEKKNGLFGNLIALSLGLTPNFKSNFDLAEDAKLQLSKDTYDDDLDNLLAQIGDQYADLFLAAKNLSDAILLSDILRVNTEITKAPLSASMIKRYDEHHQDLTLLKALVRQQLPEKYKEIFFDQSKNGYAGYIDGGASQEEFYKFIKPILEKMDGTEELLVKLNREDLLRKQRTFDNGSIPHQIHLGELHAILRRQEDFYPFLKDNREKIEKILTFRIPYYVGPLARGNSRFAWMTRKSEETITPWNFEEVVDKGASAQSFIERMTNFDKNLPNEKVLPKHSLLYEYFTVYNELTKVKYVTEGMRKPAFLSGEQKKAIVDLLFKTNRKVTVKQLKEDYFKKIECFDSVEISGVEDRFNASLGTYHDLLKIIKDKDFLDNEENEDILEDIVLTLTLFEDREMIEERLKTYAHLFDDKVMKQLKRRRYTGWGRLSRKLINGIRDKQSGKTILDFLKSDGFANRNFMQLIHDDSLTFKEDIQKAQVSGQGDSLHEHIANLAGSPAIKKGILQTVKVVDELVKVMGRHKPENIVIEMARENQTTQKGQKNSRERMKRIEEGIKELGSQILKEHPVENTQLQNEKLYLYYLQNGRDMYVDQELDINRLSDYDVDHIVPQSFLKDDSIDNKVLTRSDKARGKSDNVPSEEVVKKMKNYWRQLLNAKLITQRKFDNLTKAERGGLSELDKAGFIKRQLVETRQITKHVAQILDSRMNTKYDENDKLIREVKVITLKSKLVSDFRKDFQFYKVREINNYHHAHDAYLNAVVGTALIKKYPKLESEFVYGDYKVYDVRKMIAKSEQEIGKATAKYFFYSNIMNFFKTEITLANGEIRKRPLIETNGETGEIVWDKGRDFATVRKVLSMPQVNIVKKTEVQTGGFSKESILPKRNSDKLIARKKDWDPKKYGGFDSPTVAYSVLVVAKVEKGKSKKLKSVKELLGITIMERSSFEKNPIDFLEAKGYKEVKKDLIIKLPKYSLFELENGRKRMLASAGELQKGNELALPSKYVNFLYLASHYEKLKGSPEDNEQKQLFVEQHKHYLDEIIEQISEFSKRVILADANLDKVLSAYNKHRDKPIREQAENIIHLFTLTNLGAPAAFKYFDTTIDRKRYTSTKEVLDATLIHQSITGLYETRIDLSQLGGDGGGSAGSAAGSGEFGGVPWILKKPLELTIKLDLEEQQGTLLNNSILSKKGKEELKQLFEKYSALWQSWENQVGHRRIRPHKIATGTVKPTPQKQYHINPKAKPDIQIVINDLLKQGVLIQKESTMNTPVYPVPKPNGRWRMVLDYRAVNKVTPLIAVQNQHSYGILGSLFKGRYKTTIDLSNGFWAHPIVPEDYWITAFTWQGKQYCWTVLPQGFLNSPGLFTGDVVDLLQGIPNVEVYVDDVYISHDSEKEHLEYLDILFNRLKEAGYIISLKKSNIANSIVDFLGFQITNEGRGLTDTFKEKLENITAPTTLKQLQSILGLLNFARNFIPDFTELIAPLYALIPKSTKNYVPWQIEHSTTLETLITKLNGAEYLQGRKGDKTLIMKVNASYTTGYIRYYNEGEKKPISYVSIVFSKTELKFTELEKLLTTVHKGLLKALDLSMGQNIHVYSPIVSMQNIQKTPQTAKKALASRWLSWLSYLEDPRIRFFYDPQMPALKDLPAVDTGKDNKKHPSNFQHIFYTDGSAITSPTKEGHLNAGMGIVYFINKDGNLQKQQEWSISLGNHTAQFAEIAAFEFALKKCLPLGGNILVVTDSNYVAKAYNEELDVWASNGFVNNRKKPLKHISKWKSVADLKRLRPDVVVTHEPGHQKLDSSPHAYGNNLADQLATQASFKVHAGKRTADGSEFEKRTADGSEFESPKKKAKVE

SEQ ID NO: 7710 - protein, 2088 aa, synthetic construct
MPAAKRVKLDGGDKKYSIGLDIGTNSVGWAVITDEYKVPSKKFKVLGNTDRHSIKKNLIGALLFDSGETAEATRLKRTARRRYTRRKNRICYLQEIFSNEMAKVDDSFFHRLEESFLVEEDKKHERHPIFGNIVDEVAYHEKYPTIYHLRKKLVDSTDKADLRLIYLALAHMIKFRGHFLIEGDLNPDNSDVDKLFIQLVQTYNQLFEENPINASGVDAKAILSARLSKSRRLENLIAQLPGEKKNGLFGNLIALSLGLTPNFKSNFDLAEDAKLQLSKDTYDDDLDNLLAQIGDQYADLFLAAKNLSDAILLSDILRVNTEITKAPLSASMIKRYDEHHQDLTLLKALVRQQLPEKYKEIFFDQSKNGYAGYIDGGASQEEFYKFIKPILEKMDGTEELLVKLNREDLLRKQRTFDNGSIPHQIHLGELHAILRRQEDFYPFLKDNREKIEKILTFRIPYYVGPLARGNSRFAWMTRKSEETITPWNFEEVVDKGASAQSFIERMTNFDKNLPNEKVLPKHSLLYEYFTVYNELTKVKYVTEGMRKPAFLSGEQKKAIVDLLFKTNRKVTVKQLKEDYFKKIECFDSVEISGVEDRFNASLGTYHDLLKIIKDKDFLDNEENEDILEDIVLTLTLFEDREMIEERLKTYAHLFDDKVMKQLKRRRYTGWGRLSRKLINGIRDKQSGKTILDFLKSDGFANRNFMQLIHDDSLTFKEDIQKAQVSGQGDSLHEHIANLAGSPAIKKGILQTVKVVDELVKVMGRHKPENIVIEMARENQTTQKGQKNSRERMKRIEEGIKELGSQILKEHPVENTQLQNEKLYLYYLQNGRDMYVDQELDINRLSDYDVDHIVPQSFLKDDSIDNKVLTRSDKARGKSDNVPSEEVVKKMKNYWRQLLNAKLITQRKFDNLTKAERGGLSELDKAGFIKRQLVETRQITKHVAQILDSRMNTKYDENDKLIREVKVITLKSKLVSDFRKDFQFYKVREINNYHHAHDAYLNAVVGTALIKKYPKLESEFVYGDYKVYDVRKMIAKSEQEIGKATAKYFFYSNIMNFFKTEITLANGEIRKRPLIETNGETGEIVWDKGRDFATVRKVLSMPQVNIVKKTEVQTGGFSKESILPKRNSDKLIARKKDWDPKKYGGFDSPTVAYSVLVVAKVEKGKSKKLKSVKELLGITIMERSSFEKNPIDFLEAKGYKEVKKDLIIKLPKYSLFELENGRKRMLASAGELQKGNELALPSKYVNFLYLASHYEKLKGSPEDNEQKQLFVEQHKHYLDEIIEQISEFSKRVILADANLDKVLSAYNKHRDKPIREQAENIIHLFTLTNLGAPAAFKYFDTTIDRKRYTSTKEVLDATLIHQSITGLYETRIDLSQLGGDGGGSAGSAAGSGEFGGVPWILKKPLELTIKLDLEEQQGTLLNNSILSKKGKEELKQLFEKYSALWQSWENQVGHRRIRPHKIATGTVKPTPQKQYHINPKAKPDIQIVINDLLKQGVLIQKESTMNTPVYPVPKPNGRWRMVLDYRAVNKVTPLIAVQNQHSYGILGSLFKGRYKTTIDLSNGFWAHPIVPEDYWITAFTWQGKQYCWTVLPQGFLNSPGLFNGDVVDLLQGIPNVEVYVDDVYISHDSEKEHLEYLDILFNRLKEAGYIISLKKSNIANSIVDFLGFQITNEGRGLTDTFKEKLENITAPTTLKQLQSILGLLNFARNFIPDFTELIAPLYALIPKSPKNYVPWQIEHSTTLETLITKLNGAEYLQGRKGDKTLIMKVNASYTTGYIRYYNEGEKKPISYVSIVFSKTELKFTELEKLLTTVHKGLLKALDLSMGQNIHVYSPIVSMQNIQKTPQTAKKALASRWLSWLSYLEDPRIRFFYDPQMPALKDLPAVDTGKDNKKHPSNFQHIFYTDGSAITSPTKEGHLNAGMGIVYFINKDGNLQKQQEWSISLGNHTAQFAEIAAFEFALKKCLPLGGNILVVTDSNYVAKAYNEELDVWASNGFVNNRKKPLKHISKWKSVADLKRLRPDVVVTHEPGHQKLDSSPHAYGNNLADQLATQASFKVHAGKRTADGSEFEKRTADGSEFESPKKKAKVE

SEQ ID NO: 7711 - protein, 2096 aa, synthetic construct
MPAAKRVKLDGGDKKYSIGLDIGTNSVGWAVITDEYKVPSKKFKVLGNTDRHSIKKNLIGALLFDSGETAEATRLKRTARRRYTRRKNRICYLQEIFSNEMAKVDDSFFHRLEESFLVEEDKKHERHPIFGNIVDEVAYHEKYPTIYHLRKKLVDSTDKADLRLIYLALAHMIKFRGHFLIEGDLNPDNSDVDKLFIQLVQTYNQLFEENPINASGVDAKAILSARLSKSRRLENLIAQLPGEKKNGLFGNLIALSLGLTPNFKSNFDLAEDAKLQLSKDTYDDDLDNLLAQIGDQYADLFLAAKNLSDAILLSDILRVNTEITKAPLSASMIKRYDEHHQDLTLLKALVRQQLPEKYKEIFFDQSKNGYAGYIDGGASQEEFYKFIKPILEKMDGTEELLVKLNREDLLRKQRTFDNGSIPHQIHLGELHAILRRQEDFYPFLKDNREKIEKILTFRIPYYVGPLARGNSRFAWMTRKSEETITPWNFEEVVDKGASAQSFIERMTNFDKNLPNEKVLPKHSLLYEYFTVYNELTKVKYVTEGMRKPAFLSGEQKKAIVDLLFKTNRKVTVKQLKEDYFKKIECFDSVEISGVEDRFNASLGTYHDLLKIIKDKDFLDNEENEDILEDIVLTLTLFEDREMIEERLKTYAHLFDDKVMKQLKRRRYTGWGRLSRKLINGIRDKQSGKTILDFLKSDGFANRNFMQLIHDDSLTFKEDIQKAQVSGQGDSLHEHIANLAGSPAIKKGILQTVKVVDELVKVMGRHKPENIVIEMARENQTTQKGQKNSRERMKRIEEGIKELGSQILKEHPVENTQLQNEKLYLYYLQNGRDMYVDQELDINRLSDYDVDHIVPQSFLKDDSIDNKVLTRSDKARGKSDNVPSEEVVKKMKNYWRQLLNAKLITQRKFDNLTKAERGGLSELDKAGFIKRQLVETRQITKHVAQILDSRMNTKYDENDKLIREVKVITLKSKLVSDFRKDFQFYKVREINNYHHAHDAYLNAVVGTALIKKYPKLESEFVYGDYKVYDVRKMIAKSEQEIGKATAKYFFYSNIMNFFKTEITLANGEIRKRPLIETNGETGEIVWDKGRDFATVRKVLSMPQVNIVKKTEVQTGGFSKESILPKRNSDKLIARKKDWDPKKYGGFDSPTVAYSVLVVAKVEKGKSKKLKSVKELLGITIMERSSFEKNPIDFLEAKGYKEVKKDLIIKLPKYSLFELENGRKRMLASAGELQKGNELALPSKYVNFLYLASHYEKLKGSPEDNEQKQLFVEQHKHYLDEIIEQISEFSKRVILADANLDKVLSAYNKHRDKPIREQAENIIHLFTLTNLGAPAAFKYFDTTIDRKRYTSTKEVLDATLIHQSITGLYETRIDLSQLGGDGGGSAGSAAGSGEFGGTLQLEEEYRLFEPESTQKQEMDIWLKNFPQAWAETGGMGTAHCQAPVLIQLKATATPISIRQYPMPHEAYQGIKPHIRRMLDQGILKPCQSPWNTPLLPVKKPGTEDYRPVQDLREVNKRVEDIHPTVPNPYNLLSTLPPSHPWYTVLDLKDAFFCLRLHSESQLLFAFEWRDPEIGLSGQLTWTRLPQGFKNSPTLFNEALHSDLADFRVRYPALVLLQYVDDLLLAAATRTECLEGTKALLETLGNKGYRASAKKAQICLQEVTYLGYSLKDGQRWLTKARKEAILSIPVPKNSRQVREFLGKAGYCRLFIPGFAELAAPLYPLTRPGTLFQWGTEQQLAFEDIKKALLSSPALGLPDITKPFELFIDENSGFAKGVLVQKLGPWKRPVAYLSKKLDTVASGWPPCLRMVAAIAILVKDAGKLTLGQPLTILTSHPVEALVRQPPNKWLSNARMTHYQAMLLDAERVHFGPTVSLNPATLLPLPSGGNHHDCLQILAETHGTRPDLTDQPLPDADLTWYTDGSSFIRNGEREAGAAVTTESEVIWAAPLPPGTSAQRAELIALTQALKMAEGKKLTVYTDSRYAFATTHVHGEIYRRRGWLTSEGKEIKNKNEILALLEALFLPKRLSIIHCPGHQKGDSPQAKGNRLADDTAKKAATETHSSLTVLPAGKRTADGSEFEKRTADGSEFESPKKKAKVE

SEQ ID NO: 7712 - protein, 2095 aa, synthetic construct
MPAAKRVKLDGGDKKYSIGLDIGTNSVGWAVITDEYKVPSKKFKVLGNTDRHSIKKNLIGALLFDSGETAEATRLKRTARRRYTRRKNRICYLQEIFSNEMAKVDDSFFHRLEESFLVEEDKKHERHPIFGNIVDEVAYHEKYPTIYHLRKKLVDSTDKADLRLIYLALAHMIKFRGHFLIEGDLNPDNSDVDKLFIQLVQTYNQLFEENPINASGVDAKAILSARLSKSRRLENLIAQLPGEKKNGLFGNLIALSLGLTPNFKSNFDLAEDAKLQLSKDTYDDDLDNLLAQIGDQYADLFLAAKNLSDAILLSDILRVNTEITKAPLSASMIKRYDEHHQDLTLLKALVRQQLPEKYKEIFFDQSKNGYAGYIDGGASQEEFYKFIKPILEKMDGTEELLVKLNREDLLRKQRTFDNGSIPHQIHLGELHAILRRQEDFYPFLKDNREKIEKILTFRIPYYVGPLARGNSRFAWMTRKSEETITPWNFEEVVDKGASAQSFIERMTNFDKNLPNEKVLPKHSLLYEYFTVYNELTKVKYVTEGMRKPAFLSGEQKKAIVDLLFKTNRKVTVKQLKEDYFKKIECFDSVEISGVEDRFNASLGTYHDLLKIIKDKDFLDNEENEDILEDIVLTLTLFEDREMIEERLKTYAHLFDDKVMKQLKRRRYTGWGRLSRKLINGIRDKQSGKTILDFLKSDGFANRNFMQLIHDDSLTFKEDIQKAQVSGQGDSLHEHIANLAGSPAIKKGILQTVKVVDELVKVMGRHKPENIVIEMARENQTTQKGQKNSRERMKRIEEGIKELGSQILKEHPVENTQLQNEKLYLYYLQNGRDMYVDQELDINRLSDYDVDHIVPQSFLKDDSIDNKVLTRSDKARGKSDNVPSEEVVKKMKNYWRQLLNAKLITQRKFDNLTKAERGGLSELDKAGFIKRQLVETRQITKHVAQILDSRMNTKYDENDKLIREVKVITLKSKLVSDFRKDFQFYKVREINNYHHAHDAYLNAVVGTALIKKYPKLESEFVYGDYKVYDVRKMIAKSEQEIGKATAKYFFYSNIMNFFKTEITLANGEIRKRPLIETNGETGEIVWDKGRDFATVRKVLSMPQVNIVKKTEVQTGGFSKESILPKRNSDKLIARKKDWDPKKYGGFDSPTVAYSVLVVAKVEKGKSKKLKSVKELLGITIMERSSFEKNPIDFLEAKGYKEVKKDLIIKLPKYSLFELENGRKRMLASAGELQKGNELALPSKYVNFLYLASHYEKLKGSPEDNEQKQLFVEQHKHYLDEIIEQISEFSKRVILADANLDKVLSAYNKHRDKPIREQAENIIHLFTLTNLGAPAAFKYFDTTIDRKRYTSTKEVLDATLIHQSITGLYETRIDLSQLGGDGGGSAGSAAGSGEFGGVLNLEEEYRLHEKPVPSSIDPSWLQLFPTVWAERAGMGLANQVPPVVVELRSGASPVAVRQYPMSKEAREGIRPHIQKFLDLGVLVPCRSPWNTPLLPVKKPGTNDYRPVQDLREINKRVQDIHPTVPNPYNLLSSLPPSYTWYSVLDLKDAFFCLRLHPNSQPLFAFEWKDPEKGNTGQLTWTRLPQGFKNSPTLFNEALHRDLAPFRALNPQVVLLQYVDDLLVAAPTYEDCKKGTQKLLQELSKLGYRVSAKKAQLCQREVTYLGYLLKEGKRWLTPARKATVMKIPVPTTPRQVREFLGKAGFCRLFIPGFASLAAPLYPLTKPSIPFIWTEEHQQAFDHIKKALLSAPALALPDLTKPFTLYIDERAGVARGVLTQTLGPWRRPVAYLSKKLDPVASGWPTCLKAVAAVALLLKDADKLTLGQNVTVIASHSLESIVRQPPDRWMTNARMTHYQSLLLNERVSFAPPAVLNPATLLPVESEATPVHRCSEILAEETGTRRDLEDQPLPGVPTWYTDGSSFITEGKRRAGAPIVDGKRTVWASSLPEGTSAQKAELVALTQALRLAEGKNINIYTDSRYAFATAHIHGAIYKQRGWLTSAGKDIKNKEEILALLEAIHLPRRVAIIHCPGHQRGSNPVATGNRRADEAAKQAALSTRVLAGTTKPAGKRTADGSEFEKRTADGSEFESPKKKAKVE

SEQ ID NO: 7713 - protein, 2219 aa, synthetic construct
MPAAKRVKLDGGDKKYSIGLDIGTNSVGWAVITDEYKVPSKKFKVLGNTDRHSIKKNLIGALLFDSGETAEATRLKRTARRRYTRRKNRICYLQEIFSNEMAKVDDSFFHRLEESFLVEEDKKHERHPIFGNIVDEVAYHEKYPTIYHLRKKLVDSTDKADLRLIYLALAHMIKFRGHFLIEGDLNPDNSDVDKLFIQLVQTYNQLFEENPINASGVDAKAILSARLSKSRRLENLIAQLPGEKKNGLFGNLIALSLGLTPNFKSNFDLAEDAKLQLSKDTYDDDLDNLLAQIGDQYADLFLAAKNLSDAILLSDILRVNTEITKAPLSASMIKRYDEHHQDLTLLKALVRQQLPEKYKEIFFDQSKNGYAGYIDGGASQEEFYKFIKPILEKMDGTEELLVKLNREDLLRKQRTFDNGSIPHQIHLGELHAILRRQEDFYPFLKDNREKIEKILTFRIPYYVGPLARGNSRFAWMTRKSEETITPWNFEEVVDKGASAQSFIERMTNFDKNLPNEKVLPKHSLLYEYFTVYNELTKVKYVTEGMRKPAFLSGEQKKAIVDLLFKTNRKVTVKQLKEDYFKKIECFDSVEISGVEDRFNASLGTYHDLLKIIKDKDFLDNEENEDILEDIVLTLTLFEDREMIEERLKTYAHLFDDKVMKQLKRRRYTGWGRLSRKLINGIRDKQSGKTILDFLKSDGFANRNFMQLIHDDSLTFKEDIQKAQVSGQGDSLHEHIANLAGSPAIKKGILQTVKVVDELVKVMGRHKPENIVIEMARENQTTQKGQKNSRERMKRIEEGIKELGSQILKEHPVENTQLQNEKLYLYYLQNGRDMYVDQELDINRLSDYDVDHIVPQSFLKDDSIDNKVLTRSDKARGKSDNVPSEEVVKKMKNYWRQLLNAKLITQRKFDNLTKAERGGLSELDKAGFIKRQLVETRQITKHVAQILDSRMNTKYDENDKLIREVKVITLKSKLVSDFRKDFQFYKVREINNYHHAHDAYLNAVVGTALIKKYPKLESEFVYGDYKVYDVRKMIAKSEQEIGKATAKYFFYSNIMNFFKTEITLANGEIRKRPLIETNGETGEIVWDKGRDFATVRKVLSMPQVNIVKKTEVQTGGFSKESILPKRNSDKLIARKKDWDPKKYGGFDSPTVAYSVLVVAKVEKGKSKKLKSVKELLGITIMERSSFEKNPIDFLEAKGYKEVKKDLIIKLPKYSLFELENGRKRMLASAGELQKGNELALPSKYVNFLYLASHYEKLKGSPEDNEQKQLFVEQHKHYLDEIIEQISEFSKRVILADANLDKVLSAYNKHRDKPIREQAENIIHLFTLTNLGAPAAFKYFDTTIDRKRYTSTKEVLDATLIHQSITGLYETRIDLSQLGGDGGGSAGSAAGSGEFGGTLGDQGSRGSDPLPEPRVTLTVEGIPTEFLVNTGAEHSVLTKPMGKMGSKRTVVAGATGSKVYPWTTKRLLKIGQKQVTHSFLVIPECPAPLLGRDLLTKLKAQIQFSTEGPQVTWEDRPAMCLVLNLEEEYRLHEKPVPPSIDPSWLQLFPMVWAEKAGMGLANQVPPVVVELKSDASPVAVRQYPMSKEAREGIRPHIQRFLDLGILVPCQSPWNTPLLPVKKPGTNDYRPVQDLREVNKRVQDIHPTVPNPYNLLSSLPPSHTWYSVLDLKDAFFCLKLHPNSQPLFAFEWRDPEKGNTGQLTWTRLPQGFKNSPTLFDEALHRDLASFRALNPQVVMLQYVDDLLVAAPTYRDCKEGTRRLLQELSKLGYRVSAKKAQLCREEVTYLGYLLKGGKRWLTPARKATVMKIPTPTTPRQVREFLGTAGFCRLWIPGFASLAAPLYPLTREKVPFTWTEAHQEAFGRIKEALLSAPALALPDLTKPFALYVDEKEGVARGVLTQTLGPWRRPVAYLSKKLDPVASGWPTCLKAIAAVALLLKDADKLTLGQNVLVIAPHNLESIVRQPPDRWMTNARMTHYQSLLLNERVSFAPPAILNPATLLPVESDDTPIHICSEILAEETGTRPDLRDQPLPGVPAWYTDGSSFIMDGRRQAGAAIVDNKRTVWASNLPEGTSAQKAELIALTQALRLAEGKSINIYTDSRYAFATAHVHGAIYKQRGLLTSAGKDIKNKEEILALLEAIHLPKRVAIIHCPGHQRGTDPVATGNRKADEAAKQAAQSTRILTETTKNAGKRTADGSEFEKRTADGSEFESPKKKAKVE

SEQ ID NO: 7714 - protein, 2128 aa, synthetic construct
MPAAKRVKLDGGDKKYSIGLDIGTNSVGWAVITDEYKVPSKKFKVLGNTDRHSIKKNLIGALLFDSGETAEATRLKRTARRRYTRRKNRICYLQEIFSNEMAKVDDSFFHRLEESFLVEEDKKHERHPIFGNIVDEVAYHEKYPTIYHLRKKLVDSTDKADLRLIYLALAHMIKFRGHFLIEGDLNPDNSDVDKLFIQLVQTYNQLFEENPINASGVDAKAILSARLSKSRRLENLIAQLPGEKKNGLFGNLIALSLGLTPNFKSNFDLAEDAKLQLSKDTYDDDLDNLLAQIGDQYADLFLAAKNLSDAILLSDILRVNTEITKAPLSASMIKRYDEHHQDLTLLKALVRQQLPEKYKEIFFDQSKNGYAGYIDGGASQEEFYKFIKPILEKMDGTEELLVKLNREDLLRKQRTFDNGSIPHQIHLGELHAILRRQEDFYPFLKDNREKIEKILTFRIPYYVGPLARGNSRFAWMTRKSEETITPWNFEEVVDKGASAQSFIERMTNFDKNLPNEKVLPKHSLLYEYFTVYNELTKVKYVTEGMRKPAFLSGEQKKAIVDLLFKTNRKVTVKQLKEDYFKKIECFDSVEISGVEDRFNASLGTYHDLLKIIKDKDFLDNEENEDILEDIVLTLTLFEDREMIEERLKTYAHLFDDKVMKQLKRRRYTGWGRLSRKLINGIRDKQSGKTILDFLKSDGFANRNFMQLIHDDSLTFKEDIQKAQVSGQGDSLHEHIANLAGSPAIKKGILQTVKVVDELVKVMGRHKPENIVIEMARENQTTQKGQKNSRERMKRIEEGIKELGSQILKEHPVENTQLQNEKLYLYYLQNGRDMYVDQELDINRLSDYDVDHIVPQSFLKDDSIDNKVLTRSDKARGKSDNVPSEEVVKKMKNYWRQLLNAKLITQRKFDNLTKAERGGLSELDKAGFIKRQLVETRQITKHVAQILDSRMNTKYDENDKLIREVKVITLKSKLVSDFRKDFQFYKVREINNYHHAHDAYLNAVVGTALIKKYPKLESEFVYGDYKVYDVRKMIAKSEQEIGKATAKYFFYSNIMNFFKTEITLANGEIRKRPLIETNGETGEIVWDKGRDFATVRKVLSMPQVNIVKKTEVQTGGFSKESILPKRNSDKLIARKKDWDPKKYGGFDSPTVAYSVLVVAKVEKGKSKKLKSVKELLGITIMERSSFEKNPIDFLEAKGYKEVKKDLIIKLPKYSLFELENGRKRMLASAGELQKGNELALPSKYVNFLYLASHYEKLKGSPEDNEQKQLFVEQHKHYLDEIIEQISEFSKRVILADANLDKVLSAYNKHRDKPIREQAENIIHLFTLTNLGAPAAFKYFDTTIDRKRYTSTKEVLDATLIHQSITGLYETRIDLSQLGGDGGGSAGSAAGSGEFGGLLGRDLLTKLKAQIQFSTEGPQVTWEDRPAMCLVLNLEEEYRLHEKPVPPSIDPSWLQLFPMVWAEKAGMGLANQVPPVVVELKSDASPVAVRQYPMSKEAREGIRPHIQRFLDLGILVPCQSPWNTPLLPVKKPGTNDYRPVQDLREVNKRVQDIHPTVPNPYNLLSSLPPSHTWYSVLDLKDAFFCLKLHPNSQPLFAFEWRDPEKGNTGQLTWTRLPQGFKNSPTLFNEALHRDLASFRALNPQVVMLQYVDDLLVAAPTYRDCKEGTRRLLQELSKLGYRVSAKKAQLCREEVTYLGYLLKGGKRWLTPARKATVMKIPTPTTPRQVREFLGTAGFCRLWIPGFASLAAPLYPLTRPKVPFTWTEAHQEAFGRIKEALLSAPALALPDLTKPFALYVDEKEGVARGVLTQTLGPWRRPVAYLSKKLDPVASGWPTCLKAIAAVALLLKDADKLTLGQNVLVIAPHNLESIVRQPPDRWMTNARMTHYQSLLLNERVSFAPPAILNPATLLPVESDDTPIHICSEILAEETGTRPDLRDQPLPGVPAWYTDGSSFIMDGRRQAGAAIVDNKRTVWASNLPEGTSAQKAELIALTQALRLAEGKSINIYTDSRYAFATAHVHGAIYKQRGWLTSAGKDIKNKEEILALLEAIHLPKRVAIIHCPGHQRGTDPVATGNRKADEAAKQAAQSTRILTETTKNAGKRTADGSEFEKRTADGSEFESPKKKAKVE

SEQ ID NO: 7715 - protein, 2219 aa, synthetic construct
MPAAKRVKLDGGDKKYSIGLDIGTNSVGWAVITDEYKVPSKKFKVLGNTDRHSIKKNLIGALLFDSGETAEATRLKRTARRRYTRRKNRICYLQEIFSNEMAKVDDSFFHRLEESFLVEEDKKHERHPIFGNIVDEVAYHEKYPTIYHLRKKLVDSTDKADLRLIYLALAHMIKFRGHFLIEGDLNPDNSDVDKLFIQLVQTYNQLFEENPINASGVDAKAILSARLSKSRRLENLIAQLPGEKKNGLFGNLIALSLGLTPNFKSNFDLAEDAKLQLSKDTYDDDLDNLLAQIGDQYADLFLAAKNLSDAILLSDILRVNTEITKAPLSASMIKRYDEHHQDLTLLKALVRQQLPEKYKEIFFDQSKNGYAGYIDGGASQEEFYKFIKPILEKMDGTEELLVKLNREDLLRKQRTFDNGSIPHQIHLGELHAILRRQEDFYPFLKDNREKIEKILTFRIPYYVGPLARGNSRFAWMTRKSEETITPWNFEEVVDKGASAQSFIERMTNFDKNLPNEKVLPKHSLLYEYFTVYNELTKVKYVTEGMRKPAFLSGEQKKAIVDLLFKTNRKVTVKQLKEDYFKKIECFDSVEISGVEDRFNASLGTYHDLLKIIKDKDFLDNEENEDILEDIVLTLTLFEDREMIEERLKTYAHLFDDKVMKQLKRRRYTGWGRLSRKLINGIRDKQSGKTILDFLKSDGFANRNFMQLIHDDSLTFKEDIQKAQVSGQGDSLHEHIANLAGSPAIKKGILQTVKVVDELVKVMGRHKPENIVIEMARENQTTQKGQKNSRERMKRIEEGIKELGSQILKEHPVENTQLQNEKLYLYYLQNGRDMYVDQELDINRLSDYDVDHIVPQSFLKDDSIDNKVLTRSDKARGKSDNVPSEEVVKKMKNYWRQLLNAKLITQRKFDNLTKAERGGLSELDKAGFIKRQLVETRQITKHVAQILDSRMNTKYDENDKLIREVKVITLKSKLVSDFRKDFQFYKVREINNYHHAHDAYLNAVVGTALIKKYPKLESEFVYGDYKVYDVRKMIAKSEQEIGKATAKYFFYSNIMNFFKTEITLANGEIRKRPLIETNGETGEIVWDKGRDFATVRKVLSMPQVNIVKKTEVQTGGFSKESILPKRNSDKLIARKKDWDPKKYGGFDSPTVAYSVLVVAKVEKGKSKKLKSVKELLGITIMERSSFEKNPIDFLEAKGYKEVKKDLIIKLPKYSLFELENGRKRMLASAGELQKGNELALPSKYVNFLYLASHYEKLKGSPEDNEQKQLFVEQHKHYLDEIIEQISEFSKRVILADANLDKVLSAYNKHRDKPIREQAENIIHLFTLTNLGAPAAFKYFDTTIDRKRYTSTKEVLDATLIHQSITGLYETRIDLSQLGGDGGGSAGSAAGSGEFGGTLGDQGSRGSDPLPEPRVTLTVEGIPTEFLVNTGAEHSVLTKPMGKMGSKRTVVAGATGSKVYPWTTKRLLKIGQKQVTHSFLVIPECPAPLLGRDLLTKLKAQIQFSTEGPQVTWEDRPAMCLVLNLEEEYRLHEKPVPPSIDPSWLQLFPMVWAEKAGMGLANQVPPVVVELKSDASPVAVRQYPMSKEAREGIRPHIQRFLDLGILVPCQSPWNTPLLPVKKPGTNDYRPVQDLREVNKRVQDIHPTVPNPYNLLSSLPPSHTWYSVLDLKDAFFCLKLHPNSQPLFAFEWRDPEKGNTGQLTWTRLPQGFKNSPTLFNEALHRDLASFRALNPQVVMLQYVDDLLVAAPTYRDCKEGTRRLLQELSKLGYRVSAKKAQLCREEVTYLGYLLKGGKRWLTPARKATVMKIPTPTTPRQVREFLGTAGFCRLWIPGFASLAAPLYPLTRPKVPFTWTEAHQEAFGRIKEALLSAPALALPDLTKPFALYVDEKEGVARGVLTQTLGPWRRPVAYLSKKLDPVASGWPTCLKAIAAVALLLKDADKLTLGQNVLVIAPHNLESIVRQPPDRWMTNARMTHYQSLLLNERVSFAPPAILNPATLLPVESDDTPIHICSEILAEETGTRPDLRDQPLPGVPAWYTDGSSFIMDGRRQAGAAIVDNKRTVWASNLPEGTSAQKAELIALTQALRLAEGKSINIYTDSRYAFATAHVHGAIYKQRGWLTSAGKDIKNKEEILALLEAIHLPKRVAIIHCPGHQRGTDPVATGNRKADEAAKQAAQSTRILTETTKNAGKRTADGSEFEKRTADGSEFESPKKKAKVE

SEQ ID NO: 7716 - protein, 2097 aa, synthetic construct
MPAAKRVKLDGGDKKYSIGLDIGTNSVGWAVITDEYKVPSKKFKVLGNTDRHSIKKNLIGALLFDSGETAEATRLKRTARRRYTRRKNRICYLQEIFSNEMAKVDDSFFHRLEESFLVEEDKKHERHPIFGNIVDEVAYHEKYPTIYHLRKKLVDSTDKADLRLIYLALAHMIKFRGHFLIEGDLNPDNSDVDKLFIQLVQTYNQLFEENPINASGVDAKAILSARLSKSRRLENLIAQLPGEKKNGLFGNLIALSLGLTPNFKSNFDLAEDAKLQLSKDTYDDDLDNLLAQIGDQYADLFLAAKNLSDAILLSDILRVNTEITKAPLSASMIKRYDEHHQDLTLLKALVRQQLPEKYKEIFFDQSKNGYAGYIDGGASQEEFYKFIKPILEKMDGTEELLVKLNREDLLRKQRTFDNGSIPHQIHLGELHAILRRQEDFYPFLKDNREKIEKILTFRIPYYVGPLARGNSRFAWMTRKSEETITPWNFEEVVDKGASAQSFIERMTNFDKNLPNEKVLPKHSLLYEYFTVYNELTKVKYVTEGMRKPAFLSGEQKKAIVDLLFKTNRKVTVKQLKEDYFKKIECFDSVEISGVEDRFNASLGTYHDLLKIIKDKDFLDNEENEDILEDIVLTLTLFEDREMIEERLKTYAHLFDDKVMKQLKRRRYTGWGRLSRKLINGIRDKQSGKTILDFLKSDGFANRNFMQLIHDDSLTFKEDIQKAQVSGQGDSLHEHIANLAGSPAIKKGILQTVKVVDELVKVMGRHKPENIVIEMARENQTTQKGQKNSRERMKRIEEGIKELGSQILKEHPVENTQLQNEKLYLYYLQNGRDMYVDQELDINRLSDYDVDHIVPQSFLKDDSIDNKVLTRSDKARGKSDNVPSEEVVKKMKNYWRQLLNAKLITQRKFDNLTKAERGGLSELDKAGFIKRQLVETRQITKHVAQILDSRMNTKYDENDKLIREVKVITLKSKLVSDFRKDFQFYKVREINNYHHAHDAYLNAVVGTALIKKYPKLESEFVYGDYKVYDVRKMIAKSEQEIGKATAKYFFYSNIMNFFKTEITLANGEIRKRPLIETNGETGEIVWDKGRDFATVRKVLSMPQVNIVKKTEVQTGGFSKESILPKRNSDKLIARKKDWDPKKYGGFDSPTVAYSVLVVAKVEKGKSKKLKSVKELLGITIMERSSFEKNPIDFLEAKGYKEVKKDLIIKLPKYSLFELENGRKRMLASAGELQKGNELALPSKYVNFLYLASHYEKLKGSPEDNEQKQLFVEQHKHYLDEIIEQISEFSKRVILADANLDKVLSAYNKHRDKPIREQAENIIHLFTLTNLGAPAAFKYFDTTIDRKRYTSTKEVLDATLIHQSITGLYETRIDLSQLGGDGGGSAGSAAGSGEFGGTLNLEDEYRLYETSAEPEVSPGSTWLSDFPQAWAETGGMGLAVRQAPLIIPLKATSTPVSIKQYPMSQEAKLGIKPHIQRLLDQGILVPCQSPWNTPLLPVKKPGTNDYRPVQDLREVNKRVEDIHPTVPNPYNLLSGLPPSHRWYTVLDLKDAFFCLRLHPTSQPLFAFEWRDPGMGISGQLTWTRLPQGFKNSPTLFNEALHRDLADFRIQHPDLILLQYVDDILLAATSELDCQQGTRALLLTLGNLGYRASAKKAQLCQKQVKYLGYLLKEGQRWLTEARKETVMGQPTPKTPRQLREFLGTAGFCRLWIPGFAEMAAPLYPLTKPGTLFNWGPDQQKAYQEIKQALLTAPALGLPDLTKPFELFVDEKQGYAKGVLTQKLGPWRRPVAYLSKKLDPVAAGWPPCLRMVAAIAVLRKDAGKLTMGQPLVILAPHAVEALVKQPPDRWLSNARMTHYQAMLLDTDRVQFGPVVALNPATLLPLPEEGAPHDCLEILAETHGTRPDLTDQPIPDADHTWYTDGSSFLQEGQRKAGAAVTTETEVIWARALPAGTSAQRAELIALTQALKMAEGKRLNVYTDSRYAFATAHIHGEIYRRRGWLTSEGREIKNKSEILALLKALFLPKRLSIIHCLGHQKGDSAEARGNRLADQAAREAAIKTPPDTSTLLAGKRTADGSEFEKRTADGSEFESPKKKAKVE

SEQ ID NO: 7717 - protein, 2097 aa, synthetic construct
MPAAKRVKLDGGDKKYSIGLDIGTNSVGWAVITDEYKVPSKKFKVLGNTDRHSIKKNLIGALLFDSGETAEATRLKRTARRRYTRRKNRICYLQEIFSNEMAKVDDSFFHRLEESFLVEEDKKHERHPIFGNIVDEVAYHEKYPTIYHLRKKLVDSTDKADLRLIYLALAHMIKFRGHFLIEGDLNPDNSDVDKLFIQLVQTYNQLFEENPINASGVDAKAILSARLSKSRRLENLIAQLPGEKKNGLFGNLIALSLGLTPNFKSNFDLAEDAKLQLSKDTYDDDLDNLLAQIGDQYADLFLAAKNLSDAILLSDILRVNTEITKAPLSASMIKRYDEHHQDLTLLKALVRQQLPEKYKEIFFDQSKNGYAGYIDGGASQEEFYKFIKPILEKMDGTEELLVKLNREDLLRKQRTFDNGSIPHQIHLGELHAILRRQEDFYPFLKDNREKIEKILTFRIPYYVGPLARGNSRFAWMTRKSEETITPWNFEEVVDKGASAQSFIERMTNFDKNLPNEKVLPKHSLLYEYFTVYNELTKVKYVTEGMRKPAFLSGEQKKAIVDLLFKTNRKVTVKQLKEDYFKKIECFDSVEISGVEDRFNASLGTYHDLLKIIKDKDFLDNEENEDILEDIVLTLTLFEDREMIEERLKTYAHLFDDKVMKQLKRRRYTGWGRLSRKLINGIRDKQSGKTILDFLKSDGFANRNFMQLIHDDSLTFKEDIQKAQVSGQGDSLHEHIANLAGSPAIKKGILQTVKVVDELVKVMGRHKPENIVIEMARENQTTQKGQKNSRERMKRIEEGIKELGSQILKEHPVENTQLQNEKLYLYYLQNGRDMYVDQELDINRLSDYDVDHIVPQSFLKDDSIDNKVLTRSDKARGKSDNVPSEEVVKKMKNYWRQLLNAKLITQRKFDNLTKAERGGLSELDKAGFIKRQLVETRQITKHVAQILDSRMNTKYDENDKLIREVKVITLKSKLVSDFRKDFQFYKVREINNYHHAHDAYLNAVVGTALIKKYPKLESEFVYGDYKVYDVRKMIAKSEQEIGKATAKYFFYSNIMNFFKTEITLANGEIRKRPLIETNGETGEIVWDKGRDFATVRKVLSMPQVNIVKKTEVQTGGFSKESILPKRNSDKLIARKKDWDPKKYGGFDSPTVAYSVLVVAKVEKGKSKKLKSVKELLGITIMERSSFEKNPIDFLEAKGYKEVKKDLIIKLPKYSLFELENGRKRMLASAGELQKGNELALPSKYVNFLYLASHYEKLKGSPEDNEQKQLFVEQHKHYLDEIIEQISEFSKRVILADANLDKVLSAYNKHRDKPIREQAENIIHLFTLTNLGAPAAFKYFDTTIDRKRYTSTKEVLDATLIHQSITGLYETRIDLSQLGGDGGGSAGSAAGSGEFGGTLNIEDEHRLHETSKEPDVSLGSTWLSDFPQAWAETGGMGLAVRQAPLIIPLKATSTPVSIKQYPMSQEARLGIKPHIQRLLDQGILVPCQSPWNTPLLPVKKPGTNDYRPVQDLREVNKRVEDIHPTVPNPYNLLSGLPPSHQWYTVLDLKDAFFCLRLHPTSQPLFAFEWRDPEMGISGQLTWTRLPQGFKNSPTLFDEALHRDLADFRIQHPDLILLQYVDDLLLAATSELDCQQGTRALLQTLGNLGYRASAKKAQICQKQVKYLGYLLKEGQRWLTEARKETVMGQPTPKTPRQLREFLGTAGFCRLWIPGFAEMAAPLYPLTKTGTLFNWGPDQQKAYQEIKQALLTAPALGLPDLTKPFELFVDEKQGYAKGVLTQKLGPWRRPVAYLSKKLDPVAAGWPPCLRMVAAIAVLTKDAGKLTMGQPLVILAPHAVEALVKQPPDRWLSNARMTHYQALLLDTDRVQFGPVVALNPATLLPLPEEGLQHNCLDILAEAHGTRPDLTDQPLPDADHTWYTDGSSLLQEGQRKAGAAVTTETEVIWAKALPAGTSAQRAELIALTQALKMAEGKKLNVYTDSRYAFATAHIHGEIYRRRGLLTSEGKEIKNKDEILALLKALFLPKRLSIIHCPGHQKGHSAEARGNRMADQAARKAAITETPDTSTLLAGKRTADGSEFEKRTADGSEFESPKKKAKVE

SEQ ID NO: 7718 - protein, 2177 aa, synthetic construct
MPAAKRVKLDGGDKKYSIGLDIGTNSVGWAVITDEYKVPSKKFKVLGNTDRHSIKKNLIGALLFDSGETAEATRLKRTARRRYTRRKNRICYLQEIFSNEMAKVDDSFFHRLEESFLVEEDKKHERHPIFGNIVDEVAYHEKYPTIYHLRKKLVDSTDKADLRLIYLALAHMIKFRGHFLIEGDLNPDNSDVDKLFIQLVQTYNQLFEENPINASGVDAKAILSARLSKSRRLENLIAQLPGEKKNGLFGNLIALSLGLTPNFKSNFDLAEDAKLQLSKDTYDDDLDNLLAQIGDQYADLFLAAKNLSDAILLSDILRVNTEITKAPLSASMIKRYDEHHQDLTLLKALVRQQLPEKYKEIFFDQSKNGYAGYIDGGASQEEFYKFIKPILEKMDGTEELLVKLNREDLLRKQRTFDNGSIPHQIHLGELHAILRRQEDFYPFLKDNREKIEKILTFRIPYYVGPLARGNSRFAWMTRKSEETITPWNFEEVVDKGASAQSFIERMTNFDKNLPNEKVLPKHSLLYEYFTVYNELTKVKYVTEGMRKPAFLSGEQKKAIVDLLFKTNRKVTVKQLKEDYFKKIECFDSVEISGVEDRFNASLGTYHDLLKIIKDKDFLDNEENEDILEDIVLTLTLFEDREMIEERLKTYAHLFDDKVMKQLKRRRYTGWGRLSRKLINGIRDKQSGKTILDFLKSDGFANRNFMQLIHDDSLTFKEDIQKAQVSGQGDSLHEHIANLAGSPAIKKGILQTVKVVDELVKVMGRHKPENIVIEMARENQTTQKGQKNSRERMKRIEEGIKELGSQILKEHPVENTQLQNEKLYLYYLQNGRDMYVDQELDINRLSDYDVDHIVPQSFLKDDSIDNKVLTRSDKARGKSDNVPSEEVVKKMKNYWRQLLNAKLITQRKFDNLTKAERGGLSELDKAGFIKRQLVETRQITKHVAQILDSRMNTKYDENDKLIREVKVITLKSKLVSDFRKDFQFYKVREINNYHHAHDAYLNAVVGTALIKKYPKLESEFVYGDYKVYDVRKMIAKSEQEIGKATAKYFFYSNIMNFFKTEITLANGEIRKRPLIETNGETGEIVWDKGRDFATVRKVLSMPQVNIVKKTEVQTGGFSKESILPKRNSDKLIARKKDWDPKKYGGFDSPTVAYSVLVVAKVEKGKSKKLKSVKELLGITIMERSSFEKNPIDFLEAKGYKEVKKDLIIKLPKYSLFELENGRKRMLASAGELQKGNELALPSKYVNFLYLASHYEKLKGSPEDNEQKQLFVEQHKHYLDEIIEQISEFSKRVILADANLDKVLSAYNKHRDKPIREQAENIIHLFTLTNLGAPAAFKYFDTTIDRKRYTSTKEVLDATLIHQSITGLYETRIDLSQLGGDGGGSAGSAAGSGEFGGMDPLQLLQPLEAEIKGTKLKAHWNSGATITCVPQAFLEEEVPIKNIWIKTIHGEKEQPVYYLTFKIQGRKVEAEVISSPYDYILVSPSDIPWLMKKPLQLTTLVPLQEYEERLLKQTMLTGSYKEKLQSLFLKYDALWQHWENQVGHRRIKPHHIATGTVNPRPQKQYPINPKAKASIQTVINDLLKQGVLIQQNSIMNTPVYPVPKPDGKWRMVLDYREVNKTIPLIAAQNQHSAGILSSIFRGKYKTTLDLSNGFWAHSITPESYWLTAFTWLGQQYCWTRLPQGFLNSPALFNADVVDLLKEVPNVQVYVDDIYISHDDPREHLEQLEKVFSLLLNAGYVVSLKKSEIAQHEVEFLGFNITKEGRGLTETFKQKLLNITPPRDLKQLQSILGLLNFARNFIPNFSELVKPLYNIIATAPGKYITWTTDNSQQLQNIISMLNSAENLEERNPEVRLIMKVNTSPSAGYIRFYNEFAKRPIMYLNYVYTKAEVKFTNTEKLLTTIHKGLIKALDLGMGQEILVYSPIVSMTKIQKTPLPERKALPIRWITWMSYLEDPRIQFHYDKTLPELQQVPTVTDDIIAKIKHPSEFSMVFYTDGSAIKHPNVNKSHNAGMGIAQVQFKPEFTVINTWSIPLGDHTAQLAEVAAVEFACKKALKIDGPVLIVTDSFYVAESVNKELPYWQSNGFFNNKKKPLKHVSKWKSIADCIQLKPDIIIIHEKGHQPTASTFHTEGNNLADKLATQGSYVVNAGKRTADGSEFEKRTADGSEFESPKKKAKVE

SEQ ID NO: 7719 - protein, 2097 aa, synthetic construct
MPAAKRVKLDGGDKKYSIGLDIGTNSVGWAVITDEYKVPSKKFKVLGNTDRHSIKKNLIGALLFDSGETAEATRLKRTARRRYTRRKNRICYLQEIFSNEMAKVDDSFFHRLEESFLVEEDKKHERHPIFGNIVDEVAYHEKYPTIYHLRKKLVDSTDKADLRLIYLALAHMIKFRGHFLIEGDLNPDNSDVDKLFIQLVQTYNQLFEENPINASGVDAKAILSARLSKSRRLENLIAQLPGEKKNGLFGNLIALSLGLTPNFKSNFDLAEDAKLQLSKDTYDDDLDNLLAQIGDQYADLFLAAKNLSDAILLSDILRVNTEITKAPLSASMIKRYDEHHQDLTLLKALVRQQLPEKYKEIFFDQSKNGYAGYIDGGASQEEFYKFIKPILEKMDGTEELLVKLNREDLLRKQRTFDNGSIPHQIHLGELHAILRRQEDFYPFLKDNREKIEKILTFRIPYYVGPLARGNSRFAWMTRKSEETITPWNFEEVVDKGASAQSFIERMTNFDKNLPNEKVLPKHSLLYEYFTVYNELTKVKYVTEGMRKPAFLSGEQKKAIVDLLFKTNRKVTVKQLKEDYFKKIECFDSVEISGVEDRFNASLGTYHDLLKIIKDKDFLDNEENEDILEDIVLTLTLFEDREMIEERLKTYAHLFDDKVMKQLKRRRYTGWGRLSRKLINGIRDKQSGKTILDFLKSDGFANRNFMQLIHDDSLTFKEDIQKAQVSGQGDSLHEHIANLAGSPAIKKGILQTVKVVDELVKVMGRHKPENIVIEMARENQTTQKGQKNSRERMKRIEEGIKELGSQILKEHPVENTQLQNEKLYLYYLQNGRDMYVDQELDINRLSDYDVDHIVPQSFLKDDSIDNKVLTRSDKARGKSDNVPSEEVVKKMKNYWRQLLNAKLITQRKFDNLTKAERGGLSELDKAGFIKRQLVETRQITKHVAQILDSRMNTKYDENDKLIREVKVITLKSKLVSDFRKDFQFYKVREINNYHHAHDAYLNAVVGTALIKKYPKLESEFVYGDYKVYDVRKMIAKSEQEIGKATAKYFFYSNIMNFFKTEITLANGEIRKRPLIETNGETGEIVWDKGRDFATVRKVLSMPQVNIVKKTEVQTGGFSKESILPKRNSDKLIARKKDWDPKKYGGFDSPTVAYSVLVVAKVEKGKSKKLKSVKELLGITIMERSSFEKNPIDFLEAKGYKEVKKDLIIKLPKYSLFELENGRKRMLASAGELQKGNELALPSKYVNFLYLASHYEKLKGSPEDNEQKQLFVEQHKHYLDEIIEQISEFSKRVILADANLDKVLSAYNKHRDKPIREQAENIIHLFTLTNLGAPAAFKYFDTTIDRKRYTSTKEVLDATLIHQSITGLYETRIDLSQLGGDGGGSAGSAAGSGEFGGTLNIEDEYRLHETSKEPDVPLGSTWLSDFPQAWAETGGMGLAVRQAPLIIPLKATSTPVSIKQYPMSQEARLGIKPHIQRLLDQGILVPCQSPWNTPLLPVKKPGTNDYRPVQDLREVNKRVEDIHPTVPNPYNLLSGLPPSHQWYTVLDLKDAFFCLRLHPTSQPLFAFEWRDPEMGISGQLTWTRLPQGFKNSPTLFNEALHRDLADFRIQHPDLILLQYVDDLLLAATSEQDCQRGTRALLQTLGNLGYRASAKKAQICQKQVKYLGYLLKEGQRWLTEARKETVMGQPTPKTPRQLREFLGTAGFCRLWIPGFAEMAAPLYPLTKPGTLFNWGPDQQKAYQEIKQALLTAPALGLPDLTKPFELFVDEKQGYAKGVLTQKLGPWRRPVAYLSKKLDPVAAGWPPCLRMVAAIAVLTKDAGKLTMGQPLVILAPHAVEALVKQPPDRWLSNARMTHYQAMLLDTDRVQFGPVVALNPATLLPLPEKEAPHDCLEILAETHGTRPDLTDQPIPDADYTWYTDGSSFLQEGQRRAGAAVTTETEVIWARALPAGTSAQRAELIALTQALKMAEGKKLNVYTDSRYAFATAHVHGEIYRRRGWLTSEGREIKNKNEILALLKALFLPKRLSIIHCPGHQKGNSAEARGNRMADQAAREAAMKAVLETSTLLAGKRTADGSEFEKRTADGSEFESPKKKAKVE

SEQ ID NO: 7720 - protein, 2120 aa, synthetic construct
MPAAKRVKLDGGDKKYSIGLDIGTNSVGWAVITDEYKVPSKKFKVLGNTDRHSIKKNLIGALLFDSGETAEATRLKRTARRRYTRRKNRICYLQEIFSNEMAKVDDSFFHRLEESFLVEEDKKHERHPIFGNIVDEVAYHEKYPTIYHLRKKLVDSTDKADLRLIYLALAHMIKFRGHFLIEGDLNPDNSDVDKLFIQLVQTYNQLFEENPINASGVDAKAILSARLSKSRRLENLIAQLPGEKKNGLFGNLIALSLGLTPNFKSNFDLAEDAKLQLSKDTYDDDLDNLLAQIGDQYADLFLAAKNLSDAILLSDILRVNTEITKAPLSASMIKRYDEHHQDLTLLKALVRQQLPEKYKEIFFDQSKNGYAGYIDGGASQEEFYKFIKPILEKMDGTEELLVKLNREDLLRKQRTFDNGSIPHQIHLGELHAILRRQEDFYPFLKDNREKIEKILTFRIPYYVGPLARGNSRFAWMTRKSEETITPWNFEEVVDKGASAQSFIERMTNFDKNLPNEKVLPKHSLLYEYFTVYNELTKVKYVTEGMRKPAFLSGEQKKAIVDLLFKTNRKVTVKQLKEDYFKKIECFDSVEISGVEDRFNASLGTYHDLLKIIKDKDFLDNEENEDILEDIVLTLTLFEDREMIEERLKTYAHLFDDKVMKQLKRRRYTGWGRLSRKLINGIRDKQSGKTILDFLKSDGFANRNFMQLIHDDSLTFKEDIQKAQVSGQGDSLHEHIANLAGSPAIKKGILQTVKVVDELVKVMGRHKPENIVIEMARENQTTQKGQKNSRERMKRIEEGIKELGSQILKEHPVENTQLQNEKLYLYYLQNGRDMYVDQELDINRLSDYDVDHIVPQSFLKDDSIDNKVLTRSDKARGKSDNVPSEEVVKKMKNYWRQLLNAKLITQRKFDNLTKAERGGLSELDKAGFIKRQLVETRQITKHVAQILDSRMNTKYDENDKLIREVKVITLKSKLVSDFRKDFQFYKVREINNYHHAHDAYLNAVVGTALIKKYPKLESEFVYGDYKVYDVRKMIAKSEQEIGKATAKYFFYSNIMNFFKTEITLANGEIRKRPLIETNGETGEIVWDKGRDFATVRKVLSMPQVNIVKKTEVQTGGFSKESILPKRNSDKLIARKKDWDPKKYGGFDSPTVAYSVLVVAKVEKGKSKKLKSVKELLGITIMERSSFEKNPIDFLEAKGYKEVKKDLIIKLPKYSLFELENGRKRMLASAGELQKGNELALPSKYVNFLYLASHYEKLKGSPEDNEQKQLFVEQHKHYLDEIIEQISEFSKRVILADANLDKVLSAYNKHRDKPIREQAENIIHLFTLTNLGAPAAFKYFDTTIDRKRYTSTKEVLDATLIHQSITGLYETRIDLSQLGGDGGSGGSSGGSSGSETPGTSESATPESSGGSSGGSSGGTAPLEEEYRLFLEAPIQNVTLLEQWKREIPKVWAEINPPGLASTQAPIHVQLLSTALPVRVRQYPITLEAKRSLRETIRKFRAAGILRPVHSPWNTPLLPVRKSGTSEYRMVQDLREVNKRVETIHPTVPNPYTLLSLLPPDRIWYSVLDLKDAFFCIPLAPESQLIFAFEWADAEEGESGQLTWTRLPQGFKNSPTLFDEALNRDLQGFRLDHPSVSLLQYVDDLLIAADTQAACLSATRDLLMTLAELGYRVSGKKAQLCQEEVTYLGFKIHKGSRSLSNSRTQAILQIPVPKTKRQVREFLGTIGYCRLWIPGFAELAQPLYAATRGGNDPLVWGEKEEEAFQSLKLALTQPPALALPSLDKPFQLFVEETSGAAKGVLTQALGPWKRPVAYLSKRLDPVAAGWPRCLRAIAAAALLTREASKLTFGQDIEITSSHNLESLLRSPPDKWLTNARITQYQVLLLDPPRVRFKQTAALNPATLLPETDDTLPIHHCLDTLDSLTSTRPDLTDQPLAQAEATLFTDGSSYIRDGKRYAGAAVVTLDSVIWAEPLPIGTSAQKAELIALTKALEWSKDKSVNIYTDSRYAFATLHVHGMIYRERGLLTAGGKAIKNAPEILALLTAVWLPKRVAVMHCKGHQKDDAPTSTGNRRADEVAREVAIRPLSTQATISAGKRTADGSEFEKRTADGSEFESPKKKAKVE

SEQ ID NO: 7721 - protein, 2120 aa, synthetic construct
MPAAKRVKLDGGDKKYSIGLDIGTNSVGWAVITDEYKVPSKKFKVLGNTDRHSIKKNLIGALLFDSGETAEATRLKRTARRRYTRRKNRICYLQEIFSNEMAKVDDSFFHRLEESFLVEEDKKHERHPIFGNIVDEVAYHEKYPTIYHLRKKLVDSTDKADLRLIYLALAHMIKFRGHFLIEGDLNPDNSDVDKLFIQLVQTYNQLFEENPINASGVDAKAILSARLSKSRRLENLIAQLPGEKKNGLFGNLIALSLGLTPNFKSNFDLAEDAKLQLSKDTYDDDLDNLLAQIGDQYADLFLAAKNLSDAILLSDILRVNTEITKAPLSASMIKRYDEHHQDLTLLKALVRQQLPEKYKEIFFDQSKNGYAGYIDGGASQEEFYKFIKPILEKMDGTEELLVKLNREDLLRKQRTFDNGSIPHQIHLGELHAILRRQEDFYPFLKDNREKIEKILTFRIPYYVGPLARGNSRFAWMTRKSEETITPWNFEEVVDKGASAQSFIERMTNFDKNLPNEKVLPKHSLLYEYFTVYNELTKVKYVTEGMRKPAFLSGEQKKAIVDLLFKTNRKVTVKQLKEDYFKKIECFDSVEISGVEDRFNASLGTYHDLLKIIKDKDFLDNEENEDILEDIVLTLTLFEDREMIEERLKTYAHLFDDKVMKQLKRRRYTGWGRLSRKLINGIRDKQSGKTILDFLKSDGFANRNFMQLIHDDSLTFKEDIQKAQVSGQGDSLHEHIANLAGSPAIKKGILQTVKVVDELVKVMGRHKPENIVIEMARENQTTQKGQKNSRERMKRIEEGIKELGSQILKEHPVENTQLQNEKLYLYYLQNGRDMYVDQELDINRLSDYDVDHIVPQSFLKDDSIDNKVLTRSDKARGKSDNVPSEEVVKKMKNYWRQLLNAKLITQRKFDNLTKAERGGLSELDKAGFIKRQLVETRQITKHVAQILDSRMNTKYDENDKLIREVKVITLKSKLVSDFRKDFQFYKVREINNYHHAHDAYLNAVVGTALIKKYPKLESEFVYGDYKVYDVRKMIAKSEQEIGKATAKYFFYSNIMNFFKTEITLANGEIRKRPLIETNGETGEIVWDKGRDFATVRKVLSMPQVNIVKKTEVQTGGFSKESILPKRNSDKLIARKKDWDPKKYGGFDSPTVAYSVLVVAKVEKGKSKKLKSVKELLGITIMERSSFEKNPIDFLEAKGYKEVKKDLIIKLPKYSLFELENGRKRMLASAGELQKGNELALPSKYVNFLYLASHYEKLKGSPEDNEQKQLFVEQHKHYLDEIIEQISEFSKRVILADANLDKVLSAYNKHRDKPIREQAENIIHLFTLTNLGAPAAFKYFDTTIDRKRYTSTKEVLDATLIHQSITGLYETRIDLSQLGGDGGSGGSSGGSSGSETPGTSESATPESSGGSSGGSSGGTAPLEEEYRLFLEAPIQNVTLLEQWKREIPKVWAEINPPGLASTQAPIHVQLLSTALPVRVRQYPITLEAKRSLRETIRKFRAAGILRPVHSPWNTPLLPVRKSGTSEYRMVQDLREVNKRVETIHPTVPNPYTLLSLLPPDRIWYSVLDLKDAFFCIPLAPESQLIFAFEWADAEEGESGQLTWTRLPQGFKNSPTLFNEALNRDLQGFRLDHPSVSLLQYVDDLLIAADTQAACLSATRDLLMTLAELGYRVSGKKAQLCQEEVTYLGFKIHKGSRSLSNSRTQAILQIPVPKTKRQVREFLGTIGYCRLWIPGFAELAQPLYAATRPGNDPLVWGEKEEEAFQSLKLALTQPPALALPSLDKPFQLFVEETSGAAKGVLTQALGPWKRPVAYLSKRLDPVAAGWPRCLRAIAAAALLTREASKLTFGQDIEITSSHNLESLLRSPPDKWLTNARITQYQVLLLDPPRVRFKQTAALNPATLLPETDDTLPIHHCLDTLDSLTSTRPDLTDQPLAQAEATLFTDGSSYIRDGKRYAGAAVVTLDSVIWAEPLPIGTSAQKAELIALTKALEWSKDKSVNIYTDSRYAFATLHVHGMIYRERGWLTAGGKAIKNAPEILALLTAVWLPKRVAVMHCKGHQKDDAPTSTGNRRADEVAREVAIRPLSTQATISAGKRTADGSEFEKRTADGSEFESPKKKAKVE

SEQ ID NO: 7722 - protein, 2124 aa, synthetic construct
MPAAKRVKLDGGDKKYSIGLDIGTNSVGWAVITDEYKVPSKKFKVLGNTDRHSIKKNLIGALLFDSGETAEATRLKRTARRRYTRRKNRICYLQEIFSNEMAKVDDSFFHRLEESFLVEEDKKHERHPIFGNIVDEVAYHEKYPTIYHLRKKLVDSTDKADLRLIYLALAHMIKFRGHFLIEGDLNPDNSDVDKLFIQLVQTYNQLFEENPINASGVDAKAILSARLSKSRRLENLIAQLPGEKKNGLFGNLIALSLGLTPNFKSNFDLAEDAKLQLSKDTYDDDLDNLLAQIGDQYADLFLAAKNLSDAILLSDILRVNTEITKAPLSASMIKRYDEHHQDLTLLKALVRQQLPEKYKEIFFDQSKNGYAGYIDGGASQEEFYKFIKPILEKMDGTEELLVKLNREDLLRKQRTFDNGSIPHQIHLGELHAILRRQEDFYPFLKDNREKIEKILTFRIPYYVGPLARGNSRFAWMTRKSEETITPWNFEEVVDKGASAQSFIERMTNFDKNLPNEKVLPKHSLLYEYFTVYNELTKVKYVTEGMRKPAFLSGEQKKAIVDLLFKTNRKVTVKQLKEDYFKKIECFDSVEISGVEDRFNASLGTYHDLLKIIKDKDFLDNEENEDILEDIVLTLTLFEDREMIEERLKTYAHLFDDKVMKQLKRRRYTGWGRLSRKLINGIRDKQSGKTILDFLKSDGFANRNFMQLIHDDSLTFKEDIQKAQVSGQGDSLHEHIANLAGSPAIKKGILQTVKVVDELVKVMGRHKPENIVIEMARENQTTQKGQKNSRERMKRIEEGIKELGSQILKEHPVENTQLQNEKLYLYYLQNGRDMYVDQELDINRLSDYDVDHIVPQSFLKDDSIDNKVLTRSDKARGKSDNVPSEEVVKKMKNYWRQLLNAKLITQRKFDNLTKAERGGLSELDKAGFIKRQLVETRQITKHVAQILDSRMNTKYDENDKLIREVKVITLKSKLVSDFRKDFQFYKVREINNYHHAHDAYLNAVVGTALIKKYPKLESEFVYGDYKVYDVRKMIAKSEQEIGKATAKYFFYSNIMNFFKTEITLANGEIRKRPLIETNGETGEIVWDKGRDFATVRKVLSMPQVNIVKKTEVQTGGFSKESILPKRNSDKLIARKKDWDPKKYGGFDSPTVAYSVLVVAKVEKGKSKKLKSVKELLGITIMERSSFEKNPIDFLEAKGYKEVKKDLIIKLPKYSLFELENGRKRMLASAGELQKGNELALPSKYVNFLYLASHYEKLKGSPEDNEQKQLFVEQHKHYLDEIIEQISEFSKRVILADANLDKVLSAYNKHRDKPIREQAENIIHLFTLTNLGAPAAFKYFDTTIDRKRYTSTKEVLDATLIHQSITGLYETRIDLSQLGGDGGSGGSSGGSSGSETPGTSESATPESSGGSSGGSSGGTVSLQDEHRLFDIPVTTSLPDVWLQDFPQAWAETGGLGRAKCQAPIIIDLKPTAVPVSIKQYPMSLEAHMGIRQHIIKFLELGVLRPCRSPWNTPLLPVKKPGTQDYRPVQDLREINKRTVDIHPTVPNPYNLLSTLKPDYSWYTVLDLKDAFFCLPLAPQSQELFAFEWKDPERGISGQLTWTRLPQGFKNSPTLFDEALHRDLTDFRTQHPEVTLLQYVDDLLLAAPTKKACTQGTRHLLQELGEKGYRASAKKAQICQTKVTYLGYILSEGKRWLTPGRIETVARIPPPRNPREVREFLGTAGFCRLWIPGFAELAAPLYALTKESTPFTWQTEHQLAFEALKKALLSAPALGLPDTSKPFTLFLDERQGIAKGVLTQKLGPWKRPVAYLSKKLDPVAAGWPPCLRIMAATAMLVKDSAKLTLGQPLTVITPHTLEAIVRQPPDRWITNARLTHYQALLLDTDRVQFGPPVTLNPATLLPVPENQPSPHDCRQVLAETHGTREDLKDQELPDADHTWYTDGSSYLDSGTRRAGAAVVDGHNTIWAQSLPPGTSAQKAELIALTKALELSKGKKANIYTDSRYAFATAHTHGSIYERRGLLTSEGKEIKNKAEIIALLKALFLPQEVAIIHCPGHQKGQDPVAVGNRQADRVARQAAMAEVLTLATEPDNTSHITAGKRTADGSEFEKRTADGSEFESPKKKAKVE

SEQ ID NO: 7723 - protein, 2124 aa, synthetic construct
MPAAKRVKLDGGDKKYSIGLDIGTNSVGWAVITDEYKVPSKKFKVLGNTDRHSIKKNLIGALLFDSGETAEATRLKRTARRRYTRRKNRICYLQEIFSNEMAKVDDSFFHRLEESFLVEEDKKHERHPIFGNIVDEVAYHEKYPTIYHLRKKLVDSTDKADLRLIYLALAHMIKFRGHFLIEGDLNPDNSDVDKLFIQLVQTYNQLFEENPINASGVDAKAILSARLSKSRRLENLIAQLPGEKKNGLFGNLIALSLGLTPNFKSNFDLAEDAKLQLSKDTYDDDLDNLLAQIGDQYADLFLAAKNLSDAILLSDILRVNTEITKAPLSASMIKRYDEHHQDLTLLKALVRQQLPEKYKEIFFDQSKNGYAGYIDGGASQEEFYKFIKPILEKMDGTEELLVKLNREDLLRKQRTFDNGSIPHQIHLGELHAILRRQEDFYPFLKDNREKIEKILTFRIPYYVGPLARGNSRFAWMTRKSEETITPWNFEEVVDKGASAQSFIERMTNFDKNLPNEKVLPKHSLLYEYFTVYNELTKVKYVTEGMRKPAFLSGEQKKAIVDLLFKTNRKVTVKQLKEDYFKKIECFDSVEISGVEDRFNASLGTYHDLLKIIKDKDFLDNEENEDILEDIVLTLTLFEDREMIEERLKTYAHLFDDKVMKQLKRRRYTGWGRLSRKLINGIRDKQSGKTILDFLKSDGFANRNFMQLIHDDSLTFKEDIQKAQVSGQGDSLHEHIANLAGSPAIKKGILQTVKVVDELVKVMGRHKPENIVIEMARENQTTQKGQKNSRERMKRIEEGIKELGSQILKEHPVENTQLQNEKLYLYYLQNGRDMYVDQELDINRLSDYDVDHIVPQSFLKDDSIDNKVLTRSDKARGKSDNVPSEEVVKKMKNYWRQLLNAKLITQRKFDNLTKAERGGLSELDKAGFIKRQLVETRQITKHVAQILDSRMNTKYDENDKLIREVKVITLKSKLVSDFRKDFQFYKVREINNYHHAHDAYLNAVVGTALIKKYPKLESEFVYGDYKVYDVRKMIAKSEQEIGKATAKYFFYSNIMNFFKTEITLANGEIRKRPLIETNGETGEIVWDKGRDFATVRKVLSMPQVNIVKKTEVQTGGFSKESILPKRNSDKLIARKKDWDPKKYGGFDSPTVAYSVLVVAKVEKGKSKKLKSVKELLGITIMERSSFEKNPIDFLEAKGYKEVKKDLIIKLPKYSLFELENGRKRMLASAGELQKGNELALPSKYVNFLYLASHYEKLKGSPEDNEQKQLFVEQHKHYLDEIIEQISEFSKRVILADANLDKVLSAYNKHRDKPIREQAENIIHLFTLTNLGAPAAFKYFDTTIDRKRYTSTKEVLDATLIHQSITGLYETRIDLSQLGGDGGSGGSSGGSSGSETPGTSESATPESSGGSSGGSSGGTVSLQDEHRLFDIPVTTSLPDVWLQDFPQAWAETGGLGRAKCQAPIIIDLKPTAVPVSIKQYPMSLEAHMGIRQHIIKFLELGVLRPCRSPWNTPLLPVKKPGTQDYRPVQDLREINKRTVDIHPTVPNPYNLLSTLKPDYSWYTVLDLKDAFFCLPLAPQSQELFAFEWKDPERGISGQLTWTRLPQGFKNSPTLFNEALHRDLTDFRTQHPEVTLLQYVDDLLLAAPTKKACTQGTRHLLQELGEKGYRASAKKAQICQTKVTYLGYILSEGKRWLTPGRIETVARIPPPRNPREVREFLGTAGFCRLWIPGFAELAAPLYALTKPSTPFTWQTEHQLAFEALKKALLSAPALGLPDTSKPFTLFLDERQGIAKGVLTQKLGPWKRPVAYLSKKLDPVAAGWPPCLRIMAATAMLVKDSAKLTLGQPLTVITPHTLEAIVRQPPDRWITNARLTHYQALLLDTDRVQFGPPVTLNPATLLPVPENQPSPHDCRQVLAETHGTREDLKDQELPDADHTWYTDGSSYLDSGTRRAGAAVVDGHNTIWAQSLPPGTSAQKAELIALTKALELSKGKKANIYTDSRYAFATAHTHGSIYERRGWLTSEGKEIKNKAEIIALLKALFLPQEVAIIHCPGHQKGQDPVAVGNRQADRVARQAAMAEVLTLATEPDNTSHITAGKRTADGSEFEKRTADGSEFESPKKKAKVE

SEQ ID NO: 7724 - protein, 2109 aa, synthetic construct
MPAAKRVKLDGGDKKYSIGLDIGTNSVGWAVITDEYKVPSKKFKVLGNTDRHSIKKNLIGALLFDSGETAEATRLKRTARRRYTRRKNRICYLQEIFSNEMAKVDDSFFHRLEESFLVEEDKKHERHPIFGNIVDEVAYHEKYPTIYHLRKKLVDSTDKADLRLIYLALAHMIKFRGHFLIEGDLNPDNSDVDKLFIQLVQTYNQLFEENPINASGVDAKAILSARLSKSRRLENLIAQLPGEKKNGLFGNLIALSLGLTPNFKSNFDLAEDAKLQLSKDTYDDDLDNLLAQIGDQYADLFLAAKNLSDAILLSDILRVNTEITKAPLSASMIKRYDEHHQDLTLLKALVRQQLPEKYKEIFFDQSKNGYAGYIDGGASQEEFYKFIKPILEKMDGTEELLVKLNREDLLRKQRTFDNGSIPHQIHLGELHAILRRQEDFYPFLKDNREKIEKILTFRIPYYVGPLARGNSRFAWMTRKSEETITPWNFEEVVDKGASAQSFIERMTNFDKNLPNEKVLPKHSLLYEYFTVYNELTKVKYVTEGMRKPAFLSGEQKKAIVDLLFKTNRKVTVKQLKEDYFKKIECFDSVEISGVEDRFNASLGTYHDLLKIIKDKDFLDNEENEDILEDIVLTLTLFEDREMIEERLKTYAHLFDDKVMKQLKRRRYTGWGRLSRKLINGIRDKQSGKTILDFLKSDGFANRNFMQLIHDDSLTFKEDIQKAQVSGQGDSLHEHIANLAGSPAIKKGILQTVKVVDELVKVMGRHKPENIVIEMARENQTTQKGQKNSRERMKRIEEGIKELGSQILKEHPVENTQLQNEKLYLYYLQNGRDMYVDQELDINRLSDYDVDHIVPQSFLKDDSIDNKVLTRSDKARGKSDNVPSEEVVKKMKNYWRQLLNAKLITQRKFDNLTKAERGGLSELDKAGFIKRQLVETRQITKHVAQILDSRMNTKYDENDKLIREVKVITLKSKLVSDFRKDFQFYKVREINNYHHAHDAYLNAVVGTALIKKYPKLESEFVYGDYKVYDVRKMIAKSEQEIGKATAKYFFYSNIMNFFKTEITLANGEIRKRPLIETNGETGEIVWDKGRDFATVRKVLSMPQVNIVKKTEVQTGGFSKESILPKRNSDKLIARKKDWDPKKYGGFDSPTVAYSVLVVAKVEKGKSKKLKSVKELLGITIMERSSFEKNPIDFLEAKGYKEVKKDLIIKLPKYSLFELENGRKRMLASAGELQKGNELALPSKYVNFLYLASHYEKLKGSPEDNEQKQLFVEQHKHYLDEIIEQISEFSKRVILADANLDKVLSAYNKHRDKPIREQAENIIHLFTLTNLGAPAAFKYFDTTIDRKRYTSTKEVLDATLIHQSITGLYETRIDLSQLGGDGGSGGSSGGSSGSETPGTSESATPESSGGSSGGSSGGVPWILKKPLELTIKLDLEEQQGTLLNNSILSKKGKEELKQLFEKYSALWQSWENQVGHRRIRPHKIATGTVKPTPQKQYHINPKAKPDIQIVINDLLKQGVLIQKESTMNTPVYPVPKPNGRWRMVLDYRAVNKVTPLIAVQNQHSYGILGSLFKGRYKTTIDLSNGFWAHPIVPEDYWITAFTWQGKQYCWTVLPQGFLNSPGLFTGDVVDLLQGIPNVEVYVDDVYISHDSEKEHLEYLDILFNRLKEAGYIISLKKSNIANSIVDFLGFQITNEGRGLTDTFKEKLENITAPTTLKQLQSILGLLNFARNFIPDFTELIAPLYALIPKSTKNYVPWQIEHSTTLETLITKLNGAEYLQGRKGDKTLIMKVNASYTTGYIRYYNEGEKKPISYVSIVFSKTELKFTELEKLLTTVHKGLLKALDLSMGQNIHVYSPIVSMQNIQKTPQTAKKALASRWLSWLSYLEDPRIRFFYDPQMPALKDLPAVDTGKDNKKHPSNFQHIFYTDGSAITSPTKEGHLNAGMGIVYFINKDGNLQKQQEWSISLGNHTAQFAEIAAFEFALKKCLPLGGNILVVTDSNYVAKAYNEELDVWASNGFVNNRKKPLKHISKWKSVADLKRLRPDVVVTHEPGHQKLDSSPHAYGNNLADQLATQASFKVHAGKRTADGSEFEKRTADGSEFESPKKKAKVE

SEQ ID NO: 7725 - protein, 2109 aa, synthetic construct
MPAAKRVKLDGGDKKYSIGLDIGTNSVGWAVITDEYKVPSKKFKVLGNTDRHSIKKNLIGALLFDSGETAEATRLKRTARRRYTRRKNRICYLQEIFSNEMAKVDDSFFHRLEESFLVEEDKKHERHPIFGNIVDEVAYHEKYPTIYHLRKKLVDSTDKADLRLIYLALAHMIKFRGHFLIEGDLNPDNSDVDKLFIQLVQTYNQLFEENPINASGVDAKAILSARLSKSRRLENLIAQLPGEKKNGLFGNLIALSLGLTPNFKSNFDLAEDAKLQLSKDTYDDDLDNLLAQIGDQYADLFLAAKNLSDAILLSDILRVNTEITKAPLSASMIKRYDEHHQDLTLLKALVRQQLPEKYKEIFFDQSKNGYAGYIDGGASQEEFYKFIKPILEKMDGTEELLVKLNREDLLRKQRTFDNGSIPHQIHLGELHAILRRQEDFYPFLKDNREKIEKILTFRIPYYVGPLARGNSRFAWMTRKSEETITPWNFEEVVDKGASAQSFIERMTNFDKNLPNEKVLPKHSLLYEYFTVYNELTKVKYVTEGMRKPAFLSGEQKKAIVDLLFKTNRKVTVKQLKEDYFKKIECFDSVEISGVEDRFNASLGTYHDLLKIIKDKDFLDNEENEDILEDIVLTLTLFEDREMIEERLKTYAHLFDDKVMKQLKRRRYTGWGRLSRKLINGIRDKQSGKTILDFLKSDGFANRNFMQLIHDDSLTFKEDIQKAQVSGQGDSLHEHIANLAGSPAIKKGILQTVKVVDELVKVMGRHKPENIVIEMARENQTTQKGQKNSRERMKRIEEGIKELGSQILKEHPVENTQLQNEKLYLYYLQNGRDMYVDQELDINRLSDYDVDHIVPQSFLKDDSIDNKVLTRSDKARGKSDNVPSEEVVKKMKNYWRQLLNAKLITQRKFDNLTKAERGGLSELDKAGFIKRQLVETRQITKHVAQILDSRMNTKYDENDKLIREVKVITLKSKLVSDFRKDFQFYKVREINNYHHAHDAYLNAVVGTALIKKYPKLESEFVYGDYKVYDVRKMIAKSEQEIGKATAKYFFYSNIMNFFKTEITLANGEIRKRPLIETNGETGEIVWDKGRDFATVRKVLSMPQVNIVKKTEVQTGGFSKESILPKRNSDKLIARKKDWDPKKYGGFDSPTVAYSVLVVAKVEKGKSKKLKSVKELLGITIMERSSFEKNPIDFLEAKGYKEVKKDLIIKLPKYSLFELENGRKRMLASAGELQKGNELALPSKYVNFLYLASHYEKLKGSPEDNEQKQLFVEQHKHYLDEIIEQISEFSKRVILADANLDKVLSAYNKHRDKPIREQAENIIHLFTLTNLGAPAAFKYFDTTIDRKRYTSTKEVLDATLIHQSITGLYETRIDLSQLGGDGGSGGSSGGSSGSETPGTSESATPESSGGSSGGSSGGVPWLTQQPLQLTILVPLQEYQEKILSKTALPEDQKQQLKTLFVKYDNLWQHWENQVGHRKIRPHNIATGDYPPRPQKQYPINPKAKPSIQIVIDDLLKQGVLTPQNSTMNTPVYPVPKPDGRWRMVLDYREVNKTIPLTAAQNQHSAGILATIVRQKYKTTLDLANGFWAHPITPESYWLTAFTWQGKQYCWTRLPQGFLNSPALFNADVVDLLKEIPNVQVYVDDIYLSHDDPKEHVQQLEKVFQILLQAGYVVSLKKSEIGQKTVEFLGFNITKEGRGLTDTFKTKLLNITPPKDLKQLQSILGLLNFARNFIPNFAELVQPLYNLIAPAKGKYIEWSEENTKQLNMVIEALNTASNLEERLPEQRLVIKVNTSPSAGYVRYYNETGKKPIMYLNYVFSKAELKFSMLEKLLTTMHKALIKAMDLAMGQEILVYSPIVSMTKIQKTPLPERKALPIRWITWMTYLEDPRIQFHYDKTLPELKHIPDVYTSSQSPVKHPSQYEGVFYTDGSAIKSPDPTKSNNAGMGIVHATYKPEYQVLNQWSIPLGNHTAQMAEIAAVEFACKKALKIPGPVLVITDSFYVAESANKELPYWKSNGFVNNKKKPLKHISKWKSIAECLSMKPDITIQHEKGISLQIPVFILKGNALADKLATQGSYVVNAGKRTADGSEFEKRTADGSEFESPKKKAKVE

SEQ ID NO: 7726 - protein, 2198 aa, synthetic construct
MPAAKRVKLDGGDKKYSIGLDIGTNSVGWAVITDEYKVPSKKFKVLGNTDRHSIKKNLIGALLFDSGETAEATRLKRTARRRYTRRKNRICYLQEIFSNEMAKVDDSFFHRLEESFLVEEDKKHERHPIFGNIVDEVAYHEKYPTIYHLRKKLVDSTDKADLRLIYLALAHMIKFRGHFLIEGDLNPDNSDVDKLFIQLVQTYNQLFEENPINASGVDAKAILSARLSKSRRLENLIAQLPGEKKNGLFGNLIALSLGLTPNFKSNFDLAEDAKLQLSKDTYDDDLDNLLAQIGDQYADLFLAAKNLSDAILLSDILRVNTEITKAPLSASMIKRYDEHHQDLTLLKALVRQQLPEKYKEIFFDQSKNGYAGYIDGGASQEEFYKFIKPILEKMDGTEELLVKLNREDLLRKQRTFDNGSIPHQIHLGELHAILRRQEDFYPFLKDNREKIEKILTFRIPYYVGPLARGNSRFAWMTRKSEETITPWNFEEVVDKGASAQSFIERMTNFDKNLPNEKVLPKHSLLYEYFTVYNELTKVKYVTEGMRKPAFLSGEQKKAIVDLLFKTNRKVTVKQLKEDYFKKIECFDSVEISGVEDRFNASLGTYHDLLKIIKDKDFLDNEENEDILEDIVLTLTLFEDREMIEERLKTYAHLFDDKVMKQLKRRRYTGWGRLSRKLINGIRDKQSGKTILDFLKSDGFANRNFMQLIHDDSLTFKEDIQKAQVSGQGDSLHEHIANLAGSPAIKKGILQTVKVVDELVKVMGRHKPENIVIEMARENQTTQKGQKNSRERMKRIEEGIKELGSQILKEHPVENTQLQNEKLYLYYLQNGRDMYVDQELDINRLSDYDVDHIVPQSFLKDDSIDNKVLTRSDKARGKSDNVPSEEVVKKMKNYWRQLLNAKLITQRKFDNLTKAERGGLSELDKAGFIKRQLVETRQITKHVAQILDSRMNTKYDENDKLIREVKVITLKSKLVSDFRKDFQFYKVREINNYHHAHDAYLNAVVGTALIKKYPKLESEFVYGDYKVYDVRKMIAKSEQEIGKATAKYFFYSNIMNFFKTEITLANGEIRKRPLIETNGETGEIVWDKGRDFATVRKVLSMPQVNIVKKTEVQTGGFSKESILPKRNSDKLIARKKDWDPKKYGGFDSPTVAYSVLVVAKVEKGKSKKLKSVKELLGITIMERSSFEKNPIDFLEAKGYKEVKKDLIIKLPKYSLFELENGRKRMLASAGELQKGNELALPSKYVNFLYLASHYEKLKGSPEDNEQKQLFVEQHKHYLDEIIEQISEFSKRVILADANLDKVLSAYNKHRDKPIREQAENIIHLFTLTNLGAPAAFKYFDTTIDRKRYTSTKEVLDATLIHQSITGLYETRIDLSQLGGDGGSGGSSGGSSGSETPGTSESATPESSGGSSGGSSGGMNPLQLLQPLPAEIKGTKLLAHWNSGATITCIPESFLEDEQPIKKTLIKTIHGEKQQNVYYVTFKVKGRKVEAEVIASPYEYILLSPTDVPWLTQQPLQLTILVPLQEYQEKILSKTALPEDQKQQLKTLFVKYDNLWQHWENQVGHRKIRPHNIATGDYPPRPQKQYPINPKAKPSIQIVIDDLLKQGVLTPQNSTMNTPVYPVPKPDGRWRMVLDYREVNKTIPLTAAQNQHSAGILATIVRQKYKTTLDLANGFWAHPITPESYWLTAFTWQGKQYCWTRLPQGFLNSPALFNADVVDLLKEIPNVQVYVDDIYLSHDDPKEHVQQLEKVFQILLQAGYVVSLKKSEIGQKTVEFLGFNITKEGRGLTDTFKTKLLNITPPKDLKQLQSILGLLNFARNFIPNFAELVQPLYNLIAPAKGKYIEWSEENTKQLNMVIEALNTASNLEERLPEQRLVIKVNTSPSAGYVRYYNETGKKPIMYLNYVFSKAELKFSMLEKLLTTMHKALIKAMDLAMGQEILVYSPIVSMTKIQKTPLPERKALPIRWITWMTYLEDPRIQFHYDKTLPELKHIPDVYTSSQSPVKHPSQYEGVFYTDGSAIKSPDPTKSNNAGMGIVHATYKPEYQVLNQWSIPLGNHTAQMAEIAAVEFACKKALKIPGPVLVITDSFYVAESANKELPYWKSNGFVNNKKKPLKHISKWKSIAECLSMKPDITIQHEKGISLQIPVFILKGNALADKLATQGSYVVNAGKRTADGSEFEKRTADGSEFESPKKKAKVE

SEQ ID NO: 7727 - protein, 2149 aa, synthetic construct
MPAAKRVKLDGGDKKYSIGLDIGTNSVGWAVITDEYKVPSKKFKVLGNTDRHSIKKNLIGALLFDSGETAEATRLKRTARRRYTRRKNRICYLQEIFSNEMAKVDDSFFHRLEESFLVEEDKKHERHPIFGNIVDEVAYHEKYPTIYHLRKKLVDSTDKADLRLIYLALAHMIKFRGHFLIEGDLNPDNSDVDKLFIQLVQTYNQLFEENPINASGVDAKAILSARLSKSRRLENLIAQLPGEKKNGLFGNLIALSLGLTPNFKSNFDLAEDAKLQLSKDTYDDDLDNLLAQIGDQYADLFLAAKNLSDAILLSDILRVNTEITKAPLSASMIKRYDEHHQDLTLLKALVRQQLPEKYKEIFFDQSKNGYAGYIDGGASQEEFYKFIKPILEKMDGTEELLVKLNREDLLRKQRTFDNGSIPHQIHLGELHAILRRQEDFYPFLKDNREKIEKILTFRIPYYVGPLARGNSRFAWMTRKSEETITPWNFEEVVDKGASAQSFIERMTNFDKNLPNEKVLPKHSLLYEYFTVYNELTKVKYVTEGMRKPAFLSGEQKKAIVDLLFKTNRKVTVKQLKEDYFKKIECFDSVEISGVEDRFNASLGTYHDLLKIIKDKDFLDNEENEDILEDIVLTLTLFEDREMIEERLKTYAHLFDDKVMKQLKRRRYTGWGRLSRKLINGIRDKQSGKTILDFLKSDGFANRNFMQLIHDDSLTFKEDIQKAQVSGQGDSLHEHIANLAGSPAIKKGILQTVKVVDELVKVMGRHKPENIVIEMARENQTTQKGQKNSRERMKRIEEGIKELGSQILKEHPVENTQLQNEKLYLYYLQNGRDMYVDQELDINRLSDYDVDHIVPQSFLKDDSIDNKVLTRSDKARGKSDNVPSEEVVKKMKNYWRQLLNAKLITQRKFDNLTKAERGGLSELDKAGFIKRQLVETRQITKHVAQILDSRMNTKYDENDKLIREVKVITLKSKLVSDFRKDFQFYKVREINNYHHAHDAYLNAVVGTALIKKYPKLESEFVYGDYKVYDVRKMIAKSEQEIGKATAKYFFYSNIMNFFKTEITLANGEIRKRPLIETNGETGEIVWDKGRDFATVRKVLSMPQVNIVKKTEVQTGGFSKESILPKRNSDKLIARKKDWDPKKYGGFDSPTVAYSVLVVAKVEKGKSKKLKSVKELLGITIMERSSFEKNPIDFLEAKGYKEVKKDLIIKLPKYSLFELENGRKRMLASAGELQKGNELALPSKYVNFLYLASHYEKLKGSPEDNEQKQLFVEQHKHYLDEIIEQISEFSKRVILADANLDKVLSAYNKHRDKPIREQAENIIHLFTLTNLGAPAAFKYFDTTIDRKRYTSTKEVLDATLIHQSITGLYETRIDLSQLGGDGGSGGSSGGSSGSETPGTSESATPESSGGSSGGSSGGLLGRDLLTKLKAQIQFSTEGPQVTWEDRPAMCLVLNLEEEYRLHEKPVPPSIDPSWLQLFPMVWAEKAGMGLANQVPPVVVELKSDASPVAVRQYPMSKEAREGIRPHIQRFLDLGILVPCQSPWNTPLLPVKKPGTNDYRPVQDLREVNKRVQDIHPTVPNPYNLLSSLPPSHTWYSVLDLKDAFFCLKLHPNSQPLFAFEWRDPEKGNTGQLTWTRLPQGFKNSPTLFDEALHRDLASFRALNPQVVMLQYVDDLLVAAPTYRDCKEGTRRLLQELSKLGYRVSAKKAQLCREEVTYLGYLLKGGKRWLTPARKATVMKIPTPTTPRQVREFLGTAGFCRLWIPGFASLAAPLYPLTREKVPFTWTEAHQEAFGRIKEALLSAPALALPDLTKPFALYVDEKEGVARGVLTQTLGPWRRPVAYLSKKLDPVASGWPTCLKAIAAVALLLKDADKLTLGQNVLVIAPHNLESIVRQPPDRWMTNARMTHYQSLLLNERVSFAPPAILNPATLLPVESDDTPIHICSEILAEETGTRPDLRDQPLPGVPAWYTDGSSFIMDGRRQAGAAIVDNKRTVWASNLPEGTSAQKAELIALTQALRLAEGKSINIYTDSRYAFATAHVHGAIYKQRGLLTSAGKDIKNKEEILALLEAIHLPKRVAIIHCPGHQRGTDPVATGNRKADEAAKQAAQSTRILTETTKNAGKRTADGSEFEKRTADGSEFESPKKKAKVE

SEQ ID NO: 7728 - protein, 2149 aa, synthetic construct
MPAAKRVKLDGGDKKYSIGLDIGTNSVGWAVITDEYKVPSKKFKVLGNTDRHSIKKNLIGALLFDSGETAEATRLKRTARRRYTRRKNRICYLQEIFSNEMAKVDDSFFHRLEESFLVEEDKKHERHPIFGNIVDEVAYHEKYPTIYHLRKKLVDSTDKADLRLIYLALAHMIKFRGHFLIEGDLNPDNSDVDKLFIQLVQTYNQLFEENPINASGVDAKAILSARLSKSRRLENLIAQLPGEKKNGLFGNLIALSLGLTPNFKSNFDLAEDAKLQLSKDTYDDDLDNLLAQIGDQYADLFLAAKNLSDAILLSDILRVNTEITKAPLSASMIKRYDEHHQDLTLLKALVRQQLPEKYKEIFFDQSKNGYAGYIDGGASQEEFYKFIKPILEKMDGTEELLVKLNREDLLRKQRTFDNGSIPHQIHLGELHAILRRQEDFYPFLKDNREKIEKILTFRIPYYVGPLARGNSRFAWMTRKSEETITPWNFEEVVDKGASAQSFIERMTNFDKNLPNEKVLPKHSLLYEYFTVYNELTKVKYVTEGMRKPAFLSGEQKKAIVDLLFKTNRKVTVKQLKEDYFKKIECFDSVEISGVEDRFNASLGTYHDLLKIIKDKDFLDNEENEDILEDIVLTLTLFEDREMIEERLKTYAHLFDDKVMKQLKRRRYTGWGRLSRKLINGIRDKQSGKTILDFLKSDGFANRNFMQLIHDDSLTFKEDIQKAQVSGQGDSLHEHIANLAGSPAIKKGILQTVKVVDELVKVMGRHKPENIVIEMARENQTTQKGQKNSRERMKRIEEGIKELGSQILKEHPVENTQLQNEKLYLYYLQNGRDMYVDQELDINRLSDYDVDHIVPQSFLKDDSIDNKVLTRSDKARGKSDNVPSEEVVKKMKNYWRQLLNAKLITQRKFDNLTKAERGGLSELDKAGFIKRQLVETRQITKHVAQILDSRMNTKYDENDKLIREVKVITLKSKLVSDFRKDFQFYKVREINNYHHAHDAYLNAVVGTALIKKYPKLESEFVYGDYKVYDVRKMIAKSEQEIGKATAKYFFYSNIMNFFKTEITLANGEIRKRPLIETNGETGEIVWDKGRDFATVRKVLSMPQVNIVKKTEVQTGGFSKESILPKRNSDKLIARKKDWDPKKYGGFDSPTVAYSVLVVAKVEKGKSKKLKSVKELLGITIMERSSFEKNPIDFLEAKGYKEVKKDLIIKLPKYSLFELENGRKRMLASAGELQKGNELALPSKYVNFLYLASHYEKLKGSPEDNEQKQLFVEQHKHYLDEIIEQISEFSKRVILADANLDKVLSAYNKHRDKPIREQAENIIHLFTLTNLGAPAAFKYFDTTIDRKRYTSTKEVLDATLIHQSITGLYETRIDLSQLGGDGGSGGSSGGSSGSETPGTSESATPESSGGSSGGSSGGLLGRDLLTKLKAQIQFSTEGPQVTWEDRPAMCLVLNLEEEYRLHEKPVPPSIDPSWLQLFPMVWAEKAGMGLANQVPPVVVELKSDASPVAVRQYPMSKEAREGIRPHIQRFLDLGILVPCQSPWNTPLLPVKKPGTNDYRPVQDLREVNKRVQDIHPTVPNPYNLLSSLPPSHTWYSVLDLKDAFFCLKLHPNSQPLFAFEWRDPEKGNTGQLTWTRLPQGFKNSPTLFNEALHRDLASFRALNPQVVMLQYVDDLLVAAPTYRDCKEGTRRLLQELSKLGYRVSAKKAQLCREEVTYLGYLLKGGKRWLTPARKATVMKIPTPTTPRQVREFLGKAGFCRLFIPGFASLAAPLYPLTRPKVPFTWTEAHQEAFGRIKEALLSAPALALPDLTKPFALYVDEKEGVARGVLTQTLGPWRRPVAYLSKKLDPVASGWPTCLKAIAAVALLLKDADKLTLGQNVLVIAPHNLESIVRQPPDRWMTNARMTHYQSLLLNERVSFAPPAILNPATLLPVESDDTPIHICSEILAEETGTRPDLRDQPLPGVPAWYTDGSSFIMDGRRQAGAAIVDNKRTVWASNLPEGTSAQKAELIALTQALRLAEGKSINIYTDSRYAFATAHVHGAIYKQRGWLTSAGKDIKNKEEILALLEAIHLPKRVAIIHCPGHQRGTDPVATGNRKADEAAKQAAQSTRILTETTKNAGKRTADGSEFEKRTADGSEFESPKKKAKVE

SEQ ID NO: 7729 - protein, 2118 aa, synthetic construct
MPAAKRVKLDGGDKKYSIGLDIGTNSVGWAVITDEYKVPSKKFKVLGNTDRHSIKKNLIGALLFDSGETAEATRLKRTARRRYTRRKNRICYLQEIFSNEMAKVDDSFFHRLEESFLVEEDKKHERHPIFGNIVDEVAYHEKYPTIYHLRKKLVDSTDKADLRLIYLALAHMIKFRGHFLIEGDLNPDNSDVDKLFIQLVQTYNQLFEENPINASGVDAKAILSARLSKSRRLENLIAQLPGEKKNGLFGNLIALSLGLTPNFKSNFDLAEDAKLQLSKDTYDDDLDNLLAQIGDQYADLFLAAKNLSDAILLSDILRVNTEITKAPLSASMIKRYDEHHQDLTLLKALVRQQLPEKYKEIFFDQSKNGYAGYIDGGASQEEFYKFIKPILEKMDGTEELLVKLNREDLLRKQRTFDNGSIPHQIHLGELHAILRRQEDFYPFLKDNREKIEKILTFRIPYYVGPLARGNSRFAWMTRKSEETITPWNFEEVVDKGASAQSFIERMTNFDKNLPNEKVLPKHSLLYEYFTVYNELTKVKYVTEGMRKPAFLSGEQKKAIVDLLFKTNRKVTVKQLKEDYFKKIECFDSVEISGVEDRFNASLGTYHDLLKIIKDKDFLDNEENEDILEDIVLTLTLFEDREMIEERLKTYAHLFDDKVMKQLKRRRYTGWGRLSRKLINGIRDKQSGKTILDFLKSDGFANRNFMQLIHDDSLTFKEDIQKAQVSGQGDSLHEHIANLAGSPAIKKGILQTVKVVDELVKVMGRHKPENIVIEMARENQTTQKGQKNSRERMKRIEEGIKELGSQILKEHPVENTQLQNEKLYLYYLQNGRDMYVDQELDINRLSDYDVDHIVPQSFLKDDSIDNKVLTRSDKARGKSDNVPSEEVVKKMKNYWRQLLNAKLITQRKFDNLTKAERGGLSELDKAGFIKRQLVETRQITKHVAQILDSRMNTKYDENDKLIREVKVITLKSKLVSDFRKDFQFYKVREINNYHHAHDAYLNAVVGTALIKKYPKLESEFVYGDYKVYDVRKMIAKSEQEIGKATAKYFFYSNIMNFFKTEITLANGEIRKRPLIETNGETGEIVWDKGRDFATVRKVLSMPQVNIVKKTEVQTGGFSKESILPKRNSDKLIARKKDWDPKKYGGFDSPTVAYSVLVVAKVEKGKSKKLKSVKELLGITIMERSSFEKNPIDFLEAKGYKEVKKDLIIKLPKYSLFELENGRKRMLASAGELQKGNELALPSKYVNFLYLASHYEKLKGSPEDNEQKQLFVEQHKHYLDEIIEQISEFSKRVILADANLDKVLSAYNKHRDKPIREQAENIIHLFTLTNLGAPAAFKYFDTTIDRKRYTSTKEVLDATLIHQSITGLYETRIDLSQLGGDGGSGGSSGGSSGSETPGTSESATPESSGGSSGGSSGGTLNLEDEYRLYETSAEPEVSPGSTWLSDFPQAWAETGGMGLAVRQAPLIIPLKATSTPVSIKQYPMSQEAKLGIKPHIQRLLDQGILVPCQSPWNTPLLPVKKPGTNDYRPVQDLREVNKRVEDIHPTVPNPYNLLSGLPPSHRWYTVLDLKDAFFCLRLHPTSQPLFAFEWRDPGMGISGQLTWTRLPQGFKNSPTLFNEALHRDLADFRIQHPDLILLQYVDDILLAATSELDCQQGTRALLLTLGNLGYRASAKKAQLCQKQVKYLGYLLKEGQRWLTEARKETVMGQPTPKTPRQLREFLGKAGFCRLFIPGFAEMAAPLYPLTKPGTLFNWGPDQQKAYQEIKQALLTAPALGLPDLTKPFELFVDEKQGYAKGVLTQKLGPWRRPVAYLSKKLDPVAAGWPPCLRMVAAIAVLRKDAGKLTMGQPLVILAPHAVEALVKQPPDRWLSNARMTHYQAMLLDTDRVQFGPVVALNPATLLPLPEEGAPHDCLEILAETHGTRPDLTDQPIPDADHTWYTDGSSFLQEGQRKAGAAVTTETEVIWARALPAGTSAQRAELIALTQALKMAEGKRLNVYTDSRYAFATAHIHGEIYRRRGWLTSEGREIKNKSEILALLKALFLPKRLSIIHCLGHQKGDSAEARGNRLADQAAREAAIKTPPDTSTLLAGKRTADGSEFEKRTADGSEFESPKKKAKVE

SEQ ID NO: 7730 - protein, 2118 aa, synthetic construct
MPAAKRVKLDGGDKKYSIGLDIGTNSVGWAVITDEYKVPSKKFKVLGNTDRHSIKKNLIGALLFDSGETAEATRLKRTARRRYTRRKNRICYLQEIFSNEMAKVDDSFFHRLEESFLVEEDKKHERHPIFGNIVDEVAYHEKYPTIYHLRKKLVDSTDKADLRLIYLALAHMIKFRGHFLIEGDLNPDNSDVDKLFIQLVQTYNQLFEENPINASGVDAKAILSARLSKSRRLENLIAQLPGEKKNGLFGNLIALSLGLTPNFKSNFDLAEDAKLQLSKDTYDDDLDNLLAQIGDQYADLFLAAKNLSDAILLSDILRVNTEITKAPLSASMIKRYDEHHQDLTLLKALVRQQLPEKYKEIFFDQSKNGYAGYIDGGASQEEFYKFIKPILEKMDGTEELLVKLNREDLLRKQRTFDNGSIPHQIHLGELHAILRRQEDFYPFLKDNREKIEKILTFRIPYYVGPLARGNSRFAWMTRKSEETITPWNFEEVVDKGASAQSFIERMTNFDKNLPNEKVLPKHSLLYEYFTVYNELTKVKYVTEGMRKPAFLSGEQKKAIVDLLFKTNRKVTVKQLKEDYFKKIECFDSVEISGVEDRFNASLGTYHDLLKIIKDKDFLDNEENEDILEDIVLTLTLFEDREMIEERLKTYAHLFDDKVMKQLKRRRYTGWGRLSRKLINGIRDKQSGKTILDFLKSDGFANRNFMQLIHDDSLTFKEDIQKAQVSGQGDSLHEHIANLAGSPAIKKGILQTVKVVDELVKVMGRHKPENIVIEMARENQTTQKGQKNSRERMKRIEEGIKELGSQILKEHPVENTQLQNEKLYLYYLQNGRDMYVDQELDINRLSDYDVDHIVPQSFLKDDSIDNKVLTRSDKARGKSDNVPSEEVVKKMKNYWRQLLNAKLITQRKFDNLTKAERGGLSELDKAGFIKRQLVETRQITKHVAQILDSRMNTKYDENDKLIREVKVITLKSKLVSDFRKDFQFYKVREINNYHHAHDAYLNAVVGTALIKKYPKLESEFVYGDYKVYDVRKMIAKSEQEIGKATAKYFFYSNIMNFFKTEITLANGEIRKRPLIETNGETGEIVWDKGRDFATVRKVLSMPQVNIVKKTEVQTGGFSKESILPKRNSDKLIARKKDWDPKKYGGFDSPTVAYSVLVVAKVEKGKSKKLKSVKELLGITIMERSSFEKNPIDFLEAKGYKEVKKDLIIKLPKYSLFELENGRKRMLASAGELQKGNELALPSKYVNFLYLASHYEKLKGSPEDNEQKQLFVEQHKHYLDEIIEQISEFSKRVILADANLDKVLSAYNKHRDKPIREQAENIIHLFTLTNLGAPAAFKYFDTTIDRKRYTSTKEVLDATLIHQSITGLYETRIDLSQLGGDGGSGGSSGGSSGSETPGTSESATPESSGGSSGGSSGGTLNIEDEYRLHETSKEPDVSLGSTWLSDFPQAWAETGGMGLAVRQAPLIIPLKATSTPVSIKQYPMSQEARLGIKPHIQRLLDQGILVPCQSPWNTPLLPVKKPGTNDYRPVQDLREVNKRVEDIHPTVPNPYNLLSGLPPSHQWYTVLDLKDAFFCLRLHPTSQPLFAFEWRDPEMGISGQLTWTRLPQGFKNSPTLFNEALHRDLAGFRIQHPDLILLQYVDDLLLAATSELDCQQGTRALLQTLGDLGYRASAKKAQICQKQVKYLGYLLKEGQRWLTEARKETVMGQPIPKTPRQLREFLGTAGFCRLWIPGFAEMAAPLYPLTKPGTLFNWGPDQQKAFQEIKQALLTAPALGLPDLTKPFELFVDEKQGYAKGVLTQKLGPWRRPVAYLSKKLDPVAAGWPPCLRMVAAIAVLTKDAGKLTMGQPLVILAPHAVEALVKQPPDRWLSNARMTHYQALLLDTDRVQFGPVVALNPATLLPLPEEGLQHDCLDILAEAHGTRSDLMDQPLPDADHTWYTDGSSFLQEGQRKAGAAVTTETEVIWARALPAGTSAQRAELIALTQALKMAEGKKLNVYTDSRYAFATAHIHGEIYRRRGWLTSEGKEIKNKDEILALLKALFLPKRLSIIHCPGHQKGNSAEARGNRMADQAAREVATRETPETSTLLAGKRTADGSEFEKRTADGSEFESPKKKAKVE

SEQ ID NO: 7731 - protein, 2118 aa, synthetic construct
MPAAKRVKLDGGDKKYSIGLDIGTNSVGWAVITDEYKVPSKKFKVLGNTDRHSIKKNLIGALLFDSGETAEATRLKRTARRRYTRRKNRICYLQEIFSNEMAKVDDSFFHRLEESFLVEEDKKHERHPIFGNIVDEVAYHEKYPTIYHLRKKLVDSTDKADLRLIYLALAHMIKFRGHFLIEGDLNPDNSDVDKLFIQLVQTYNQLFEENPINASGVDAKAILSARLSKSRRLENLIAQLPGEKKNGLFGNLIALSLGLTPNFKSNFDLAEDAKLQLSKDTYDDDLDNLLAQIGDQYADLFLAAKNLSDAILLSDILRVNTEITKAPLSASMIKRYDEHHQDLTLLKALVRQQLPEKYKEIFFDQSKNGYAGYIDGGASQEEFYKFIKPILEKMDGTEELLVKLNREDLLRKQRTFDNGSIPHQIHLGELHAILRRQEDFYPFLKDNREKIEKILTFRIPYYVGPLARGNSRFAWMTRKSEETITPWNFEEVVDKGASAQSFIERMTNFDKNLPNEKVLPKHSLLYEYFTVYNELTKVKYVTEGMRKPAFLSGEQKKAIVDLLFKTNRKVTVKQLKEDYFKKIECFDSVEISGVEDRFNASLGTYHDLLKIIKDKDFLDNEENEDILEDIVLTLTLFEDREMIEERLKTYAHLFDDKVMKQLKRRRYTGWGRLSRKLINGIRDKQSGKTILDFLKSDGFANRNFMQLIHDDSLTFKEDIQKAQVSGQGDSLHEHIANLAGSPAIKKGILQTVKVVDELVKVMGRHKPENIVIEMARENQTTQKGQKNSRERMKRIEEGIKELGSQILKEHPVENTQLQNEKLYLYYLQNGRDMYVDQELDINRLSDYDVDHIVPQSFLKDDSIDNKVLTRSDKARGKSDNVPSEEVVKKMKNYWRQLLNAKLITQRKFDNLTKAERGGLSELDKAGFIKRQLVETRQITKHVAQILDSRMNTKYDENDKLIREVKVITLKSKLVSDFRKDFQFYKVREINNYHHAHDAYLNAVVGTALIKKYPKLESEFVYGDYKVYDVRKMIAKSEQEIGKATAKYFFYSNIMNFFKTEITLANGEIRKRPLIETNGETGEIVWDKGRDFATVRKVLSMPQVNIVKKTEVQTGGFSKESILPKRNSDKLIARKKDWDPKKYGGFDSPTVAYSVLVVAKVEKGKSKKLKSVKELLGITIMERSSFEKNPIDFLEAKGYKEVKKDLIIKLPKYSLFELENGRKRMLASAGELQKGNELALPSKYVNFLYLASHYEKLKGSPEDNEQKQLFVEQHKHYLDEIIEQISEFSKRVILADANLDKVLSAYNKHRDKPIREQAENIIHLFTLTNLGAPAAFKYFDTTIDRKRYTSTKEVLDATLIHQSITGLYETRIDLSQLGGDGGSGGSSGGSSGSETPGTSESATPESSGGSSGGSSGGTLNIEDEHRLHETSKEPDVSLGSTWLSDFPQAWAETGGMGLAVRQAPLIIPLKATSTPVSIKQYPMSQEARLGIKPHIQRLLDQGILVPCQSPWNTPLLPVKKPGTNDYRPVQDLREVNKRVEDIHPTVPNPYNLLSGLPPSHQWYTVLDLKDAFFCLRLHPTSQPLFAFEWRDPEMGISGQLTWTRLPQGFKNSPTLFDEALHRDLADFRIQHPDLILLQYVDDLLLAATSELDCQQGTRALLQTLGNLGYRASAKKAQICQKQVKYLGYLLKEGQRWLTEARKETVMGQPTPKTPRQLREFLGTAGFCRLWIPGFAEMAAPLYPLTKTGTLFNWGPDQQKAYQEIKQALLTAPALGLPDLTKPFELFVDEKQGYAKGVLTQKLGPWRRPVAYLSKKLDPVAAGWPPCLRMVAAIAVLTKDAGKLTMGQPLVILAPHAVEALVKQPPDRWLSNARMTHYQALLLDTDRVQFGPVVALNPATLLPLPEEGLQHNCLDILAEAHGTRPDLTDQPLPDADHTWYTDGSSLLQEGQRKAGAAVTTETEVIWAKALPAGTSAQRAELIALTQALKMAEGKKLNVYTDSRYAFATAHIHGEIYRRRGLLTSEGKEIKNKDEILALLKALFLPKRLSIIHCPGHQKGHSAEARGNRMADQAARKAAITETPDTSTLLAGKRTADGSEFEKRTADGSEFESPKKKAKVE

SEQ ID NO: 7732 - protein, 2118 aa, synthetic construct; identical to SEQ ID NO: 7731

SEQ ID NO: 7733 - protein, 2138 aa, synthetic construct
MPAAKRVKLDGGDKKYSIGLDIGTNSVGWAVITDEYKVPSKKFKVLGNTDRHSIKKNLIGALLFDSGETAEATRLKRTARRRYTRRKNRICYLQEIFSNEMAKVDDSFFHRLEESFLVEEDKKHERHPIFGNIVDEVAYHEKYPTIYHLRKKLVDSTDKADLRLIYLALAHMIKFRGHFLIEGDLNPDNSDVDKLFIQLVQTYNQLFEENPINASGVDAKAILSARLSKSRRLENLIAQLPGEKKNGLFGNLIALSLGLTPNFKSNFDLAEDAKLQLSKDTYDDDLDNLLAQIGDQYADLFLAAKNLSDAILLSDILRVNTEITKAPLSASMIKRYDEHHQDLTLLKALVRQQLPEKYKEIFFDQSKNGYAGYIDGGASQEEFYKFIKPILEKMDGTEELLVKLNREDLLRKQRTFDNGSIPHQIHLGELHAILRRQEDFYPFLKDNREKIEKILTFRIPYYVGPLARGNSRFAWMTRKSEETITPWNFEEVVDKGASAQSFIERMTNFDKNLPNEKVLPKHSLLYEYFTVYNELTKVKYVTEGMRKPAFLSGEQKKAIVDLLFKTNRKVTVKQLKEDYFKKIECFDSVEISGVEDRFNASLGTYHDLLKIIKDKDFLDNEENEDILEDIVLTLTLFEDREMIEERLKTYAHLFDDKVMKQLKRRRYTGWGRLSRKLINGIRDKQSGKTILDFLKSDGFANRNFMQLIHDDSLTFKEDIQKAQVSGQGDSLHEHIANLAGSPAIKKGILQTVKVVDELVKVMGRHKPENIVIEMARENQTTQKGQKNSRERMKRIEEGIKELGSQILKEHPVENTQLQNEKLYLYYLQNGRDMYVDQELDINRLSDYDVDHIVPQSFLKDDSIDNKVLTRSDKARGKSDNVPSEEVVKKMKNYWRQLLNAKLITQRKFDNLTKAERGGLSELDKAGFIKRQLVETRQITKHVAQILDSRMNTKYDENDKLIREVKVITLKSKLVSDFRKDFQFYKVREINNYHHAHDAYLNAVVGTALIKKYPKLESEFVYGDYKVYDVRKMIAKSEQEIGKATAKYFFYSNIMNFFKTEITLANGEIRKRPLIETNGETGEIVWDKGRDFATVRKVLSMPQVNIVKKTEVQTGGFSKESILPKRNSDKLIARKKDWDPKKYGGFDSPTVAYSVLVVAKVEKGKSKKLKSVKELLGITIMERSSFEKNPIDFLEAKGYKEVKKDLIIKLPKYSLFELENGRKRMLASAGELQKGNELALPSKYVNFLYLASHYEKLKGSPEDNEQKQLFVEQHKHYLDEIIEQISEFSKRVILADANLDKVLSAYNKHRDKPIREQAENIIHLFTLTNLGAPAAFKYFDTTIDRKRYTSTKEVLDATLIHQSITGLYETRIDLSQLGGDGGSGGSSGGSSGSETPGTSESATPESSGGSSGGSSGGWVQEISDSRPMLHIYLNGRRFLGLLNTGADKTCIAGRDWPANWPIHQTESSLQGLGMACGVARSSQPLRWQHEDKSGIIHPFVIPTLPFTLWGRDIMKDIKVRLMTDSPDDSQDLMIGAIESNLFADQISWKSDQPVWLNQWPLKQEKLQALQQLVTEQLQLGHLEESNSPWNTPVFVIKKKSGKWRLLQDLRAVNATMHDMGALQPGLPSPVAVPKGWEIIIIDLQDCFFNIKLHPEDCKRFAFSVPSPNFKRPYQRFQWKVLPQGMKNSPTLCQKFVDKAILTVRDKYQDSYIVHYMDDILLAHPSRSIVDEILTSMIQALNKHGLVVSTEKIQKYDNLKYLGTHIQGDSVSYQKLQIRTDKLRTLNDFQKLLGNINWIRPFLKLTTGELKPLFEILNGDSNPISTRKLTPEACKALQLMNERLSTARVKRLDLSQPWSLCILKTEYTPTACLWQDGVVEWIHLPHISPKVITPYDIFCTQLIIKGRHRSKELFSKDPDYIVVPYTKVQFDLLLQEKEDWPISLLGFLGEVHFHLPKDPLLTFTLQTAIIFPHMTSTTPLEKGIVIFTDGSANGRSVTYIQGREPIIKENTQNTAQQAEIVAVITAFEEVSQPFNLYTDSKYVTGLFPEIETATLSPRTKIYTELKHLQRLIHKRQEKFYIGHIRGHTGLPGPLAQGNAYADSLTRILTAGKRTADGSEFEKRTADGSEFESPKKKAKVE

SEQ ID NO: 7734 - protein, 2110 aa, synthetic construct
MPAAKRVKLDGGDKKYSIGLDIGTNSVGWAVITDEYKVPSKKFKVLGNTDRHSIKKNLIGALLFDSGETAEATRLKRTARRRYTRRKNRICYLQEIFSNEMAKVDDSFFHRLEESFLVEEDKKHERHPIFGNIVDEVAYHEKYPTIYHLRKKLVDSTDKADLRLIYLALAHMIKFRGHFLIEGDLNPDNSDVDKLFIQLVQTYNQLFEENPINASGVDAKAILSARLSKSRRLENLIAQLPGEKKNGLFGNLIALSLGLTPNFKSNFDLAEDAKLQLSKDTYDDDLDNLLAQIGDQYADLFLAAKNLSDAILLSDILRVNTEITKAPLSASMIKRYDEHHQDLTLLKALVRQQLPEKYKEIFFDQSKNGYAGYIDGGASQEEFYKFIKPILEKMDGTEELLVKLNREDLLRKQRTFDNGSIPHQIHLGELHAILRRQEDFYPFLKDNREKIEKILTFRIPYYVGPLARGNSRFAWMTRKSEETITPWNFEEVVDKGASAQSFIERMTNFDKNLPNEKVLPKHSLLYEYFTVYNELTKVKYVTEGMRKPAFLSGEQKKAIVDLLFKTNRKVTVKQLKEDYFKKIECFDSVEISGVEDRFNASLGTYHDLLKIIKDKDFLDNEENEDILEDIVLTLTLFEDREMIEERLKTYAHLFDDKVMKQLKRRRYTGWGRLSRKLINGIRDKQSGKTILDFLKSDGFANRNFMQLIHDDSLTFKEDIQKAQVSGQGDSLHEHIANLAGSPAIKKGILQTVKVVDELVKVMGRHKPENIVIEMARENQTTQKGQKNSRERMKRIEEGIKELGSQILKEHPVENTQLQNEKLYLYYLQNGRDMYVDQELDINRLSDYDVDHIVPQSFLKDDSIDNKVLTRSDKARGKSDNVPSEEVVKKMKNYWRQLLNAKLITQRKFDNLTKAERGGLSELDKAGFIKRQLVETRQITKHVAQILDSRMNTKYDENDKLIREVKVITLKSKLVSDFRKDFQFYKVREINNYHHAHDAYLNAVVGTALIKKYPKLESEFVYGDYKVYDVRKMIAKSEQEIGKATAKYFFYSNIMNFFKTEITLANGEIRKRPLIETNGETGEIVWDKGRDFATVRKVLSMPQVNIVKKTEVQTGGFSKESILPKRNSDKLIARKKDWDPKKYGGFDSPTVAYSVLVVAKVEKGKSKKLKSVKELLGITIMERSSFEKNPIDFLEAKGYKEVKKDLIIKLPKYSLFELENGRKRMLASAGELQKGNELALPSKYVNFLYLASHYEKLKGSPEDNEQKQLFVEQHKHYLDEIIEQISEFSKRVILADANLDKVLSAYNKHRDKPIREQAENIIHLFTLTNLGAPAAFKYFDTTIDRKRYTSTKEVLDATLIHQSITGLYETRIDLSQLGGDGGSGGSSGGSSGSETPGTSESATPESSGGSSGGSSGGLDDEYRLYSPLVKPDQNIQFWLEQFPQAWAETAGMGLAKQVPPQVIQLKASATPVSVRQYPLSKEAQEGIRPHVQRLIQQGILVPVQSPWNTPLLPVRKPGTNDYRPVQDLREVNKRVQDIHPTVPNPYNLLCALPPQRSWYTVLDLKDAFFCLRLHPTSQPLFAFEWRDPGTGRTGQLTWTRLPQGFKNSPTIFNEALHRDLANFRIQHPQVTLLQYVDDLLLAGATKQDCLEGTKALLLELSDLGYRASAKKAQICRREVTYLGYSLRDGQRWLTEARKKTVVQIPAPTTAKQVREFLGKAGFCRLFIPGFATLAAPLYPLTKPKGEFSWAPEHQKAFDAIKKALLSAPALALPDVTKPFTLYVDERKGVARGVLTQTLGPWRRPVAYLSKKLDPVASGWPVCLKAIAAVAILVKDADKLTLGQNITVIAPHALENIVRQPPDRWMTNARMTHYQSLLLTERVTFAPPAALNPATLLPEETDEPVTHDCHQLLIEETGVRKDLTDIPLTGEVLTWFTDGSSYVVEGKRMAGAAVVDGTRTIWASSLPEGTSAQKAELMALTQALRLAEGKSINIYTDSRYAFATAHVHGAIYKQRGWLTSAGREIKNKEEILSLLEALHLPKRLAIIHCPGHQKAKDPISRGNQMADRVAKQAAQGVNLLPAGKRTADGSEFEKRTADGSEFESPKKKAKVE

SEQ ID NO: 7735 - protein, 2110 aa, synthetic construct; identical to SEQ ID NO: 7734

SEQ ID NO: 7736 - protein, 2109 aa, synthetic construct
MPAAKRVKLDGGDKKYSIGLDIGTNSVGWAVITDEYKVPSKKFKVLGNTDRHSIKKNLIGALLFDSGETAEATRLKRTARRRYTRRKNRICYLQEIFSNEMAKVDDSFFHRLEESFLVEEDKKHERHPIFGNIVDEVAYHEKYPTIYHLRKKLVDSTDKADLRLIYLALAHMIKFRGHFLIEGDLNPDNSDVDKLFIQLVQTYNQLFEENPINASGVDAKAILSARLSKSRRLENLIAQLPGEKKNGLFGNLIALSLGLTPNFKSNFDLAEDAKLQLSKDTYDDDLDNLLAQIGDQYADLFLAAKNLSDAILLSDILRVNTEITKAPLSASMIKRYDEHHQDLTLLKALVRQQLPEKYKEIFFDQSKNGYAGYIDGGASQEEFYKFIKPILEKMDGTEELLVKLNREDLLRKQRTFDNGSIPHQIHLGELHAILRRQEDFYPFLKDNREKIEKILTFRIPYYVGPLARGNSRFAWMTRKSEETITPWNFEEVVDKGASAQSFIERMTNFDKNLPNEKVLPKHSLLYEYFTVYNELTKVKYVTEGMRKPAFLSGEQKKAIVDLLFKTNRKVTVKQLKEDYFKKIECFDSVEISGVEDRFNASLGTYHDLLKIIKDKDFLDNEENEDILEDIVLTLTLFEDREMIEERLKTYAHLFDDKVMKQLKRRRYTGWGRLSRKLINGIRDKQSGKTILDFLKSDGFANRNFMQLIHDDSLTFKEDIQKAQVSGQGDSLHEHIANLAGSPAIKKGILQTVKVVDELVKVMGRHKPENIVIEMARENQTTQKGQKNSRERMKRIEEGIKELGSQILKEHPVENTQLQNEKLYLYYLQNGRDMYVDQELDINRLSDYDVDHIVPQSFLKDDSIDNKVLTRSDKARGKSDNVPSEEVVKKMKNYWRQLLNAKLITQRKFDNLTKAERGGLSELDKAGFIKRQLVETRQITKHVAQILDSRMNTKYDENDKLIREVKVITLKSKLVSDFRKDFQFYKVREINNYHHAHDAYLNAVVGTALIKKYPKLESEFVYGDYKVYDVRKMIAKSEQEIGKATAKYFFYSNIMNFFKTEITLANGEIRKRPLIETNGETGEIVWDKGRDFATVRKVLSMPQVNIVKKTEVQTGGFSKESILPKRNSDKLIARKKDWDPKKYGGFDSPTVAYSVLVVAKVEKGKSKKLKSVKELLGITIMERSSFEKNPIDFLEAKGYKEVKKDLIIKLPKYSLFELENGRKRMLASAGELQKGNELALPSKYVNFLYLASHYEKLKGSPEDNEQKQLFVEQHKHYLDEIIEQISEFSKRVILADANLDKVLSAYNKHRDKPIREQAENIIHLFTLTNLGAPAAFKYFDTTIDRKRYTSTKEVLDATLIHQSITGLYETRIDLSQLGGDGGSGGSSGGSSGSETPGTSESATPESSGGSSGGSSGGVPWLMKKPLQLTVLVPLHEYQERLLQQTALPKEQKELLQKLFLKYDALWQHWENQVGHRRIKPHNIATGTLAPRPQKQYPINPKAKPSIQIVIDDLLKQGVLIQQNSTMNTPVYPVPKPDGKWRMVLDYREVNKTIPLIAAQNQHSAGILSSIYRGKYKTTLDLTNGFWAHPITPESYWLTAFTWQGKQYCWTRLPQGFLNSPALFTADVVDLLKEIPNVQAYVDDIYISHDDPQEHLEQLEKIFSILLNAGYVVSLKKSEIAQREVEFLGFNITKEGRGLTDTFKQKLLNITPPKDLKQLQSILGLLNFARNFIPNYSELVKPLYTIVANANGKFISWTEDNSNQLQHIISVLNQADNLEERNPETRLIIKVNSSPSAGYIRYYNEGSKRPIMYVNYIFSKAEAKFTQTEKLLTTMHKGLIKAMDLAMGQEILVYSPIVSMTKIQRTPLPERKALPVRWITWMTYLEDPRIQFHYDKSLPELQQIPNVTEDVIAKTKHPSEFAMVFYTDGSAIKHPDVNKSHSAGMGIAQVQFIPEYKIVHQWSIPLGDHTAQLAEIAAVEFACKKALKISGPVLIVTDSFYVAESANKELPYWKSNGFLNNKKKPLRHVSKWKSIAECLQLKPDIIIMHEKGHQQPMTTLHTEGNNLADKLATQGSYVVHAGKRTADGSEFEKRTADGSEFESPKKKAKVE

SEQ ID NO: 7737 - protein, 2109 aa, synthetic construct
MPAAKRVKLDGGDKKYSIGLDIGTNSVGWAVITDEYKVPSKKFKVLGNTDRHSIKKNLIGALLFDSGETAEATRLKRTARRRYTRRKNRICYLQEIFSNEMAKVDDSFFHRLEESFLVEEDKKHERHPIFGNIVDEVAYHEKYPTIYHLRKKLVDSTDKADLRLIYLALAHMIKFRGHFLIEGDLNPDNSDVDKLFIQLVQTYNQLFEENPINASGVDAKAILSARLSKSRRLENLIAQLPGEKKNGLFGNLIALSLGLTPNFKSNFDLAEDAKLQLSKDTYDDDLDNLLAQIGDQYADLFLAAKNLSDAILLSDILRVNTEITKAPLSASMIKRYDEHHQDLTLLKALVRQQLPEKYKEIFFDQSKNGYAGYIDGGASQEEFYKFIKPILEKMDGTEELLVKLNREDLLRKQRTFDNGSIPHQIHLGELHAILRRQEDFYPFLKDNREKIEKILTFRIPYYVGPLARGNSRFAWMTRKSEETITPWNFEEVVDKGASAQSFIERMTNFDKNLPNEKVLPKHSLLYEYFTVYNELTKVKYVTEGMRKPAFLSGEQKKAIVDLLFKTNRKVTVKQLKEDYFKKIECFDSVEISGVEDRFNASLGTYHDLLKIIKDKDFLDNEENEDILEDIVLTLTLFEDREMIEERLKTYAHLFDDKVMKQLKRRRYTGWGRLSRKLINGIRDKQSGKTILDFLKSDGFANRNFMQLIHDDSLTFKEDIQKAQVSGQGDSLHEHIANLAGSPAIKKGILQTVKVVDELVKVMGRHKPENIVIEMARENQTTQKGQKNSRERMKRIEEGIKELGSQILKEHPVENTQLQNEKLYLYYLQNGRDMYVDQELDINRLSDYDVDHIVPQSFLKDDSIDNKVLTRSDKARGKSDNVPSEEVVKKMKNYWRQLLNAKLITQRKFDNLTKAERGGLSELDKAGFIKRQLVETRQITKHVAQILDSRMNTKYDENDKLIREVKVITLKSKLVSDFRKDFQFYKVREINNYHHAHDAYLNAVVGTALIKKYPKLESEFVYGDYKVYDVRKMIAKSEQEIGKATAKYFFYSNIMNFFKTEITLANGEIRKRPLIETNGETGEIVWDKGRDFATVRKVLSMPQVNIVKKTEVQTGGFSKESILPKRNSDKLIARKKDWDPKKYGGFDSPTVAYSVLVVAKVEKGKSKKLKSVKELLGITIMERSSFEKNPIDFLEAKGYKEVKKDLIIKLPKYSLFELENGRKRMLASAGELQKGNELALPSKYVNFLYLASHYEKLKGSPEDNEQKQLFVEQHKHYLDEIIEQISEFSKRVILADANLDKVLSAYNKHRDKPIREQAENIIHLFTLTNLGAPAAFKYFDTTIDRKRYTSTKEVLDATLIHQSITGLYETRIDLSQLGGDGGSGGSSGGSSGSETPGTSESATPESSGGSSGGSSGGVPWLMKKPLQLTVLVPLHEYQERLLQQTALPKEQKELLQKLFLKYDALWQHWENQVGHRRIKPHNIATGTLAPRPQKQYPINPKAKPSIQIVIDDLLKQGVLIQQNSTMNTPVYPVPKPDGKWRMVLDYREVNKTIPLIAAQNQHSAGILSSIYRGKYKTTLDLTNGFWAHPITPESYWLTAFTWQGKQYCWTRLPQGFLNSPALFNADVVDLLKEIPNVQAYVDDIYISHDDPQEHLEQLEKIFSILLNAGYVVSLKKSEIAQREVEFLGFNITKEGRGLTDTFKQKLLNITPPKDLKQLQSILGLLNFARNFIPNYSELVKPLYTIVAPANGKFISWTEDNSNQLQHIISVLNQADNLEERNPETRLIIKVNSSPSAGYIRYYNEGSKRPIMYVNYIFSKAEAKFTQTEKLLTTMHKGLIKAMDLAMGQEILVYSPIVSMTKIQRTPLPERKALPVRWITWMTYLEDPRIQFHYDKSLPELQQIPNVTEDVIAKTKHPSEFAMVFYTDGSAIKHPDVNKSHSAGMGIAQVQFIPEYKIVHQWSIPLGDHTAQLAEIAAVEFACKKALKISGPVLIVTDSFYVAESANKELPYWKSNGFLNNKKKPLRHVSKWKSIAECLQLKPDIIIMHEKGHQQPMTTLHTEGNNLADKLATQGSYVVHAGKRTADGSEFEKRTADGSEFESPKKKAKVE

SEQ ID NO: 7738 - protein, 2198 aa, synthetic construct
MPAAKRVKLDGGDKKYSIGLDIGTNSVGWAVITDEYKVPSKKFKVLGNTDRHSIKKNLIGALLFDSGETAEATRLKRTARRRYTRRKNRICYLQEIFSNEMAKVDDSFFHRLEESFLVEEDKKHERHPIFGNIVDEVAYHEKYPTIYHLRKKLVDSTDKADLRLIYLALAHMIKFRGHFLIEGDLNPDNSDVDKLFIQLVQTYNQLFEENPINASGVDAKAILSARLSKSRRLENLIAQLPGEKKNGLFGNLIALSLGLTPNFKSNFDLAEDAKLQLSKDTYDDDLDNLLAQIGDQYADLFLAAKNLSDAILLSDILRVNTEITKAPLSASMIKRYDEHHQDLTLLKALVRQQLPEKYKEIFFDQSKNGYAGYIDGGASQEEFYKFIKPILEKMDGTEELLVKLNREDLLRKQRTFDNGSIPHQIHLGELHAILRRQEDFYPFLKDNREKIEKILTFRIPYYVGPLARGNSRFAWMTRKSEETITPWNFEEVVDKGASAQSFIERMTNFDKNLPNEKVLPKHSLLYEYFTVYNELTKVKYVTEGMRKPAFLSGEQKKAIVDLLFKTNRKVTVKQLKEDYFKKIECFDSVEISGVEDRFNASLGTYHDLLKIIKDKDFLDNEENEDILEDIVLTLTLFEDREMIEERLKTYAHLFDDKVMKQLKRRRYTGWGRLSRKLINGIRDKQSGKTILDFLKSDGFANRNFMQLIHDDSLTFKEDIQKAQVSGQGDSLHEHIANLAGSPAIKKGILQTVKVVDELVKVMGRHKPENIVIEMARENQTTQKGQKNSRERMKRIEEGIKELGSQILKEHPVENTQLQNEKLYLYYLQNGRDMYVDQELDINRLSDYDVDHIVPQSFLKDDSIDNKVLTRSDKARGKSDNVPSEEVVKKMKNYWRQLLNAKLITQRKFDNLTKAERGGLSELDKAGFIKRQLVETRQITKHVAQILDSRMNTKYDENDKLIREVKVITLKSKLVSDFRKDFQFYKVREINNYHHAHDAYLNAVVGTALIKKYPKLESEFVYGDYKVYDVRKMIAKSEQEIGKATAKYFFYSNIMNFFKTEITLANGEIRKRPLIETNGETGEIVWDKGRDFATVRKVLSMPQVNIVKKTEVQTGGFSKESILPKRNSDKLIARKKDWDPKKYGGFDSPTVAYSVLVVAKVEKGKSKKLKSVKELLGITIMERSSFEKNPIDFLEAKGYKEVKKDLIIKLPKYSLFELENGRKRMLASAGELQKGNELALPSKYVNFLYLASHYEKLKGSPEDNEQKQLFVEQHKHYLDEIIEQISEFSKRVILADANLDKVLSAYNKHRDKPIREQAENIIHLFTLTNLGAPAAFKYFDTTIDRKRYTSTKEVLDATLIHQSITGLYETRIDLSQLGGDGGSGGSSGGSSGSETPGTSESATPESSGGSSGGSSGGMDPLQLLQPLEAEIKGTKLKAHWNSGATITCVPEAFLEDERPIQTMLIKTIHGEKQQDVYYLTFKVQGRKVEAEVLASPYDYILLNPSDVPWLMKKPLQLTVLVPLHEYQERLLQQTALPKEQKELLQKLFLKYDALWQHWENQVGHRRIKPHNIATGTLAPRPQKQYPINPKAKPSIQIVIDDLLKQGVLIQQNSTMNTPVYPVPKPDGKWRMVLDYREVNKTIPLIAAQNQHSAGILSSIYRGKYKTTLDLTNGFWAHPITPESYWLTAFTWQGKQYCWTRLPQGFLNSPALFNADVVDLLKEIPNVQAYVDDIYISHDDPQEHLEQLEKIFSILLNAGYVVSLKKSEIAQREVEFLGFNITKEGRGLTDTFKQKLLNITPPKDLKQLQSILGKLNFARNFIPNYSELVKPLYTIVAPANGKFISWTEDNSNQLQHIISVLNQADNLEERNPETRLIIKVNSSPSAGYIRYYNEGSKRPIMYVNYIFSKAEAKFTQTEKLLTTMHKGLIKAMDLAMGQEILVYSPIVSMTKIQRTPLPERKALPVRWITWMTYLEDPRIQFHYDKSLPELQQIPNVTEDVIAKTKHPSEFAMVFYTDGSAIKHPDVNKSHSAGMGIAQVQFIPEYKIVHQWSIPLGDHTAQLAEIAAVEFACKKALKISGPVLIVTDSFYVAESANKELPYWKSNGFLNNKKKPLRHVSKWKSIAECLQLKPDIIIMHEKGHQQPMTTLHTEGNNLADKLATQGSYVVHAGKRTADGSEFEKRTADGSEFESPKKKAKVE

SEQ ID NO: 7739 - protein, 2109 aa, synthetic construct
MPAAKRVKLDGGDKKYSIGLDIGTNSVGWAVITDEYKVPSKKFKVLGNTDRHSIKKNLIGALLFDSGETAEATRLKRTARRRYTRRKNRICYLQEIFSNEMAKVDDSFFHRLEESFLVEEDKKHERHPIFGNIVDEVAYHEKYPTIYHLRKKLVDSTDKADLRLIYLALAHMIKFRGHFLIEGDLNPDNSDVDKLFIQLVQTYNQLFEENPINASGVDAKAILSARLSKSRRLENLIAQLPGEKKNGLFGNLIALSLGLTPNFKSNFDLAEDAKLQLSKDTYDDDLDNLLAQIGDQYADLFLAAKNLSDAILLSDILRVNTEITKAPLSASMIKRYDEHHQDLTLLKALVRQQLPEKYKEIFFDQSKNGYAGYIDGGASQEEFYKFIKPILEKMDGTEELLVKLNREDLLRKQRTFDNGSIPHQIHLGELHAILRRQEDFYPFLKDNREKIEKILTFRIPYYVGPLARGNSRFAWMTRKSEETITPWNFEEVVDKGASAQSFIERMTNFDKNLPNEKVLPKHSLLYEYFTVYNELTKVKYVTEGMRKPAFLSGEQKKAIVDLLFKTNRKVTVKQLKEDYFKKIECFDSVEISGVEDRFNASLGTYHDLLKIIKDKDFLDNEENEDILEDIVLTLTLFEDREMIEERLKTYAHLFDDKVMKQLKRRRYTGWGRLSRKLINGIRDKQSGKTILDFLKSDGFANRNFMQLIHDDSLTFKEDIQKAQVSGQGDSLHEHIANLAGSPAIKKGILQTVKVVDELVKVMGRHKPENIVIEMARENQTTQKGQKNSRERMKRIEEGIKELGSQILKEHPVENTQLQNEKLYLYYLQNGRDMYVDQELDINRLSDYDVDHIVPQSFLKDDSIDNKVLTRSDKARGKSDNVPSEEVVKKMKNYWRQLLNAKLITQRKFDNLTKAERGGLSELDKAGFIKRQLVETRQITKHVAQILDSRMNTKYDENDKLIREVKVITLKSKLVSDFRKDFQFYKVREINNYHHAHDAYLNAVVGTALIKKYPKLESEFVYGDYKVYDVRKMIAKSEQEIGKATAKYFFYSNIMNFFKTEITLANGEIRKRPLIETNGETGEIVWDKGRDFATVRKVLSMPQVNIVKKTEVQTGGFSKESILPKRNSDKLIARKKDWDPKKYGGFDSPTVAYSVLVVAKVEKGKSKKLKSVKELLGITIMERSSFEKNPIDFLEAKGYKEVKKDLIIKLPKYSLFELENGRKRMLASAGELQKGNELALPSKYVNFLYLASHYEKLKGSPEDNEQKQLFVEQHKHYLDEIIEQISEFSKRVILADANLDKVLSAYNKHRDKPIREQAENIIHLFTLTNLGAPAAFKYFDTTIDRKRYTSTKEVLDATLIHQSITGLYETRIDLSQLGGDGGSGGSSGGSSGSETPGTSESATPESSGGSSGGSSGGIPWLMKKPLQLTTLVPLQEYEERLLKQTMLTGSYKEKLQSLFLKYDALWQHWENQVGHRRIKPHHIATGTVNPRPQKQYPINPKAKASIQTVINDLLKQGVLIQQNSIMNTPVYPVPKPDGKWRMVLDYREVNKTIPLIAAQNQHSAGILSSIFRGKYKTTLDLSNGFWAHSITPESYWLTAFTWLGQQYCWTRLPQGFLNSPALFNADVVDLLKEVPNVQVYVDDIYISHDDPREHLEQLEKVFSLLLNAGYVVSLKKSEIAQHEVEFLGFNITKEGRGLTETFKQKLLNITPPRDLKQLQSILGLLNFARNFIPNFSELVKPLYNIIATAPGKYITWTTDNSQQLQNIISMLNSAENLEERNPEVRLIMKVNTSPSAGYIRFYNEFAKRPIMYLNYVYTKAEVKFTNTEKLLTTIHKGLIKALDLGMGQEILVYSPIVSMTKIQKTPLPERKALPIRWITWMSYLEDPRIQFHYDKTLPELQQVPTVTDDIIAKIKHPSEFSMVFYTDGSAIKHPNVNKSHNAGMGIAQVQFKPEFTVINTWSIPLGDHTAQLAEVAAVEFACKKALKIDGPVLIVTDSFYVAESVNKELPYWQSNGFFNNKKKPLKHVSKWKSIADCIQLKPDIIIIHEKGHQPTASTFHTEGNNLADKLATQGSYVVNAGKRTADGSEFEKRTADGSEFESPKKKAKVE

SEQ ID NO: 7740 - protein, 2198 aa, synthetic construct
MPAAKRVKLDGGDKKYSIGLDIGTNSVGWAVITDEYKVPSKKFKVLGNTDRHSIKKNLIGALLFDSGETAEATRLKRTARRRYTRRKNRICYLQEIFSNEMAKVDDSFFHRLEESFLVEEDKKHERHPIFGNIVDEVAYHEKYPTIYHLRKKLVDSTDKADLRLIYLALAHMIKFRGHFLIEGDLNPDNSDVDKLFIQLVQTYNQLFEENPINASGVDAKAILSARLSKSRRLENLIAQLPGEKKNGLFGNLIALSLGLTPNFKSNFDLAEDAKLQLSKDTYDDDLDNLLAQIGDQYADLFLAAKNLSDAILLSDILRVNTEITKAPLSASMIKRYDEHHQDLTLLKALVRQQLPEKYKEIFFDQSKNGYAGYIDGGASQEEFYKFIKPILEKMDGTEELLVKLNREDLLRKQRTFDNGSIPHQIHLGELHAILRRQEDFYPFLKDNREKIEKILTFRIPYYVGPLARGNSRFAWMTRKSEETITPWNFEEVVDKGASAQSFIERMTNFDKNLPNEKVLPKHSLLYEYFTVYNELTKVKYVTEGMRKPAFLSGEQKKAIVDLLFKTNRKVTVKQLKEDYFKKIECFDSVEISGVEDRFNASLGTYHDLLKIIKDKDFLDNEENEDILEDIVLTLTLFEDREMIEERLKTYAHLFDDKVMKQLKRRRYTGWGRLSRKLINGIRDKQSGKTILDFLKSDGFANRNFMQLIHDDSLTFKEDIQKAQVSGQGDSLHEHIANLAGSPAIKKGILQTVKVVDELVKVMGRHKPENIVIEMARENQTTQKGQKNSRERMKRIEEGIKELGSQILKEHPVENTQLQNEKLYLYYLQNGRDMYVDQELDINRLSDYDVDHIVPQSFLKDDSIDNKVLTRSDKARGKSDNVPSEEVVKKMKNYWRQLLNAKLITQRKFDNLTKAERGGLSELDKAGFIKRQLVETRQITKHVAQILDSRMNTKYDENDKLIREVKVITLKSKLVSDFRKDFQFYKVREINNYHHAHDAYLNAVVGTALIKKYPKLESEFVYGDYKVYDVRKMIAKSEQEIGKATAKYFFYSNIMNFFKTEITLANGEIRKRPLIETNGETGEIVWDKGRDFATVRKVLSMPQVNIVKKTEVQTGGFSKESILPKRNSDKLIARKKDWDPKKYGGFDSPTVAYSVLVVAKVEKGKSKKLKSVKELLGITIMERSSFEKNPIDFLEAKGYKEVKKDLIIKLPKYSLFELENGRKRMLASAGELQKGNELALPSKYVNFLYLASHYEKLKGSPEDNEQKQLFVEQHKHYLDEIIEQISEFSKRVILADANLDKVLSAYNKHRDKPIREQAENIIHLFTLTNLGAPAAFKYFDTTIDRKRYTSTKEVLDATLIHQSITGLYETRIDLSQLGGDGGSGGSSGGSSGSETPGTSESATPESSGGSSGGSSGGMDPLQLLQPLEAEIKGTKLKAHWNSGATITCVPQAFLEEEVPIKNIWIKTIHGEKEQPVYYLTFKIQGRKVEAEVISSPYDYILVSPSDIPWLMKKPLQLTTLVPLQEYEERLLKQTMLTGSYKEKLQSLFLKYDALWQHWENQVGHRRIKPHHIATGTVNPRPQKQYPINPKAKASIQTVINDLLKQGVLIQQNSIMNTPVYPVPKPDGKWRMVLDYREVNKTIPLIAAQNQHSAGILSSIFRGKYKTTLDLSNGFWAHSITPESYWLTAFTWLGQQYCWTRLPQGFLNSPALFNADVVDLLKEVPNVQVYVDDIYISHDDPREHLEQLEKVFSLLLNAGYVVSLKKSEIAQHEVEFLGFNITKEGRGLTETFKQKLLNITPPRDLKQLQSILGLLNFARNFIPNFSELVKPLYNIIATAPGKYITWTTDNSQQLQNIISMLNSAENLEERNPEVRLIMKVNTSPSAGYIRFYNEFAKRPIMYLNYVYTKAEVKFTNTEKLLTTIHKGLIKALDLGMGQEILVYSPIVSMTKIQKTPLPERKALPIRWITWMSYLEDPRIQFHYDKTLPELQQVPTVTDDIIAKIKHPSEFSMVFYTDGSAIKHPNVNKSHNAGMGIAQVQFKPEFTVINTWSIPLGDHTAQLAEVAAVEFACKKALKIDGPVLIVTDSFYVAESVNKELPYWQSNGFFNNKKKPLKHVSKWKSIADCIQLKPDIIIIHEKGHQPTASTFHTEGNNLADKLATQGSYVVNAGKRTADGSEFEKRTADGSEFESPKKKAKVE

SEQ ID NO: 7741 - protein, 2116 aa, synthetic construct
MPAAKRVKLDGGDKKYSIGLDIGTNSVGWAVITDEYKVPSKKFKVLGNTDRHSIKKNLIGALLFDSGETAEATRLKRTARRRYTRRKNRICYLQEIFSNEMAKVDDSFFHRLEESFLVEEDKKHERHPIFGNIVDEVAYHEKYPTIYHLRKKLVDSTDKADLRLIYLALAHMIKFRGHFLIEGDLNPDNSDVDKLFIQLVQTYNQLFEENPINASGVDAKAILSARLSKSRRLENLIAQLPGEKKNGLFGNLIALSLGLTPNFKSNFDLAEDAKLQLSKDTYDDDLDNLLAQIGDQYADLFLAAKNLSDAILLSDILRVNTEITKAPLSASMIKRYDEHHQDLTLLKALVRQQLPEKYKEIFFDQSKNGYAGYIDGGASQEEFYKFIKPILEKMDGTEELLVKLNREDLLRKQRTFDNGSIPHQIHLGELHAILRRQEDFYPFLKDNREKIEKILTFRIPYYVGPLARGNSRFAWMTRKSEETITPWNFEEVVDKGASAQSFIERMTNFDKNLPNEKVLPKHSLLYEYFTVYNELTKVKYVTEGMRKPAFLSGEQKKAIVDLLFKTNRKVTVKQLKEDYFKKIECFDSVEISGVEDRFNASLGTYHDLLKIIKDKDFLDNEENEDILEDIVLTLTLFEDREMIEERLKTYAHLFDDKVMKQLKRRRYTGWGRLSRKLINGIRDKQSGKTILDFLKSDGFANRNFMQLIHDDSLTFKEDIQKAQVSGQGDSLHEHIANLAGSPAIKKGILQTVKVVDELVKVMGRHKPENIVIEMARENQTTQKGQKNSRERMKRIEEGIKELGSQILKEHPVENTQLQNEKLYLYYLQNGRDMYVDQELDINRLSDYDVDHIVPQSFLKDDSIDNKVLTRSDKARGKSDNVPSEEVVKKMKNYWRQLLNAKLITQRKFDNLTKAERGGLSELDKAGFIKRQLVETRQITKHVAQILDSRMNTKYDENDKLIREVKVITLKSKLVSDFRKDFQFYKVREINNYHHAHDAYLNAVVGTALIKKYPKLESEFVYGDYKVYDVRKMIAKSEQEIGKATAKYFFYSNIMNFFKTEITLANGEIRKRPLIETNGETGEIVWDKGRDFATVRKVLSMPQVNIVKKTEVQTGGFSKESILPKRNSDKLIARKKDWDPKKYGGFDSPTVAYSVLVVAKVEKGKSKKLKSVKELLGITIMERSSFEKNPIDFLEAKGYKEVKKDLIIKLPKYSLFELENGRKRMLASAGELQKGNELALPSKYVNFLYLASHYEKLKGSPEDNEQKQLFVEQHKHYLDEIIEQISEFSKRVILADANLDKVLSAYNKHRDKPIREQAENIIHLFTLTNLGAPAAFKYFDTTIDRKRYTSTKEVLDATLIHQSITGLYETRIDLSQLGGDGGSGGSSGGSSGSETPGTSESATPESSGGSSGGSSGGVLNLEEEYRLHEKPVPSSIDPSWLQLFPTVWAERAGMGLANQVPPVVVELRSGASPVAVRQYPMSKEAREGIRPHIQRFLDLGVLVPCQSPWNTPLLPVKKPGTNDYRPVQDLREINKRVQDIHPTVPNPYNLLSSLPPSHTWYSVLDLKDAFFCLKLHPNSQPLFAFEWRDPEKGNTGQLTWTRLPQGFKNSPTLFDEALHRDLAPFRALNPQVVLLQYVDDLLVAAPTYRDCKEGTQKLLQELSKLGYRVSAKKAQLCQKEVTYLGYLLKEGKRWLTPARKATVMKIPPPTTPRQVREFLGTAGFCRLWIPGFASLAAPLYPLTKESIPFIWTEEHQKAFDRIKEALLSAPALALPDLTKPFTLYVDERAGVARGVLTQTLGPWRRPVAYLSKKLDPVASGWPTCLKAVAAVALLLKDADKLTLGQNVTVIASHSLESIVRQPPDRWMTNARMTHYQSLLLNERVSFAPPAVLNPATLLPVESEATPVHRCSEILAEETGTRRDLKDQPLPGVPAWYTDGSSFIAEGKRRAGAAIVDGKRTVWASSLPEGTSAQKAELVALTQALRLAEGKDINIYTDSRYAFATAHIHGAIYKQRGLLTSAGKDIKNKEEILALLEAIHLPKRVAIIHCPGHQKGNDPVATGNRRADEAAKQAALSTRVLAETTKPAGKRTADGSEFEKRTADGSEFESPKKKAKVE

SEQ ID NO: 7742 - protein, 2116 aa, synthetic construct
MPAAKRVKLDGGDKKYSIGLDIGTNSVGWAVITDEYKVPSKKFKVLGNTDRHSIKKNLIGALLFDSGETAEATRLKRTARRRYTRRKNRICYLQEIFSNEMAKVDDSFFHRLEESFLVEEDKKHERHPIFGNIVDEVAYHEKYPTIYHLRKKLVDSTDKADLRLIYLALAHMIKFRGHFLIEGDLNPDNSDVDKLFIQLVQTYNQLFEENPINASGVDAKAILSARLSKSRRLENLIAQLPGEKKNGLFGNLIALSLGLTPNFKSNFDLAEDAKLQLSKDTYDDDLDNLLAQIGDQYADLFLAAKNLSDAILLSDILRVNTEITKAPLSASMIKRYDEHHQDLTLLKALVRQQLPEKYKEIFFDQSKNGYAGYIDGGASQEEFYKFIKPILEKMDGTEELLVKLNREDLLRKQRTFDNGSIPHQIHLGELHAILRRQEDFYPFLKDNREKIEKILTFRIPYYVGPLARGNSRFAWMTRKSEETITPWNFEEVVDKGASAQSFIERMTNFDKNLPNEKVLPKHSLLYEYFTVYNELTKVKYVTEGMRKPAFLSGEQKKAIVDLLFKTNRKVTVKQLKEDYFKKIECFDSVEISGVEDRFNASLGTYHDLLKIIKDKDFLDNEENEDILEDIVLTLTLFEDREMIEERLKTYAHLFDDKVMKQLKRRRYTGWGRLSRKLINGIRDKQSGKTILDFLKSDGFANRNFMQLIHDDSLTFKEDIQKAQVSGQGDSLHEHIANLAGSPAIKKGILQTVKVVDELVKVMGRHKPENIVIEMARENQTTQKGQKNSRERMKRIEEGIKELGSQILKEHPVENTQLQNEKLYLYYLQNGRDMYVDQELDINRLSDYDVDHIVPQSFLKDDSIDNKVLTRSDKARGKSDNVPSEEVVKKMKNYWRQLLNAKLITQRKFDNLTKAERGGLSELDKAGFIKRQLVETRQITKHVAQILDSRMNTKYDENDKLIREVKVITLKSKLVSDFRKDFQFYKVREINNYHHAHDAYLNAVVGTALIKKYPKLESEFVYGDYKVYDVRKMIAKSEQEIGKATAKYFFYSNIMNFFKTEITLANGEIRKRPLIETNGETGEIVWDKGRDFATVRKVLSMPQVNIVKKTEVQTGGFSKESILPKRNSDKLIARKKDWDPKKYGGFDSPTVAYSVLVVAKVEKGKSKKLKSVKELLGITIMERSSFEKNPIDFLEAKGYKEVKKDLIIKLPKYSLFELENGRKRMLASAGELQKGNELALPSKYVNFLYLASHYEKLKGSPEDNEQKQLFVEQHKHYLDEIIEQISEFSKRVILADANLDKVLSAYNKHRDKPIREQAENIIHLFTLTNLGAPAAFKYFDTTIDRKRYTSTKEVLDATLIHQSITGLYETRIDLSQLGGDGGSGGSSGGSSGSETPGTSESATPESSGGSSGGSSGGVLNLEEEYRLHEKPVPSSIDPSWLQLFPTVWAERAGMGLANQVPPVVVELRSGASPVAVRQYPMSKEAREGIRPHIQRFLDLGVLVPCQSPWNTPLLPVKKPGTNDYRPVQDLREINKRVQDIHPTVPNPYNLLSSLPPSHTWYSVLDLKDAFFCLKLHPNSQPLFAFEWRDPEKGNTGQLTWTRLPQGFKNSPTLFNEALHRDLAPFRALNPQVVLLQYVDDLLVAAPTYRDCKEGTQKLLQELSKLGYRVSAKKAQLCQKEVTYLGYLLKEGKRWLTPARKATVMKIPPPTTPRQVREFLGTAGFCRLWIPGFASLAAPLYPLTKPSIPFIWTEEHQKAFDRIKEALLSAPALALPDLTKPFTLYVDERAGVARGVLTQTLGPWRRPVAYLSKKLDPVASGWPTCLKAVAAVALLLKDADKLTLGQNVTVIASHSLESIVRQPPDRWMTNARMTHYQSLLLNERVSFAPPAVLNPATLLPVESEATPVHRCSEILAEETGTRRDLKDQPLPGVPAWYTDGSSFIAEGKRRAGAAIVDGKRTVWASSLPEGTSAQKAELVALTQALRLAEGKDINIYTDSRYAFATAHIHGAIYKQRGWLTSAGKDIKNKEEILALLEAIHLPKRVAIIHCPGHQKGNDPVATGNRRADEAAKQAALSTRVLAETTKPAGKRTADGSEFEKRTADGSEFESPKKKAKVE

SEQ ID NO: 7743 - protein, 2116 aa, synthetic construct
MPAAKRVKLDGGDKKYSIGLDIGTNSVGWAVITDEYKVPSKKFKVLGNTDRHSIKKNLIGALLFDSGETAEATRLKRTARRRYTRRKNRICYLQEIFSNEMAKVDDSFFHRLEESFLVEEDKKHERHPIFGNIVDEVAYHEKYPTIYHLRKKLVDSTDKADLRLIYLALAHMIKFRGHFLIEGDLNPDNSDVDKLFIQLVQTYNQLFEENPINASGVDAKAILSARLSKSRRLENLIAQLPGEKKNGLFGNLIALSLGLTPNFKSNFDLAEDAKLQLSKDTYDDDLDNLLAQIGDQYADLFLAAKNLSDAILLSDILRVNTEITKAPLSASMIKRYDEHHQDLTLLKALVRQQLPEKYKEIFFDQSKNGYAGYIDGGASQEEFYKFIKPILEKMDGTEELLVKLNREDLLRKQRTFDNGSIPHQIHLGELHAILRRQEDFYPFLKDNREKIEKILTFRIPYYVGPLARGNSRFAWMTRKSEETITPWNFEEVVDKGASAQSFIERMTNFDKNLPNEKVLPKHSLLYEYFTVYNELTKVKYVTEGMRKPAFLSGEQKKAIVDLLFKTNRKVTVKQLKEDYFKKIECFDSVEISGVEDRFNASLGTYHDLLKIIKDKDFLDNEENEDILEDIVLTLTLFEDREMIEERLKTYAHLFDDKVMKQLKRRRYTGWGRLSRKLINGIRDKQSGKTILDFLKSDGFANRNFMQLIHDDSLTFKEDIQKAQVSGQGDSLHEHIANLAGSPAIKKGILQTVKVVDELVKVMGRHKPENIVIEMARENQTTQKGQKNSRERMKRIEEGIKELGSQILKEHPVENTQLQNEKLYLYYLQNGRDMYVDQELDINRLSDYDVDHIVPQSFLKDDSIDNKVLTRSDKARGKSDNVPSEEVVKKMKNYWRQLLNAKLITQRKFDNLTKAERGGLSELDKAGFIKRQLVETRQITKHVAQILDSRMNTKYDENDKLIREVKVITLKSKLVSDFRKDFQFYKVREINNYHHAHDAYLNAVVGTALIKKYPKLESEFVYGDYKVYDVRKMIAKSEQEIGKATAKYFFYSNIMNFFKTEITLANGEIRKRPLIETNGETGEIVWDKGRDFATVRKVLSMPQVNIVKKTEVQTGGFSKESILPKRNSDKLIARKKDWDPKKYGGFDSPTVAYSVLVVAKVEKGKSKKLKSVKELLGITIMERSSFEKNPIDFLEAKGYKEVKKDLIIKLPKYSLFELENGRKRMLASAGELQKGNELALPSKYVNFLYLASHYEKLKGSPEDNEQKQLFVEQHKHYLDEIIEQISEFSKRVILADANLDKVLSAYNKHRDKPIREQAENIIHLFTLTNLGAPAAFKYFDTTIDRKRYTSTKEVLDATLIHQSITGLYETRIDLSQLGGDGGSGGSSGGSSGSETPGTSESATPESSGGSSGGSSGGVLNLEEEYRLHEKPVPSSIDPSWLQLFPTVWAERAGMGLANQVPPVVVELRSGASPVAVRQYPMSKEAREGIRPHIQRFLDLGVLVPCQSPWNTPLLPVKKPGTNDYRPVQDLREINKRVQDIHPTVPNPYNLLSSLPPSHTWYSVLDLKDAFFCLKLHPNSQPLFAFEWRDPEKGNTGQLTWTRLPQGFKNSPTLFNEALHRDLAPFRALNPQVVLLQYVDDLLVAAPTYRDCKEGTQKLLQELSKLGYRVSAKKAQLCQKEVTYLGYLLKEGKRWLTPARKATVMKIPPPTTPRQVREFLGKAGFCRLFIPGFASLAAPLYPLTKPSIPFIWTEEHQKAFDRIKEALLSAPALALPDLTKPFTLYVDERAGVARGVLTQTLGPWRRPVAYLSKKLDPVASGWPTCLKAVAAVALLLKDADKLTLGQNVTVIASHSLESIVRQPPDRWMTNARMTHYQSLLLNERVSFAPPAVLNPATLLPVESEATPVHRCSEILAEETGTRRDLKDQPLPGVPAWYTDGSSFIAEGKRRAGAAIVDGKRTVWASSLPEGTSAQKAELVALTQALRLAEGKDINIYTDSRYAFATAHIHGAIYKQRGWLTSAGKDIKNKEEILALLEAIHLPKRVAIIHCPGHQKGNDPVATGNRRADEAAKQAALSTRVLAETTKPAGKRTADGSEFEKRTADGSEFESPKKKAKVE

SEQ ID NO: 7744-8000 - skipped (257 entries)

SEQ ID NO: 8001 - protein, 673 aa, Reticuloendotheliosis virus
TAPLEEEYRLFLEAPIQNVTLLEQWKREIPKVWAEINPPGLASTQAPIHVQLLSTALPVRVRQYPITLEAKRSLRETIRKFRAAGILRPVHSPWNTPLLPVRKSGTSEYRMVQDLREVNKRVETIHPTVPNPYTLLSLLPPDRIWYSVLDLKDAFFCIPLAPESQLIFAFEWADAEEGESGQLTWTRLPQGFKNSPTLFDEALNRDLQGFRLDHPSVSLLQYVDDLLIAADTQAACLSATRDLLMTLAELGYRVSGKKAQLCQEEVTYLGFKIHKGSRSLSNSRTQAILQIPVPKTKRQVREFLGTIGYCRLWIPGFAELAQPLYAATRGGNDPLVWGEKEEEAFQSLKLALTQPPALALPSLDKPFQLFVEETSGAAKGVLTQALGPWKRPVAYLSKRLDPVAAGWPRCLRAIAAAALLTREASKLTFGQDIEITSSHNLESLLRSPPDKWLTNARITQYQVLLLDPPRVRFKQTAALNPATLLPETDDTLPIHHCLDTLDSLTSTRPDLTDQPLAQAEATLFTDGSSYIRDGKRYAGAAVVTLDSVIWAEPLPIGTSAQKAELIALTKALEWSKDKSVNIYTDSRYAFATLHVHGMIYRERGLLTAGGKAIKNAPEILALLTAVWLPKRVAVMHCKGHQKDDAPTSTGNRRADEVAREVAIRPLSTQATIS

SEQ ID NO: 8002 - protein, 673 aa, synthetic construct
TAPLEEEYRLFLEAPIQNVTLLEQWKREIPKVWAEINPPGLASTQAPIHVQLLSTALPVRVRQYPITLEAKRSLRETIRKFRAAGILRPVHSPWNTPLLPVRKSGTSEYRMVQDLREVNKRVETIHPTVPNPYTLLSLLPPDRIWYSVLDLKDAFFCIPLAPESQLIFAFEWADAEEGESGQLTWTRLPQGFKNSPTLFNEALNRDLQGFRLDHPSVSLLQYVDDLLIAADTQAACLSATRDLLMTLAELGYRVSGKKAQLCQEEVTYLGFKIHKGSRSLSNSRTQAILQIPVPKTKRQVREFLGTIGYCRLWIPGFAELAQPLYAATRPGNDPLVWGEKEEEAFQSLKLALTQPPALALPSLDKPFQLFVEETSGAAKGVLTQALGPWKRPVAYLSKRLDPVAAGWPRCLRAIAAAALLTREASKLTFGQDIEITSSHNLESLLRSPPDKWLTNARITQYQVLLLDPPRVRFKQTAALNPATLLPETDDTLPIHHCLDTLDSLTSTRPDLTDQPLAQAEATLFTDGSSYIRDGKRYAGAAVVTLDSVIWAEPLPIGTSAQKAELIALTKALEWSKDKSVNIYTDSRYAFATLHVHGMIYRERGWLTAGGKAIKNAPEILALLTAVWLPKRVAVMHCKGHQKDDAPTSTGNRRADEVAREVAIRPLSTQATIS

SEQ ID NO: 8003 - protein, 673 aa, synthetic construct
TAPLEEEYRLFLEAPIQNVTLLEQWKREIPKVWAEINPPGLASTQAPIHVQLLSTALPVRVRQYPITLEAKRSLRETIRKFRAAGILRPVHSPWNTPLLPVRKSGTSEYRMVQDLREVNKRVETIHPTVPNPYTLLSLLPPDRIWYSVLDLKDAFFCIPLAPESQLIFAFEWADAEEGESGQLTWTRLPQGFKNSPTLFNEALNRDLQGFRLDHPSVSLLQYVDDLLIAADTQAACLSATRDLLMTLAELGYRVSGKKAQLCQEEVTYLGFKIHKGSRSLSNSRTQAILQIPVPKTKRQVREFLGKIGYCRLFIPGFAELAQPLYAATRPGNDPLVWGEKEEEAFQSLKLALTQPPALALPSLDKPFQLFVEETSGAAKGVLTQALGPWKRPVAYLSKRLDPVAAGWPRCLRAIAAAALLTREASKLTFGQDIEITSSHNLESLLRSPPDKWLTNARITQYQVLLLDPPRVRFKQTAALNPATLLPETDDTLPIHHCLDTLDSLTSTRPDLTDQPLAQAEATLFTDGSSYIRDGKRYAGAAVVTLDSVIWAEPLPIGTSAQKAELIALTKALEWSKDKSVNIYTDSRYAFATLHVHGMIYRERGWLTAGGKAIKNAPEILALLTAVWLPKRVAVMHCKGHQKDDAPTSTGNRRADEVAREVAIRPLSTQATIS

SEQ ID NO: 8004 - protein, 677 aa, Baboon endogenous virus
TVSLQDEHRLFDIPVTTSLPDVWLQDFPQAWAETGGLGRAKCQAPIIIDLKPTAVPVSIKQYPMSLEAHMGIRQHIIKFLELGVLRPCRSPWNTPLLPVKKPGTQDYRPVQDLREINKRTVDIHPTVPNPYNLLSTLKPDYSWYTVLDLKDAFFCLPLAPQSQELFAFEWKDPERGISGQLTWTRLPQGFKNSPTLFDEALHRDLTDFRTQHPEVTLLQYVDDLLLAAPTKKACTQGTRHLLQELGEKGYRASAKKAQICQTKVTYLGYILSEGKRWLTPGRIETVARIPPPRNPREVREFLGTAGFCRLWIPGFAELAAPLYALTKESTPFTWQTEHQLAFEALKKALLSAPALGLPDTSKPFTLFLDERQGIAKGVLTQKLGPWKRPVAYLSKKLDPVAAGWPPCLRIMAATAMLVKDSAKLTLGQPLTVITPHTLEAIVRQPPDRWITNARLTHYQALLLDTDRVQFGPPVTLNPATLLPVPENQPSPHDCRQVLAETHGTREDLKDQELPDADHTWYTDGSSYLDSGTRRAGAAVVDGHNTIWAQSLPPGTSAQKAELIALTKALELSKGKKANIYTDSRYAFATAHTHGSIYERRGLLTSEGKEIKNKAEIIALLKALFLPQEVAIIHCPGHQKGQDPVAVGNRQADRVARQAAMAEVLTLATEPDNTSHIT

SEQ ID NO: 8005 - protein, 677 aa, synthetic construct
TVSLQDEHRLFDIPVTTSLPDVWLQDFPQAWAETGGLGRAKCQAPIIIDLKPTAVPVSIKQYPMSLEAHMGIRQHIIKFLELGVLRPCRSPWNTPLLPVKKPGTQDYRPVQDLREINKRTVDIHPTVPNPYNLLSTLKPDYSWYTVLDLKDAFFCLPLAPQSQELFAFEWKDPERGISGQLTWTRLPQGFKNSPTLFNEALHRDLTDFRTQHPEVTLLQYVDDLLLAAPTKKACTQGTRHLLQELGEKGYRASAKKAQICQTKVTYLGYILSEGKRWLTPGRIETVARIPPPRNPREVREFLGTAGFCRLWIPGFAELAAPLYALTKPSTPFTWQTEHQLAFEALKKALLSAPALGLPDTSKPFTLFLDERQGIAKGVLTQKLGPWKRPVAYLSKKLDPVAAGWPPCLRIMAATAMLVKDSAKLTLGQPLTVITPHTLEAIVRQPPDRWITNARLTHYQALLLDTDRVQFGPPVTLNPATLLPVPENQPSPHDCRQVLAETHGTREDLKDQELPDADHTWYTDGSSYLDSGTRRAGAAVVDGHNTIWAQSLPPGTSAQKAELIALTKALELSKGKKANIYTDSRYAFATAHTHGSIYERRGWLTSEGKEIKNKAEIIALLKALFLPQEVAIIHCPGHQKGQDPVAVGNRQADRVARQAAMAEVLTLATEPDNTSHIT

SEQ ID NO: 8006 - protein, 677 aa, synthetic construct
TVSLQDEHRLFDIPVTTSLPDVWLQDFPQAWAETGGLGRAKCQAPIIIDLKPTAVPVSIKQYPMSLEAHMGIRQHIIKFLELGVLRPCRSPWNTPLLPVKKPGTQDYRPVQDLREINKRTVDIHPTVPNPYNLLSTLKPDYSWYTVLDLKDAFFCLPLAPQSQELFAFEWKDPERGISGQLTWTRLPQGFKNSPTLFNEALHRDLTDFRTQHPEVTLLQYVDDLLLAAPTKKACTQGTRHLLQELGEKGYRASAKKAQICQTKVTYLGYILSEGKRWLTPGRIETVARIPPPRNPREVREFLGKAGFCRLFIPGFAELAAPLYALTKPSTPFTWQTEHQLAFEALKKALLSAPALGLPDTSKPFTLFLDERQGIAKGVLTQKLGPWKRPVAYLSKKLDPVAAGWPPCLRIMAATAMLVKDSAKLTLGQPLTVITPHTLEAIVRQPPDRWITNARLTHYQALLLDTDRVQFGPPVTLNPATLLPVPENQPSPHDCRQVLAETHGTREDLKDQELPDADHTWYTDGSSYLDSGTRRAGAAVVDGHNTIWAQSLPPGTSAQKAELIALTKALELSKGKKANIYTDSRYAFATAHTHGSIYERRGWLTSEGKEIKNKAEIIALLKALFLPQEVAIIHCPGHQKGQDPVAVGNRQADRVARQAAMAEVLTLATEPDNTSHIT

SEQ ID NO: 8007 - protein, 576 aa, Bovine leukemia virus
GVLDAPPSHIGLEHLPPPPEVPQFPLNLERLQALQDLVHRSLEAGYISPWDGPGNNPVFPVRKPNGAWRFVHDLRVTNALTKPIPALSPGPPDLTAIPTHLPHIICLDLKDAFFQIPVEDRFRSYFAFTLPTPGGLQPHRRFAWRVLPQGFINSPALFERALQEPLRQVSAAFSQSLLVSYMDDILYVSPTEEQRLQCYQTMAAHLRDLGFQVASEKTRQTPSPVPFLGQMVHERMVTYQSLPTLQISSPISLHQLQTVLGDLQWVSRGTPTTRRPLQLLYSSLKGIDDPRAIIHLSPEQQQGIAELRQALSHNARSRYNEQEPLLAYVHLTRAGSTLVLFQKGAQFPLAYFQTPLTDNQASPWGLLLLLGCQYLQAQALSSYAKTILKYYHNLPKTSLDNWIQSSEDPRVQELLQLWPQISSQGIQPPGPWKTLVTRAEVFLTPQFSPEPIPAALCLFSDGAARRGAYCLWKDHLLDFQAVPAPESAQKGELAGLLAGLAAAPPEPLNIWVDSKYLYSLLRTLVLGAWLQPDPVPSYALLYKSLLRHPAIFVGHVRSHSSASHPIASLNNYVDQL

SEQ ID NO: 8008 - protein, 576 aa, synthetic construct
GVLDAPPSHIGLEHLPPPPEVPQFPLNLERLQALQDLVHRSLEAGYISPWDGPGNNPVFPVRKPNGAWRFVHDLRVTNALTKPIPALSPGPPDLTAIPTHLPHIICLDLKDAFFQIPVEDRFRSYFAFTLPTPGGLQPHRRFAWRVLPQGFINSPALFQRALQEPLRQVSAAFSQSLLVSYMDDILYVSPTEEQRLQCYQTMAAHLRDLGFQVASEKTRQTPSPVPFLGQMVHERMVTYQSLPTLQISSPISLHQLQTVLGDLQWVSRGTPTTRRPLQLLYSSLKPIDDPRAIIHLSPEQQQGIAELRQALSHNARSRYNEQEPLLAYVHLTRAGSTLVLFQKGAQFPLAYFQTPLTDNQASPWGLLLLLGCQYLQAQALSSYAKTILKYYHNLPKTSLDNWIQSSEDPRVQELLQLWPQISSQGIQPPGPWKTLVTRAEVFLTPQFSPEPIPAALCLFSDGAARRGAYCLWKDHLLDFQAVPAPESAQKGELAGLLAGLAAAPPEPLNIWVDSKYLYSLLRTLVLGAWLQPDPVPSYALLYKSLLRHPAIFVGHVRSHSSASHPIASLNNYVDQL

SEQ ID NO: 8009 - protein, 576 aa, Bovine leukemia virus
GVLDTPPSHIGLEHLPPPPEVPQFPLNLERLQALQDLVHRSLEAGYISPWDGPGNNPVFPVRKPNGAWRFVHDLRATNALTKPIPALSPGPPDLTAIPTHPPHIICLDLKDAFFQIPVEDRFRFYLSFTLPSPGGLQPHRRFAWRVLPQGFINSPALFERALQEPLRQVSAAFSQSLLVSYMDDILYASPTEEQRSQCYQALAARLRDLGFQVASEKTSQTPSPVPFLGQMVHEQIVTYQSLPTLQISSPISLHQLQAVLGDLQWVSRGTPTTRRPLQLLYSSLKRHHDPRAIIQLSPEQLQGIAELRQALSHNARSRYNEQEPLLAYVHLTRAGSTLVLFQKGAQFPLAYFQTPLTDNQASPWGLLLLLGCQYLQTQALSSYAKPILKYYHNLPKTSLDNWIQSSEDPRVQELLQLWPQISSQGIQPPGPWKTLITRAEVFLTPQFSPDPIPAALCLFSDGATGRGAYCLWKDHLLDFQAVPAPESAQKGELAGLLAGLAAAPPEPVNIWVDSKYLYSLLRTLVLGAWLQPDPVPSYALLYKSLLRHPAIVVGHVRSHSSASHPIASLNNYVDQL

SEQ ID NO: 8010 - protein, 576 aa, synthetic construct
GVLDTPPSHIGLEHLPPPPEVPQFPLNLERLQALQDLVHRSLEAGYISPWDGPGNNPVFPVRKPNGAWRFVHDLRATNALTKPIPALSPGPPDLTAIPTHPPHIICLDLKDAFFQIPVEDRFRFYLSFTLPSPGGLQPHRRFAWRVLPQGFINSPALFNRALQEPLRQVSAAFSQSLLVSYMDDILYASPTEEQRSQCYQALAARLRDLGFQVASEKTSQTPSPVPFLGQMVHEQIVTYQSLPTLQISSPISLHQLQAVLGDLQWVSRGTPTTRRPLQLLYSSLKRHHDPRAIIQLSPEQLQGIAELRQALSHNARSRYNEQEPLLAYVHLTRAGSTLVLFQKGAQFPLAYFQTPLTDNQASPWGLLLLLGCQYLQTQALSSYAKPILKYYHNLPKTSLDNWIQSSEDPRVQELLQLWPQISSQGIQPPGPWKTLITRAEVFLTPQFSPDPIPAALCLFSDGATGRGAYCLWKDHLLDFQAVPAPESAQKGELAGLLAGLAAAPPEPVNIWVDSKYLYSLLRTWVLGAWLQPDPVPSYALLYKSLLRHPAIVVGHVRSHSSASHPIASLNNYVDQL

SEQ ID NO: 8011 - protein, 576 aa, synthetic construct
GVLDTPPSHIGLEHLPPPPEVPQFPLNLERLQALQDLVHRSLEAGYISPWDGPGNNPVFPVRKPNGAWRFVHDLRATNALTKPIPALSPGPPDLTAPPTHPPHIICLDLKDAFFQIPVEDRFRFYLSFTLPSPGGLQPHRRFAWRVLPQGFINSPALFQRALQEPLRQVSAAFSQSLLVSYMDDILYASPTEEQRSQCYQALAARLRDLGFQVASEKTSQTPSPVPFLGQMVHEQIVTYQSLPTLQISSPISLHQLQAVLGDLQWVSRGTPTTRRPLQLLYSSLKRHHDPRAIIQLSPEQLQGIAELRQALSHNARSRYNEQEPLLAYVHLTRAGSTLVLFQKGAQFPLAYFQTPLTDNQASPWGLLLLLGCQYLQTQALSSYAKPILKYYHNLPKTSLDNWIQSSEDPRVQELLQLWPQISSQGIQPPGPWKTLITRAEVFLTPQFSPDPIPAALCLFSDGATGRGAYCLWKDHLLDFQAVPAPESAQKGELAGLLAGLAAAPPEPVNIWVDSKYLYSLLRTWVLGAWLQPDPVPSYALLYKSLLRHPAIVVGHVRSHSSASHPIASLNNYVDQL

SEQ ID NO: 8012 - protein, 748 aa, Feline foamy virus
MDLLKPLTVERKGVKIKGYWNSQADITCVPKDLLQGEEPVRQQNVTTIHGTQEGDVYYVNLKIDGRRINTEVIGTTLDYAIITPGDVPWILKKPLELTIKLDLEEQQGTLLNNSILSKKGKEELKQLFEKYSALWQSWENQVGHRRIRPHKIATGTVKPTPQKQYHINPKAKPDIQIVINDLLKQGVLIQKESTMNTPVYPVPKPNGRWRMVLDYRAVNKVTPLIAVQNQHSYGILGSLFKGRYKTTIDLSNGFWAHPIVPEDYWITAFTWQGKQYCWTVLPQGFLNSPGLFTGDVVDLLQGIPNVEVYVDDVYISHDSEKEHLEYLDILFNRLKEAGYIISLKKSNIANSIVDFLGFQITNEGRGLTDTFKEKLENITAPTTLKQLQSILGLLNFARNFIPDFTELIAPLYALIPKSTKNYVPWQIEHSTTLETLITKLNGAEYLQGRKGDKTLIMKVNASYTTGYIRYYNEGEKKPISYVSIVFSKTELKFTELEKLLTTVHKGLLKALDLSMGQNIHVYSPIVSMQNIQKTPQTAKKALASRWLSWLSYLEDPRIRFFYDPQMPALKDLPAVDTGKDNKKHPSNFQHIFYTDGSAITSPTKEGHLNAGMGIVYFINKDGNLQKQQEWSISLGNHTAQFAEIAAFEFALKKCLPLGGNILVVTDSNYVAKAYNEELDVWASNGFVNNRKKPLKHISKWKSVADLKRLRPDVVVTHEPGHQKLDSSPHAYGNNLADQLATQASFKVH

SEQ ID NO: 8013 - protein, 748 aa, synthetic construct
MDLLKPLTVERKGVKIKGYWNSQADITCVPKDLLQGEEPVRQQNVTTIHGTQEGDVYYVNLKIDGRRINTEVIGTTLDYAIITPGDVPWILKKPLELTIKLDLEEQQGTLLNNSILSKKGKEELKQLFEKYSALWQSWENQVGHRRIRPHKIATGTVKPTPQKQYHINPKAKPDIQIVINDLLKQGVLIQKESTMNTPVYPVPKPNGRWRMVLDYRAVNKVTPLIAVQNQHSYGILGSLFKGRYKTTIDLSNGFWAHPIVPEDYWITAFTWQGKQYCWTVLPQGFLNSPGLFNGDVVDLLQGIPNVEVYVDDVYISHDSEKEHLEYLDILFNRLKEAGYIISLKKSNIANSIVDFLGFQITNEGRGLTDTFKEKLENITAPTTLKQLQSILGLLNFARNFIPDFTELIAPLYALIPKSPKNYVPWQIEHSTTLETLITKLNGAEYLQGRKGDKTLIMKVNASYTTGYIRYYNEGEKKPISYVSIVFSKTELKFTELEKLLTTVHKGLLKALDLSMGQNIHVYSPIVSMQNIQKTPQTAKKALASRWLSWLSYLEDPRIRFFYDPQMPALKDLPAVDTGKDNKKHPSNFQHIFYTDGSAITSPTKEGHLNAGMGIVYFINKDGNLQKQQEWSISLGNHTAQFAEIAAFEFALKKCLPLGGNILVVTDSNYVAKAYNEELDVWASNGFVNNRKKPLKHISKWKSVADLKRLRPDVVVTHEPGHQKLDSSPHAYGNNLADQLATQASFKVH

SEQ ID NO: 8014 - protein, 748 aa, synthetic construct
MDLLKPLTVERKGVKIKGYWNSQADITCVPKDLLQGEEPVRQQNVTTIHGTQEGDVYYVNLKIDGRRINTEVIGTTLDYAIITPGDVPWILKKPLELTIKLDLEEQQGTLLNNSILSKKGKEELKQLFEKYSALWQSWENQVGHRRIRPHKIATGTVKPTPQKQYHINPKAKPDIQIVINDLLKQGVLIQKESTMNTPVYPVPKPNGRWRMVLDYRAVNKVTPLIAVQNQHSYGILGSLFKGRYKTTIDLSNGFWAHPIVPEDYWITAFTWQGKQYCWTVLPQGFLNSPGLFNGDVVDLLQGIPNVEVYVDDVYISHDSEKEHLEYLDILFNRLKEAGYIISLKKSNIANSIVDFLGFQITNEGRGLTDTFKEKLENITAPTTLKQLQSILGKLNFARNFIPDFTELIAPLYALIPKSPKNYVPWQIEHSTTLETLITKLNGAEYLQGRKGDKTLIMKVNASYTTGYIRYYNEGEKKPISYVSIVFSKTELKFTELEKLLTTVHKGLLKALDLSMGQNIHVYSPIVSMQNIQKTPQTAKKALASRWLSWLSYLEDPRIRFFYDPQMPALKDLPAVDTGKDNKKHPSNFQHIFYTDGSAITSPTKEGHLNAGMGIVYFINKDGNLQKQQEWSISLGNHTAQFAEIAAFEFALKKCLPLGGNILVVTDSNYVAKAYNEELDVWASNGFVNNRKKPLKHISKWKSVADLKRLRPDVVVTHEPGHQKLDSSPHAYGNNLADQLATQASFKVH

SEQ ID NO: 8015 - protein, 662 aa, Feline foamy virus
VPWILKKPLELTIKLDLEEQQGTLLNNSILSKKGKEELKQLFEKYSALWQSWENQVGHRRIRPHKIATGTVKPTPQKQYHINPKAKPDIQIVINDLLKQGVLIQKESTMNTPVYPVPKPNGRWRMVLDYRAVNKVTPLIAVQNQHSYGILGSLFKGRYKTTIDLSNGFWAHPIVPEDYWITAFTWQGKQYCWTVLPQGFLNSPGLFTGDVVDLLQGIPNVEVYVDDVYISHDSEKEHLEYLDILFNRLKEAGYIISLKKSNIANSIVDFLGFQITNEGRGLTDTFKEKLENITAPTTLKQLQSILGLLNFARNFIPDFTELIAPLYALIPKSTKNYVPWQIEHSTTLETLITKLNGAEYLQGRKGDKTLIMKVNASYTTGYIRYYNEGEKKPISYVSIVFSKTELKFTELEKLLTTVHKGLLKALDLSMGQNIHVYSPIVSMQNIQKTPQTAKKALASRWLSWLSYLEDPRIRFFYDPQMPALKDLPAVDTGKDNKKHPSNFQHIFYTDGSAITSPTKEGHLNAGMGIVYFINKDGNLQKQQEWSISLGNHTAQFAEIAAFEFALKKCLPLGGNILVVTDSNYVAKAYNEELDVWASNGFVNNRKKPLKHISKWKSVADLKRLRPDVVVTHEPGHQKLDSSPHAYGNNLADQLATQASFKVH

SEQ ID NO: 8016 - protein, 662 aa, synthetic construct
VPWILKKPLELTIKLDLEEQQGTLLNNSILSKKGKEELKQLFEKYSALWQSWENQVGHRRIRPHKIATGTVKPTPQKQYHINPKAKPDIQIVINDLLKQGVLIQKESTMNTPVYPVPKPNGRWRMVLDYRAVNKVTPLIAVQNQHSYGILGSLFKGRYKTTIDLSNGFWAHPIVPEDYWITAFTWQGKQYCWTVLPQGFLNSPGLFNGDVVDLLQGIPNVEVYVDDVYISHDSEKEHLEYLDILFNRLKEAGYIISLKKSNIANSIVDFLGFQITNEGRGLTDTFKEKLENITAPTTLKQLQSILGLLNFARNFIPDFTELIAPLYALIPKSPKNYVPWQIEHSTTLETLITKLNGAEYLQGRKGDKTLIMKVNASYTTGYIRYYNEGEKKPISYVSIVFSKTELKFTELEKLLTTVHKGLLKALDLSMGQNIHVYSPIVSMQNIQKTPQTAKKALASRWLSWLSYLEDPRIRFFYDPQMPALKDLPAVDTGKDNKKHPSNFQHIFYTDGSAITSPTKEGHLNAGMGIVYFINKDGNLQKQQEWSISLGNHTAQFAEIAAFEFALKKCLPLGGNILVVTDSNYVAKAYNEELDVWASNGFVNNRKKPLKHISKWKSVADLKRLRPDVVVTHEPGHQKLDSSPHAYGNNLADQLATQASFKVH

SEQ ID NO: 8017 - protein, 662 aa, synthetic construct
VPWILKKPLELTIKLDLEEQQGTLLNNSILSKKGKEELKQLFEKYSALWQSWENQVGHRRIRPHKIATGTVKPTPQKQYHINPKAKPDIQIVINDLLKQGVLIQKESTMNTPVYPVPKPNGRWRMVLDYRAVNKVTPLIAVQNQHSYGILGSLFKGRYKTTIDLSNGFWAHPIVPEDYWITAFTWQGKQYCWTVLPQGFLNSPGLFNGDVVDLLQGIPNVEVYVDDVYISHDSEKEHLEYLDILFNRLKEAGYIISLKKSNIANSIVDFLGFQITNEGRGLTDTFKEKLENITAPTTLKQLQSILGKLNFARNFIPDFTELIAPLYALIPKSPKNYVPWQIEHSTTLETLITKLNGAEYLQGRKGDKTLIMKVNASYTTGYIRYYNEGEKKPISYVSIVFSKTELKFTELEKLLTTVHKGLLKALDLSMGQNIHVYSPIVSMQNIQKTPQTAKKALASRWLSWLSYLEDPRIRFFYDPQMPALKDLPAVDTGKDNKKHPSNFQHIFYTDGSAITSPTKEGHLNAGMGIVYFINKDGNLQKQQEWSISLGNHTAQFAEIAAFEFALKKCLPLGGNILVVTDSNYVAKAYNEELDVWASNGFVNNRKKPLKHISKWKSVADLKRLRPDVVVTHEPGHQKLDSSPHAYGNNLADQLATQASFKVH

SEQ ID NO: 8018 - protein, 670 aa, Feline leukemia virus
TLQLEEEYRLFEPESTQKQEMDIWLKNFPQAWAETGGMGTAHCQAPVLIQLKATATPISIRQYPMPHEAYQGIKPHIRRMLDQGILKPCQSPWNTPLLPVKKPGTEDYRPVQDLREVNKRVEDIHPTVPNPYNLLSTLPPSHPWYTVLDLKDAFFCLRLHSESQLLFAFEWRDPEIGLSGQLTWTRLPQGFKNSPTLFDEALHSDLADFRVRYPALVLLQYVDDLLLAAATRTECLEGTKALLETLGNKGYRASAKKAQICLQEVTYLGYSLKDGQRWLTKARKEAILSIPVPKNSRQVREFLGTAGYCRLWIPGFAELAAPLYPLTRPGTLFQWGTEQQLAFEDIKKALLSSPALGLPDITKPFELFIDENSGFAKGVLVQKLGPWKRPVAYLSKKLDTVASGWPPCLRMVAAIAILVKDAGKLTLGQPLTILTSHPVEALVRQPPNKWLSNARMTHYQAMLLDAERVHFGPTVSLNPATLLPLPSGGNHHDCLQILAETHGTRPDLTDQPLPDADLTWYTDGSSFIRNGEREAGAAVTTESEVIWAAPLPPGTSAQRAELIALTQALKMAEGKKLTVYTDSRYAFATTHVHGEIYRRRGLLTSEGKEIKNKNEILALLEALFLPKRLSIIHCPGHQKGDSPQAKGNRLADDTAKKAATETHSSLTVLP

SEQ ID NO: 8019 - protein, 670 aa, synthetic construct
TLQLEEEYRLFEPESTQKQEMDIWLKNFPQAWAETGGMGTAHCQAPVLIQLKATATPISIRQYPMPHEAYQGIKPHIRRMLDQGILKPCQSPWNTPLLPVKKPGTEDYRPVQDLREVNKRVEDIHPTVPNPYNLLSTLPPSHPWYTVLDLKDAFFCLRLHSESQLLFAFEWRDPEIGLSGQLTWTRLPQGFKNSPTLFNEALHSDLADFRVRYPALVLLQYVDDLLLAAATRTECLEGTKALLETLGNKGYRASAKKAQICLQEVTYLGYSLKDGQRWLTKARKEAILSIPVPKNSRQVREFLGTAGYCRLWIPGFAELAAPLYPLTRPGTLFQWGTEQQLAFEDIKKALLSSPALGLPDITKPFELFIDENSGFAKGVLVQKLGPWKRPVAYLSKKLDTVASGWPPCLRMVAAIAILVKDAGKLTLGQPLTILTSHPVEALVRQPPNKWLSNARMTHYQAMLLDAERVHFGPTVSLNPATLLPLPSGGNHHDCLQILAETHGTRPDLTDQPLPDADLTWYTDGSSFIRNGEREAGAAVTTESEVIWAAPLPPGTSAQRAELIALTQALKMAEGKKLTVYTDSRYAFATTHVHGEIYRRRGWLTSEGKEIKNKNEILALLEALFLPKRLSIIHCPGHQKGDSPQAKGNRLADDTAKKAATETHSSLTVLP

SEQ ID NO: 8020 - protein, 670 aa, synthetic construct
TLQLEEEYRLFEPESTQKQEMDIWLKNFPQAWAETGGMGTAHCQAPVLIQLKATATPISIRQYPMPHEAYQGIKPHIRRMLDQGILKPCQSPWNTPLLPVKKPGTEDYRPVQDLREVNKRVEDIHPTVPNPYNLLSTLPPSHPWYTVLDLKDAFFCLRLHSESQLLFAFEWRDPEIGLSGQLTWTRLPQGFKNSPTLFNEALHSDLADFRVRYPALVLLQYVDDLLLAAATRTECLEGTKALLETLGNKGYRASAKKAQICLQEVTYLGYSLKDGQRWLTKARKEAILSIPVPKNSRQVREFLGKAGYCRLFIPGFAELAAPLYPLTRPGTLFQWGTEQQLAFEDIKKALLSSPALGLPDITKPFELFIDENSGFAKGVLVQKLGPWKRPVAYLSKKLDTVASGWPPCLRMVAAIAILVKDAGKLTLGQPLTILTSHPVEALVRQPPNKWLSNARMTHYQAMLLDAERVHFGPTVSLNPATLLPLPSGGNHHDCLQILAETHGTRPDLTDQPLPDADLTWYTDGSSFIRNGEREAGAAVTTESEVIWAAPLPPGTSAQRAELIALTQALKMAEGKKLTVYTDSRYAFATTHVHGEIYRRRGWLTSEGKEIKNKNEILALLEALFLPKRLSIIHCPGHQKGDSPQAKGNRLADDTAKKAATETHSSLTVLP

SEQ ID NO: 8021 - protein, 751 aa, unidentified
MNPLQLLQPLPAEIKGTKLLAHWNSGATITCIPESFLEDEQPIKKTLIKTIHGEKQQNVYYVTFKVKGRKVEAEVIASPYEYILLSPTDVPWLTQQPLQLTILVPLQEYQEKILSKTALPEDQKQQLKTLFVKYDNLWQHWENQVGHRKIRPHNIATGDYPPRPQKQYPINPKAKPSIQIVIDDLLKQGVLTPQNSTMNTPVYPVPKPDGRWRMVLDYREVNKTIPLTAAQNQHSAGILATIVRQKYKTTLDLANGFWAHPITPESYWLTAFTWQGKQYCWTRLPQGFLNSPALFTADVVDLLKEIPNVQVYVDDIYLSHDDPKEHVQQLEKVFQILLQAGYVVSLKKSEIGQKTVEFLGFNITKEGRGLTDTFKTKLLNITPPKDLKQLQSILGLLNFARNFIPNFAELVQPLYNLIASAKGKYIEWSEENTKQLNMVIEALNTASNLEERLPEQRLVIKVNTSPSAGYVRYYNETGKKPIMYLNYVFSKAELKFSMLEKLLTTMHKALIKAMDLAMGQEILVYSPIVSMTKIQKTPLPERKALPIRWITWMTYLEDPRIQFHYDKTLPELKHIPDVYTSSQSPVKHPSQYEGVFYTDGSAIKSPDPTKSNNAGMGIVHATYKPEYQVLNQWSIPLGNHTAQMAEIAAVEFACKKALKIPGPVLVITDSFYVAESANKELPYWKSNGFVNNKKKPLKHISKWKSIAECLSMKPDITIQHEKGISLQIPVFILKGNALADKLATQGSYVVN

SEQ ID NO: 8022 - protein, 751 aa, synthetic construct
MNPLQLLQPLPAEIKGTKLLAHWNSGATITCIPESFLEDEQPIKKTLIKTIHGEKQQNVYYVTFKVKGRKVEAEVIASPYEYILLSPTDVPWLTQQPLQLTILVPLQEYQEKILSKTALPEDQKQQLKTLFVKYDNLWQHWENQVGHRKIRPHNIATGDYPPRPQKQYPINPKAKPSIQIVIDDLLKQGVLTPQNSTMNTPVYPVPKPDGRWRMVLDYREVNKTIPLTAAQNQHSAGILATIVRQKYKTTLDLANGFWAHPITPESYWLTAFTWQGKQYCWTRLPQGFLNSPALFNADVVDLLKEIPNVQVYVDDIYLSHDDPKEHVQQLEKVFQILLQAGYVVSLKKSEIGQKTVEFLGFNITKEGRGLTDTFKTKLLNITPPKDLKQLQSILGLLNFARNFIPNFAELVQPLYNLIAPAKGKYIEWSEENTKQLNMVIEALNTASNLEERLPEQRLVIKVNTSPSAGYVRYYNETGKKPIMYLNYVFSKAELKFSMLEKLLTTMHKALIKAMDLAMGQEILVYSPIVSMTKIQKTPLPERKALPIRWITWMTYLEDPRIQFHYDKTLPELKHIPDVYTSSQSPVKHPSQYEGVFYTDGSAIKSPDPTKSNNAGMGIVHATYKPEYQVLNQWSIPLGNHTAQMAEIAAVEFACKKALKIPGPVLVITDSFYVAESANKELPYWKSNGFVNNKKKPLKHISKWKSIAECLSMKPDITIQHEKGISLQIPVFILKGNALADKLATQGSYVVN

SEQ ID NO: 8023 - protein, 751 aa, synthetic construct
MNPLQLLQPLPAEIKGTKLLAHWNSGATITCIPESFLEDEQPIKKTLIKTIHGEKQQNVYYVTFKVKGRKVEAEVIASPYEYILLSPTDVPWLTQQPLQLTILVPLQEYQEKILSKTALPEDQKQQLKTLFVKYDNLWQHWENQVGHRKIRPHNIATGDYPPRPQKQYPINPKAKPSIQIVIDDLLKQGVLTPQNSTMNTPVYPVPKPDGRWRMVLDYREVNKTIPLTAAQNQHSAGILATIVRQKYKTTLDLANGFWAHPITPESYWLTAFTWQGKQYCWTRLPQGFLNSPALFNADVVDLLKEIPNVQVYVDDIYLSHDDPKEHVQQLEKVFQILLQAGYVVSLKKSEIGQKTVEFLGFNITKEGRGLTDTFKTKLLNITPPKDLKQLQSILGKLNFARNFIPNFAELVQPLYNLIAPAKGKYIEWSEENTKQLNMVIEALNTASNLEERLPEQRLVIKVNTSPSAGYVRYYNETGKKPIMYLNYVFSKAELKFSMLEKLLTTMHKALIKAMDLAMGQEILVYSPIVSMTKIQKTPLPERKALPIRWITWMTYLEDPRIQFHYDKTLPELKHIPDVYTSSQSPVKHPSQYEGVFYTDGSAIKSPDPTKSNNAGMGIVHATYKPEYQVLNQWSIPLGNHTAQMAEIAAVEFACKKALKIPGPVLVITDSFYVAESANKELPYWKSNGFVNNKKKPLKHISKWKSIAECLSMKPDITIQHEKGISLQIPVFILKGNALADKLATQGSYVVN

SEQ ID NO: 8024 - protein, 662 aa, unidentified
VPWLTQQPLQLTILVPLQEYQEKILSKTALPEDQKQQLKTLFVKYDNLWQHWENQVGHRKIRPHNIATGDYPPRPQKQYPINPKAKPSIQIVIDDLLKQGVLTPQNSTMNTPVYPVPKPDGRWRMVLDYREVNKTIPLTAAQNQHSAGILATIVRQKYKTTLDLANGFWAHPITPESYWLTAFTWQGKQYCWTRLPQGFLNSPALFTADVVDLLKEIPNVQVYVDDIYLSHDDPKEHVQQLEKVFQILLQAGYVVSLKKSEIGQKTVEFLGFNITKEGRGLTDTFKTKLLNITPPKDLKQLQSILGLLNFARNFIPNFAELVQPLYNLIASAKGKYIEWSEENTKQLNMVIEALNTASNLEERLPEQRLVIKVNTSPSAGYVRYYNETGKKPIMYLNYVFSKAELKFSMLEKLLTTMHKALIKAMDLAMGQEILVYSPIVSMTKIQKTPLPERKALPIRWITWMTYLEDPRIQFHYDKTLPELKHIPDVYTSSQSPVKHPSQYEGVFYTDGSAIKSPDPTKSNNAGMGIVHATYKPEYQVLNQWSIPLGNHTAQMAEIAAVEFACKKALKIPGPVLVITDSFYVAESANKELPYWKSNGFVNNKKKPLKHISKWKSIAECLSMKPDITIQHEKGISLQIPVFILKGNALADKLATQGSYVVN

SEQ ID NO: 8025 - protein, 662 aa, synthetic construct
VPWLTQQPLQLTILVPLQEYQEKILSKTALPEDQKQQLKTLFVKYDNLWQHWENQVGHRKIRPHNIATGDYPPRPQKQYPINPKAKPSIQIVIDDLLKQGVLTPQNSTMNTPVYPVPKPDGRWRMVLDYREVNKTIPLTAAQNQHSAGILATIVRQKYKTTLDLANGFWAHPITPESYWLTAFTWQGKQYCWTRLPQGFLNSPALFNADVVDLLKEIPNVQVYVDDIYLSHDDPKEHVQQLEKVFQILLQAGYVVSLKKSEIGQKTVEFLGFNITKEGRGLTDTFKTKLLNITPPKDLKQLQSILGLLNFARNFIPNFAELVQPLYNLIAPAKGKYIEWSEENTKQLNMVIEALNTASNLEERLPEQRLVIKVNTSPSAGYVRYYNETGKKPIMYLNYVFSKAELKFSMLEKLLTTMHKALIKAMDLAMGQEILVYSPIVSMTKIQKTPLPERKALPIRWITWMTYLEDPRIQFHYDKTLPELKHIPDVYTSSQSPVKHPSQYEGVFYTDGSAIKSPDPTKSNNAGMGIVHATYKPEYQVLNQWSIPLGNHTAQMAEIAAVEFACKKALKIPGPVLVITDSFYVAESANKELPYWKSNGFVNNKKKPLKHISKWKSIAECLSMKPDITIQHEKGISLQIPVFILKGNALADKLATQGSYVVN

SEQ ID NO: 8026 - protein, 662 aa, synthetic construct
VPWLTQQPLQLTILVPLQEYQEKILSKTALPEDQKQQLKTLFVKYDNLWQHWENQVGHRKIRPHNIATGDYPPRPQKQYPINPKAKPSIQIVIDDLLKQGVLTPQNSTMNTPVYPVPKPDGRWRMVLDYREVNKTIPLTAAQNQHSAGILATIVRQKYKTTLDLANGFWAHPITPESYWLTAFTWQGKQYCWTRLPQGFLNSPALFNADVVDLLKEIPNVQVYVDDIYLSHDDPKEHVQQLEKVFQILLQAGYVVSLKKSEIGQKTVEFLGFNITKEGRGLTDTFKTKLLNITPPKDLKQLQSILGKLNFARNFIPNFAELVQPLYNLIAPAKGKYIEWSEENTKQLNMVIEALNTASNLEERLPEQRLVIKVNTSPSAGYVRYYNETGKKPIMYLNYVFSKAELKFSMLEKLLTTMHKALIKAMDLAMGQEILVYSPIVSMTKIQKTPLPERKALPIRWITWMTYLEDPRIQFHYDKTLPELKHIPDVYTSSQSPVKHPSQYEGVFYTDGSAIKSPDPTKSNNAGMGIVHATYKPEYQVLNQWSIPLGNHTAQMAEIAAVEFACKKALKIPGPVLVITDSFYVAESANKELPYWKSNGFVNNKKKPLKHISKWKSIAECLSMKPDITIQHEKGISLQIPVFILKGNALADKLATQGSYVVN

SEQ ID NO: 8027 - protein, 669 aa, Gibbon ape leukemia virus
VLNLEEEYRLHEKPVPSSIDPSWLQLFPTVWAERAGMGLANQVPPVVVELRSGASPVAVRQYPMSKEAREGIRPHIQKFLDLGVLVPCRSPWNTPLLPVKKPGTNDYRPVQDLREINKRVQDIHPTVPNPYNLLSSLPPSYTWYSVLDLKDAFFCLRLHPNSQPLFAFEWKDPEKGNTGQLTWTRLPQGFKNSPTLFDEALHRDLAPFRALNPQVVLLQYVDDLLVAAPTYEDCKKGTQKLLQELSKLGYRVSAKKAQLCQREVTYLGYLLKEGKRWLTPARKATVMKIPVPTTPRQVREFLGTAGFCRLWIPGFASLAAPLYPLTKESIPFIWTEEHQQAFDHIKKALLSAPALALPDLTKPFTLYIDERAGVARGVLTQTLGPWRRPVAYLSKKLDPVASGWPTCLKAVAAVALLLKDADKLTLGQNVTVIASHSLESIVRQPPDRWMTNARMTHYQSLLLNERVSFAPPAVLNPATLLPVESEATPVHRCSEILAEETGTRRDLEDQPLPGVPTWYTDGSSFITEGKRRAGAPIVDGKRTVWASSLPEGTSAQKAELVALTQALRLAEGKNINIYTDSRYAFATAHIHGAIYKQRGLLTSAGKDIKNKEEILALLEAIHLPRRVAIIHCPGHQRGSNPVATGNRRADEAAKQAALSTRVLAGTTKP

SEQ ID NO: 8028 - protein, 669 aa, synthetic construct
VLNLEEEYRLHEKPVPSSIDPSWLQLFPTVWAERAGMGLANQVPPVVVELRSGASPVAVRQYPMSKEAREGIRPHIQKFLDLGVLVPCRSPWNTPLLPVKKPGTNDYRPVQDLREINKRVQDIHPTVPNPYNLLSSLPPSYTWYSVLDLKDAFFCLRLHPNSQPLFAFEWKDPEKGNTGQLTWTRLPQGFKNSPTLFNEALHRDLAPFRALNPQVVLLQYVDDLLVAAPTYEDCKKGTQKLLQELSKLGYRVSAKKAQLCQREVTYLGYLLKEGKRWLTPARKATVMKIPVPTTPRQVREFLGTAGFCRLWIPGFASLAAPLYPLTKPSIPFIWTEEHQQAFDHIKKALLSAPALALPDLTKPFTLYIDERAGVARGVLTQTLGPWRRPVAYLSKKLDPVASGWPTCLKAVAAVALLLKDADKLTLGQNVTVIASHSLESIVRQPPDRWMTNARMTHYQSLLLNERVSFAPPAVLNPATLLPVESEATPVHRCSEILAEETGTRRDLEDQPLPGVPTWYTDGSSFITEGKRRAGAPIVDGKRTVWASSLPEGTSAQKAELVALTQALRLAEGKNINIYTDSRYAFATAHIHGAIYKQRGWLTSAGKDIKNKEEILALLEAIHLPRRVAIIHCPGHQRGSNPVATGNRRADEAAKQAALSTRVLAGTTKP

SEQ ID NO: 8029 - protein, 669 aa, synthetic construct
VLNLEEEYRLHEKPVPSSIDPSWLQLFPTVWAERAGMGLANQVPPVVVELRSGASPVAVRQYPMSKEAREGIRPHIQKFLDLGVLVPCRSPWNTPLLPVKKPGTNDYRPVQDLREINKRVQDIHPTVPNPYNLLSSLPPSYTWYSVLDLKDAFFCLRLHPNSQPLFAFEWKDPEKGNTGQLTWTRLPQGFKNSPTLFNEALHRDLAPFRALNPQVVLLQYVDDLLVAAPTYEDCKKGTQKLLQELSKLGYRVSAKKAQLCQREVTYLGYLLKEGKRWLTPARKATVMKIPVPTTPRQVREFLGKAGFCRLFIPGFASLAAPLYPLTKPSIPFIWTEEHQQAFDHIKKALLSAPALALPDLTKPFTLYIDERAGVARGVLTQTLGPWRRPVAYLSKKLDPVASGWPTCLKAVAAVALLLKDADKLTLGQNVTVIASHSLESIVRQPPDRWMTNARMTHYQSLLLNERVSFAPPAVLNPATLLPVESEATPVHRCSEILAEETGTRRDLEDQPLPGVPTWYTDGSSFITEGKRRAGAPIVDGKRTVWASSLPEGTSAQKAELVALTQALRLAEGKNINIYTDSRYAFATAHIHGAIYKQRGWLTSAGKDIKNKEEILALLEAIHLPRRVAIIHCPGHQRGSNPVATGNRRADEAAKQAALSTRVLAGTTKP

SEQ ID NO: 8030 - protein, 588 aa, unidentified
AVLGLEHLPRPPQISQFPLNPERLQALQHLVRKALEAGHIEPYTGPGNNPVFPVKKANGTWRFIHDLRATNSLTIDLSSSSPGPPDLSSLPTTLAHLQTIDLRDAFFQIPLPKQFQPYFAFTVPQQCNYGPGTRYAWKVLPQGFKNSPTLFEMQLAHILQPIRQAFPQCTILQYMDDILLASPSHEDLLLLSEATMASLISHGLPVSENKTQQTPGTIKFLGQIISPNHLTYDAVPTVPIRSRWALPELQALLGEIQWVSKGTPTLRQPLHSLYCALQRHTDPRDQIYLNPSQVQSLVQLRQALSQNCRSRLVQTLPLLGAIMLTLTGTTTVVFQSKEQWPLVWLHAPLPHTSQCPWGQLLASAVLLLDKYTLQSYGLLCQTIHHNISTQTFNQFIQTSDHPSVPILLHHSHRFKNLGAQTGELWNTFLKTAAPLAPVKALMPVFTLSPVIINTAPCLFSDGSTSRAAYILWDKQILSQRSFPLPPPHKSAQRAELLGLLHGLSSARSWRCLNIFLDSKYLYHYLRTLALGTFQGRSSQAPFQALLPRLLSRKVVYLHHVRSHTNLPDPISRLNALTDALLITPVLQL

SEQ ID NO: 8031 - protein, 588 aa, synthetic construct
AVLGLEHLPRPPQISQFPLNPERLQALQHLVRKALEAGHIEPYTGPGNNPVFPVKKANGTWRFIHDLRATNSLTIDLSSSSPGPPDLSSLPTTLAHLQTIDLRDAFFQIPLPKQFQPYFAFTVPQQCNYGPGTRYAWKVLPQGFKNSPTLFQMQLAHILQPIRQAFPQCTILQYMDDILLASPSHEDLLLLSEATMASLISHGLPVSENKTQQTPGTIKFLGQIISPNHLTYDAVPTVPIRSRWALPELQALLGEIQWVSKGTPTLRQPLHSLYCALQPHTDPRDQIYLNPSQVQSLVQLRQALSQNCRSRLVQTLPLLGAIMLTLTGTTTVVFQSKEQWPLVWLHAPLPHTSQCPWGQLLASAVLLLDKYTLQSYGLLCQTIHHNISTQTFNQFIQTSDHPSVPILLHHSHRFKNLGAQTGELWNTFLKTAAPLAPVKALMPVFTLSPVIINTAPCLFSDGSTSRAAYILWDKQILSQRSFPLPPPHKSAQRAELLGLLHGLSSARSWRCLNIFLDSKYLYHYLRTLALGTFQGRSSQAPFQALLPRLLSRKVVYLHHVRSHTNLPDPISRLNALTDALLITPVLQL

SEQ ID NO: 8032 - protein, 588 aa, synthetic construct
AVLGLEHLPRPPQISQFPLNPERLQALQHLVRKALEAGHIEPYTGPGNNPVFPVKKANGTWRFIHDLRATNSLTIDLSSSSPGPPDLSSPPTTLAHLQTIDLRDAFFQIPLPKQFQPYFAFTVPQQCNYGPGTRYAWKVLPQGFKNSPTLFQMQLAHILQPIRQAFPQCTILQYMDDILLASPSHEDLLLLSEATMASLISHGLPVSENKTQQTPGTIKFLGQIISPNHLTYDAVPTVPIRSRWALPELQALLGEIQWVSKGTPTLRQPLHSLYCALQPHTDPRDQIYLNPSQVQSLVQLRQALSQNCRSRLVQTLPLLGAIMLTLTGTTTVVFQSKEQWPLVWLHAPLPHTSQCPWGQLLASAVLLLDKYTLQSYGLLCQTIHHNISTQTFNQFIQTSDHPSVPILLHHSHRFKNLGAQTGELWNTFLKTAAPLAPVKALMPVFTLSPVIINTAPCLFSDGSTSRAAYILWDKQILSQRSFPLPPPHKSAQRAELLGLLHGLSSARSWRCLNIFLDSKYLYHYLRTLALGTFQGRSSQAPFQALLPRLLSRKVVYLHHVRSHTNLPDPISRLNALTDALLITPVLQL

SEQ ID NO: 8033 - protein, 588 aa, unidentified
AVLGLEHLPRPPEISQFPLNPERLQALQHLVRKALEAGHIEPYTGPGNNPVFPVKKANGTWRFIHDLRATNSLTIDLSSSSPGPPDLSSLPTTLAHLQTIDLKDAFFQIPLPKQFQPYFAFTVPQQCNYGPGTRYAWRVLPQGFKNSPTLFEMQLAHILQPIRQAFPQCTILQYMDDILLASPSHADLQLLSEATMASLISHGLPVSENKTQQTPGTIKFLGQIISPNHLTYDAVPKVPIRSRWALPELQALLGEIQWVSKGTPTLRQPLHSLYCALQRHTDPRDQIYLNPSQVQSLVQLRQALSQNCRSRLVQTLPLLGAIMLTLTGTTTVVFQSKQQWPLVWLHAPLPHTSQCPWGQLLASAVLLLDKYTLQSYGLLCQTIHHNISTQTFNQFIQTSDHPSVPILLHHSHRFKNLGAQTGELWNTFLKTTAPLAPVKALMPVFTLSPVIINTAPCLFSDGSTSQAAYILWDKHILSQRSFPLPPPHKSAQRAELLGLLHGLSSARSWRCLNIFLDSKYLYHYLRTLALGTFQGRSSQAPFQALLPRLLSRKVVYLHHVRSHTNLPDPISRLNALTDALLITPVLQL

SEQ ID NO: 8034 - protein, 588 aa, synthetic construct
AVLGLEHLPRPPEISQFPLNPERLQALQHLVRKALEAGHIEPYTGPGNNPVFPVKKANGTWRFIHDLRATNSLTIDLSSSSPGPPDLSSLPTTLAHLQTIDLKDAFFQIPLPKQFQPYFAFTVPQQCNYGPGTRYAWRVLPQGFKNSPTLFQMQLAHILQPIRQAFPQCTILQYMDDILLASPSHADLQLLSEATMASLISHGLPVSENKTQQTPGTIKFLGQIISPNHLTYDAVPKVPIRSRWALPELQALLGEIQWVSKGTPTLRQPLHSLYCALQPHTDPRDQIYLNPSQVQSLVQLRQALSQNCRSRLVQTLPLLGAIMLTLTGTTTVVFQSKQQWPLVWLHAPLPHTSQCPWGQLLASAVLLLDKYTLQSYGLLCQTIHHNISTQTFNQFIQTSDHPSVPILLHHSHRFKNLGAQTGELWNTFLKTTAPLAPVKALMPVFTLSPVIINTAPCLFSDGSTSQAAYILWDKHILSQRSFPLPPPHKSAQRAELLGLLHGLSSARSWRCLNIFLDSKYLYHYLRTLALGTFQGRSSQAPFQALLPRLLSRKVVYLHHVRSHTNLPDPISRLNALTDALLITPVLQL

SEQ ID NO: 8035 - protein, 583 aa, unidentified
GLEHLPRPPEISQFPLNPERLQALQHLVRKALEAGHIEPYTGPGNNPVFPVKKANGTWRFIHDLRATNSLTVDLSSSSPGPPDLSSLPTTLAHLQTIDLKDAFFQIPLPKQFQPYFAFTVPQQCNYGPGTRYAWKVLPQGFKNSPTLFEMQLASILQPIRQAFPQCVILQYMDDILLASPSPEDLQQLSEATMASLISHGLPVSQDKTQQTPGTIKFLGQIISPNHITYDAVPTVPIRSRWALPELQALLGEIQWVSKGTPTLRQPLHSLYCALQGHTDPRDQIYLNPSQVQSLMQLQQALSQNCRSRLAQTLPLLGAIMLTLTGTTTVVFQSKQQWPLVWLHAPLPHTSQCPWGQLLASAVLLLDKYTLQSYGLLCQTIHHNISIQTFNQFIQTSDHPSVPILLHHSHRFKNLGAQTGELWNTFLKTAAPLAPVKALTPVFTLSPIIINTAPCLFSDGSTSQAAYILWDKHILSQRSFPLPPPHKSAQQAELLGLLHGLSSARSWHCLNIFLDSKYLYHYLRTLALGTFQGKSSQAPFQALLPRLLAHKVIYLHHVRSHTNLPDPISKLNALTDALLITPIL

SEQ ID NO: 8036 - protein, 583 aa, synthetic construct
GLEHLPRPPEISQFPLNPERLQALQHLVRKALEAGHIEPYTGPGNNPVFPVKKANGTWRFIHDLRATNSLTVDLSSSSPGPPDLSSLPTTLAHLQTIDLKDAFFQIPLPKQFQPYFAFTVPQQCNYGPGTRYAWKVLPQGFKNSPTLFQMQLASILQPIRQAFPQCVILQYMDDILLASPSPEDLQQLSEATMASLISHGLPVSQDKTQQTPGTIKFLGQIISPNHITYDAVPTVPIRSRWALPELQALLGEIQWVSKGTPTLRQPLHSLYCALQGHTDPRDQIYLNPSQVQSLMQLQQALSQNCRSRLAQTLPLLGAIMLTLTGTTTVVFQSKQQWPLVWLHAPLPHTSQCPWGQLLASAVLLLDKYTLQSYGLLCQTIHHNISIQTFNQFIQTSDHPSVPILLHHSHRFKNLGAQTGELWNTFLKTAAPLAPVKALTPVFTLSPIIINTAPCLFSDGSTSQAAYILWDKHILSQRSFPLPPPHKSAQQAELLGLLHGLSSARSWHCLNIFLDSKYLYHYLRTLAWGTFQGKSSQAPFQALLPRLLAHKVIYLHHVRSHTNLPDPISKLNALTDALLITPIL

SEQ ID NO: 8037 - protein, 583 aa, synthetic construct
GLEHLPRPPEISQFPLNPERLQALQHLVRKALEAGHIEPYTGPGNNPVFPVKKANGTWRFIHDLRATNSLTVDLSSSSPGPPDLSSPPTTLAHLQTIDLKDAFFQIPLPKQFQPYFAFTVPQQCNYGPGTRYAWKVLPQGFKNSPTLFQMQLASILQPIRQAFPQCVILQYMDDILLASPSPEDLQQLSEATMASLISHGLPVSQDKTQQTPGTIKFLGQIISPNHITYDAVPTVPIRSRWALPELQALLGEIQWVSKGTPTLRQPLHSLYCALQGHTDPRDQIYLNPSQVQSLMQLQQALSQNCRSRLAQTLPLLGAIMLTLTGTTTVVFQSKQQWPLVWLHAPLPHTSQCPWGQLLASAVLLLDKYTLQSYGLLCQTIHHNISIQTFNQFIQTSDHPSVPILLHHSHRFKNLGAQTGELWNTFLKTAAPLAPVKALTPVFTLSPIIINTAPCLFSDGSTSQAAYILWDKHILSQRSFPLPPPHKSAQQAELLGLLHGLSSARSWHCLNIFLDSKYLYHYLRTLAWGTFQGKSSQAPFQALLPRLLAHKVIYLHHVRSHTNLPDPISKLNALTDALLITPIL

SEQ ID NO: 8038 - protein, 584 aa, unidentified
GLEHLPPPPEVSQFPLNPERLQALTDLVSRALEAKHIEPYQGPGNNPIFPVKKPNGKWRFIHDLRATNSVTRDLASPSPGPPDLTSLPQGLPHLRTIDLTDAFFQIPLPTIFQPYFAFTLPQPNNYGPGTRYSWRVLPQGFKNSPTLFEQQLSHILTPVRKTFPNSLIIQYMDDILLASPAPGELAALTDKVTNALTKEGLPLSPEKTQATPGPIHFLGQVISQDCITYETLPSINVKSTWSLAELQSMLGELQWVSKGTPVLRSSLHQLYLALRGHRDPRDTIKLTSIQVQALRTIQKALTLNCRSRLVNQLPILALIMLRPTGTTAVLFQTKQKWPLVWLHTPHPATSLRPWGQLLANAVIILDKYSLQHYGQVCKSFHHNISNQALTYYLHTSDQSSVAILLQHSHRFHNLGAQPSGPWRSLLQMPQIFQNIDVLRPPFTISPVVINHAPCLFSDGSASKAAFIIWDRQVIHQQVLSLPSTCSAQAGELFGLLAGLQKSQPWVALNIFLDSKFLIGHLRRMALGAFPGPSTQCELHTQLLPLLQGKTVYVHHVRSHTLLQDPISRLNEATDALMLAPLLPL

SEQ ID NO: 8039 - protein, 584 aa, synthetic construct
GLEHLPPPPEVSQFPLNPERLQALTDLVSRALEAKHIEPYQGPGNNPIFPVKKPNGKWRFIHDLRATNSVTRDLASPSPGPPDLTSLPQGLPHLRTIDLTDAFFQIPLPTIFQPYFAFTLPQPNNYGPGTRYSWRVLPQGFKNSPTLFQQQLSHILTPVRKTFPNSLIIQYMDDILLASPAPGELAALTDKVTNALTKEGLPLSPEKTQATPGPIHFLGQVISQDCITYETLPSINVKSTWSLAELQSMLGELQWVSKGTPVLRSSLHQLYLALRGHRDPRDTIKLTSIQVQALRTIQKALTLNCRSRLVNQLPILALIMLRPTGTTAVLFQTKQKWPLVWLHTPHPATSLRPWGQLLANAVIILDKYSLQHYGQVCKSFHHNISNQALTYYLHTSDQSSVAILLQHSHRFHNLGAQPSGPWRSLLQMPQIFQNIDVLRPPFTISPVVINHAPCLFSDGSASKAAFIIWDRQVIHQQVLSLPSTCSAQAGELFGLLAGLQKSQPWVALNIFLDSKFLIGHLRRMAWGAFPGPSTQCELHTQLLPLLQGKTVYVHHVRSHTLLQDPISRLNEATDALMLAPLLPL

SEQ ID NO: 8040 - protein, 584 aa, synthetic construct
GLEHLPPPPEVSQFPLNPERLQALTDLVSRALEAKHIEPYQGPGNNPIFPVKKPNGKWRFIHDLRATNSVTRDLASPSPGPPDLTSPPQGLPHLRTIDLTDAFFQIPLPTIFQPYFAFTLPQPNNYGPGTRYSWRVLPQGFKNSPTLFQQQLSHILTPVRKTFPNSLIIQYMDDILLASPAPGELAALTDKVTNALTKEGLPLSPEKTQATPGPIHFLGQVISQDCITYETLPSINVKSTWSLAELQSMLGELQWVSKGTPVLRSSLHQLYLALRGHRDPRDTIKLTSIQVQALRTIQKALTLNCRSRLVNQLPILALIMLRPTGTTAVLFQTKQKWPLVWLHTPHPATSLRPWGQLLANAVIILDKYSLQHYGQVCKSFHHNISNQALTYYLHTSDQSSVAILLQHSHRFHNLGAQPSGPWRSLLQMPQIFQNIDVLRPPFTISPVVINHAPCLFSDGSASKAAFIIWDRQVIHQQVLSLPSTCSAQAGELFGLLAGLQKSQPWVALNIFLDSKFLIGHLRRMAWGAFPGPSTQCELHTQLLPLLQGKTVYVHHVRSHTLLQDPISRLNEATDALMLAPLLPL

SEQ ID NO: 8041 - protein, 584 aa, unidentified
GLEHLPPPPEVSQFPLNPERLQALTDLVSRALEAKHIEPYQGPGNNPIFPVKKPNGKWRFIHDLRATNSLTRDLASPSPGPPDLTSLPQDLPHLRTIDLTDAFFQIPLPAVFQPYFAFTLPQPNNHGPGTRYSWRVLPQGFKNSPTLFEQQLSHILAPVRKAFPNSLIIQYMDDILLASPALRELTALTDKVTNALTKEGLPMSLEKTQATPGSIHFLGQVISPDCITYETLPSIHVKSIWSLAELQSMLGELQWVSKGTPVLRSSLHQLYLALRGHRDPRDTIELTSTQVQALKTIQKALALNCRSRLVSQLPILALIILRPTGTTAVLFQTKQKWPLVWLHTPHPATSLRPWGQLLANAIITLDKYSLQHYGQICKSFHHNISNQALTYYLHTSDQSSVAILLQHSHRFHNLGAQPSGPWRSLLQVPQIFQNIDVLRPPFIISPVVIDHAPCLFSDGATSKAAFILWDKQVIHQQVLPLPSTCSAQAGELFGLLAGLQKSKPWPALNIFLDSKFLIGHLRRMALGAFLGPSTQCDLHARLFPLLQGKTVYVHHVRSHTLLQDPISRLNEATDALMLAPLLPL

SEQ ID NO: 8042 - protein, 584 aa, synthetic construct
GLEHLPPPPEVSQFPLNPERLQALTDLVSRALEAKHIEPYQGPGNNPIFPVKKPNGKWRFIHDLRATNSLTRDLASPSPGPPDLTSLPQDLPHLRTIDLTDAFFQIPLPAVFQPYFAFTLPQPNNHGPGTRYSWRVLPQGFKNSPTLFQQQLSHILAPVRKAFPNSLIIQYMDDILLASPALRELTALTDKVTNALTKEGLPMSLEKTQATPGSIHFLGQVISPDCITYETLPSIHVKSIWSLAELQSMLGELQWVSKGTPVLRSSLHQLYLALRGHRDPRDTIELTSTQVQALKTIQKALALNCRSRLVSQLPILALIILRPTGTTAVLFQTKQKWPLVWLHTPHPATSLRPWGQLLANAIITLDKYSLQHYGQICKSFHHNISNQALTYYLHTSDQSSVAILLQHSHRFHNLGAQPSGPWRSLLQVPQIFQNIDVLRPPFIISPVVIDHAPCLFSDGATSKAAFILWDKQVIHQQVLPLPSTCSAQAGELFGLLAGLQKSKPWPALNIFLDSKFLIGHLRRMAWGAFLGPSTQCDLHARLFPLLQGKTVYVHHVRSHTLLQDPISRLNEATDALMLAPLLPL

SEQ ID NO: 8043 - protein, 584 aa, synthetic construct
GLEHLPPPPEVSQFPLNPERLQALTDLVSRALEAKHIEPYQGPGNNPIFPVKKPNGKWRFIHDLRATNSLTRDLASPSPGPPDLTSPPQDLPHLRTIDLTDAFFQIPLPAVFQPYFAFTLPQPNNHGPGTRYSWRVLPQGFKNSPTLFQQQLSHILAPVRKAFPNSLIIQYMDDILLASPALRELTALTDKVTNALTKEGLPMSLEKTQATPGSIHFLGQVISPDCITYETLPSIHVKSIWSLAELQSMLGELQWVSKGTPVLRSSLHQLYLALRGHRDPRDTIELTSTQVQALKTIQKALALNCRSRLVSQLPILALIILRPTGTTAVLFQTKQKWPLVWLHTPHPATSLRPWGQLLANAIITLDKYSLQHYGQICKSFHHNISNQALTYYLHTSDQSSVAILLQHSHRFHNLGAQPSGPWRSLLQVPQIFQNIDVLRPPFIISPVVIDHAPCLFSDGATSKAAFILWDKQVIHQQVLPLPSTCSAQAGELFGLLAGLQKSKPWPALNIFLDSKFLIGHLRRMAWGAFLGPSTQCDLHARLFPLLQGKTVYVHHVRSHTLLQDPISRLNEATDALMLAPLLPL

SEQ ID NO: 8044 - protein, 584 aa, synthetic construct
HLPPPPQVDQFPLNLPERLQALNDLVSKALEAGHIEPYSGPGNNPVFPVKKPNGKWRFIHDLRATNAITTTLTSPSPGPPDLTSLPTALPHLQTIDLTDAFFQIPLPKQYQPYFAFTIPQPCNYGPGTRYAWTVLPQGFKNSPTLFQQQLAAVLNPMRKMFPTSTIVQYMDDILLASPTNEELQQLSQLTLQALTTHGLPISQEKTQQTPGQIRFLGQVISPNHITYESTPTIPIKSQWTLTELQVILGEIQWVSKGTPILRKHLQSLYSALHPYRDPRACITLTPQQLHALHAIQQALQHNCRGRLNPALPLLGLISLSTSGTTSVIFQPKQNWPLAWLHTPHPPTSLCPWGHLLACTILTLDKYTLQHYGQLCQSFHHNMSKQALCDFLRNSPHPSVGILIHHMGRFHNLGSQPSGPWKTLLHLPTLLQEPRLLRPIFTLSPVVLDTAPCLFSDGSPQKAAYVLWDQTILQQDITPLPSHETHSAQKGELLALICGLRAAKPWPSLNIFLDSKYLIKYLHSLAIGAFLGTSAHQTLQAALPPLLQGKTIYLHHVRSHTNLPDPISTFNEYTDSLILAPLVPL

SEQ ID NO: 8045 - protein, 581 aa, Jaagsiekte sheep retrovirus
PLGTSDSPVTHADPIDWKSEEPVWVDQWPLTQEKLSAAQQLVQEQLRLGHIEPSTSAWNSPIFVIKKKSGKWRLLQDLRKVNETMMHMGALQPGLPTPSAIPDKSYIIVIDLKDCFYTIPLAPQDCKRFAFSLPSVNFKEPMQRYQWRVLPQGMTNSPTLCQKFVATAIAPVRQRFPQLYLVHYMDDILLAHTDEHLLYQAFSILKQHLSLNGLVIADEKIQTHFPYNYLGFSLYPRVYNTQLVKLQTDHLKTLNDFQKLLGDINWIRPYLKLPTYTLQPLFDILKGDSDPASPRTLSLEGRTALQSIEEAIRQQQITYCDYQRSWGLYILPTPRAPTGVLYQDKPLRWIYLSATPTKHLLPYYELVAKIIAKGRHEAIQYFGMEPPFICVPYALEQQDWLFQFSDNWSIAFANYPGQITHHYPSDKLLQFASSHAFIFPKIVRRQPIPEATLIFTDGSSNGTAALIINHQTYYAQTSFSSAQVVELFAVHQALLTVPTSFNLFTDSSYVVGALQMIETVPIIGTTSPEVLNLFTLIQQVLHCRQHPCFFGHIRAHSTLPGALVQGNHTADVLTKQVFFQS

SEQ ID NO: 8046 - protein, 581 aa, synthetic construct
PLGTSDSPVTHADPIDWKSEEPVWVDQWPLTQEKLSAAQQLVQEQLRLGHIEPSTSAWNSPIFVIKKKSGKWRLLQDLRKVNETMMHMGALQPGLPTPSPIPDKSYIIVIDLKDCFYTIPLAPQDCKRFAFSLPSVNFKEPMQRYQWRVLPQGMTNSPTLCQKFVATAIAPVRQRFPQLYLVHYMDDILLAHTDEHLLYQAFSILKQHLSLNGLVIADEKIQTHFPYNYLGFSLYPRVYNTQLVKLQTDHLKTLNDFQKLLGDINWIRPYLKLPTYTLQPLFDILKGDSDPASPRTLSLEGRTALQSIEEAIRQQQITYCDYQRSWGLYILPTPRAPTGVLYQDKPLRWIYLSATPTKHLLPYYELVAKIIAKGRHEAIQYFGMEPPFICVPYALEQQDWLFQFSDNWSIAFANYPGQITHHYPSDKLLQFASSHAFIFPKIVRRQPIPEATLIFTDGSSNGTAALIINHQTYYAQTSFSSAQVVELFAVHQALLTVPTSFNLFTDSSYVVGALQMIETVPIIGTTSPEVLNLFTLIQQVLHCRQHPCFFGHIRAHSTLPGALVQGNHTADVLTKQVFFQS

SEQ ID NO: 8047 - protein, 793 aa, Koala retrovirus
TLGDQGSRGSDPLPEPRVTLTVEGIPTEFLVNTGAEHSVLTKPMGKMGSKRTVVAGATGSKVYPWTTKRLLKIGQKQVTHSFLVIPECPAPLLGRDLLTKLKAQIQFSTEGPQVTWEDRPAMCLVLNLEEEYRLHEKPVPPSIDPSWLQLFPMVWAEKAGMGLANQVPPVVVELKSDASPVAVRQYPMSKEAREGIRPHIQRFLDLGILVPCQSPWNTPLLPVKKPGTNDYRPVQDLREVNKRVQDIHPTVPNPYNLLSSLPPSHTWYSVLDLKDAFFCLKLHPNSQPLFAFEWRDPEKGNTGQLTWTRLPQGFKNSPTLFDEALHRDLASFRALNPQVVMLQYVDDLLVAAPTYRDCKEGTRRLLQELSKLGYRVSAKKAQLCREEVTYLGYLLKGGKRWLTPARKATVMKIPTPTTPRQVREFLGTAGFCRLWIPGFASLAAPLYPLTREKVPFTWTEAHQEAFGRIKEALLSAPALALPDLTKPFALYVDEKEGVARGVLTQTLGPWRRPVAYLSKKLDPVASGWPTCLKAIAAVALLLKDADKLTLGQNVLVIAPHNLESIVRQPPDRWMTNARMTHYQSLLLNERVSFAPPAILNPATLLPVESDDTPIHICSEILAEETGTRPDLRDQPLPGVPAWYTDGSSFIMDGRRQAGAAIVDNKRTVWASNLPEGTSAQKAELIALTQALRLAEGKSINIYTDSRYAFATAHVHGAIYKQRGLLTSAGKDIKNKEEILALLEAIHLPKRVAIIHCPGHQRGTDPVATGNRKADEAAKQAAQSTRILTETTKN

SEQ ID NO: 8048 - protein, 793 aa, synthetic construct
TLGDQGSRGSDPLPEPRVTLTVEGIPTEFLVNTGAEHSVLTKPMGKMGSKRTVVAGATGSKVYPWTTKRLLKIGQKQVTHSFLVIPECPAPLLGRDLLTKLKAQIQFSTEGPQVTWEDRPAMCLVLNLEEEYRLHEKPVPPSIDPSWLQLFPMVWAEKAGMGLANQVPPVVVELKSDASPVAVRQYPMSKEAREGIRPHIQRFLDLGILVPCQSPWNTPLLPVKKPGTNDYRPVQDLREVNKRVQDIHPTVPNPYNLLSSLPPSHTWYSVLDLKDAFFCLKLHPNSQPLFAFEWRDPEKGNTGQLTWTRLPQGFKNSPTLFNEALHRDLASFRALNPQVVMLQYVDDLLVAAPTYRDCKEGTRRLLQELSKLGYRVSAKKAQLCREEVTYLGYLLKGGKRWLTPARKATVMKIPTPTTPRQVREFLGTAGFCRLWIPGFASLAAPLYPLTRPKVPFTWTEAHQEAFGRIKEALLSAPALALPDLTKPFALYVDEKEGVARGVLTQTLGPWRRPVAYLSKKLDPVASGWPTCLKAIAAVALLLKDADKLTLGQNVLVIAPHNLESIVRQPPDRWMTNARMTHYQSLLLNERVSFAPPAILNPATLLPVESDDTPIHICSEILAEETGTRPDLRDQPLPGVPAWYTDGSSFIMDGRRQAGAAIVDNKRTVWASNLPEGTSAQKAELIALTQALRLAEGKSINIYTDSRYAFATAHVHGAIYKQRGWLTSAGKDIKNKEEILALLEAIHLPKRVAIIHCPGHQRGTDPVATGNRKADEAAKQAAQSTRILTETTKN

SEQ ID NO: 8049 - protein, 793 aa, synthetic construct
TLGDQGSRGSDPLPEPRVTLTVEGIPTEFLVNTGAEHSVLTKPMGKMGSKRTVVAGATGSKVYPWTTKRLLKIGQKQVTHSFLVIPECPAPLLGRDLLTKLKAQIQFSTEGPQVTWEDRPAMCLVLNLEEEYRLHEKPVPPSIDPSWLQLFPMVWAEKAGMGLANQVPPVVVELKSDASPVAVRQYPMSKEAREGIRPHIQRFLDLGILVPCQSPWNTPLLPVKKPGTNDYRPVQDLREVNKRVQDIHPTVPNPYNLLSSLPPSHTWYSVLDLKDAFFCLKLHPNSQPLFAFEWRDPEKGNTGQLTWTRLPQGFKNSPTLFNEALHRDLASFRALNPQVVMLQYVDDLLVAAPTYRDCKEGTRRLLQELSKLGYRVSAKKAQLCREEVTYLGYLLKGGKRWLTPARKATVMKIPTPTTPRQVREFLGKAGFCRLFIPGFASLAAPLYPLTRPKVPFTWTEAHQEAFGRIKEALLSAPALALPDLTKPFALYVDEKEGVARGVLTQTLGPWRRPVAYLSKKLDPVASGWPTCLKAIAAVALLLKDADKLTLGQNVLVIAPHNLESIVRQPPDRWMTNARMTHYQSLLLNERVSFAPPAILNPATLLPVESDDTPIHICSEILAEETGTRPDLRDQPLPGVPAWYTDGSSFIMDGRRQAGAAIVDNKRTVWASNLPEGTSAQKAELIALTQALRLAEGKSINIYTDSRYAFATAHVHGAIYKQRGWLTSAGKDIKNKEEILALLEAIHLPKRVAIIHCPGHQRGTDPVATGNRKADEAAKQAAQSTRILTETTKN

SEQ ID NO: 8050 - protein, 702 aa, Koala retrovirus
LLGRDLLTKLKAQIQFSTEGPQVTWEDRPAMCLVLNLEEEYRLHEKPVPPSIDPSWLQLFPMVWAEKAGMGLANQVPPVVVELKSDASPVAVRQYPMSKEAREGIRPHIQRFLDLGILVPCQSPWNTPLLPVKKPGTNDYRPVQDLREVNKRVQDIHPTVPNPYNLLSSLPPSHTWYSVLDLKDAFFCLKLHPNSQPLFAFEWRDPEKGNTGQLTWTRLPQGFKNSPTLFDEALHRDLASFRALNPQVVMLQYVDDLLVAAPTYRDCKEGTRRLLQELSKLGYRVSAKKAQLCREEVTYLGYLLKGGKRWLTPARKATVMKIPTPTTPRQVREFLGTAGFCRLWIPGFASLAAPLYPLTREKVPFTWTEAHQEAFGRIKEALLSAPALALPDLTKPFALYVDEKEGVARGVLTQTLGPWRRPVAYLSKKLDPVASGWPTCLKAIAAVALLLKDADKLTLGQNVLVIAPHNLESIVRQPPDRWMTNARMTHYQSLLLNERVSFAPPAILNPATLLPVESDDTPIHICSEILAEETGTRPDLRDQPLPGVPAWYTDGSSFIMDGRRQAGAAIVDNKRTVWASNLPEGTSAQKAELIALTQALRLAEGKSINIYTDSRYAFATAHVHGAIYKQRGLLTSAGKDIKNKEEILALLEAIHLPKRVAIIHCPGHQRGTDPVATGNRKADEAAKQAAQSTRILTETTKN

SEQ ID NO: 8051 - protein, 702 aa, synthetic construct
LLGRDLLTKLKAQIQFSTEGPQVTWEDRPAMCLVLNLEEEYRLHEKPVPPSIDPSWLQLFPMVWAEKAGMGLANQVPPVVVELKSDASPVAVRQYPMSKEAREGIRPHIQRFLDLGILVPCQSPWNTPLLPVKKPGTNDYRPVQDLREVNKRVQDIHPTVPNPYNLLSSLPPSHTWYSVLDLKDAFFCLKLHPNSQPLFAFEWRDPEKGNTGQLTWTRLPQGFKNSPTLFNEALHRDLASFRALNPQVVMLQYVDDLLVAAPTYRDCKEGTRRLLQELSKLGYRVSAKKAQLCREEVTYLGYLLKGGKRWLTPARKATVMKIPTPTTPRQVREFLGTAGFCRLWIPGFASLAAPLYPLTRPKVPFTWTEAHQEAFGRIKEALLSAPALALPDLTKPFALYVDEKEGVARGVLTQTLGPWRRPVAYLSKKLDPVASGWPTCLKAIAAVALLLKDADKLTLGQNVLVIAPHNLESIVRQPPDRWMTNARMTHYQSLLLNERVSFAPPAILNPATLLPVESDDTPIHICSEILAEETGTRPDLRDQPLPGVPAWYTDGSSFIMDGRRQAGAAIVDNKRTVWASNLPEGTSAQKAELIALTQALRLAEGKSINIYTDSRYAFATAHVHGAIYKQRGWLTSAGKDIKNKEEILALLEAIHLPKRVAIIHCPGHQRGTDPVATGNRKADEAAKQAAQSTRILTETTKN

SEQ ID NO: 8052 - protein, 702 aa, synthetic construct
LLGRDLLTKLKAQIQFSTEGPQVTWEDRPAMCLVLNLEEEYRLHEKPVPPSIDPSWLQLFPMVWAEKAGMGLANQVPPVVVELKSDASPVAVRQYPMSKEAREGIRPHIQRFLDLGILVPCQSPWNTPLLPVKKPGTNDYRPVQDLREVNKRVQDIHPTVPNPYNLLSSLPPSHTWYSVLDLKDAFFCLKLHPNSQPLFAFEWRDPEKGNTGQLTWTRLPQGFKNSPTLFNEALHRDLASFRALNPQVVMLQYVDDLLVAAPTYRDCKEGTRRLLQELSKLGYRVSAKKAQLCREEVTYLGYLLKGGKRWLTPARKATVMKIPTPTTPRQVREFLGKAGFCRLFIPGFASLAAPLYPLTRPKVPFTWTEAHQEAFGRIKEALLSAPALALPDLTKPFALYVDEKEGVARGVLTQTLGPWRRPVAYLSKKLDPVASGWPTCLKAIAAVALLLKDADKLTLGQNVLVIAPHNLESIVRQPPDRWMTNARMTHYQSLLLNERVSFAPPAILNPATLLPVESDDTPIHICSEILAEETGTRPDLRDQPLPGVPAWYTDGSSFIMDGRRQAGAAIVDNKRTVWASNLPEGTSAQKAELIALTQALRLAEGKSINIYTDSRYAFATAHVHGAIYKQRGWLTSAGKDIKNKEEILALLEAIHLPKRVAIIHCPGHQRGTDPVATGNRKADEAAKQAAQSTRILTETTKN

SEQ ID NO: 8053 - protein, 671 aa, unidentified
TLNLEDEYRLYETSAEPEVSPGSTWLSDFPQAWAETGGMGLAVRQAPLIIPLKATSTPVSIKQYPMSQEAKLGIKPHIQRLLDQGILVPCQSPWNTPLLPVKKPGTNDYRPVQDLREVNKRVEDIHPTVPNPYNLLSGLPPSHRWYTVLDLKDAFFCLRLHPTSQPLFAFEWRDPGMGISGQLTWTRLPQGFKNSPTLFDEALHRDLADFRIQHPDLILLQYVDDILLAATSELDCQQGTRALLLTLGNLGYRASAKKAQLCQKQVKYLGYLLKEGQRWLTEARKETVMGQPTPKTPRQLREFLGTAGFCRLWIPGFAEMAAPLYPLTKTGTLFNWGPDQQKAYQEIKQALLTAPALGLPDLTKPFELFVDEKQGYAKGVLTQKLGPWRRPVAYLSKKLDPVAAGWPPCLRMVAAIAVLRKDAGKLTMGQPLVILAPHAVEALVKQPPDRWLSNARMTHYQAMLLDTDRVQFGPVVALNPATLLPLPEEGAPHDCLEILAETHGTRPDLTDQPIPDADHTWYTDGSSFLQEGQRKAGAAVTTETEVIWARALPAGTSAQRAELIALTQALKMAEGKRLNVYTDSRYAFATAHIHGEIYRRRGLLTSEGREIKNKSEILALLKALFLPKRLSIIHCLGHQKGDSAEARGNRLADQAAREAAIKTPPDTSTLL

SEQ ID NO: 8054 - protein, 671 aa, synthetic construct
TLNLEDEYRLYETSAEPEVSPGSTWLSDFPQAWAETGGMGLAVRQAPLIIPLKATSTPVSIKQYPMSQEAKLGIKPHIQRLLDQGILVPCQSPWNTPLLPVKKPGTNDYRPVQDLREVNKRVEDIHPTVPNPYNLLSGLPPSHRWYTVLDLKDAFFCLRLHPTSQPLFAFEWRDPGMGISGQLTWTRLPQGFKNSPTLFNEALHRDLADFRIQHPDLILLQYVDDILLAATSELDCQQGTRALLLTLGNLGYRASAKKAQLCQKQVKYLGYLLKEGQRWLTEARKETVMGQPTPKTPRQLREFLGTAGFCRLWIPGFAEMAAPLYPLTKPGTLFNWGPDQQKAYQEIKQALLTAPALGLPDLTKPFELFVDEKQGYAKGVLTQKLGPWRRPVAYLSKKLDPVAAGWPPCLRMVAAIAVLRKDAGKLTMGQPLVILAPHAVEALVKQPPDRWLSNARMTHYQAMLLDTDRVQFGPVVALNPATLLPLPEEGAPHDCLEILAETHGTRPDLTDQPIPDADHTWYTDGSSFLQEGQRKAGAAVTTETEVIWARALPAGTSAQRAELIALTQALKMAEGKRLNVYTDSRYAFATAHIHGEIYRRRGWLTSEGREIKNKSEILALLKALFLPKRLSIIHCLGHQKGDSAEARGNRLADQAAREAAIKTPPDTSTLL

SEQ ID NO: 8055 - protein, 671 aa, synthetic construct
TLNLEDEYRLYETSAEPEVSPGSTWLSDFPQAWAETGGMGLAVRQAPLIIPLKATSTPVSIKQYPMSQEAKLGIKPHIQRLLDQGILVPCQSPWNTPLLPVKKPGTNDYRPVQDLREVNKRVEDIHPTVPNPYNLLSGLPPSHRWYTVLDLKDAFFCLRLHPTSQPLFAFEWRDPGMGISGQLTWTRLPQGFKNSPTLFNEALHRDLADFRIQHPDLILLQYVDDILLAATSELDCQQGTRALLLTLGNLGYRASAKKAQLCQKQVKYLGYLLKEGQRWLTEARKETVMGQPTPKTPRQLREFLGKAGFCRLFIPGFAEMAAPLYPLTKPGTLFNWGPDQQKAYQEIKQALLTAPALGLPDLTKPFELFVDEKQGYAKGVLTQKLGPWRRPVAYLSKKLDPVAAGWPPCLRMVAAIAVLRKDAGKLTMGQPLVILAPHAVEALVKQPPDRWLSNARMTHYQAMLLDTDRVQFGPVVALNPATLLPLPEEGAPHDCLEILAETHGTRPDLTDQPIPDADHTWYTDGSSFLQEGQRKAGAAVTTETEVIWARALPAGTSAQRAELIALTQALKMAEGKRLNVYTDSRYAFATAHIHGEIYRRRGWLTSEGREIKNKSEILALLKALFLPKRLSIIHCLGHQKGDSAEARGNRLADQAAREAAIKTPPDTSTLL

SEQ ID NO: 8056 - protein, 671 aa, Murine leukemia virus
TLGIEDEYRLHETSTEPDVSLGSTWLSDFPQAWAETGGMGLAVRQAPLIIPLKATSTPVSIQQYPMSHEARLGIKPHIQRLLDQGILVPCQSPWNTPLLPVKKPGTNDYRPVQDLREVNKRVEDIHPTVPNPYNLLSGLPPSHQWYTVLDLKDAFFCLRLHPTSQPLFAFEWRDPGMGISGQLTWTRLPQGFKNSPTLFDEALHRDLADFRIQHPDLILLQYVDDILLAATSELDCQQGTRALLQTLGDLGYRASAKKAQICQKQVKYLGYLLREGQRWLTEARKETVMGQPVPKTPRQLREFLGTAGFCRLWIPGFAEMAAPLYPLTKTGTLFSWGPDQQKAYQEIKQALLTAPALGLPDLTKPFELFVDEKQGYAKGVLTQKLGPWRRPVAYLSKKLDPVAAGWPPCLRMVAAIAVLTKDAGKLTMGQPLVILAPHAVEALVKQPPDRWLSNARMTHYQAMLLDTDRVQFGPVVALNPATLLPLPEEGAPHDCLEILAETHGTRPDLTDQPIPDADHTWYTDGSSFLQEGQRKAGAAVTTETEVIWAGALPAGTSAQRAELIALTQALKMAEGKRLNVYTDSRYAFATAHIHGEIYRRRGLLTSEGREIKNKSEILALLKALFLPKRLSIIHCLGHQKGDSAEARGNRLADQAAREAAIKTPPDTSTLL

SEQ ID NO: 8057 - protein, 671 aa, Murine leukemia virus; identical to SEQ ID NO: 8056

SEQ ID NO: 8058 - protein, 671 aa, synthetic construct
TLGIEDEYRLHETSTEPDVSLGSTWLSDFPQAWAETGGMGLAVRQAPLIIPLKATSTPVSIQQYPMSHEARLGIKPHIQRLLDQGILVPCQSPWNTPLLPVKKPGTNDYRPVQDLREVNKRVEDIHPTVPNPYNLLSGLPPSHQWYTVLDLKDAFFCLRLHPTSQPLFAFEWRDPGMGISGQLTWTRLPQGFKNSPTLFNEALHRDLADFRIQHPDLILLQYVDDILLAATSELDCQQGTRALLQTLGDLGYRASAKKAQICQKQVKYLGYLLREGQRWLTEARKETVMGQPVPKTPRQLREFLGTAGFCRLWIPGFAEMAAPLYPLTKPGTLFSWGPDQQKAYQEIKQALLTAPALGLPDLTKPFELFVDEKQGYAKGVLTQKLGPWRRPVAYLSKKLDPVAAGWPPCLRMVAAIAVLTKDAGKLTMGQPLVILAPHAVEALVKQPPDRWLSNARMTHYQAMLLDTDRVQFGPVVALNPATLLPLPEEGAPHDCLEILAETHGTRPDLTDQPIPDADHTWYTDGSSFLQEGQRKAGAAVTTETEVIWAGALPAGTSAQRAELIALTQALKMAEGKRLNVYTDSRYAFATAHIHGEIYRRRGWLTSEGREIKNKSEILALLKALFLPKRLSIIHCLGHQKGDSAEARGNRLADQAAREAAIKTPPDTSTLL

SEQ ID NO: 8059 - protein, 671 aa, synthetic construct; identical to SEQ ID NO: 8058

SEQ ID NO: 8060 - protein, 671 aa, synthetic construct
LGIEDEYRLHETSTEPDVSLGSTWLSDFPQAWAETGGMGLAVRQAPLIIPLKATSTPVSIQQYPMSHEARLGIKPHIQRLLDQGILVPCQSPWNTPLLPVKKPGTNDYRPVQDLREVNKRVEDIHPTVPNPYNLLSGLPPSHQWYTVLDLKDAFFCLRLHPTSQPLFAFEWRDPGMGISGQLTWTRLPQGFKNSPTLFNEALHRDLADFRIQHPDLILLQYVDDILLAATSELDCQQGTRALLQTLGDLGYRASAKKAQICQKQVKYLGYLLREGQRWLTEARKETVMGQPVPKTPRQLREFLGKAGFCRLFIPGFAEMAAPLYPLTKPGTLFSWGPDQQKAYQEIKQALLTAPALGLPDLTKPFELFVDEKQGYAKGVLTQKLGPWRRPVAYLSKKLDPVAAGWPPCLRMVAAIAVLTKDAGKLTMGQPLVILAPHAVEALVKQPPDRWLSNARMTHYQAMLLDTDRVQFGPVVALNPATLLPLPEEGAPHDCLEILAETHGTRPDLTDQPIPDADHTWYTDGSSFLQEGQRKAGAAVTTETEVIWAGALPAGTSAQRAELIALTQALKMAEGKRLNVYTDSRYAFATAHIHGEIYRRRGWLTSEGREIKNKSEILALLKALFLPKRLSIIHCLGHQKGDSAEARGNRLADQAAREAAIKTPPDTSTLLI

SEQ ID NO: 8061 - protein, 671 aa, synthetic construct; identical to SEQ ID NO: 8060

SEQ ID NO: 8062 - protein, 671 aa, unidentified
TLNIEDEYRLHETSKEPDVSLGSTWLSDFPQAWAETGGMGLAVRQAPLIIPLKATSTPVSIKQYPMSQEARLGIKPHIQRLLDQGILVPCQSPWNTPLLPVKKPGTNDYRPVQDLREVNKRVEDIHPTVPNPYNLLSGLPPSHQWYTVLDLKDAFFCLRLHPTSQPLFAFEWRDPEMGISGQLTWTRLPQGFKNSPTLFDEALHRDLAGFRIQHPDLILLQYVDDLLLAATSELDCQQGTRALLQTLGDLGYRASAKKAQICQKQVKYLGYLLKEGQRWLTEARKETVMGQPIPKTPRQLREFLGTAGFCRLWIPGFAEMAAPLYPLTKTGTLFNWGPDQQKAFQEIKQALLTAPALGLPDLTKPFELFVDEKQGYAKGVLTQKLGPWRRPVAYLSKKLDPVAAGWPPCLRMVAAIAVLTKDAGKLTMGQPLVILAPHAVEALVKQPPDRWLSNARMTHYQALLLDTDRVQFGPVVALNPATLLPLPEEGLQHDCLDILAEAHGTRSDLMDQPLPDADHTWYTDGSSFLQEGQRKAGAAVTTETEVIWARALPAGTSAQRAELIALTQALKMAEGKKLNVYTDSRYAFATAHIHGEIYRRRGLLTSEGKEIKNKDEILALLKALFLPKRLSIIHCPGHQKGNSAEARGNRMADQAAREVATRETPETSTLL

SEQ ID NO: 8063 - protein, 671 aa, synthetic construct
TLNIEDEYRLHETSKEPDVSLGSTWLSDFPQAWAETGGMGLAVRQAPLIIPLKATSTPVSIKQYPMSQEARLGIKPHIQRLLDQGILVPCQSPWNTPLLPVKKPGTNDYRPVQDLREVNKRVEDIHPTVPNPYNLLSGLPPSHQWYTVLDLKDAFFCLRLHPTSQPLFAFEWRDPEMGISGQLTWTRLPQGFKNSPTLFNEALHRDLAGFRIQHPDLILLQYVDDLLLAATSELDCQQGTRALLQTLGDLGYRASAKKAQICQKQVKYLGYLLKEGQRWLTEARKETVMGQPIPKTPRQLREFLGTAGFCRLWIPGFAEMAAPLYPLTKPGTLFNWGPDQQKAFQEIKQALLTAPALGLPDLTKPFELFVDEKQGYAKGVLTQKLGPWRRPVAYLSKKLDPVAAGWPPCLRMVAAIAVLTKDAGKLTMGQPLVILAPHAVEALVKQPPDRWLSNARMTHYQALLLDTDRVQFGPVVALNPATLLPLPEEGLQHDCLDILAEAHGTRSDLMDQPLPDADHTWYTDGSSFLQEGQRKAGAAVTTETEVIWARALPAGTSAQRAELIALTQALKMAEGKKLNVYTDSRYAFATAHIHGEIYRRRGWLTSEGKEIKNKDEILALLKALFLPKRLSIIHCPGHQKGNSAEARGNRMADQAAREVATRETPETSTLL

SEQ ID NO: 8064 - protein, 671 aa, synthetic construct
TLNIEDEYRLHETSKEPDVSLGSTWLSDFPQAWAETGGMGLAVRQAPLIIPLKATSTPVSIKQYPMSQEARLGIKPHIQRLLDQGILVPCQSPWNTPLLPVKKPGTNDYRPVQDLREVNKRVEDIHPTVPNPYNLLSGLPPSHQWYTVLDLKDAFFCLRLHPTSQPLFAFEWRDPEMGISGQLTWTRLPQGFKNSPTLFNEALHRDLAGFRIQHPDLILLQYVDDLLLAATSELDCQQGTRALLQTLGDLGYRASAKKAQICQKQVKYLGYLLKEGQRWLTEARKETVMGQPIPKTPRQLREFLGKAGFCRLFIPGFAEMAAPLYPLTKPGTLFNWGPDQQKAFQEIKQALLTAPALGLPDLTKPFELFVDEKQGYAKGVLTQKLGPWRRPVAYLSKKLDPVAAGWPPCLRMVAAIAVLTKDAGKLTMGQPLVILAPHAVEALVKQPPDRWLSNARMTHYQALLLDTDRVQFGPVVALNPATLLPLPEEGLQHDCLDILAEAHGTRSDLMDQPLPDADHTWYTDGSSFLQEGQRKAGAAVTTETEVIWARALPAGTSAQRAELIALTQALKMAEGKKLNVYTDSRYAFATAHIHGEIYRRRGWLTSEGKEIKNKDEILALLKALFLPKRLSIIHCPGHQKGNSAEARGNRMADQAAREVATRETPETSTLL

SEQ ID NO: 8065 - protein, 671 aa, unidentified
TLNIEDEYRLHETSKGPDVPLGSTWLSDFPQAWAETGGMGLAFRQAPLIISLKATSTPVSIKQYPMSQEARLGIKPHIQRLLDQGILVPCQSPWNTPLLPVKKPGTNDYRPVQDLREVNKRVEDIHPTVPNPYNLLSGLPPSHQWYTVLDLKDAFFCLRLHPTSQSLFAFEWKDPEMGISGQLTWTRLPQGFKNSPTLFDEALHRDLADFRIQHPDLILLQYVDDLLLAATSELDCQQGTRALLQTLGDLGYRASAKKAQICQKQVKYLGYLLKEGQRWLTEARKETVMGQPTPKTPRQLREFLGTAGLCRLWIPGFAEMAAPLYPLTKTGTLFKWGPDQQKAYQEIKQALLTAPALGLPDLTKPFELFVDEKQGYAKGVLTQKLGPWRRPVAYLSKKLDPVAAGWPPCLRMVAAIAVLTKDVGKLTMGQPLVILAPHAVEALVKQPPDRWLSNARMTHYQALLLDTDRVQFGPIVALNPATLLPLPEEGLQHDCLDILAEAHGTRPDLTDQPLPDADHTWYTDGSSFLQEGQRRAGAAVTTETEVIWAKALPAGTSAQRAELIALTQALKMAAGKKLNVYTDSRYAFATAHIHGEIYRRRGLLTSEGKEIKNKDEILALLKALFLPKRLSIIHCPGHQKGNHAEARGNRMADQAAREVATRETPETSTLL

SEQ ID NO: 8066 - protein, 671 aa, synthetic construct
TLNIEDEYRLHETSKGPDVPLGSTWLSDFPQAWAETGGMGLAFRQAPLIISLKATSTPVSIKQYPMSQEARLGIKPHIQRLLDQGILVPCQSPWNTPLLPVKKPGTNDYRPVQDLREVNKRVEDIHPTVPNPYNLLSGLPPSHQWYTVLDLKDAFFCLRLHPTSQSLFAFEWKDPEMGISGQLTWTRLPQGFKNSPTLFNEALHRDLADFRIQHPDLILLQYVDDLLLAATSELDCQQGTRALLQTLGDLGYRASAKKAQICQKQVKYLGYLLKEGQRWLTEARKETVMGQPTPKTPRQLREFLGTAGLCRLWIPGFAEMAAPLYPLTKPGTLFKWGPDQQKAYQEIKQALLTAPALGLPDLTKPFELFVDEKQGYAKGVLTQKLGPWRRPVAYLSKKLDPVAAGWPPCLRMVAAIAVLTKDVGKLTMGQPLVILAPHAVEALVKQPPDRWLSNARMTHYQALLLDTDRVQFGPIVALNPATLLPLPEEGLQHDCLDILAEAHGTRPDLTDQPLPDADHTWYTDGSSFLQEGQRRAGAAVTTETEVIWAKALPAGTSAQRAELIALTQALKMAAGKKLNVYTDSRYAFATAHIHGEIYRRRGWLTSEGKEIKNKDEILALLKALFLPKRLSIIHCPGHQKGNHAEARGNRMADQAAREVATRETPETSTLL

SEQ ID NO: 8067 - protein, 671 aa, synthetic construct
TLNIEDEYRLHETSKGPDVPLGSTWLSDFPQAWAETGGMGLAFRQAPLIISLKATSTPVSIKQYPMSQEARLGIKPHIQRLLDQGILVPCQSPWNTPLLPVKKPGTNDYRPVQDLREVNKRVEDIHPTVPNPYNLLSGLPPSHQWYTVLDLKDAFFCLRLHPTSQSLFAFEWKDPEMGISGQLTWTRLPQGFKNSPTLFNEALHRDLADFRIQHPDLILLQYVDDLLLAATSELDCQQGTRALLQTLGDLGYRASAKKAQICQKQVKYLGYLLKEGQRWLTEARKETVMGQPTPKTPRQLREFLGKAGLCRLFIPGFAEMAAPLYPLTKPGTLFKWGPDQQKAYQEIKQALLTAPALGLPDLTKPFELFVDEKQGYAKGVLTQKLGPWRRPVAYLSKKLDPVAAGWPPCLRMVAAIAVLTKDVGKLTMGQPLVILAPHAVEALVKQPPDRWLSNARMTHYQALLLDTDRVQFGPIVALNPATLLPLPEEGLQHDCLDILAEAHGTRPDLTDQPLPDADHTWYTDGSSFLQEGQRRAGAAVTTETEVIWAKALPAGTSAQRAELIALTQALKMAAGKKLNVYTDSRYAFATAHIHGEIYRRRGWLTSEGKEIKNKDEILALLKALFLPKRLSIIHCPGHQKGNHAEARGNRMADQAAREVATRETPETSTLL

SEQ ID NO: 8068 - protein, 671 aa, synthetic construct
TLNIEDEYRLHETSKGPDVPLGSTWLSDFPQAWAETGGMGLAVRQAPLIIPLKATSTPVSIKQYPMSQEARLGIKPHIQRLLDQGILVPCQSPWNTPLLPVKKPGTNDYRPVQDLREVNKRVEDIHPTVPNPYNLLSGLPPSHQWYTVLDLKDAFFCLRLHPTSQSLFAFEWRDPEMGISGQLTWTRLPQGFKNSPTLFNEALHRDLADFRIQHPDLILLQYVDDLLLAATSELDCQQGTRALLQTLGDLGYRASAKKAQICQKQVKYLGYLLKEGQRWLTEARKETVMGQPTPKTPRQLREFLGTAGFCRLWIPGFAEMAAPLYPLTKPGTLFEWGPDQQKAYQEIKQALLTAPALGLPDLTKPFELFVDEKQGYAKGVLTQKLGPWRRPVAYLSKKLDPVAAGWPPCLRMVAAIAVLTKDAGKLTMGQPLVILAPHAVEALVKQPPDRWLSNARMTHYQALLLDTDRVQFGPIVALNPATLLPLPEEGLQHDCLDILAEAHGTRPDLTDQPLPDADHTWYTDGSSFLQEGQRKAGAAVTTETEVVWAKALPAGTSAQRAELIALTQALKMAEGKKLNVYTDSRYAFATAHIHGEIYRRRGWLTSEGKEIKNKDEILALLKALFLPKRLSIIHCPGHQKGNRAEARGNRMADQAAREVATRETPETSTLL

SEQ ID NO: 8069 - protein, 671 aa, synthetic construct
TLNIEDEYRLHETSKGPDVPLGSTWLSDFPQAWAETGGMGLAVRQAPLIIPLKATSTPVSIKQYPMSQEARLGIKPHIQRLLDQGILVPCQSPWNTPLLPVKKPGTNDYRPVQDLREVNKRVEDIHPTVPNPYNLLSGLPPSHQWYTVLDLKDAFFCLRLHPTSQSLFAFEWRDPEMGISGQLTWTRLPQGFKNSPTLFNEALHRDLADFRIQHPDLILLQYVDDLLLAATSELDCQQGTRALLQTLGDLGYRASAKKAQICQKQVKYLGYLLKEGQRWLTEARKETVMGQPTPKTPRQLREFLGKAGFCRLFIPGFAEMAAPLYPLTKPGTLFEWGPDQQKAYQEIKQALLTAPALGLPDLTKPFELFVDEKQGYAKGVLTQKLGPWRRPVAYLSKKLDPVAAGWPPCLRMVAAIAVLTKDAGKLTMGQPLVILAPHAVEALVKQPPDRWLSNARMTHYQALLLDTDRVQFGPIVALNPATLLPLPEEGLQHDCLDILAEAHGTRPDLTDQPLPDADHTWYTDGSSFLQEGQRKAGAAVTTETEVVWAKALPAGTSAQRAELIALTQALKMAEGKKLNVYTDSRYAFATAHIHGEIYRRRGWLTSEGKEIKNKDEILALLKALFLPKRLSIIHCPGHQKGNRAEARGNRMADQAAREVATRETPETSTLL

SEQ ID NO: 8070 - protein, 671 aa, Murine leukemia virus; identical to SEQ ID NO: 5003

SEQ ID NO: 8071 - protein, 671 aa, Murine leukemia virus; identical to SEQ ID NO: 5003

SEQ ID NO: 8072 - protein, 671 aa, synthetic construct
TLNIEDEHRLHETSKEPDVSLGSTWLSDFPQAWAETGGMGLAVRQAPLIIPLKATSTPVSIKQYPMSQEARLGIKPHIQRLLDQGILVPCQSPWNTPLLPVKKPGTNDYRPVQDLREVNKRVEDIHPTVPNPYNLLSGLPPSHQWYTVLDLKDAFFCLRLHPTSQPLFAFEWRDPEMGISGQLTWTRLPQGFKNSPTLFNEALHRDLADFRIQHPDLILLQYVDDLLLAATSELDCQQGTRALLQTLGNLGYRASAKKAQICQKQVKYLGYLLKEGQRWLTEARKETVMGQPTPKTPRQLREFLGTAGFCRLWIPGFAEMAAPLYPLTKPGTLFNWGPDQQKAYQEIKQALLTAPALGLPDLTKPFELFVDEKQGYAKGVLTQKLGPWRRPVAYLSKKLDPVAAGWPPCLRMVAAIAVLTKDAGKLTMGQPLVILAPHAVEALVKQPPDRWLSNARMTHYQALLLDTDRVQFGPVVALNPATLLPLPEEGLQHNCLDILAEAHGTRPDLTDQPLPDADHTWYTDGSSLLQEGQRKAGAAVTTETEVIWAKALPAGTSAQRAELIALTQALKMAEGKKLNVYTDSRYAFATAHIHGEIYRRRGWLTSEGKEIKNKDEILALLKALFLPKRLSIIHCPGHQKGHSAEARGNRMADQAARKAAITETPDTSTLL

SEQ ID NO: 8073 - protein, 671 aa, synthetic construct; identical to SEQ ID NO: 8072

SEQ ID NO: 8074 - protein, 671 aa, synthetic construct
TLNIEDEHRLHETSKEPDVSLGSTWLSDFPQAWAETGGMGLAVRQAPLIIPLKATSTPVSIKQYPMSQEARLGIKPHIQRLLDQGILVPCQSPWNTPLLPVKKPGTNDYRPVQDLREVNKRVEDIHPTVPNPYNLLSGLPPSHQWYTVLDLKDAFFCLRLHPTSQPLFAFEWRDPEMGISGQLTWTRLPQGFKNSPTLFNEALHRDLADFRIQHPDLILLQYVDDLLLAATSELDCQQGTRALLQTLGNLGYRASAKKAQICQKQVKYLGYLLKEGQRWLTEARKETVMGQPTPKTPRQLREFLGKAGFCRLFIPGFAEMAAPLYPLTKPGTLFNWGPDQQKAYQEIKQALLTAPALGLPDLTKPFELFVDEKQGYAKGVLTQKLGPWRRPVAYLSKKLDPVAAGWPPCLRMVAAIAVLTKDAGKLTMGQPLVILAPHAVEALVKQPPDRWLSNARMTHYQALLLDTDRVQFGPVVALNPATLLPLPEEGLQHNCLDILAEAHGTRPDLTDQPLPDADHTWYTDGSSLLQEGQRKAGAAVTTETEVIWAKALPAGTSAQRAELIALTQALKMAEGKKLNVYTDSRYAFATAHIHGEIYRRRGWLTSEGKEIKNKDEILALLKALFLPKRLSIIHCPGHQKGHSAEARGNRMADQAARKAAITETPDTSTLL

SEQ ID NO: 8075 - protein, 671 aa, synthetic construct; identical to SEQ ID NO: 8074

SEQ ID NO: 8076 - protein, 691 aa, synthetic construct
TLNIEDEYRLHETSKEPDVSLGSTWLSDFPQAWAETGGMGLAVRQAPLIIPLKATSTPVSIKQYPMSQEARLGIKPHIQRLLDQGILVPCQSPWNTPLLPVKKPGTNDYRPVQDLREVNKRVEDIHPTVPNPYNLLSGLPPSHQWYTVLDLKDAFFCLRLHPTSQPLFAFEWRDPEMGISGQLTWTRLPQGFKNSPTLFNEALHRDLADFRIQHPDLILLQYVDDLLLAATSELDCQQGTRALLQTLGNLGYRASAKKAQICQKQVKYLGYLLKEGQRWLTEARKETVMGQPTPKTPRQLREFLGKAGFCRLFIPGFAEMAAPLYPLTKPGTLFNWGPDQQKAYQEIKQALLTAPALGLPDLTKPFELFVDEKQGYAKGVLTQKLGPWRRPVAYLSKKLDPVAAGWPPCLRMVAAIAVLTKDAGKLTMGQPLVILAPHAVEALVKQPPDRWLSNARMTHYQALLLDTDRVQFGPVVALNPATLLPLPEEGLQHNCLDILAEAHGTRPDLTDQPLPDADHTWYTDGSSLLQEGQRKAGAAVTTETEVIWAKALPAGTSAQRAELIALTQALKMAEGKKLNVYTDSRYAFATAHIHGEIYRRRGWLTSEGKEIKNKDEILALLKALFLPKRLSIIHCPGHQKGHSAEARGNRMADQAARKAAITETPDTSTLLIENSSPSGGSKRTADGSEFE

SEQ ID NO: 8077 - protein, 691 aa, synthetic construct; identical to SEQ ID NO: 8076

SEQ ID NO: 8078 - protein, 671 aa, unidentified
TLNIEDEYRLHEISTEPDVSPGSTWLSDFPQAWAETGGMGLAVRQAPLIIPLKATSTPVSIKQYPMSQEAKLGIKPHIQRLLDQGILVPCQSPWNTPLLPVKKPGTNDYRPVQGLREVNKRVEDIHPTVPNPYNLLSGLPTSHRWYTVLDLKDAFFCLRLHPTSQPLFASEWRDPGMGISGQLTWTRLPQGFKNSPTLFDEALHRGLADFRIQHPDLILLQYVDDLLLAATSELDCQQGTRALLKTLGNLGYRASAKKAQICQKQVKYLGYLLREGQRWLTEARKETVMGQPTPKTPRQLREFLGTAGFCRLWIPRFAEMAAPLYPLTKTGTLFNWGPDQQKAYHEIKQALLTAPALGLPDLTKPFELFVDEKQGYAKGVLTQKLGPWRRPVAYLSKKLDPVAAGWPPCLRMVAAIAVLTKDAGKLTMGQPLVILAPHAVEALVKQPPDRWLSNARMTHYQAMLLDTDRVQFGPVVALNPATLLPLPEEGAPHDCLEILAETHGTEPDLTDQPIPDADHTWYTDGSSFLQEGQRKAGAAVTTETEVIWARALPAGTSAQRAELIALTQALKMAEGKRLNVYTDSRYAFATAHIHGEIYKRRGLLTSEGREIKNKSEILALLKALFLPKRLSIIHCLGHQKGDSAEARGNRLADQAAREAAIKTPPDTSTLL

SEQ ID NO: 8079 - protein, 671 aa, synthetic construct
TLNIEDEYRLHEISTEPDVSPGSTWLSDFPQAWAETGGMGLAVRQAPLIIPLKATSTPVSIKQYPMSQEAKLGIKPHIQRLLDQGILVPCQSPWNTPLLPVKKPGTNDYRPVQGLREVNKRVEDIHPTVPNPYNLLSGLPTSHRWYTVLDLKDAFFCLRLHPTSQPLFASEWRDPGMGISGQLTWTRLPQGFKNSPTLFNEALHRGLADFRIQHPDLILLQYVDDLLLAATSELDCQQGTRALLKTLGNLGYRASAKKAQICQKQVKYLGYLLREGQRWLTEARKETVMGQPTPKTPRQLREFLGTAGFCRLWIPRFAEMAAPLYPLTKPGTLFNWGPDQQKAYHEIKQALLTAPALGLPDLTKPFELFVDEKQGYAKGVLTQKLGPWRRPVAYLSKKLDPVAAGWPPCLRMVAAIAVLTKDAGKLTMGQPLVILAPHAVEALVKQPPDRWLSNARMTHYQAMLLDTDRVQFGPVVALNPATLLPLPEEGAPHDCLEILAETHGTEPDLTDQPIPDADHTWYTDGSSFLQEGQRKAGAAVTTETEVIWARALPAGTSAQRAELIALTQALKMAEGKRLNVYTDSRYAFATAHIHGEIYKRRGWLTSEGREIKNKSEILALLKALFLPKRLSIIHCLGHQKGDSAEARGNRLADQAAREAAIKTPPDTSTLL

SEQ ID NO: 8080 - protein, 691 aa, Mouse mammary tumor virus
WVQEISDSRPMLHIYLNGRRFLGLLNTGADKTCIAGRDWPANWPIHQTESSLQGLGMACGVARSSQPLRWQHEDKSGIIHPFVIPTLPFTLWGRDIMKDIKVRLMTDSPDDSQDLMIGAIESNLFADQISWKSDQPVWLNQWPLKQEKLQALQQLVTEQLQLGHLEESNSPWNTPVFVIKKKSGKWRLLQDLRAVNATMHDMGALQPGLPSPVAVPKGWEIIIIDLQDCFFNIKLHPEDCKRFAFSVPSPNFKRPYQRFQWKVLPQGMKNSPTLCQKFVDKAILTVRDKYQDSYIVHYMDDILLAHPSRSIVDEILTSMIQALNKHGLVVSTEKIQKYDNLKYLGTHIQGDSVSYQKLQIRTDKLRTLNDFQKLLGNINWIRPFLKLTTGELKPLFEILNGDSNPISTRKLTPEACKALQLMNERLSTARVKRLDLSQPWSLCILKTEYTPTACLWQDGVVEWIHLPHISPKVITPYDIFCTQLIIKGRHRSKELFSKDPDYIVVPYTKVQFDLLLQEKEDWPISLLGFLGEVHFHLPKDPLLTFTLQTAIIFPHMTSTTPLEKGIVIFTDGSANGRSVTYIQGREPIIKENTQNTAQQAEIVAVITAFEEVSQPFNLYTDSKYVTGLFPEIETATLSPRTKIYTELKHLQRLIHKRQEKFYIGHIRGHTGLPGPLAQGNAYADSLTRILT

SEQ ID NO: 8081 - protein, 691 aa, Mouse mammary tumor virus; identical to SEQ ID NO: 8080

SEQ ID NO: 8082 - protein, 691 aa, synthetic construct
WVQEISDSRPMLHIYLNGRRFLGLLNTGADKTCIAGRDWPANWPIHQTESSLQGLGMACGVARSSQPLRWQHEDKSGIIHPFVIPTLPFTLWGRDIMKDIKVRLMTDSPDDSQDLMIGAIESNLFADQISWKSDQPVWLNQWPLKQEKLQALQQLVTEQLQLGHLEESNSPWNTPVFVIKKKSGKWRLLQDLRAVNATMHDMGALQPGLPSPVAVPKGWEIIIIDLQDCFFNIKLHPEDCKRFAFSVPSPNFKRPYQRFQWKVLPQGMKNSPTLCQKFVDKAILTVRDKYQDSYIVHYMDDILLAHPSRSIVDEILTSMIQALNKHGLVVSTEKIQKYDNLKYLGTHIQGDSVSYQKLQIRTDKLRTLNDFQKLLGNINWIRPFLKLTTGELKPLFEILNPDSNPISTRKLTPEACKALQLMNERLSTARVKRLDLSQPWSLCILKTEYTPTACLWQDGVVEWIHLPHISPKVITPYDIFCTQLIIKGRHRSKELFSKDPDYIVVPYTKVQFDLLLQEKEDWPISLLGFLGEVHFHLPKDPLLTFTLQTAIIFPHMTSTTPLEKGIVIFTDGSANGRSVTYIQGREPIIKENTQNTAQQAEIVAVITAFEEVSQPFNLYTDSKYVTGLFPEIETATLSPRTKIYTELKHLQRLIHKRQEKFYIGHIRGHTGLPGPLAQGNAYADSLTRILT

SEQ ID NO: 8083 - protein, 691 aa, synthetic construct
VQEISDSRPMLHIYLNGRRFLGLLDTGADKTCIAGRDWPANWPIHQTESSLQGLGMACGVARSSQPLRWQHEDKSGIIHPFVIPTLPFTLWGRDIMKDIKVRLMTDSPDDSQDLMIGAIESNLFADQISWKSDQPVWLNQWPLKQEKLQALQQLVTEQLQLGHLEESNSPWNTPVFVIKKKSGKWRLLQDLRAVNATMHDMGALQPGLPSPVAVPKGWEIIIIDLQDCFFNIKLHPEDCKRFAFSVPSPNFKRPYQRFQWKVLPQGMKNSPTLCQKFVDKAILTVRDKYQDSYIVHYMDDILLAHPSRSIVDEILTSMIQALNKHGLVVSTEKIQKYDNLKYLGTHIQGDSVSYQKLQIRTDKLRTLNDFQKLLGNINWIRPFLKLTTGELKPLFEILNPDSNPISTRKLTPEACKALQLMNERLSTARVKRLDLSQPWSLCILKTEYTPTACLWQDGVVEWIHLPHISPKVITPYDIFCTQLIIKGRHRSKELFSKDPDYIVVPYTKVQFDLLLQEKEDWPISLLGFLGEVHFHLPKDPLLTFTLQTAIIFPHMTSTTPLEKGIVIFTDGSANGRSVTYIQGREPIIKENTQNTAQQAEIVAVITAFEEVSQPFNLYTDSKYVTGLFPEIETATLSPRTKIYTELKHLQRLIHKRQEKFYIGHIRGHTGLPGPLAQGNAYADSLTRILTA

SEQ ID NO: 8084 - protein, 691 aa, synthetic construct; identical to SEQ ID NO: 8083

SEQ ID NO: 8085 - protein, 691 aa, synthetic construct
WVQEISDSRPMLHIYLNGRRFLGLLNTGADKTCIAGRDWPANWPIHQTESSLQGLGMACGVARSSQPLRWQHEDKSGIIHPFVIPTLPFTLWGRDIMKDIKVRLMTDSPDDSQDLMIGAIESNLFADQISWKSDQPVWLNQWPLKQEKLQALQQLVTEQLQLGHLEESNSPWNTPVFVIKKKSGKWRLLQDLRAVNATMHDMGALQPGLPSPVAPPKGWEIIIIDLQDCFFNIKLHPEDCKRFAFSVPSPNFKRPYQRFQWKVLPQGMKNSPTLCQKFVDKAILTVRDKYQDSYIVHYMDDILLAHPSRSIVDEILTSMIQALNKHGLVVSTEKIQKYDNLKYLGTHIQGDSVSYQKLQIRTDKLRTLNDFQKLLGNINWIRPFLKLTTGELKPLFEILNPDSNPISTRKLTPEACKALQLMNERLSTARVKRLDLSQPWSLCILKTEYTPTACLWQDGVVEWIHLPHISPKVITPYDIFCTQLIIKGRHRSKELFSKDPDYIVVPYTKVQFDLLLQEKEDWPISLLGFLGEVHFHLPKDPLLTFTLQTAIIFPHMTSTTPLEKGIVIFTDGSANGRSVTYIQGREPIIKENTQNTAQQAEIVAVITAFEEVSQPFNLYTDSKYVTGLFPEIETATLSPRTKIYTELKHLQRLIHKRQEKFYIGHIRGHTGLPGPLAQGNAYADSLTRILT

SEQ ID NO: 8086 - protein, 691 aa, synthetic construct; identical to SEQ ID NO: 8085

SEQ ID NO: 8087 - protein, 691 aa, synthetic construct
VQEISDSRPMLHIYLNGRRFLGLLDTGADKTCIAGRDWPANWPIHQTESSLQGLGMACGVARSSQPLRWQHEDKSGIIHPFVIPTLPFTLWGRDIMKDIKVRLMTDSPDDSQDLMIGAIESNLFADQISWKSDQPVWLNQWPLKQEKLQALQQLVTEQLQLGHLEESNSPWNTPVFVIKKKSGKWRLLQDLRAVNATMHDMGALQPGLPSPPAVPKGWEIIIIDLQDCFFNIKLHPEDCKRFAFSVPSPNFKRPYQRFQWKVLPQGMKNSPTLCQKFVDKAILTVRDKYQDSYIVHYMDDILLAHPSRSIVDEILTSMIQALNKHGLVVSTEKIQKYDNLKYLGTHIQGDSVSYQKLQIRTDKLRTLNDFQKLLGNINWIRPFLKLTTGELKPLFEILNPDSNPISTRKLTPEACKALQLMNERLSTARVKRLDLSQPWSLCILKTEYTPTACLWQDGVVEWIHLPHISPKVITPYDIFCTQLIIKGRHRSKELFSKDPDYIVVPYTKVQFDLLLQEKEDWPISLLGFLGEVHFHLPKDPLLTFTLQTAIIFPHMTSTTPLEKGIVIFTDGSANGRSVTYIQGREPIIKENTQNTAQQAEIVAVITAFEEVSQPFNLYTDSKYVTGLFPEIETATLSPRTKIYTELKHLQRLIHKRQEKFYIGHIRGHTGLPGPLAQGNAYADSLTRILTA

SEQ ID NO: 8088 - protein, 691 aa, synthetic construct; identical to SEQ ID NO: 8087

SEQ ID NO: 8089 - protein, 691 aa, Mouse mammary tumor virus
VQEISDSRPMLHIYLNGRRFLGLLDTGADKTCIAGRDWPANWPIHQTESSLQGLGMACGVARSSQPLRWQHEDKSGIIHPFVIPTLPFTLWGRDIMKDIKVRLMTDSPDDSQDLMIGAIESNLFADQISWKSDQPVWLNQWPLKQEKLQALQQLVTEQLQLGHLEESNSPWNTPVFVIKKKSGKWRLLQDLRAVNATMHDMGALQPGLPSPVAVPKGWEIIIIDLQDCFFNIKLHPEDCKRFAFSVPSPNFKRPYQRFQWKVLPQGMKNSPTLCQKFVDKAILTVRDKYQDSYIVHYMDDILLAHPSRSIVDEILTSMIQALNKHGLVVSTEKIQKYDNLKYLGTHIQGDSVSYQKLQIRTDKLRTLNDFQKLLGNINWIRPFLKLTTGELKPLFEILNGDSNPISTRKLTPEACKALQLMNERLSTARVKRLDLSQPWSLCILKTEYTPTACLWQDGVVEWIHLPHISPKVITPYDIFCTQLIIKGRHRSKELFSKDPDYIVVPYTKVQFDLLLQEKEDWPISLLGFLGEVHFHLPKDPLLTFTLQTAIIFPHMTSTTPLEKGIVIFTDGSANGRSVTYIQGREPIIKENTQNTAQQAEIVAVITAFEEVSQPFNLYTDSKYVTGLFPEIETATLSPRTKIYTELKHLQRLIHKRQEKFYIGHIRGHTGLPGPLAQGNAYADSLTRILTA

SEQ ID NO: 8090 - protein, 691 aa, Mouse mammary tumor virus; identical to SEQ ID NO: 8089

SEQ ID NO: 8091 - protein, 599 aa, Mouse mammary tumor virus
GRDIMKDIKVRLMTDSPDDSQDLMIGAIESNLFADQISWKSDQPVWLNQWPLKQEKLQALQQLVTEQLQLGHLEESNSPWNTPVFVIKKKSGKWRLLQDLRAVNATMHDMGALQPGLPSPVAVPKGWEIIIIDLQDCFFNIKLHPEDCKRFAFSVPSPNFKRPYQRFQWKVLPQGMKNSPTLCQKFVDKAILTVRDKYQDSYIVHYMDDILLAHPSRSIVDEILTSMIQALNKHGLVVSTEKIQKYDNLKYLGTHIQGDSVSYQKLQIRTDKLRTLNDFQKLLGNINWIRPFLKLTTGELKPLFEILNGDSNPISTRKLTPEACKALQLMNERLSTARVKRLDLSQPWSLCILKTEYTPTACLWQDGVVEWIHLPHISPKVITPYDIFCTQLIIKGRHRSKELFSKDPDYIVVPYTKVQFDLLLQEKEDWPISLLGFLGEVHFHLPKDPLLTFTLQTAIIFPHMTSTTPLEKGIVIFTDGSANGRSVTYIQGREPIIKENTQNTAQQAEIVAVITAFEEVSQPFNLYTDSKYVTGLFPEIETATLSPRTKIYTELKHLQRLIHKRQEKFYIGHIRGHTGLPGPLAQGNAYADSLTRILT

SEQ ID NO: 8092 - protein, 599 aa, Mouse mammary tumor virus; identical to SEQ ID NO: 8091

SEQ ID NO: 8093 - protein, 599 aa, synthetic construct
GRDIMKDIKVRLMTDSPDDSQDLMIGAIESNLFADQISWKSDQPVWLNQWPLKQEKLQALQQLVTEQLQLGHLEESNSPWNTPVFVIKKKSGKWRLLQDLRAVNATMHDMGALQPGLPSPVAVPKGWEIIIIDLQDCFFNIKLHPEDCKRFAFSVPSPNFKRPYQRFQWKVLPQGMKNSPTLCQKFVDKAILTVRDKYQDSYIVHYMDDILLAHPSRSIVDEILTSMIQALNKHGLVVSTEKIQKYDNLKYLGTHIQGDSVSYQKLQIRTDKLRTLNDFQKLLGNINWIRPFLKLTTGELKPLFEILNPDSNPISTRKLTPEACKALQLMNERLSTARVKRLDLSQPWSLCILKTEYTPTACLWQDGVVEWIHLPHISPKVITPYDIFCTQLIIKGRHRSKELFSKDPDYIVVPYTKVQFDLLLQEKEDWPISLLGFLGEVHFHLPKDPLLTFTLQTAIIFPHMTSTTPLEKGIVIFTDGSANGRSVTYIQGREPIIKENTQNTAQQAEIVAVITAFEEVSQPFNLYTDSKYVTGLFPEIETATLSPRTKIYTELKHLQRLIHKRQEKFYIGHIRGHTGLPGPLAQGNAYADSLTRILT

SEQ ID NO: 8094 - protein, 599 aa, synthetic construct; identical to SEQ ID NO: 8093

SEQ ID NO: 8095 - protein, 599 aa, synthetic construct
GRDIMKDIKVRLMTDSPDDSQDLMIGAIESNLFADQISWKSDQPVWLNQWPLKQEKLQALQQLVTEQLQLGHLEESNSPWNTPVFVIKKKSGKWRLLQDLRAVNATMHDMGALQPGLPSPVAPPKGWEIIIIDLQDCFFNIKLHPEDCKRFAFSVPSPNFKRPYQRFQWKVLPQGMKNSPTLCQKFVDKAILTVRDKYQDSYIVHYMDDILLAHPSRSIVDEILTSMIQALNKHGLVVSTEKIQKYDNLKYLGTHIQGDSVSYQKLQIRTDKLRTLNDFQKLLGNINWIRPFLKLTTGELKPLFEILNPDSNPISTRKLTPEACKALQLMNERLSTARVKRLDLSQPWSLCILKTEYTPTACLWQDGVVEWIHLPHISPKVITPYDIFCTQLIIKGRHRSKELFSKDPDYIVVPYTKVQFDLLLQEKEDWPISLLGFLGEVHFHLPKDPLLTFTLQTAIIFPHMTSTTPLEKGIVIFTDGSANGRSVTYIQGREPIIKENTQNTAQQAEIVAVITAFEEVSQPFNLYTDSKYVTGLFPEIETATLSPRTKIYTELKHLQRLIHKRQEKFYIGHIRGHTGLPGPLAQGNAYADSLTRILT

SEQ ID NO: 8096 - protein, 599 aa, synthetic construct; identical to SEQ ID NO: 8095

SEQ ID NO: 8097 - protein, 585 aa, Mason-Pfizer monkey virus
LTAAIDILAPQQCAEPITWKSDEPVWVDQWPLTNDKLAAAQQLVQEQLEAGHITESSSPWNTPIFVIKKKSGKWRLLQDLRAVNATMVLMGALQPGLPSPVAIPQGYLKIIIDLKDCFFSIPLHPSDQKRFAFSLPSTNFKEPMQRFQWKVLPQGMANSPTLCQKYVATAIHKVRHAWKQMYIIHYMDDILIAGKDGQQVLQCFDQLKQELTAAGLHIAPEKVQLQDPYTYLGFELNGPKITNQKAVIRKDKLQTLNDFQKLLGDINWLRPYLKLTTGDLKPLFDTLKGDSDPNSHRSLSKEALASLEKVETAIAEQFVTHINYSLPLIFLIFNTALTPTGLFWQDNPIMWIHLPASPKKVLLPYYDAIADLIILGRDHSKKYFGIEPSTIIQPYSKSQIDWLMQNTEMWPIACASFVGILDNHYPPNKLIQFCKLHTFVFPQIISKTPLNNALLVFTDGSSTGMAAYTLTDTTIKFQTNLNSAQLVELQALIAVLSAFPNQPLNIYTDSAYLAHSIPLLETVAQIKHISETAKLFLQCQQLIYNRSIPFYIGHVRAHSGLPGPIAQGNQRADLATKIVASNINT

SEQ ID NO: 8098 - protein, 585 aa, synthetic construct
LTAAIDILAPQQCAEPITWKSDEPVWVDQWPLTNDKLAAAQQLVQEQLEAGHITESSSPWNTPIFVIKKKSGKWRLLQDLRAVNATMVLMGALQPGLPSPVAPPQGYLKIIIDLKDCFFSIPLHPSDQKRFAFSLPSTNFKEPMQRFQWKVLPQGMANSPTLCQKYVATAIHKVRHAWKQMYIIHYMDDILIAGKDGQQVLQCFDQLKQELTAAGLHIAPEKVQLQDPYTYLGFELNGPKITNQKAVIRKDKLQTLNDFQKLLGDINWLRPYLKLTTGDLKPLFDTLKPDSDPNSHRSLSKEALASLEKVETAIAEQFVTHINYSLPLIFLIFNTALTPTGLFWQDNPIMWIHLPASPKKVLLPYYDAIADLIILGRDHSKKYFGIEPSTIIQPYSKSQIDWLMQNTEMWPIACASFVGILDNHYPPNKLIQFCKLHTFVFPQIISKTPLNNALLVFTDGSSTGMAAYTLTDTTIKFQTNLNSAQLVELQALIAVLSAFPNQPLNIYTDSAYLAHSIPLLETVAQIKHISETAKLFLQCQQLIYNRSIPFYIGHVRAHSGLPGPIAQGNQRADLATKIVASNINT

SEQ ID NO: 8099 - protein, 665 aa, unidentified
TLQLDDEYRLYSPLVKPDQNIQFWLEQFPQAWAETAGMGLAKQVPPQVIQLKASATPVSVRQYPLSKEAQEGIRPHVQRLIQQGILVPVQSPWNTPLLPVRKPGTNDYRPVQDLREVNKRVQDIHPTVPNPYNLLCALPPQRSWYTVLDLKDAFFCLRLHPTSQPLFAFEWRDPGTGRTGQLTWTRLPQGFKNSPTIFDEALHRDLANFRIQHPQVTLLQYVDDLLLAGATKQDCLEGTKALLLELSDLGYRASAKKAQICRREVTYLGYSLRDGQRWLTEARKKTVVQIPAPTTAKQVREFLGTAGFCRLWIPGFATLAAPLYPLTKEKGEFSWAPEHQKAFDAIKKALLSAPALALPDVTKPFTLYVDERKGVARGVLTQTLGPWRRPVAYLSKKLDPVASGWPVCLKAIAAVAILVKDADKLTLGQNITVIAPHALENIVRQPPDRWMTNARMTHYQSLLLTERVTFAPPAALNPATLLPEETDEPVTHDCHQLLIEETGVRKDLTDIPLTGEVLTWFTDGSSYVVEGKRMAGAAVVDGTRTIWASSLPEGTSAQKAELMALTQALRLAEGKSINIYTDSRYAFATAHVHGAIYKQRGLLTSAGREIKNKEEILSLLEALHLPKRLAIIHCPGHQKAKDPISRGNQMADRVAKQAAQGVNLL

SEQ ID NO: 8100 - protein, 665 aa, unidentified; identical to SEQ ID NO: 8099

SEQ ID NO: 8101 - protein, 665 aa, synthetic construct
TLQLDDEYRLYSPLVKPDQNIQFWLEQFPQAWAETAGMGLAKQVPPQVIQLKASATPVSVRQYPLSKEAQEGIRPHVQRLIQQGILVPVQSPWNTPLLPVRKPGTNDYRPVQDLREVNKRVQDIHPTVPNPYNLLCALPPQRSWYTVLDLKDAFFCLRLHPTSQPLFAFEWRDPGTGRTGQLTWTRLPQGFKNSPTIFNEALHRDLANFRIQHPQVTLLQYVDDLLLAGATKQDCLEGTKALLLELSDLGYRASAKKAQICRREVTYLGYSLRDGQRWLTEARKKTVVQIPAPTTAKQVREFLGTAGFCRLWIPGFATLAAPLYPLTKPKGEFSWAPEHQKAFDAIKKALLSAPALALPDVTKPFTLYVDERKGVARGVLTQTLGPWRRPVAYLSKKLDPVASGWPVCLKAIAAVAILVKDADKLTLGQNITVIAPHALENIVRQPPDRWMTNARMTHYQSLLLTERVTFAPPAALNPATLLPEETDEPVTHDCHQLLIEETGVRKDLTDIPLTGEVLTWFTDGSSYVVEGKRMAGAAVVDGTRTIWASSLPEGTSAQKAELMALTQALRLAEGKSINIYTDSRYAFATAHVHGAIYKQRGWLTSAGREIKNKEEILSLLEALHLPKRLAIIHCPGHQKAKDPISRGNQMADRVAKQAAQGVNLL

SEQ ID NO: 8102 - protein, 665 aa, synthetic construct; identical to SEQ ID NO: 8101

SEQ ID NO: 8103 - protein, 663 aa, synthetic construct
LDDEYRLYSPLVKPDQNIQFWLEQFPQAWAETAGMGLAKQVPPQVIQLKASATPVSVRQYPLSKEAQEGIRPHVQRLIQQGILVPVQSPWNTPLLPVRKPGTNDYRPVQDLREVNKRVQDIHPTVPNPYNLLCALPPQRSWYTVLDLKDAFFCLRLHPTSQPLFAFEWRDPGTGRTGQLTWTRLPQGFKNSPTIFNEALHRDLANFRIQHPQVTLLQYVDDLLLAGATKQDCLEGTKALLLELSDLGYRASAKKAQICRREVTYLGYSLRDGQRWLTEARKKTVVQIPAPTTAKQVREFLGKAGFCRLFIPGFATLAAPLYPLTKPKGEFSWAPEHQKAFDAIKKALLSAPALALPDVTKPFTLYVDERKGVARGVLTQTLGPWRRPVAYLSKKLDPVASGWPVCLKAIAAVAILVKDADKLTLGQNITVIAPHALENIVRQPPDRWMTNARMTHYQSLLLTERVTFAPPAALNPATLLPEETDEPVTHDCHQLLIEETGVRKDLTDIPLTGEVLTWFTDGSSYVVEGKRMAGAAVVDGTRTIWASSLPEGTSAQKAELMALTQALRLAEGKSINIYTDSRYAFATAHVHGAIYKQRGWLTSAGREIKNKEEILSLLEALHLPKRLAIIHCPGHQKAKDPISRGNQMADRVAKQAAQGVNLLP

SEQ ID NO: 8104 - protein, 663 aa, synthetic construct; identical to SEQ ID NO: 8103

SEQ ID NO: 8105 - protein, 751 aa, Macaque simian foamy virus
MDPLQLLQPLEAEIKGTKLKAHWNSGATITCVPEAFLEDERPIQTMLIKTIHGEKQQDVYYLTFKVQGRKVEAEVLASPYDYILLNPSDVPWLMKKPLQLTVLVPLHEYQERLLQQTALPKEQKELLQKLFLKYDALWQHWENQVGHRRIKPHNIATGTLAPRPQKQYPINPKAKPSIQIVIDDLLKQGVLIQQNSTMNTPVYPVPKPDGKWRMVLDYREVNKTIPLIAAQNQHSAGILSSIYRGKYKTTLDLTNGFWAHPITPESYWLTAFTWQGKQYCWTRLPQGFLNSPALFTADVVDLLKEIPNVQAYVDDIYISHDDPQEHLEQLEKIFSILLNAGYVVSLKKSEIAQREVEFLGFNITKEGRGLTDTFKQKLLNITPPKDLKQLQSILGLLNFARNFIPNYSELVKPLYTIVANANGKFISWTEDNSNQLQHIISVLNQADNLEERNPETRLIIKVNSSPSAGYIRYYNEGSKRPIMYVNYIFSKAEAKFTQTEKLLTTMHKGLIKAMDLAMGQEILVYSPIVSMTKIQRTPLPERKALPVRWITWMTYLEDPRIQFHYDKSLPELQQIPNVTEDVIAKTKHPSEFAMVFYTDGSAIKHPDVNKSHSAGMGIAQVQFIPEYKIVHQWSIPLGDHTAQLAEIAAVEFACKKALKISGPVLIVTDSFYVAESANKELPYWKSNGFLNNKKKPLRHVSKWKSIAECLQLKPDIIIMHEKGHQQPMTTLHTEGNNLADKLATQGSYVVH

SEQ ID NO: 8106 - protein, 751 aa, synthetic construct
MDPLQLLQPLEAEIKGTKLKAHWNSGATITCVPEAFLEDERPIQTMLIKTIHGEKQQDVYYLTFKVQGRKVEAEVLASPYDYILLNPSDVPWLMKKPLQLTVLVPLHEYQERLLQQTALPKEQKELLQKLFLKYDALWQHWENQVGHRRIKPHNIATGTLAPRPQKQYPINPKAKPSIQIVIDDLLKQGVLIQQNSTMNTPVYPVPKPDGKWRMVLDYREVNKTIPLIAAQNQHSAGILSSIYRGKYKTTLDLTNGFWAHPITPESYWLTAFTWQGKQYCWTRLPQGFLNSPALFNADVVDLLKEIPNVQAYVDDIYISHDDPQEHLEQLEKIFSILLNAGYVVSLKKSEIAQREVEFLGFNITKEGRGLTDTFKQKLLNITPPKDLKQLQSILGLLNFARNFIPNYSELVKPLYTIVAPANGKFISWTEDNSNQLQHIISVLNQADNLEERNPETRLIIKVNSSPSAGYIRYYNEGSKRPIMYVNYIFSKAEAKFTQTEKLLTTMHKGLIKAMDLAMGQEILVYSPIVSMTKIQRTPLPERKALPVRWITWMTYLEDPRIQFHYDKSLPELQQIPNVTEDVIAKTKHPSEFAMVFYTDGSAIKHPDVNKSHSAGMGIAQVQFIPEYKIVHQWSIPLGDHTAQLAEIAAVEFACKKALKISGPVLIVTDSFYVAESANKELPYWKSNGFLNNKKKPLRHVSKWKSIAECLQLKPDIIIMHEKGHQQPMTTLHTEGNNLADKLATQGSYVVH

SEQ ID NO: 8107 - protein, 751 aa, synthetic construct
MDPLQLLQPLEAEIKGTKLKAHWNSGATITCVPEAFLEDERPIQTMLIKTIHGEKQQDVYYLTFKVQGRKVEAEVLASPYDYILLNPSDVPWLMKKPLQLTVLVPLHEYQERLLQQTALPKEQKELLQKLFLKYDALWQHWENQVGHRRIKPHNIATGTLAPRPQKQYPINPKAKPSIQIVIDDLLKQGVLIQQNSTMNTPVYPVPKPDGKWRMVLDYREVNKTIPLIAAQNQHSAGILSSIYRGKYKTTLDLTNGFWAHPITPESYWLTAFTWQGKQYCWTRLPQGFLNSPALFNADVVDLLKEIPNVQAYVDDIYISHDDPQEHLEQLEKIFSILLNAGYVVSLKKSEIAQREVEFLGFNITKEGRGLTDTFKQKLLNITPPKDLKQLQSILGKLNFARNFIPNYSELVKPLYTIVAPANGKFISWTEDNSNQLQHIISVLNQADNLEERNPETRLIIKVNSSPSAGYIRYYNEGSKRPIMYVNYIFSKAEAKFTQTEKLLTTMHKGLIKAMDLAMGQEILVYSPIVSMTKIQRTPLPERKALPVRWITWMTYLEDPRIQFHYDKSLPELQQIPNVTEDVIAKTKHPSEFAMVFYTDGSAIKHPDVNKSHSAGMGIAQVQFIPEYKIVHQWSIPLGDHTAQLAEIAAVEFACKKALKISGPVLIVTDSFYVAESANKELPYWKSNGFLNNKKKPLRHVSKWKSIAECLQLKPDIIIMHEKGHQQPMTTLHTEGNNLADKLATQGSYVVH

SEQ ID NO: 8108 - protein, 662 aa, Macaque simian foamy virus
VPWLMKKPLQLTVLVPLHEYQERLLQQTALPKEQKELLQKLFLKYDALWQHWENQVGHRRIKPHNIATGTLAPRPQKQYPINPKAKPSIQIVIDDLLKQGVLIQQNSTMNTPVYPVPKPDGKWRMVLDYREVNKTIPLIAAQNQHSAGILSSIYRGKYKTTLDLTNGFWAHPITPESYWLTAFTWQGKQYCWTRLPQGFLNSPALFTADVVDLLKEIPNVQAYVDDIYISHDDPQEHLEQLEKIFSILLNAGYVVSLKKSEIAQREVEFLGFNITKEGRGLTDTFKQKLLNITPPKDLKQLQSILGLLNFARNFIPNYSELVKPLYTIVANANGKFISWTEDNSNQLQHIISVLNQADNLEERNPETRLIIKVNSSPSAGYIRYYNEGSKRPIMYVNYIFSKAEAKFTQTEKLLTTMHKGLIKAMDLAMGQEILVYSPIVSMTKIQRTPLPERKALPVRWITWMTYLEDPRIQFHYDKSLPELQQIPNVTEDVIAKTKHPSEFAMVFYTDGSAIKHPDVNKSHSAGMGIAQVQFIPEYKIVHQWSIPLGDHTAQLAEIAAVEFACKKALKISGPVLIVTDSFYVAESANKELPYWKSNGFLNNKKKPLRHVSKWKSIAECLQLKPDIIIMHEKGHQQPMTTLHTEGNNLADKLATQGSYVVH

SEQ ID NO: 8109 - protein, 662 aa, synthetic construct
VPWLMKKPLQLTVLVPLHEYQERLLQQTALPKEQKELLQKLFLKYDALWQHWENQVGHRRIKPHNIATGTLAPRPQKQYPINPKAKPSIQIVIDDLLKQGVLIQQNSTMNTPVYPVPKPDGKWRMVLDYREVNKTIPLIAAQNQHSAGILSSIYRGKYKTTLDLTNGFWAHPITPESYWLTAFTWQGKQYCWTRLPQGFLNSPALFNADVVDLLKEIPNVQAYVDDIYISHDDPQEHLEQLEKIFSILLNAGYVVSLKKSEIAQREVEFLGFNITKEGRGLTDTFKQKLLNITPPKDLKQLQSILGLLNFARNFIPNYSELVKPLYTIVAPANGKFISWTEDNSNQLQHIISVLNQADNLEERNPETRLIIKVNSSPSAGYIRYYNEGSKRPIMYVNYIFSKAEAKFTQTEKLLTTMHKGLIKAMDLAMGQEILVYSPIVSMTKIQRTPLPERKALPVRWITWMTYLEDPRIQFHYDKSLPELQQIPNVTEDVIAKTKHPSEFAMVFYTDGSAIKHPDVNKSHSAGMGIAQVQFIPEYKIVHQWSIPLGDHTAQLAEIAAVEFACKKALKISGPVLIVTDSFYVAESANKELPYWKSNGFLNNKKKPLRHVSKWKSIAECLQLKPDIIIMHEKGHQQPMTTLHTEGNNLADKLATQGSYVVH

SEQ ID NO: 8110 - protein, 662 aa, synthetic construct
VPWLMKKPLQLTVLVPLHEYQERLLQQTALPKEQKELLQKLFLKYDALWQHWENQVGHRRIKPHNIATGTLAPRPQKQYPINPKAKPSIQIVIDDLLKQGVLIQQNSTMNTPVYPVPKPDGKWRMVLDYREVNKTIPLIAAQNQHSAGILSSIYRGKYKTTLDLTNGFWAHPITPESYWLTAFTWQGKQYCWTRLPQGFLNSPALFNADVVDLLKEIPNVQAYVDDIYISHDDPQEHLEQLEKIFSILLNAGYVVSLKKSEIAQREVEFLGFNITKEGRGLTDTFKQKLLNITPPKDLKQLQSILGKLNFARNFIPNYSELVKPLYTIVAPANGKFISWTEDNSNQLQHIISVLNQADNLEERNPETRLIIKVNSSPSAGYIRYYNEGSKRPIMYVNYIFSKAEAKFTQTEKLLTTMHKGLIKAMDLAMGQEILVYSPIVSMTKIQRTPLPERKALPVRWITWMTYLEDPRIQFHYDKSLPELQQIPNVTEDVIAKTKHPSEFAMVFYTDGSAIKHPDVNKSHSAGMGIAQVQFIPEYKIVHQWSIPLGDHTAQLAEIAAVEFACKKALKISGPVLIVTDSFYVAESANKELPYWKSNGFLNNKKKPLRHVSKWKSIAECLQLKPDIIIMHEKGHQQPMTTLHTEGNNLADKLATQGSYVVH

SEQ ID NO: 8111 - protein, 751 aa, unidentified
MDPLQLLQPLEAEIKGTKLKAHWNSGATITCVPQAFLEEEVPIKNIWIKTIHGEKEQPVYYLTFKIQGRKVEAEVISSPYDYILVSPSDIPWLMKKPLQLTTLVPLQEYEERLLKQTMLTGSYKEKLQSLFLKYDALWQHWENQVGHRRIKPHHIATGTVNPRPQKQYPINPKAKASIQTVINDLLKQGVLIQQNSIMNTPVYPVPKPDGKWRMVLDYREVNKTIPLIAAQNQHSAGILSSIFRGKYKTTLDLSNGFWAHSITPESYWLTAFTWLGQQYCWTRLPQGFLNSPALFTADVVDLLKEVPNVQVYVDDIYISHDDPREHLEQLEKVFSLLLNAGYVVSLKKSEIAQHEVEFLGFNITKEGRGLTETFKQKLLNITPPRDLKQLQSILGLLNFARNFIPNFSELVKPLYNIIATANGKYITWTTDNSQQLQNIISMLNSAENLEERNPEVRLIMKVNTSPSAGYIRFYNEFAKRPIMYLNYVYTKAEVKFTNTEKLLTTIHKGLIKALDLGMGQEILVYSPIVSMTKIQKTPLPERKALPIRWITWMSYLEDPRIQFHYDKTLPELQQVPTVTDDIIAKIKHPSEFSMVFYTDGSAIKHPNVNKSHNAGMGIAQVQFKPEFTVINTWSIPLGDHTAQLAEVAAVEFACKKALKIDGPVLIVTDSFYVAESVNKELPYWQSNGFFNNKKKPLKHVSKWKSIADCIQLKPDIIIIHEKGHQPTASTFHTEGNNLADKLATQGSYVVN

SEQ ID NO: 8112 - protein, 751 aa, synthetic construct
MDPLQLLQPLEAEIKGTKLKAHWNSGATITCVPQAFLEEEVPIKNIWIKTIHGEKEQPVYYLTFKIQGRKVEAEVISSPYDYILVSPSDIPWLMKKPLQLTTLVPLQEYEERLLKQTMLTGSYKEKLQSLFLKYDALWQHWENQVGHRRIKPHHIATGTVNPRPQKQYPINPKAKASIQTVINDLLKQGVLIQQNSIMNTPVYPVPKPDGKWRMVLDYREVNKTIPLIAAQNQHSAGILSSIFRGKYKTTLDLSNGFWAHSITPESYWLTAFTWLGQQYCWTRLPQGFLNSPALFNADVVDLLKEVPNVQVYVDDIYISHDDPREHLEQLEKVFSLLLNAGYVVSLKKSEIAQHEVEFLGFNITKEGRGLTETFKQKLLNITPPRDLKQLQSILGLLNFARNFIPNFSELVKPLYNIIATAPGKYITWTTDNSQQLQNIISMLNSAENLEERNPEVRLIMKVNTSPSAGYIRFYNEFAKRPIMYLNYVYTKAEVKFTNTEKLLTTIHKGLIKALDLGMGQEILVYSPIVSMTKIQKTPLPERKALPIRWITWMSYLEDPRIQFHYDKTLPELQQVPTVTDDIIAKIKHPSEFSMVFYTDGSAIKHPNVNKSHNAGMGIAQVQFKPEFTVINTWSIPLGDHTAQLAEVAAVEFACKKALKIDGPVLIVTDSFYVAESVNKELPYWQSNGFFNNKKKPLKHVSKWKSIADCIQLKPDIIIIHEKGHQPTASTFHTEGNNLADKLATQGSYVVN

SEQ ID NO: 8113 - protein, 751 aa, synthetic construct
MDPLQLLQPLEAEIKGTKLKAHWNSGATITCVPQAFLEEEVPIKNIWIKTIHGEKEQPVYYLTFKIQGRKVEAEVISSPYDYILVSPSDIPWLMKKPLQLTTLVPLQEYEERLLKQTMLTGSYKEKLQSLFLKYDALWQHWENQVGHRRIKPHHIATGTVNPRPQKQYPINPKAKASIQTVINDLLKQGVLIQQNSIMNTPVYPVPKPDGKWRMVLDYREVNKTIPLIAAQNQHSAGILSSIFRGKYKTTLDLSNGFWAHSITPESYWLTAFTWLGQQYCWTRLPQGFLNSPALFNADVVDLLKEVPNVQVYVDDIYISHDDPREHLEQLEKVFSLLLNAGYVVSLKKSEIAQHEVEFLGFNITKEGRGLTETFKQKLLNITPPRDLKQLQSILGKLNFARNFIPNFSELVKPLYNIIATAPGKYITWTTDNSQQLQNIISMLNSAENLEERNPEVRLIMKVNTSPSAGYIRFYNEFAKRPIMYLNYVYTKAEVKFTNTEKLLTTIHKGLIKALDLGMGQEILVYSPIVSMTKIQKTPLPERKALPIRWITWMSYLEDPRIQFHYDKTLPELQQVPTVTDDIIAKIKHPSEFSMVFYTDGSAIKHPNVNKSHNAGMGIAQVQFKPEFTVINTWSIPLGDHTAQLAEVAAVEFACKKALKIDGPVLIVTDSFYVAESVNKELPYWQSNGFFNNKKKPLKHVSKWKSIADCIQLKPDIIIIHEKGHQPTASTFHTEGNNLADKLATQGSYVVN

SEQ ID NO: 8114 - protein, 662 aa, unidentified
IPWLMKKPLQLTTLVPLQEYEERLLKQTMLTGSYKEKLQSLFLKYDALWQHWENQVGHRRIKPHHIATGTVNPRPQKQYPINPKAKASIQTVINDLLKQGVLIQQNSIMNTPVYPVPKPDGKWRMVLDYREVNKTIPLIAAQNQHSAGILSSIFRGKYKTTLDLSNGFWAHSITPESYWLTAFTWLGQQYCWTRLPQGFLNSPALFTADVVDLLKEVPNVQVYVDDIYISHDDPREHLEQLEKVFSLLLNAGYVVSLKKSEIAQHEVEFLGFNITKEGRGLTETFKQKLLNITPPRDLKQLQSILGLLNFARNFIPNFSELVKPLYNIIATANGKYITWTTDNSQQLQNIISMLNSAENLEERNPEVRLIMKVNTSPSAGYIRFYNEFAKRPIMYLNYVYTKAEVKFTNTEKLLTTIHKGLIKALDLGMGQEILVYSPIVSMTKIQKTPLPERKALPIRWITWMSYLEDPRIQFHYDKTLPELQQVPTVTDDIIAKIKHPSEFSMVFYTDGSAIKHPNVNKSHNAGMGIAQVQFKPEFTVINTWSIPLGDHTAQLAEVAAVEFACKKALKIDGPVLIVTDSFYVAESVNKELPYWQSNGFFNNKKKPLKHVSKWKSIADCIQLKPDIIIIHEKGHQPTASTFHTEGNNLADKLATQGSYVVN

SEQ ID NO: 8115 - protein, 662 aa, synthetic construct
IPWLMKKPLQLTTLVPLQEYEERLLKQTMLTGSYKEKLQSLFLKYDALWQHWENQVGHRRIKPHHIATGTVNPRPQKQYPINPKAKASIQTVINDLLKQGVLIQQNSIMNTPVYPVPKPDGKWRMVLDYREVNKTIPLIAAQNQHSAGILSSIFRGKYKTTLDLSNGFWAHSITPESYWLTAFTWLGQQYCWTRLPQGFLNSPALFNADVVDLLKEVPNVQVYVDDIYISHDDPREHLEQLEKVFSLLLNAGYVVSLKKSEIAQHEVEFLGFNITKEGRGLTETFKQKLLNITPPRDLKQLQSILGLLNFARNFIPNFSELVKPLYNIIATAPGKYITWTTDNSQQLQNIISMLNSAENLEERNPEVRLIMKVNTSPSAGYIRFYNEFAKRPIMYLNYVYTKAEVKFTNTEKLLTTIHKGLIKALDLGMGQEILVYSPIVSMTKIQKTPLPERKALPIRWITWMSYLEDPRIQFHYDKTLPELQQVPTVTDDIIAKIKHPSEFSMVFYTDGSAIKHPNVNKSHNAGMGIAQVQFKPEFTVINTWSIPLGDHTAQLAEVAAVEFACKKALKIDGPVLIVTDSFYVAESVNKELPYWQSNGFFNNKKKPLKHVSKWKSIADCIQLKPDIIIIHEKGHQPTASTFHTEGNNLADKLATQGSYVVN

SEQ ID NO: 8116 - protein, 662 aa, synthetic construct
IPWLMKKPLQLTTLVPLQEYEERLLKQTMLTGSYKEKLQSLFLKYDALWQHWENQVGHRRIKPHHIATGTVNPRPQKQYPINPKAKASIQTVINDLLKQGVLIQQNSIMNTPVYPVPKPDGKWRMVLDYREVNKTIPLIAAQNQHSAGILSSIFRGKYKTTLDLSNGFWAHSITPESYWLTAFTWLGQQYCWTRLPQGFLNSPALFNADVVDLLKEVPNVQVYVDDIYISHDDPREHLEQLEKVFSLLLNAGYVVSLKKSEIAQHEVEFLGFNITKEGRGLTETFKQKLLNITPPRDLKQLQSILGKLNFARNFIPNFSELVKPLYNIIATAPGKYITWTTDNSQQLQNIISMLNSAENLEERNPEVRLIMKVNTSPSAGYIRFYNEFAKRPIMYLNYVYTKAEVKFTNTEKLLTTIHKGLIKALDLGMGQEILVYSPIVSMTKIQKTPLPERKALPIRWITWMSYLEDPRIQFHYDKTLPELQQVPTVTDDIIAKIKHPSEFSMVFYTDGSAIKHPNVNKSHNAGMGIAQVQFKPEFTVINTWSIPLGDHTAQLAEVAAVEFACKKALKIDGPVLIVTDSFYVAESVNKELPYWQSNGFFNNKKKPLKHVSKWKSIADCIQLKPDIIIIHEKGHQPTASTFHTEGNNLADKLATQGSYVVN

SEQ ID NO: 8117 - protein, 751 aa, Simian foamy virus
MNPLQLLQPLPAEVKGTKLLAHWNSGATITCIPESFLEDEQPIKQTLIKTIHGEKQQNVYYLTFKVKGRKVEAEVIASPYEYILLSPTDVPWLTQQPLQLTILVPLQEYQDRILNKTALPEEQKQQLKALFTKYDNLWQHWENQVGHRKIRPHNIATGDYPPRPQKQYPINPKAKPSIQIVIDDLLKQGVLTPQNSTMNTPVYPVPKPDGRWRMVLDYREVNKTIPLTAAQNQHSAGILATIVRQKYKTTLDLANGFWAHPITPDSYWLTAFTWQGKQYCWTRLPQGFLNSPALFTADAVDLLKEVPNVQVYVDDIYLSHDNPHEHIQQLEKVFQILLQAGYVVSLKKSEIGQRTVEFLGFNITKEGRGLTDTFKTKLLNVTPPKDLKQLQSILGLLNFARNFIPNFAELVQTLYNLIASSKGKYIEWTEDNTKQLNKVIEALNTASNLEERLPDQRLVIKVNTSPSAGYVRYYNESGKKPIMYLNYVFSKAELKFSMLEKLLTTMHKALIKAMDLAMGQEILVYSPIVSMTKIQKTPLPERKALPIRWITWMTYLEDPRIQFHYDKTLPELKHIPDVYTSSIPPLKHPSQYEGVFCTDGSAIKSPDPTKSNNAGMGIVHAIYNPEYKILNQWSIPLGHHTAQMAEIAAVEFACKKALKVPGPVLVITDSFYVAESANKELPYWKSNGFVNNKKEPLKHISKWKSIAECLSIKPDITIQHEKGHQPINTSIHTEGNALADKLATQGSYVVN

SEQ ID NO: 8118 - protein, 751 aa, synthetic construct
MNPLQLLQPLPAEVKGTKLLAHWNSGATITCIPESFLEDEQPIKQTLIKTIHGEKQQNVYYLTFKVKGRKVEAEVIASPYEYILLSPTDVPWLTQQPLQLTILVPLQEYQDRILNKTALPEEQKQQLKALFTKYDNLWQHWENQVGHRKIRPHNIATGDYPPRPQKQYPINPKAKPSIQIVIDDLLKQGVLTPQNSTMNTPVYPVPKPDGRWRMVLDYREVNKTIPLTAAQNQHSAGILATIVRQKYKTTLDLANGFWAHPITPDSYWLTAFTWQGKQYCWTRLPQGFLNSPALFNADAVDLLKEVPNVQVYVDDIYLSHDNPHEHIQQLEKVFQILLQAGYVVSLKKSEIGQRTVEFLGFNITKEGRGLTDTFKTKLLNVTPPKDLKQLQSILGLLNFARNFIPNFAELVQTLYNLIASSPGKYIEWTEDNTKQLNKVIEALNTASNLEERLPDQRLVIKVNTSPSAGYVRYYNESGKKPIMYLNYVFSKAELKFSMLEKLLTTMHKALIKAMDLAMGQEILVYSPIVSMTKIQKTPLPERKALPIRWITWMTYLEDPRIQFHYDKTLPELKHIPDVYTSSIPPLKHPSQYEGVFCTDGSAIKSPDPTKSNNAGMGIVHAIYNPEYKILNQWSIPLGHHTAQMAEIAAVEFACKKALKVPGPVLVITDSFYVAESANKELPYWKSNGFVNNKKEPLKHISKWKSIAECLSIKPDITIQHEKGHQPINTSIHTEGNALADKLATQGSYVVN

SEQ ID NO: 8119 - protein, 751 aa, synthetic construct
MNPLQLLQPLPAEVKGTKLLAHWNSGATITCIPESFLEDEQPIKQTLIKTIHGEKQQNVYYLTFKVKGRKVEAEVIASPYEYILLSPTDVPWLTQQPLQLTILVPLQEYQDRILNKTALPEEQKQQLKALFTKYDNLWQHWENQVGHRKIRPHNIATGDYPPRPQKQYPINPKAKPSIQIVIDDLLKQGVLTPQNSTMNTPVYPVPKPDGRWRMVLDYREVNKTIPLTAAQNQHSAGILATIVRQKYKTTLDLANGFWAHPITPDSYWLTAFTWQGKQYCWTRLPQGFLNSPALFNADAVDLLKEVPNVQVYVDDIYLSHDNPHEHIQQLEKVFQILLQAGYVVSLKKSEIGQRTVEFLGFNITKEGRGLTDTFKTKLLNVTPPKDLKQLQSILGKLNFARNFIPNFAELVQTLYNLIASSPGKYIEWTEDNTKQLNKVIEALNTASNLEERLPDQRLVIKVNTSPSAGYVRYYNESGKKPIMYLNYVFSKAELKFSMLEKLLTTMHKALIKAMDLAMGQEILVYSPIVSMTKIQKTPLPERKALPIRWITWMTYLEDPRIQFHYDKTLPELKHIPDVYTSSIPPLKHPSQYEGVFCTDGSAIKSPDPTKSNNAGMGIVHAIYNPEYKILNQWSIPLGHHTAQMAEIAAVEFACKKALKVPGPVLVITDSFYVAESANKELPYWKSNGFVNNKKEPLKHISKWKSIAECLSIKPDITIQHEKGHQPINTSIHTEGNALADKLATQGSYVVN

SEQ ID NO: 8120 - protein, 662 aa, Simian foamy virus
VPWLTQQPLQLTILVPLQEYQDRILNKTALPEEQKQQLKALFTKYDNLWQHWENQVGHRKIRPHNIATGDYPPRPQKQYPINPKAKPSIQIVIDDLLKQGVLTPQNSTMNTPVYPVPKPDGRWRMVLDYREVNKTIPLTAAQNQHSAGILATIVRQKYKTTLDLANGFWAHPITPDSYWLTAFTWQGKQYCWTRLPQGFLNSPALFTADAVDLLKEVPNVQVYVDDIYLSHDNPHEHIQQLEKVFQILLQAGYVVSLKKSEIGQRTVEFLGFNITKEGRGLTDTFKTKLLNVTPPKDLKQLQSILGLLNFARNFIPNFAELVQTLYNLIASSKGKYIEWTEDNTKQLNKVIEALNTASNLEERLPDQRLVIKVNTSPSAGYVRYYNESGKKPIMYLNYVFSKAELKFSMLEKLLTTMHKALIKAMDLAMGQEILVYSPIVSMTKIQKTPLPERKALPIRWITWMTYLEDPRIQFHYDKTLPELKHIPDVYTSSIPPLKHPSQYEGVFCTDGSAIKSPDPTKSNNAGMGIVHAIYNPEYKILNQWSIPLGHHTAQMAEIAAVEFACKKALKVPGPVLVITDSFYVAESANKELPYWKSNGFVNNKKEPLKHISKWKSIAECLSIKPDITIQHEKGHQPINTSIHTEGNALADKLATQGSYVVN

SEQ ID NO: 8121 - protein, 662 aa, synthetic construct
VPWLTQQPLQLTILVPLQEYQDRILNKTALPEEQKQQLKALFTKYDNLWQHWENQVGHRKIRPHNIATGDYPPRPQKQYPINPKAKPSIQIVIDDLLKQGVLTPQNSTMNTPVYPVPKPDGRWRMVLDYREVNKTIPLTAAQNQHSAGILATIVRQKYKTTLDLANGFWAHPITPDSYWLTAFTWQGKQYCWTRLPQGFLNSPALFNADAVDLLKEVPNVQVYVDDIYLSHDNPHEHIQQLEKVFQILLQAGYVVSLKKSEIGQRTVEFLGFNITKEGRGLTDTFKTKLLNVTPPKDLKQLQSILGLLNFARNFIPNFAELVQTLYNLIASSPGKYIEWTEDNTKQLNKVIEALNTASNLEERLPDQRLVIKVNTSPSAGYVRYYNESGKKPIMYLNYVFSKAELKFSMLEKLLTTMHKALIKAMDLAMGQEILVYSPIVSMTKIQKTPLPERKALPIRWITWMTYLEDPRIQFHYDKTLPELKHIPDVYTSSIPPLKHPSQYEGVFCTDGSAIKSPDPTKSNNAGMGIVHAIYNPEYKILNQWSIPLGHHTAQMAEIAAVEFACKKALKVPGPVLVITDSFYVAESANKELPYWKSNGFVNNKKEPLKHISKWKSIAECLSIKPDITIQHEKGHQPINTSIHTEGNALADKLATQGSYVVN

SEQ ID NO: 8122 - protein, 662 aa, synthetic construct
VPWLTQQPLQLTILVPLQEYQDRILNKTALPEEQKQQLKALFTKYDNLWQHWENQVGHRKIRPHNIATGDYPPRPQKQYPINPKAKPSIQIVIDDLLKQGVLTPQNSTMNTPVYPVPKPDGRWRMVLDYREVNKTIPLTAAQNQHSAGILATIVRQKYKTTLDLANGFWAHPITPDSYWLTAFTWQGKQYCWTRLPQGFLNSPALFNADAVDLLKEVPNVQVYVDDIYLSHDNPHEHIQQLEKVFQILLQAGYVVSLKKSEIGQRTVEFLGFNITKEGRGLTDTFKTKLLNVTPPKDLKQLQSILGKLNFARNFIPNFAELVQTLYNLIASSPGKYIEWTEDNTKQLNKVIEALNTASNLEERLPDQRLVIKVNTSPSAGYVRYYNESGKKPIMYLNYVFSKAELKFSMLEKLLTTMHKALIKAMDLAMGQEILVYSPIVSMTKIQKTPLPERKALPIRWITWMTYLEDPRIQFHYDKTLPELKHIPDVYTSSIPPLKHPSQYEGVFCTDGSAIKSPDPTKSNNAGMGIVHAIYNPEYKILNQWSIPLGHHTAQMAEIAAVEFACKKALKVPGPVLVITDSFYVAESANKELPYWKSNGFVNNKKEPLKHISKWKSIAECLSIKPDITIQHEKGHQPINTSIHTEGNALADKLATQGSYVVN

SEQ ID NO: 8123 - protein, 592 aa, Squirrel monkey retrovirus
PRSRAIDIPVPHADKISWKITDPVWVDQWPLTYEKTLAAIALVQEQLAAGHIEPTNSPWNTPIFIIKKKSGSWRLLQDLRAVNKVMVPMGALQPGLPSPVAIPLNYHKIVIDLKDCFFTIPLHPEDRPYFAFSVPQINFQSPMPRYQWKVLPQGMANSPTLCQKFVAAAIAPVRSQWPEAYILHYMDDILLACDSAEAAKACYAHIISCLTSYGLKIAPDKVQVSEPFSYLGFELHHQQVFTPRVCLKTDHLKTLNDFQKLLGDIQWLRPYLKLPTSALVPLNNILKGDPNPLSVRALTPEAKQSLALINKAIQNQSVQQISYNLPLVLLLLPTPHTPTAVFWQPNGTDPTKNGSPLLWLHLPASPSKVLLTYPSLLAMLIIKGRYTGRQLFGRDPHSIIIPYTQDQLTWLLQTSDEWAIALSSFTGDIDNHYPSDPVIQFAKLHQFIFPKITKCAPIPQATLVFTDGSSNGIAAYVIDNQPISIKSPYLSAQLVELYAILQVFTVLAHQPFNLYTDSAYIAQSVPLLETVPFIKSSTNATPLFSKLQQLILNRQHPFFIGHLRAHLNLPGPLAEGNALADAATQIFPIISD

SEQ ID NO: 8124 - protein, 592 aa, synthetic construct
PRSRAIDIPVPHADKISWKITDPVWVDQWPLTYEKTLAAIALVQEQLAAGHIEPTNSPWNTPIFIIKKKSGSWRLLQDLRAVNKVMVPMGALQPGLPSPVAIPLNYHKIVIDLKDCFFTIPLHPEDRPYFAFSVPQINFQSPMPRYQWKVLPQGMANSPTLCQKFVAAAIAPVRSQWPEAYILHYMDDILLACDSAEAAKACYAHIISCLTSYGLKIAPDKVQVSEPFSYLGFELHHQQVFTPRVCLKTDHLKTLNDFQKLLGDIQWLRPYLKLPTSALVPLNNILKPDPNPLSVRALTPEAKQSLALINKAIQNQSVQQISYNLPLVLLLLPTPHTPTAVFWQPNGTDPTKNGSPLLWLHLPASPSKVLLTYPSLLAMLIIKGRYTGRQLFGRDPHSIIIPYTQDQLTWLLQTSDEWAIALSSFTGDIDNHYPSDPVIQFAKLHQFIFPKITKCAPIPQATLVFTDGSSNGIAAYVIDNQPISIKSPYLSAQLVELYAILQVFTVLAHQPFNLYTDSAYIAQSVPLLETVPFIKSSTNATPLFSKLQQLILNRQHPFFIGHLRAHLNLPGPLAEGNALADAATQIFPIISD

SEQ ID NO: 8125 - protein, 592 aa, synthetic construct
PRSRAIDIPVPHADKISWKITDPVWVDQWPLTYEKTLAAIALVQEQLAAGHIEPTNSPWNTPIFIIKKKSGSWRLLQDLRAVNKVMVPMGALQPGLPSPVAPPLNYHKIVIDLKDCFFTIPLHPEDRPYFAFSVPQINFQSPMPRYQWKVLPQGMANSPTLCQKFVAAAIAPVRSQWPEAYILHYMDDILLACDSAEAAKACYAHIISCLTSYGLKIAPDKVQVSEPFSYLGFELHHQQVFTPRVCLKTDHLKTLNDFQKLLGDIQWLRPYLKLPTSALVPLNNILKPDPNPLSVRALTPEAKQSLALINKAIQNQSVQQISYNLPLVLLLLPTPHTPTAVFWQPNGTDPTKNGSPLLWLHLPASPSKVLLTYPSLLAMLIIKGRYTGRQLFGRDPHSIIIPYTQDQLTWLLQTSDEWAIALSSFTGDIDNHYPSDPVIQFAKLHQFIFPKITKCAPIPQATLVFTDGSSNGIAAYVIDNQPISIKSPYLSAQLVELYAILQVFTVLAHQPFNLYTDSAYIAQSVPLLETVPFIKSSTNATPLFSKLQQLILNRQHPFFIGHLRAHLNLPGPLAEGNALADAATQIFPIISD

SEQ ID NO: 8126 - protein, 585 aa, unidentified
LATAVDILAPQRYADPITWKSDEPVWVDQWPLTQEKLAAAQQLVQEQLQAGHIIESNSPWNTPIFVIKKKSGKWRLLQDLRAVNATMVLMGALQPGLPSPVAIPQGYFKIVIDLKDCFFTIPLQPVDQKRFAFSLPSTNFKQPMKRYQWKVLPQGMANSPTLCQKYVAAAIEPVRKSWAQMYIIHYMDDILIAGKLGEQVLQCFAQLKQALTTTGLQIAPEKVQLQDPYTYLGFQINGPKITNQKAVIRRDKLQTLNDFQKLLGDINWLRPYLHLTTGDLKPLFDILKGDSNPNSPRSLSEAALASLQKVETAIAEQFVTQIDYTQPLTFLIFNTTLTPTGLFWQNNPVMWVHLPASPKKVLLPYYDAIADLIILGRDNSKKYFGLEPSTIIQPYSKSQIHWLMQNTETWPIACASYAGNIDNHYPPNKLIQFCKLHAVVFPRIISKTPLDNALLVFTDGSSTGIAAYTFEKTTVRFKTSHTSAQLVELQALIAVLSAFPHRALNVYTDSAYLAHSIPLLETVSHIKHISDTAKFFLQCQQLIYNRSIPFYLGHIRAHSGLPGPLSQGNHITDLATKVVATTLTT

SEQ ID NO: 8127 - protein, 585 aa, synthetic construct
LATAVDILAPQRYADPITWKSDEPVWVDQWPLTQEKLAAAQQLVQEQLQAGHIIESNSPWNTPIFVIKKKSGKWRLLQDLRAVNATMVLMGALQPGLPSPVAPPQGYFKIVIDLKDCFFTIPLQPVDQKRFAFSLPSTNFKQPMKRYQWKVLPQGMANSPTLCQKYVAAAIEPVRKSWAQMYIIHYMDDILIAGKLGEQVLQCFAQLKQALTTTGLQIAPEKVQLQDPYTYLGFQINGPKITNQKAVIRRDKLQTLNDFQKLLGDINWLRPYLHLTTGDLKPLFDILKGDSNPNSPRSLSEAALASLQKVETAIAEQFVTQIDYTQPLTFLIFNTTLTPTGLFWQNNPVMWVHLPASPKKVLLPYYDAIADLIILGRDNSKKYFGLEPSTIIQPYSKSQIHWLMQNTETWPIACASYAGNIDNHYPPNKLIQFCKLHAVVFPRIISKTPLDNALLVFTDGSSTGIAAYTFEKTTVRFKTSHTSAQLVELQALIAVLSAFPHRALNVYTDSAYLAHSIPLLETVSHIKHISDTAKFFLQCQQLIYNRSIPFYLGHIRAHSGLPGPLSQGNHITDLATKVVATTLTT

SEQ ID NO: 8128 - protein, 650 aa, Walleye dermal sarcoma virus
SCQTKNTLNIDEYLLQFPDQLWASLPTDIGRMLVPPITIKIKDNASLPSIRQYPLPKDKTEGLRPLISSLENQGILIKCHSPCNTPIFPIKKAGRDEYRMIHDLRAINNIVAPLTAVVASPTTVLSNLAPSLHWFTVIDLSNAFFSVPIHKDSQYLFAFTFEGHQYTWTVLPQGFIHSPTLFSQALYQSLHKIKFKISSEICIYMDDVLIASKDRDTNLKDTAVMLQHLASEGHKVSKKKLQLCQQEVVYLGQLLTPEGRKILPDRKVTVSQFQQPTTIRQIRAFLGLVGYCRHWIPEFSIHSKFLEKQLKKDTAEPFQLDDQQVEAFNKLKHAITTAPVLVVPDPAKPFQLYTSHSEHASIAVLTQKHAGRTRPIAFLSSKFDAIESGLPPCLKACASIHRSLTQADSFILGAPLIIYTTHAICTLLQRDRSQLVTASRFSKWEADLLRPELTFVACSAVSPAHLYMQSCENNIPPHDCVLLTHTISRPRPDLSDLPIPDPDMTLFSDGSYTTGRGGAAVVMHRPVTDDFIIIHQQPGGASAQTAELLALAAACHLATDKTVNIYTDSRYAYGVVHDFGHLWMHRGFVTSAGTPIKNHKEIEYLLKQIMKPKQVSVIKIEAHTKGVSMEVRGNAAADEAAKNAVFLVQR

SEQ ID NO: 8129 - protein, 650 aa, synthetic construct
SCQTKNTLNIDEYLLQFPDQLWASLPTDIGRMLVPPITIKIKDNASLPSIRQYPLPKDKTEGLRPLISSLENQGILIKCHSPCNTPIFPIKKAGRDEYRMIHDLRAINNIVAPLTAVVASPTTVLSNLAPSLHWFTVIDLSNAFFSVPIHKDSQYLFAFTFEGHQYTWTVLPQGFIHSPTLFNQALYQSLHKIKFKISSEICIYMDDVLIASKDRDTNLKDTAVMLQHLASEGHKVSKKKLQLCQQEVVYLGQLLTPEGRKILPDRKVTVSQFQQPTTIRQIRAFLGLVGYCRHWIPEFSIHSKFLEKQLKPDTAEPFQLDDQQVEAFNKLKHAITTAPVLVVPDPAKPFQLYTSHSEHASIAVLTQKHAGRTRPIAFLSSKFDAIESGLPPCLKACASIHRSLTQADSFILGAPLIIYTTHAICTLLQRDRSQLVTASRFSKWEADLLRPELTFVACSAVSPAHLYMQSCENNIPPHDCVLLTHTISRPRPDLSDLPIPDPDMTLFSDGSYTTGRGGAAVVMHRPVTDDFIIIHQQPGGASAQTAELLALAAACHLATDKTVNIYTDSRYAYGVVHDFGHLWMHRGFVTSAGTPIKNHKEIEYLLKQIMKPKQVSVIKIEAHTKGVSMEVRGNAAADEAAKNAVFLVQR

SEQ ID NO: 8130 - protein, 650 aa, synthetic construct
SCQTKNTLNIDEYLLQFPDQLWASLPTDIGRMLVPPITIKIKDNASLPSIRQYPLPKDKTEGLRPLISSLENQGILIKCHSPCNTPIFPIKKAGRDEYRMIHDLRAINNIVAPLTAVVASPTTVLSNLAPSLHWFTVIDLSNAFFSVPIHKDSQYLFAFTFEGHQYTWTVLPQGFIHSPTLFNQALYQSLHKIKFKISSEICIYMDDVLIASKDRDTNLKDTAVMLQHLASEGHKVSKKKLQLCQQEVVYLGQLLTPEGRKILPDRKVTVSQFQQPTTIRQIRAFLGKVGYCRHFIPEFSIHSKFLEKQLKPDTAEPFQLDDQQVEAFNKLKHAITTAPVLVVPDPAKPFQLYTSHSEHASIAVLTQKHAGRTRPIAFLSSKFDAIESGLPPCLKACASIHRSLTQADSFILGAPLIIYTTHAICTLLQRDRSQLVTASRFSKWEADLLRPELTFVACSAVSPAHLYMQSCENNIPPHDCVLLTHTISRPRPDLSDLPIPDPDMTLFSDGSYTTGRGGAAVVMHRPVTDDFIIIHQQPGGASAQTAELLALAAACHLATDKTVNIYTDSRYAYGVVHDFGHLWMHRGFVTSAGTPIKNHKEIEYLLKQIMKPKQVSVIKIEAHTKGVSMEVRGNAAADEAAKNAVFLVQR

SEQ ID NO: 8131 - protein, 669 aa, Woolly monkey sarcoma virus
VLNLEEEYRLHEKPVPSSIDPSWLQLFPTVWAERAGMGLANQVPPVVVELRSGASPVAVRQYPMSKEAREGIRPHIQRFLDLGVLVPCQSPWNTPLLPVKKPGTNDYRPVQDLREINKRVQDIHPTVPNPYNLLSSLPPSHTWYSVLDLKDAFFCLKLHPNSQPLFAFEWRDPEKGNTGQLTWTRLPQGFKNSPTLFDEALHRDLAPFRALNPQVVLLQYVDDLLVAAPTYRDCKEGTQKLLQELSKLGYRVSAKKAQLCQKEVTYLGYLLKEGKRWLTPARKATVMKIPPPTTPRQVREFLGTAGFCRLWIPGFASLAAPLYPLTKESIPFIWTEEHQKAFDRIKEALLSAPALALPDLTKPFTLYVDERAGVARGVLTQTLGPWRRPVAYLSKKLDPVASGWPTCLKAVAAVALLLKDADKLTLGQNVTVIASHSLESIVRQPPDRWMTNARMTHYQSLLLNERVSFAPPAVLNPATLLPVESEATPVHRCSEILAEETGTRRDLKDQPLPGVPAWYTDGSSFIAEGKRRAGAAIVDGKRTVWASSLPEGTSAQKAELVALTQALRLAEGKDINIYTDSRYAFATAHIHGAIYKQRGLLTSAGKDIKNKEEILALLEAIHLPKRVAIIHCPGHQKGNDPVATGNRRADEAAKQAALSTRVLAETTKP

SEQ ID NO: 8132 - protein, 669 aa, synthetic construct
VLNLEEEYRLHEKPVPSSIDPSWLQLFPTVWAERAGMGLANQVPPVVVELRSGASPVAVRQYPMSKEAREGIRPHIQRFLDLGVLVPCQSPWNTPLLPVKKPGTNDYRPVQDLREINKRVQDIHPTVPNPYNLLSSLPPSHTWYSVLDLKDAFFCLKLHPNSQPLFAFEWRDPEKGNTGQLTWTRLPQGFKNSPTLFNEALHRDLAPFRALNPQVVLLQYVDDLLVAAPTYRDCKEGTQKLLQELSKLGYRVSAKKAQLCQKEVTYLGYLLKEGKRWLTPARKATVMKIPPPTTPRQVREFLGTAGFCRLWIPGFASLAAPLYPLTKPSIPFIWTEEHQKAFDRIKEALLSAPALALPDLTKPFTLYVDERAGVARGVLTQTLGPWRRPVAYLSKKLDPVASGWPTCLKAVAAVALLLKDADKLTLGQNVTVIASHSLESIVRQPPDRWMTNARMTHYQSLLLNERVSFAPPAVLNPATLLPVESEATPVHRCSEILAEETGTRRDLKDQPLPGVPAWYTDGSSFIAEGKRRAGAAIVDGKRTVWASSLPEGTSAQKAELVALTQALRLAEGKDINIYTDSRYAFATAHIHGAIYKQRGWLTSAGKDIKNKEEILALLEAIHLPKRVAIIHCPGHQKGNDPVATGNRRADEAAKQAALSTRVLAETTKP

SEQ ID NO: 8133 - protein, 669 aa, synthetic construct
VLNLEEEYRLHEKPVPSSIDPSWLQLFPTVWAERAGMGLANQVPPVVVELRSGASPVAVRQYPMSKEAREGIRPHIQRFLDLGVLVPCQSPWNTPLLPVKKPGTNDYRPVQDLREINKRVQDIHPTVPNPYNLLSSLPPSHTWYSVLDLKDAFFCLKLHPNSQPLFAFEWRDPEKGNTGQLTWTRLPQGFKNSPTLFNEALHRDLAPFRALNPQVVLLQYVDDLLVAAPTYRDCKEGTQKLLQELSKLGYRVSAKKAQLCQKEVTYLGYLLKEGKRWLTPARKATVMKIPPPTTPRQVREFLGKAGFCRLFIPGFASLAAPLYPLTKPSIPFIWTEEHQKAFDRIKEALLSAPALALPDLTKPFTLYVDERAGVARGVLTQTLGPWRRPVAYLSKKLDPVASGWPTCLKAVAAVALLLKDADKLTLGQNVTVIASHSLESIVRQPPDRWMTNARMTHYQSLLLNERVSFAPPAVLNPATLLPVESEATPVHRCSEILAEETGTRRDLKDQPLPGVPAWYTDGSSFIAEGKRRAGAAIVDGKRTVWASSLPEGTSAQKAELVALTQALRLAEGKDINIYTDSRYAFATAHIHGAIYKQRGWLTSAGKDIKNKEEILALLEAIHLPKRVAIIHCPGHQKGNDPVATGNRRADEAAKQAALSTRVLAETTKP

SEQ ID NO: 8134 - protein, 671 aa, unidentified
TLNIEDEYRLHETSKEPDVPLGSTWLSDFPQAWAETGGMGLAVRQAPLIIPLKATSTPVSIKQYPMSQEARLGIKPHIQRLLDQGILVPCQSPWNTPLLPVKKPGTNDYRPVQDLREVNKRVEDIHPTVPNPYNLLSGLPPSHQWYTVLDLKDAFFCLRLHPTSQPLFAFEWRDPEMGISGQLTWTRLPQGFKNSPTLFDEALHRDLADFRIQHPDLILLQYVDDLLLAATSEQDCQRGTRALLQTLGNLGYRASAKKAQICQKQVKYLGYLLKEGQRWLTEARKETVMGQPTPKTPRQLREFLGTAGFCRLWIPGFAEMAAPLYPLTKTGTLFNWGPDQQKAYQEIKQALLTAPALGLPDLTKPFELFVDEKQGYAKGVLTQKLGPWRRPVAYLSKKLDPVAAGWPPCLRMVAAIAVLTKDAGKLTMGQPLVILAPHAVEALVKQPPDRWLSNARMTHYQAMLLDTDRVQFGPVVALNPATLLPLPEKEAPHDCLEILAETHGTRPDLTDQPIPDADYTWYTDGSSFLQEGQRRAGAAVTTETEVIWARALPAGTSAQRAELIALTQALKMAEGKKLNVYTDSRYAFATAHVHGEIYRRRGLLTSEGREIKNKNEILALLKALFLPKRLSIIHCPGHQKGNSAEARGNRMADQAAREAAMKAVLETSTLL

SEQ ID NO: 8135 - protein, 671 aa, synthetic construct
TLNIEDEYRLHETSKEPDVPLGSTWLSDFPQAWAETGGMGLAVRQAPLIIPLKATSTPVSIKQYPMSQEARLGIKPHIQRLLDQGILVPCQSPWNTPLLPVKKPGTNDYRPVQDLREVNKRVEDIHPTVPNPYNLLSGLPPSHQWYTVLDLKDAFFCLRLHPTSQPLFAFEWRDPEMGISGQLTWTRLPQGFKNSPTLFNEALHRDLADFRIQHPDLILLQYVDDLLLAATSEQDCQRGTRALLQTLGNLGYRASAKKAQICQKQVKYLGYLLKEGQRWLTEARKETVMGQPTPKTPRQLREFLGTAGFCRLWIPGFAEMAAPLYPLTKPGTLFNWGPDQQKAYQEIKQALLTAPALGLPDLTKPFELFVDEKQGYAKGVLTQKLGPWRRPVAYLSKKLDPVAAGWPPCLRMVAAIAVLTKDAGKLTMGQPLVILAPHAVEALVKQPPDRWLSNARMTHYQAMLLDTDRVQFGPVVALNPATLLPLPEKEAPHDCLEILAETHGTRPDLTDQPIPDADYTWYTDGSSFLQEGQRRAGAAVTTETEVIWARALPAGTSAQRAELIALTQALKMAEGKKLNVYTDSRYAFATAHVHGEIYRRRGWLTSEGREIKNKNEILALLKALFLPKRLSIIHCPGHQKGNSAEARGNRMADQAAREAAMKAVLETSTLL

SEQ ID NO: 8136 - protein, 671 aa, synthetic construct
TLNIEDEYRLHETSKEPDVPLGSTWLSDFPQAWAETGGMGLAVRQAPLIIPLKATSTPVSIKQYPMSQEARLGIKPHIQRLLDQGILVPCQSPWNTPLLPVKKPGTNDYRPVQDLREVNKRVEDIHPTVPNPYNLLSGLPPSHQWYTVLDLKDAFFCLRLHPTSQPLFAFEWRDPEMGISGQLTWTRLPQGFKNSPTLFNEALHRDLADFRIQHPDLILLQYVDDLLLAATSEQDCQRGTRALLQTLGNLGYRASAKKAQICQKQVKYLGYLLKEGQRWLTEARKETVMGQPTPKTPRQLREFLGKAGFCRLFIPGFAEMAAPLYPLTKPGTLFNWGPDQQKAYQEIKQALLTAPALGLPDLTKPFELFVDEKQGYAKGVLTQKLGPWRRPVAYLSKKLDPVAAGWPPCLRMVAAIAVLTKDAGKLTMGQPLVILAPHAVEALVKQPPDRWLSNARMTHYQAMLLDTDRVQFGPVVALNPATLLPLPEKEAPHDCLEILAETHGTRPDLTDQPIPDADYTWYTDGSSFLQEGQRRAGAAVTTETEVIWARALPAGTSAQRAELIALTQALKMAEGKKLNVYTDSRYAFATAHVHGEIYRRRGWLTSEGREIKNKNEILALLKALFLPKRLSIIHCPGHQKGNSAEARGNRMADQAAREAAMKAVLETSTLL

SEQ ID NO: 8137 - protein, 677 aa, unidentified
TLNIEDEYRLHETSKEPDVSLGSTWLSDFPQAWAETGGMGLAVRQAPLIIPLKATSTPVSIKQYPMSQEARLGIKPHIQRLLDQGILVPCQSPWNTPLLPVKKPGTNDYRPVQDLREVNKRVEDIHPTVPNPYNLLSGLPPSHQWYTVLDLKDAFFCLRLHPTSQPLFAFEWRDPEMGISGQLTWTRLPQGFKNSPTLFNEALHRDLADFRIQHPDLILLQYVDDLLLAATSELDCQQGTRALLQTLGNLGYRASAKKAQICQKQVKYLGYLLKEGQRWLTEARKETVMGQPTPKTPRQLREFLGKAGFCRLFIPGFAEMAAPLYPLTKPGTLFNWGPDQQKAYQEIKQALLTAPALGLPDLTKPFELFVDEKQGYAKGVLTQKLGPWRRPVAYLSKKLDPVAAGWPPCLRMVAAIAVLTKDAGKLTMGQPLVILAPHAVEALVKQPPDRWLSNARMTHYQALLLDTDRVQFGPVVALNPATLLPLPEEGLQHNCLDILAEAHGTRPDLTDQPLPDADHTWYTDGSSLLQEGQRKAGAAVTTETEVIWAKALPAGTSAQRAELIALTQALKMAEGKKLNVYTDSRYAFATAHIHGEIYRRRGWLTSEGKEIKNKDEILALLKALFLPKRLSIIHCPGHQKGHSAEARGNRMADQAARKAAITETPDTSTLLIENSSP

SEQ ID NO: 8138-9000 - skipped (863 entries)

SEQ ID NO: 9001 - protein, 1082 aa, Neisseria meningitidis
MAAFKPNPINYILGLDIGIASVGWAMVEIDEEENPIRLIDLGVRVFERAEVPKTGDSLAMARRLARSVRRLTRRRAHRLLRARRLLKREGVLQAADFDENGLIKSLPNTPWQLRAAALDRKLTPLEWSAVLLHLIKHRGYLSQRKNEGETADKELGALLKGVANNAHALQTGDFRTPAELALNKFEKESGHIRNQRGDYSHTFSRKDLQAELILLFEKQKEFGNPHVSGGLKEGIETLLMTQRPALSGDAVQKMLGHCTFEPAEPKAAKNTYTAERFIWLTKLNNLRILEQGSERPLTDTERATLMDEPYRKSKLTYAQARKLLGLEDTAFFKGLRYGKDNAEASTLMEMKAYHAISRALEKEGLKDKKSPLNLSSELQDEIGTAFSLFKTDEDITGRLKDRVQPEILEALLKHISFDKFVQISLKALRRIVPLMEQGKRYDEACAEIYGDHYGKKNTEEKIYLPPIPADEIRNPVVLRALSQARKVINGVVRRYGSPARIHIETAREVGKSFKDRKEIEKRQEENRKDREKAAAKFREYFPNFVGEPKSKDILKLRLYEQQHGKCLYSGKEINLVRLNEKGYVEIDHALPFSRTWDDSFNNKVLVLGSENQNKGNQTPYEYFNGKDNSREWQEFKARVETSRFPRSKKQRILLQKFDEDGFKECNLNDTRYVNRFLCQFVADHILLTGKGKRRVFASNGQITNLLRGFWGLRKVRAENDRHHALDAVVVACSTVAMQQKITRFVRYKEMNAFDGKTIDKETGKVLHQKTHFPQPWEFFAQEVMIRVFGKPDGKPEFEEADTPEKLRTLLAEKLSSRPEAVHEYVTPLFVSRAPNRKMSGAHKDTLRSAKRFVKHNEKISVKRVWLTEIKLADLENMVNYKNGREIELYEALKARLEAYGGNAKQAFDPKDNPFYKKGGQLVKAVRVEKTQESGVLLNKKNAYTIADNGDMVRVDVFCKVDKKGKNQYFIVPIYAWQVAENILPDIDCKGYRIDDSYTFCFSLHKYDLIAFQKDEKSKVEFAYYINCDSSNGRFYLAWHDKGSKEQQFRISTQNLVLIQKYQVNELGKEIRPCRLKKRPPVR

SEQ ID NO: 9002 - protein, 1055 aa, Pasteurella pneumotropica
MQNNPLNYILGLDLGIASIGWAVVEIDEESSPIRLIDVGVRTFERAEVAKTGESLALSRRLARSSRRLIKRRAERLKKAKRLLKAEKILHSIDEKLPINVWQLRVKGLKEKLERQEWAAVLLHLSKHRGYLSQRKNEGKSDNKELGALLSGIASNHQMLQSSEYRTPAEIAVKKFQVEEGHIRNQRGSYTHTFSRLDLLAEMELLFQRQAELGNSYTSTTLLENLTALLMWQKPALAGDAILKMLGKCTFEPSEYKAAKNSYSAERFVWLTKLNNLRILENGTERALNDNERFALLEQPYEKSKLTYAQVRAMLALSDNAIFKGVRYLGEDKKTVESKTTLIEMKFYHQIRKTLGSAELKKEWNELKGNSDLLDEIGTAFSLYKTDDDICRYLEGKLPERVLNALLENLNFDKFIQLSLKALHQILPLMLQGQRYDEAVSAIYGDHYGKKSTETTRLLPTIPADEIRNPVVLRTLTQARKVINAVVRLYGSPARIHIETAREVGKSYQDRKKLEKQQEDNRKQRESAVKKFKEMFPHFVGEPKGKDILKMRLYELQQAKCLYSGKSLELHRLLEKGYVEVDHALPFSRTWDDSFNNKVLVLANENQNKGNLTPYEWLDGKNNSERWQHFVVRVQTSGFSYAKKQRILNHKLDEKGFIERNLNDTRYVARFLCNFIADNMLLVGKGKRNVFASNGQITALLRHRWGLQKVREQNDRHHALDAVVVACSTVAMQQKITRFVRYNEGNVFSGERIDRETGEIIPLHFPSPWAFFKENVEIRIFSENPKLELENRLPDYPQYNHEWVQPLFVSRMPTRKMTGQGHMETVKSAKRLNEGLSVLKVPLTQLKLSDLERMVNRDREIALYESLKARLEQFGNDPAKAFAEPFYKKGGALVKAVRLEQTQKSGVLVRDGNGVADNASMVRVDVFTKGGKYFLVPIYTWQVAKGILPNRAATQGKDENDWDIMDEMATFQFSLCQNDLIKLVTKKKTIFGYFNGLNRATSNINIKEHDLDKSKGKLGIYLEVGVKLAISLEKYQVDELGKNIRPCRPTKRQHVR

SEQ ID NO: 9003 - protein, 1053 aa, Staphylococcus aureus
MKRNYILGLDIGITSVGYGIIDYETRDVIDAGVRLFKEANVENNEGRRSKRGARRLKRRRRHRIQRVKKLLFDYNLLTDHSELSGINPYEARVKGLSQKLSEEEFSAALLHLAKRRGVHNVNEVEEDTGNELSTKEQISRNSKALEEKYVAELQLERLKKDGEVRGSINRFKTSDYVKEAKQLLKVQKAYHQLDQSFIDTYIDLLETRRTYYEGPGEGSPFGWKDIKEWYEMLMGHCTYFPEELRSVKYAYNADLYNALNDLNNLVITRDENEKLEYYEKFQIIENVFKQKKKPTLKQIAKEILVNEEDIKGYRVTSTGKPEFTNLKVYHDIKDITARKEIIENAELLDQIAKILTIYQSSEDIQEELTNLNSELTQEEIEQISNLKGYTGTHNLSLKAINLILDELWHTNDNQIAIFNRLKLVPKKVDLSQQKEIPTTLVDDFILSPVVKRSFIQSIKVINAIIKKYGLPNDIIIELAREKNSKDAQKMINEMQKRNRQTNERIEEIIRTTGKENAKYLIEKIKLHDMQEGKCLYSLEAIPLEDLLNNPFNYEVDHIIPRSVSFDNSFNNKVLVKQEENSKKGNRTPFQYLSSSDSKISYETFKKHILNLAKGKGRISKTKKEYLLEERDINRFSVQKDFINRNLVDTRYATRGLMNLLRSYFRVNNLDVKVKSINGGFTSFLRRKWKFKKERNKGYKHHAEDALIIANADFIFKEWKKLDKAKKVMENQMFEEKQAESMPEIETEQEYKEIFITPHQIKHIKDFKDYKYSHRVDKKPNRELINDTLYSTRKDDKGNTLIVNNLNGLYDKDNDKLKKLINKSPEKLLMYHHDPQTYQKLKLIMEQYGDEKNPLYKYYEETGNYLTKYSKKDNGPVIKKIKYYGNKLNAHLDITDDYPNSRNKVVKLSLKPYRFDVYLDNGVYKFVTVKNLDVIKKENYYEVNSKCYEEAKKLKKISNQAEFIASFYNNDLIKINGELYRVIGVNNDLLNRIEVNMIDITYREYLENMNDKRPPRIIKTIASKTQSIKKYSTDILGNLYEVKSKKHPQIIKKG

SEQ ID NO: 9004 - protein, 1053 aa, Staphylococcus aureus
MKRNYILGLDIGITSVGYGIIDYETRDVIDAGVRLFKEANVENNEGRRSKRGARRLKRRRRHRIQRVKKLLFDYNLLTDHSELSGINPYEARVKGLSQKLSEEEFSAALLHLAKRRGVHNVNEVEEDTGNELSTKEQISRNSKALEEKYVAELQLERLKKDGEVRGSINRFKTSDYVKEAKQLLKVQKAYHQLDQSFIDTYIDLLETRRTYYEGPGEGSPFGWKDIKEWYEMLMGHCTYFPEELRSVKYAYNADLYNALNDLNNLVITRDENEKLEYYEKFQIIENVFKQKKKPTLKQIAKEILVNEEDIKGYRVTSTGKPEFTNLKVYHDIKDITARKEIIENAELLDQIAKILTIYQSSEDIQEELTNLNSELTQEEIEQISNLKGYTGTHNLSLKAINLILDELWHTNDNQIAIFNRLKLVPKKVDLSQQKEIPTTLVDDFILSPVVKRSFIQSIKVINAIIKKYGLPNDIIIELAREKNSKDAQKMINEMQKRNRQTNERIEEIIRTTGKENAKYLIEKIKLHDMQEGKCLYSLEAIPLEDLLNNPFNYEVDHIIPRSVSFDNSFNNKVLVKQEENSKKGNRTPFQYLSSSDSKISYETFKKHILNLAKGKGRISKTKKEYLLEERDINRFSVQKDFINRNLVDTRYATRGLMNLLRSYFRVNNLDVKVKSINGGFTSFLRRKWKFKKERNKGYKHHAEDALIIANADFIFKEWKKLDKAKKVMENQMFEEKQAESMPEIETEQEYKEIFITPHQIKHIKDFKDYKYSHRVDKKPNRKLINDTLYSTRKDDKGNTLIVNNLNGLYDKDNDKLKKLINKSPEKLLMYHHDPQTYQKLKLIMEQYGDEKNPLYKYYEETGNYLTKYSKKDNGPVIKKIKYYGNKLNAHLDITDDYPNSRNKVVKLSLKPYRFDVYLDNGVYKFVTVKNLDVIKKENYYEVNSKCYEEAKKLKKISNQAEFIASFYKNDLIKINGELYRVIGVNNDLLNRIEVNMIDITYREYLENMNDKRPPHIIKTIASKTQSIKKYSTDILGNLYEVKSKKHPQIIKKG

SEQ ID NO: 9005 - protein, 1061 aa, Staphylococcus auricularis
MQENQQKQNYILGLDIGITSVGYGLIDSKTREVIDAGVRLFPEADSENNSNRRSKRGARRLKRRRIHRLNRVKDLLADYQMIDLNNVPKSTDPYTIRVKGLREPLTKEEFAIALLHIAKRRGLHNISVSMGDEEQDNELSTKQQLQKNAQQLQDKYVCELQLERLTNINKVRGEKNRFKTEDFVKEVKQLCETQRQYHNIDDQFIQQYIDLVSTRREYFEGPGNGSPYGWDGDLLKWYEKLMGRCTYFPEELRSVKYAYSADLFNALNDLNNLVVTRDDNPKLEYYEKYHIIENVFKQKKNPTLKQIAKEIGVQDYDIRGYRITKSGKPQFTSFKLYHDLKNIFEQAKYLEDVEMLDEIAKILTIYQDEISIKKALDQLPELLTESEKSQIAQLTGYTGTHRLSLKCIHIVIDELWESPENQMEIFTRLNLKPKKVEMSEIDSIPTTLVDEFILSPVVKRAFIQSIKVINAVINRFGLPEDIIIELAREKNSKDRRKFINKLQKQNEATRKKIEQLLAKYGNTNAKYMIEKIKLHDMQEGKCLYSLEAIPLEDLLSNPTHYEVDHIIPRSVSFDNSLNNKVLVKQSENSKKGNRTPYQYLSSNESKISYNQFKQHILNLSKAKDRISKKKRDMLLEERDINKFEVQKEFINRNLVDTRYATRELSNLLKTYFSTHDYAVKVKTINGGFTNHLRKVWDFKKHRNHGYKHHAEDALVIANADFLFKTHKALRRTDKILEQPGLEVNDTTVKVDTEEKYQELFETPKQVKNIKQFRDFKYSHRVDKKPNRQLINDTLYSTREIDGETYVVQTLKDLYAKDNEKVKKLFTERPQKILMYQHDPKTFEKLMTILNQYAEAKNPLAAYYEDKGEYVTKYAKKGNGPAIHKIKYIDKKLGSYLDVSNKYPETQNKLVKLSLKSFRFDIYKCEQGYKMVSIGYLDVLKKDNYYYIPKDKYEAEKQKKKIKESDLFVGSFYYNDLIMYEDELFRVIGVNSDINNLVELNMVDITYKDFCEVNNVTGEKRIKKTIGKRVVLIEKYTTDILGNLYKTPLPKKPQLIFKRGEL

SEQ ID NO: 9006 - protein, 1061 aa, Staphylococcus auricularis
MQENQQKQNYILGLDIGITSVGYGLIDSKTREVIDAGVRLFPEADSENNSNRRSKRGARRLKRRRIHRLNRVKDLLADYQMIDLNNVPKSTDPYTIRVKGLREPLTKEEFAIALLHIAKRRGLHNISVSMGDEEQDNELSTKQQLQKNAQQLQDKYVCELQLERLTNINKVRGEKNRFKTEDFVKEVKQLCETQRQYHNIDDQFIQQYIDLVSTRREYFEGPGNGSPYGWDGDLLKWYEKLMGRCTYFPEELRSVKYAYSADLFNALNDLNNLVVTRDDNPKLEYYEKYHIIENVFKQKKNPTLKQIAKEIGVQDYDIRGYRITKSGKPQFTSFKLYHDLKNIFEQAKYLEDVEMLDEIAKILTIYQDEISIKKALDQLPELLTESEKSQIAQLTGYTGTHRLSLKCIHIVIDELWESPENQMEIFTRLNLKPKKVEMSEIDSIPTTLVDEFILSPVVKRAFIQSIKVINAVINRFGLPEDIIIELAREKNSKDRRKFINKLQKQNEATRKKIEQLLAKYGNTNAKYMIEKIKLHDMQEGKCLYSLEAIPLEDLLSNPTHYEVDHIIPRSVSFDNSLNNKVLVKQSENSKKGNRTPYQYLSSNESKISYNQFKQHILNLSKAKDRISKKKRDMLLEERDINKFEVQKEFINRNLVDTRYATRELSNLLKTYFSTHDYAVKVKTINGGFTNHLRKVWDFKKHRNHGYKHHAEDALVIANADFLFKTHKALRRTDKILEQPGLEVNDTTVKVDTEEKYQELFETPKQVKNIKQFRDFKYSHRVDKKPNRKLINDTLYSTREIDGETYVVQTLKDLYAKDNEKVKKLFTERPQKILMYQHDPKTFEKLMTILNQYAEAKNPLAAYYEDKGEYVTKYAKKGNGPAIHKIKYIDKKLGSYLDVSNKYPETQNKLVKLSLKSFRFDIYKCEQGYKMVSIGYLDVLKKDNYYYIPKDKYEAEKQKKKIKESDLFVGSFYKNDLIMYEDELFRVIGVNSDINNLVELNMVDITYKDFCEVNNVTGEKHIKKTIGKRVVLIEKYTTDILGNLYKTPLPKKPQLIFKRGEL

SEQ ID NO: 9007 - protein, 1375 aa, Streptococcus canis
MEKKYSIGLDIGTNSVGWAVITDDYKVPSKKFKVLGNTNRKSIKKNLMGALLFDSGETAEATRLKRTARRRYTRRKNRIRYLQEIFANEMAKLDDSFFQRLEESFLVEEDKKNERHPIFGNLADEVAYHRNYPTIYHLRKKLADSPEKADLRLIYLALAHIIKFRGHFLIEGKLNAENSDVAKLFYQLIQTYNQLFEESPLDEIEVDAKGILSARLSKSKRLEKLIAVFPNEKKNGLFGNIIALALGLTPNFKSNFDLTEDAKLQLSKDTYDDDLDELLGQIGDQYADLFSAAKNLSDAILLSDILRSNSEVTKAPLSASMVKRYDEHHQDLALLKTLVRQQFPEKYAEIFKDDTKNGYAGYVGADKKLRKRSGKLATEEEFYKFIKPILEKMDGAEELLAKLNRDDLLRKQRTFDNGSIPHQIHLKELHAILRRQEEFYPFLKENREKIEKILTFRIPYYVGPLARGNSRFAWLTRKSEEAITPWNFEEVVDKGASAQSFIERMTNFDEQLPNKKVLPKHSLLYEYFTVYNELTKVKYVTERMRKPEFLSGEQKKAIVDLLFKTNRKVTVKQLKEDYFKKIECFDSVEIIGVEDRFNASLGTYHDLLKIIKDKDFLDNEENEDILEDIVLTLTLFEDREMIEERLKTYAHLFDDKVMKQLKRRHYTGWGRLSRKMINGIRDKQSGKTILDFLKSDGFSNRNFMQLIHDDSLTFKEEIEKAQVSGQGDSLHEQIADLAGSPAIKKGILQTVKIVDELVKVMGHKPENIVIEMARENQTTTKGLQQSRERKKRIEEGIKELESQILKENPVENTQLQNEKLYLYYLQNGRDMYVDQELDINRLSDYDVDHIVPQSFIKDDSIDNKVLTRSVENRGKSDNVPSEEVVKKMKNYWRQLLNAKLITQRKFDNLTKAERGGLSEADKAGFIKRQLVETRQITKHVARILDSRMNTKRDKNDKPIREVKVITLKSKLVSDFRKDFQLYKVRDINNYHHAHDAYLNAVVGTALIKKYPKLESEFVYGDYKVYDVRKMIAKSEQEIGKATAKRFFYSNIMNFFKTEVKLANGEIRKRPLIETNGETGEVVWNKEKDFATVRKVLAMPQVNIVKKTEVQTGGFSKESILSKRESAKLIPRKKGWDTRKYGGFGSPTVAYSILVVAKVEKGKAKKLKSVKVLVGITIMEKGSYEKDPIGFLEAKGYKDIKKELIFKLPKYSLFELENGRRRMLASAKELQKANELVLPQHLVRLLYYTQNISATTGSNNLGYIEQHREEFKEIFEKIIDFSEKYILKNKVNSNLKSSFDEQFAVSDSILLSNSFVSLLKYTSFGASGGFTFLDLDVKQGRLRYQTVTEVLDATLIYQSITGLYETRTDLSQLGGD

SEQ ID NO: 9008 - protein, 1368 aa, Streptococcus pyogenes [sequence omitted]

SEQ ID NO: 9009 - protein, 1368 aa, Streptococcus pyogenes
MDKKYSIGLDIGTNSVGWAVITDEYKVPSKKFKVLGNTDRHSIKKNLIGALLFDSGETAEATRLKRTARRRYTRRKNRICYLQEIFSNEMAKVDDSFFHRLEESFLVEEDKKHERHPIFGNIVDEVAYHEKYPTIYHLRKKLVDSTDKADLRLIYLALAHMIKFRGHFLIEGDLNPDNSDVDKLFIQLVQTYNQLFEENPINASGVDAKAILSARLSKSRRLENLIAQLPGEKKNGLFGNLIALSLGLTPNFKSNFDLAEDAKLQLSKDTYDDDLDNLLAQIGDQYADLFLAAKNLSDAILLSDILRVNTEITKAPLSASMIKRYDEHHQDLTLLKALVRQQLPEKYKEIFFDQSKNGYAGYIDGGASQEEFYKFIKPILEKMDGTEELLVKLNREDLLRKQRTFDNGSIPHQIHLGELHAILRRQEDFYPFLKDNREKIEKILTFRIPYYVGPLARGNSRFAWMTRKSEETITPWNFEEVVDKGASAQSFIERMTNFDKNLPNEKVLPKHSLLYEYFTVYNELTKVKYVTEGMRKPAFLSGEQKKAIVDLLFKTNRKVTVKQLKEDYFKKIECFDSVEISGVEDRFNASLGTYHDLLKIIKDKDFLDNEENEDILEDIVLTLTLFEDREMIEERLKTYAHLFDDKVMKQLKRRRYTGWGRLSRKLINGIRDKQSGKTILDFLKSDGFANRNFMQLIHDDSLTFKEDIQKAQVSGQGDSLHEHIANLAGSPAIKKGILQTVKVVDELVKVMGRHKPENIVIEMARENQTTQKGQKNSRERMKRIEEGIKELGSQILKEHPVENTQLQNEKLYLYYLQNGRDMYVDQELDINRLSDYDVDHIVPQSFLKDDSIDNKVLTRSDKNRGKSDNVPSEEVVKKMKNYWRQLLNAKLITQRKFDNLTKAERGGLSELDKAGFIKRQLVETRQITKHVAQILDSRMNTKYDENDKLIREVKVITLKSKLVSDFRKDFQFYKVREINNYHHAHDAYLNAVVGTALIKKYPKLESEFVYGDYKVYDVRKMIAKSEQEIGKATAKYFFYSNIMNFFKTEITLANGEIRKRPLIETNGETGEIVWDKGRDFATVRKVLSMPQVNIVKKTEVQTGGFSKESIRPKRNSDKLIARKKDWDPKKYGGFVSPTVAYSVLVVAKVEKGKSKKLKSVKELLGITIMERSSFEKNPIDFLEAKGYKEVKKDLIIKLPKYSLFELENGRKRMLASARFLQKGNELALPSKYVNFLYLASHYEKLKGSPEDNEQKQLFVEQHKHYLDEIIEQISEFSKRVILADANLDKVLSAYNKHRDKPIREQAENIIHLFTLTNLGAPRAFKYFDTTIDRKVYRSTKEVLDATLIHQSITGLYETRIDLSQLGGD

SEQ ID NO: 9010 - protein, 1368 aa, Streptococcus pyogenes
MDKKYSIGLDIGTNSVGWAVITDEYKVPSKKFKVLGNTDRHSIKKNLIGALLFDSGETAERTRLKRTARRRYTRRKNRICYLQEIFSNEMAKVDDSFFHRLEESFLVEEDKKHERHPIFGNIVDEVAYHEKYPTIYHLRKKLVDSTDKADLRLIYLALAHMIKFRGHFLIEGDLNPDNSDVDKLFIQLVQTYNQLFEENPINASGVDAKAILSARLSKSRRLENLIAQLPGEKKNGLFGNLIALSLGLTPNFKSNFDLAEDAKLQLSKDTYDDDLDNLLAQIGDQYADLFLAAKNLSDAILLSDILRVNTEITKAPLSASMIKRYDEHHQDLTLLKALVRQQLPEKYKEIFFDQSKNGYAGYIDGGASQEEFYKFIKPILEKMDGTEELLVKLNREDLLRKQRTFDNGSIPHQIHLGELHAILRRQEDFYPFLKDNREKIEKILTFRIPYYVGPLARGNSRFAWMTRKSEETITPWNFEEVVDKGASAQSFIERMTNFDKNLPNEKVLPKHSLLYEYFTVYNELTKVKYVTEGMRKPAFLSGEQKKAIVDLLFKTNRKVTVKQLKEDYFKKIECFDSVEISGVEDRFNASLGTYHDLLKIIKDKDFLDNEENEDILEDIVLTLTLFEDREMIEERLKTYAHLFDDKVMKQLKRRRYTGWGRLSRKLINGIRDKQSGKTILDFLKSDGFANRNFMQLIHDDSLTFKEDIQKAQVSGQGDSLHEHIANLAGSPAIKKGILQTVKVVDELVKVMGRHKPENIVIEMARENQTTQKGQKNSRERMKRIEEGIKELGSQILKEHPVENTQLQNEKLYLYYLQNGRDMYVDQELDINRLSDYDVDHIVPQSFLKDDSIDNKVLTRSDKNRGKSDNVPSEEVVKKMKNYWRQLLNAKLITQRKFDNLTKAERGGLSELDKAGFIKRQLVETRQITKHVAQILDSRMNTKYDENDKLIREVKVITLKSKLVSDFRKDFQFYKVREINNYHHAHDAYLNAVVGTALIKKYPKLESEFVYGDYKVYDVRKMIAKSEQEIGKATAKYFFYSNIMNFFKTEITLANGEIRKRPLIETNGETGEIVWDKGRDFATVRKVLSMPQVNIVKKTEVQTGGFSKESIRPKRNSDKLIARKKDWDPKKYGGFLWPTVAYSVLVVAKVEKGKSKKLKSVKELLGITIMERSSFEKNPIDFLEAKGYKEVKKDLIIKLPKYSLFELENGRKRMLASAKQLQKGNELALPSKYVNFLYLASHYEKLKGSPEDNEQKQLFVEQHKHYLDEIIEQISEFSKRVILADANLDKVLSAYNKHRDKPIREQAENIIHLFTLTRLGAPRAFKYFDTTIDPKQYRSTKEVLDATLIHQSITGLYETRIDLSQLGGD

SEQ ID NO: 9011 - protein, 1121 aa, Streptococcus thermophilus
MSDLVLGLDIGIGSVGVGILNKVTGEIIHKNSRIFPAAQAENNLVRRTNRQGRRLARRKKHRRVRLNRLFEESGLITDFTKISINLNPYQLRVKGLTDELSNEELFIALKNMVKHRGISYLDDASDDGNSSVGDYAQIVKENSKQLETKTPGQIQLERYQTYGQLRGDFTVEKDGKKHRLINVFPTSAYRSEALRILQTQQEFNPQITDEFINRYLEILTGKRKYYHGPGNEKSRTDYGRYRTSGETLDNIFGILIGKCTFYPDEFRAAKASYTAQEFNLLNDLNNLTVPTETKKLSKEQKNQIINYVKNEKAMGPAKLFKYIAKLLSCDVADIKGYRIDKSGKAEIHTFEAYRKMKTLETLDIEQMDRETLDKLAYVLTLNTEREGIQEALEHEFADGSFSQKQVDELVQFRKANSSIFGKGWHNFSVKLMMELIPELYETSEEQMTILTRLGKQKTTSSSNKTKYIDEKLLTEEIYNPVVAKSVRQAIKIVNAAIKEYGDFDNIVIEMARETNEDDEKKAIQKIQKANKDEKDAAMLKAANQYNGKAELPHSVFHGHKQLATKIRLWHQQGERCLYTGKTISIHDLINNSNQFEVDHILPLSITFDDSLANKVLVYATANQEKGQRTPYQALDSMDDAWSFRELKAFVRESKTLSNKKKEYLLTEEDISKFDVRKKFIERNLVDTRYASRVVLNALQEHFRAHKIDTKVSVVRGQFTSQLRRHWGIEKTRDTYHHHAVDALIIAASSQLNLWKKQKNTLVSYSEDQLLDIETGELISDDEYKESVFKAPYQHFVDTLKSKEFEDSILFSYQVDSKFNRKISDATIYATRQAKVGKDKADETYVLGKIKDIYTQDGYDAFMKIYKKDKSKFLMYRHDPQTFEKVIEPILENYPNKQINEKGKEVPCNPFLKYKEEHGYIRKYSKKGNGPEIKSLKYYDSKLGNHIDITPKDSNNKVVLQSVSPWRADVYFNKTTGKYEILGLKYADLQFEKGTGTYKISQEKYNDIKKKEGVDSDSEFKFTLYKNDLLLVKDTETKEQQLFRFLSRTMPKQKHYVELKPYDKQKFEGGEALIKVLGNVANSGQCKKGLGKSNISIYKVRTDVLGNQHIIKNEGDKPKLDF

SEQ ID NO: 9012 - protein, 1092 aa, Brevibacillus laterosporus
MAYTMGIDVGIASCGWAIVDLERQRIIDIGVRTFEKAENPKNGEALAVPRREARSSRRRLRRKKHRIERLKHMFVRNGLAVDIQHLEQTLRSQNEIDVWQLRVDGLDRMLTQKEWLRVLIHLAQRRGFQSNRKTDGSSEDGQVLVNVTENDRLMEEKDYRTVAEMMVKDEKFSDHKRNKNGNYHGVVSRSSLLVEIHTLFETQRQHHNSLASKDFELEYVNIWSAQRPVATKDQIEKMIGTCTFLPKEKRAPKASWHFQYFMLLQTINHIRITNVQGTRSLNKEEIEQVVNMALTKSKVSYHDTRKILDLSEEYQFVGLDYGKEDEKKKVESKETIIKLDDYHKLNKIFNEVELAKGETWEADDYDTVAYALTFFKDDEDIRDYLQNKYKDSKNRLVKNLANKEYTNELIGKVSTLSFRKVGHLSLKALRKIIPFLEQGMTYDKACQAAGFDFQGISKKKRSVVLPVIDQISNPVVNRALTQTRKVINALIKKYGSPETIHIETARELSKTFDERKNITKDYKENRDKNEHAKKHLSELGIINPTGLDIVKYKLWCEQQGRCMYSNQPISFERLKESGYTEVDHIIPYSRSMNDSYNNRVLVMTRENREKGNQTPFEYMGNDTQRWYEFEQRVTTNPQIKKEKRQNLLLKGFTNRRELEMLERNLNDTRYITKYLSHFISTNLEFSPSDKKKKVVNTSGRITSHLRSRWGLEKNRGQNDLHHAMDAIVIAVTSDSFIQQVTNYYKRKERRELNGDDKFPLPWKFFREEVIARLSPNPKEQIEALPNHFYSEDELADLQPIFVSRMPKRSITGEAHQAQFRRVVGKTKEGKNITAKKTALVDISYDKNGDFNMYGRETDPATYEAIKERYLEFGGNVKKAFSTDLHKPKKDGTKGPLIKSVRIMENKTLVHPVNKGKGVVYNSSIVRTDVFQRKEKYYLLPVYVTDVTKGKLPNKVIVAKKGYHDWIEVDDSFTFLFSLYPNDLIFIRQNPKKKISLKKRIESHSISDSKEVQEIHAYYKGVDSSTAAIEFIIHDGSYYAKGVGVQNLDCFEKYQVDILGNYFKVKGEKRLELETSDSNHKGKDVNSIKSTSR

SEQ ID NO: 9013 - protein, 1053 aa, Staphylococcus aureus
MKRNYILGLDIGITSVGYGIIDYETRDVIDAGVRLFKEANVENNEGRRSKRGARRLKRRRRHRIQRVKKLLFDYNLLTDHSELSGINPYEARVKGLSQKLSEEEFSAALLHLAKRRGVHNVNEVEEDTGNELSTKEQISRNSKALEEKYVAELQLERLKKDGEVRGSINRFKTSDYVKEAKQLLKVQKAYHQLDQSFIDTYIDLLETRRTYYEGPGEGSPFGWKDIKEWYEMLMGHCTYFPEELRSVKYAYNADLYNALNDLNNLVITRDENEKLEYYEKFQIIENVFKQKKKPTLKQIAKEILVNEEDIKGYRVTSTGKPEFTNLKVYHDIKDITARKEIIENAELLDQIAKILTIYQSSEDIQEELTNLNSELTQEEIEQISNLKGYTGTHNLSLKAINLILDELWHTNDNQIAIFNRLKLVPKKVDLSQQKEIPTTLVDDFILSPVVKRSFIQSIKVINAIIKKYGLPNDIIIELAREKNSKDAQKMINEMQKRNRQTNERIEEIIRTTGKENAKYLIEKIKLHDMQEGKCLYSLEAIPLEDLLNNPFNYEVDHIIPRSVSFDNSFNNKVLVKQEENSKKGNRTPFQYLSSSDSKISYETFKKHILNLAKGKGRISKTKKEYLLEERDINRFSVQKDFINRNLVDTRYATRGLMNLLRSYFRVNNLDVKVKSINGGFTSFLRRKWKFKKERNKGYKHHAEDALIIANADFIFKEWKKLDKAKKVMENQMFEEKQAESMPEIETEQEYKEIFITPHQIKHIKDFKDYKYSHRVDKKPNRKLINDTLYSTRKDDKGNTLIVNNLNGLYDKDNDKLKKLINKSPEKLLMYHHDPQTYQKLKLIMEQYGDEKNPLYKYYEETGNYLTKYSKKDNGPVIKKIKYYGNKLNAHLDITDDYPNSRNKVVKLSLKPYRFDVYLDNGVYKFVTVKNLDVIKKENYYEVNSKCYEEAKKLKKISNQAEFIASFYKNDLIKINGELYRVIGVNSDKNNLIEVNMIDITYREYLENMNDKRPPHIIKTIASKTQSIKKYSTDILGNLYEVKSKKHPQIIKKG

SEQ ID NO: 9014 - protein, 1053 aa, Staphylococcus aureus
MKRNYILGLDIGITSVGYGIIDYETRDVIDAGVRLFKEANVENNEGRRSKRGARRLKRRRRHRIQRVKKLLFDYNLLTDHSELSGINPYEARVKGLSQKLSEEEFSAALLHLAKRRGVHNVNEVEEDTGNELSTKEQISRNSKALEEKYVAELQLERLKKDGEVRGSINRFKTSDYVKEAKQLLKVQKAYHQLDQSFIDTYIDLLETRRTYYEGPGEGSPFGWKDIKEWYEMLMGHCTYFPEELRSVKYAYNADLYNALNDLNNLVITRDENEKLEYYEKFQIIENVFKQKKKPTLKQIAKEILVNEEDIKGYRVTSTGKPEFTNLKVYHDIKDITARKEIIENAELLDQIAKILTIYQSSEDIQEELTNLNSELTQEEIEQISNLKGYTGTHNLSLKAINLILDELWHTNDNQIAIFNRLKLVPKKVDLSQQKEIPTTLVDDFILSPVVKRSFIQSIKVINAIIKKYGLPNDIIIELAREKNSKDAQKMINEMQKRNRQTNERIEEIIRTTGKENAKYLIEKIKLHDMQEGKCLYSLEAIPLEDLLNNPFNYEVDHIIPRSVSFDNSFNNKVLVKQEENSKKGNRTPFQYLSSSDSKISYETFKKHILNLAKGKGRISKTKKEYLLEERDINRFSVQKDFINRNLVDTRYATRGLMNLLRSYFRVNNLDVKVKSINGGFTSFLRRKWKFKKERNKGYKHHAEDALIIANADFIFKEWKKLDKAKKVMENQMFEEKQAESMPEIETEQEYKEIFITPHQIKHIKDFKDYKYSHRVDKKPNRKLINDTLYSTRKDDKGNTLIVNNLNGLYDKDNDKLKKLINKSPEKLLMYHHDPQTYQKLKLIMEQYGDEKNPLYKYYEETGNYLTKYSKKDNGPVIKKIKYYGNKLNAHLDITDDYPNSRNKVVKLSLKPYRFDVYLDNGVYKFVTVKNLDVIKKENYYEVNSKCYEEAKKLKKISNQAEFIASFYKNDLIKINGELYRVIGVNNSTRNIVELNMIDITYREYLENMNDKRPPHIIKTIASKTQSIKKYSTDILGNLYEVKSKKHPQIIKKG

SEQ ID NO: 9015 - protein, 1053 aa, Staphylococcus aureus
MKRNYILGLDIGITSVGYGIIDYETRDVIDAGVRLFKEANVENNEGRRSKRGARRLKRRRRHRIQRVKKLLFDYNLLTDHSELSGINPYEARVKGLSQKLSEEEFSAALLHLAKRRGVHNVNEVEEDTGNELSTKEQISRNSKALEEKYVAELQLERLKKDGEVRGSINRFKTSDYVKEAKQLLKVQKAYHQLDQSFIDTYIDLLETRRTYYEGPGEGSPFGWKDIKEWYEMLMGHCTYFPEELRSVKYAYNADLYNALNDLNNLVITRDENEKLEYYEKFQIIENVFKQKKKPTLKQIAKEILVNEEDIKGYRVTSTGKPEFTNLKVYHDIKDITARKEIIENAELLDQIAKILTIYQSSEDIQEELTNLNSELTQEEIEQISNLKGYTGTHNLSLKAINLILDELWHTNDNQIAIFNRLKLVPKKVDLSQQKEIPTTLVDDFILSPVVKRSFIQSIKVINAIIKKYGLPNDIIIELAREKNSKDAQKMINEMQKRNRQTNERIEEIIRTTGKENAKYLIEKIKLHDMQEGKCLYSLEAIPLEDLLNNPFNYEVDHIIPRSVSFDNSFNNKVLVKQEENSKKGNRTPFQYLSSSDSKISYETFKKHILNLAKGKGRISKTKKEYLLEERDINRFSVQKDFINRNLVDTRYATRGLMNLLRSYFRVNNLDVKVKSINGGFTSFLRRKWKFKKERNKGYKHHAEDALIIANADFIFKEWKKLDKAKKVMENQMFEEKQAESMPEIETEQEYKEIFITPHQIKHIKDFKDYKYSHRVDKKPNRKLINDTLYSTRKDDKGNTLIVNNLNGLYDKDNDKLKKLINKSPEKLLMYHHDPQTYQKLKLIMEQYGDEKNPLYKYYEETGNYLTKYSKKDNGPVIKKIKYYGNKLNAHLDITDDYPNSRNKVVKLSLKPYRFDVYLDNGVYKFVTVKNLDVIKKENYYEVNSKCYEEAKKLKKISNQAEFIASFYKNDLIKINGELYRVIGVNSDDRNIIELNMIDITYREYLENMNDKRPPHIIKTIASKTQSIKKYSTDILGNLYEVKSKKHPQIIKKG

SEQ ID NO: 9016 - protein, 1053 aa, Staphylococcus aureus
MKRNYILGLDIGITSVGYGIIDYETRDVIDAGVRLFKEANVENNEGRRSKRGARRLKRRRRHRIQRVKKLLFDYNLLTDHSELSGINPYEARVKGLSQKLSEEEFSAALLHLAKRRGVHNVNEVEEDTGNELSTKEQISRNSKALEEKYVAELQLERLKKDGEVRGSINRFKTSDYVKEAKQLLKVQKAYHQLDQSFIDTYIDLLETRRTYYEGPGEGSPFGWKDIKEWYEMLMGHCTYFPEELRSVKYAYNADLYNALNDLNNLVITRDENEKLEYYEKFQIIENVFKQKKKPTLKQIAKEILVNEEDIKGYRVTSTGKPEFTNLKVYHDIKDITARKEIIENAELLDQIAKILTIYQSSEDIQEELTNLNSELTQEEIEQISNLKGYTGTHNLSLKAINLILDELWHTNDNQIAIFNRLKLVPKKVDLSQQKEIPTTLVDDFILSPVVKRSFIQSIKVINAIIKKYGLPNDIIIELAREKNSKDAQKMINEMQKRNRQTNERIEEIIRTTGKENAKYLIEKIKLHDMQEGKCLYSLEAIPLEDLLNNPFNYEVDHIIPRSVSFDNSFNNKVLVKQEENSKKGNRTPFQYLSSSDSKISYETFKKHILNLAKGKGRISKTKKEYLLEERDINRFSVQKDFINRNLVDTRYATRGLMNLLRSYFRVNNLDVKVKSINGGFTSFLRRKWKFKKERNKGYKHHAEDALIIANADFIFKEWKKLDKAKKVMENQMFEEKQAESMPEIETEQEYKEIFITPHQIKHIKDFKDYKYSHRVDKKPNRKLINDTLYSTRKDDKGNTLIVNNLNGLYDKDNDKLKKLINKSPEKLLMYHHDPQTYQKLKLIMEQYGDEKNPLYKYYEETGNYLTKYSKKDNGPVIKKIKYYGNKLNAHLDITDDYPNSRNKVVKLSLKPYRFDVYLDNGVYKFVTVKNLDVIKKENYYEVNSKCYEEAKKLKKISNQAEFIASFYKNDLIKINGELYRVIGVNNNRLNKIELNMIDITYREYLENMNDKRPPHIIKTIASKTQSIKKYSTDILGNLYEVKSKKHPQIIKKG

SEQ ID NO: 9017 - protein, 1084 aa, Corynebacterium diphtheriae
MKYHVGIDVGTFSVGLAAIEVDDAGMPIKTLSLVSHIHDSGLDPDEIKSAVTRLASSGIARRTRRLYRRKRRRLQQLDKFIQRQGWPVIELEDYSDPLYPWKVRAELAASYIADEKERGEKLSVALRHIARHRGWRNPYAKVSSLYLPDGPSDAFKAIREEIKRASGQPVPETATVGQMVTLCELGTLKLRGEGGVLSARLQQSDYAREIQEICRMQEIGQELYRKIIDVVFAAESPKGSASSRVGKDPLQPGKNRALKASDAFQRYRIAALIGNLRVRVDGEKRILSVEEKNLVFDHLVNLTPKKEPEWVTIAEILGIDRGQLIGTATMTDDGERAGARPPTHDTNRSIVNSRIAPLVDWWKTASALEQHAMVKALSNAEVDDFDSPEGAKVQAFFADLDDDVHAKLDSLHLPVGRAAYSEDTLVRLTRRMLSDGVDLYTARLQEFGIEPSWTPPTPRIGEPVGNPAVDRVLKTVSRWLESATKTWGAPERVIIEHVREGFVTEKRAREMDGDMRRRAARNAKLFQEMQEKLNVQGKPSRADLWRYQSVQRQNCQCAYCGSPITFSNSEMDHIVPRAGQGSTNTRENLVAVCHRCNQSKGNTPFAIWAKNTSIEGVSVKEAVERTRHWVTDTGMRSTDFKKFTKAVVERFQRATMDEEIDARSMESVAWMANELRSRVAQHFASHGTTVRVYRGSLTAEARRASGISGKLKFFDGVGKSRLDRRHHAIDAAVIAFTSDYVAETLAVRSNLKQSQAHRQEAPQWREFTGKDAEHRAAWRVWCQKMEKLSALLTEDLRDDRVVVMSNVRLRLGNGSAHKETIGKLSKVKLSSQLSVSDIDKASSEALWCALTREPGFDPKEGLPANPERHIRVNGTHVYAGDNIGLFPVSAGSIALRGGYAELGSSFHHARVYKITSGKKPAFAMLRVYTIDLLPYRNQDLFSVELKPQTMSMRQAEKKLRDALATGNAEYLGWLVVDDELVVDTSKIATDQVKAVEAELGTIRRWRVDGFFSPSKLRLRPLQMSKEGIKKESAPELSKIIDRPGWLPAVNKLFSDGNVTVVRRDSLGRVRLESTAHLPVTWKVQ

SEQ ID NO: 9018 - protein, 984 aa, Campylobacter jejuni
MARILAFDIGISSIGWAFSENDELKDCGVRIFTKVENPKTGESLALPRRLARSARKRLARRKARLNHLKHLIANEFKLNYEDYQSFDESLAKAYKGSLISPYELRFRALNELLSKQDFARVILHIAKRRGYDDIKNSDDKEKGAILKAIKQNEEKLANYQSVGEYLYKEYFQKFKENSKEFTNVRNKKESYERCIAQSFLKDELKLIFKKQREFGFSFSKKFEEEVLSVAFYKRALKDFSHLVGNCSFFTDEKRAPKNSPLAFMFVALTRIINLLNNLKNTEGILYTKDDLNALLNEVLKNGTLTYKQTKKLLGLSDDYEFKGEKGTYFIEFKKYKEFIKALGEHNLSQDDLNEIAKDITLIKDEIKLKKALAKYDLNQNQIDSLSKLEFKDHLNISFKALKLVTPLMLEGKKYDEACNELNLKVAINEDKKDFLPAFNETYYKDEVTNPVVLRAIKEYRKVLNALLKKYGKVHKINIELAREVGKNHSQRAKIEKEQNENYKAKKDAELECEKLGLKINSKNILKLRLFKEQKEFCAYSGEKIKISDLQDEKMLEIDHIYPYSRSFDDSYMNKVLVFTKQNQEKLNQTPFEAFGNDSAKWQKIEVLAKNLPTKKQKRILDKNYKDKEQKNFKDRNLNDTRYIARLVLNYTKDYLDFLPLSDDENTKLNDTQKGSKVHVEAKSGMLTSALRHTWGFSAKDRNNHLHHAIDAVIIAYANNSIVKAFSDFKKEQESNSAELYAKKISELDYKNKRKFFEPFSGFRQKVLDKIDEIFVSKPERKKPSGALHEETFRKEEEFYQSYGGKEGVLKALELGKIRKVNGKIVKNGDMFRVDIFKHKKTNKFYAVPIYTMDFALKVLPNKAVARSKKGEIKDWILMDENYEFCFSLYKDSLILIQTKDMQEPEFVYYNAFTSSTVSLIVSKHDNKFETLSKNQKILFKNANEKEVIAKSIGIQNLKVFEKYIVSALGEVTKAEFRQREDFKK

SEQ ID NO: 9019 - protein, 1087 aa, Geobacillus stearothermophilus
MRYKIGLDIGITSVGWAVMNLDIPRIEDLGVRIFDRAENPQTGESLALPRRLARSARRRLRRRKHRLERIRRLVIREGILTKEELDKLFEEKHEIDVWQLRVEALDRKLNNDELARVLLHLAKRRGFKSNRKSERSNKENSTMLKHIEENRAILSSYRTVGEMIVKDPKFALHKRNKGENYTNTIARDDLEREIRLIFSKQREFGNMSCTEEFENEYITIWASQRPVASKDDIEKKVGFCTFEPKEKRAPKATYTFQSFIAWEHINKLRLISPSGARGLTDEERRLLYEQAFQKNKITYHDIRTLLHLPDDTYFKGIVYDRGESRKQNENIRFLELDAYHQIRKAVDKVYGKGKSSSFLPIDFDTFGYALTLFKDDADIHSYLRNEYEQNGKRMPNLANKVYDNELIEELLNLSFTKFGHLSLKALRSILPYMEQGEVYSSACERAGYTFTGPKKKQKTMLLPNIPPIANPVVMRALTQARKVVNAIIKKYGSPVSIHIELARDLSQTFDERRKTKKEQDENRKKNETAIRQLMEYGLTLNPTGHDIVKFKLWSEQNGRCAYSLQPIEIERLLEPGYVEVDHVIPYSRSLDDSYTNKVLVLTRENREKGNRIPAEYLGVGTERWQQFETFVLTNKQFSKKKRDRLLRLHYDENEETEFKNRNLNDTRYISRFFANFIREHLKFAESDDKQKVYTVNGRVTAHLRSRWEFNKNREESDLHHAVDAVIVACTTPSDIAKVTAFYQRREQNKELAKKTEPHFPQPWPHFADELRARLSKHPKESIKALNLGNYDDQKLESLQPVFVSRMPKRSVTGAAHQETLRRYVGIDERSGKIQTVVKTKLSEIKLDASGHFPMYGKESDPRTYEAIRQRLLEHNNDPKKAFQEPLYKPKKNGEPGPVIRTVKIIDTKNQVIPLNDGKTVAYNSNIVRVDVFEKDGKYYCVPVYTMDIMKGILPNKAIEPNKPYSEWKEMTEDYTFRFSLYPNDLIRIELPREKTVKTAAGEEINVKDVFVYYKTIDSANGGLELISHDHRFSLRGVGSRTLKRFEKYQVDVLGNIYKVRGEKRVGLASSAHSKPGKTIRPLQSTRD

SEQ ID NO: 9020 - protein, 1378 aa, Streptococcus sp.
MDKKYSIGLDIGTNSVGWAVITDEYKVPSKKFKVLGNTDRHSIKKNLIGALLFDSGETAEATRLKRTARRRYTRRKNRICYLQEIFSNEMAKVDDSFFHRLEESFLVEEDKKHERHPIFGNIVDEVAYHEKYPTIYHLRKKLVDSTDKADLRLIYLALAHMIKFRGHFLIEGDLNPDNSDVDKLFIQLVQTYNQLFEENPINASGVDAKAILSARLSKSRKLENLIAQLPGEKKNGLFGNLIALSLGLTPNFKSNFDLAEDAKLQLSKDTYDDDLDNLLAQIGDQYADLFLAAKNLSDAILLSDILRVNTEITKAPLSASMIKRYDEHHQDLTLLKALVRQQLPEKYKEIFFDQSKNGYAGYIDGGASQEEFYKFIKPILEKMDGTEELLVKLKREDLLRKQRTFDNGSIPHQIHLGELHAILRRQEDFYPFLKDNREKIEKILTFRIPYYVGPLARGNSRFAWMTRKSEETITPWNFEEVVDKGASAQSFIERMTNFDKNLPNEKVLPKHSLLYEYFTVYNELTKVKYVTEGMRKPAFLSGEQKKAIVDLLFKTNRKVTVKQLKEDYFKKIECFDSVEISGVEDRFNASLGTYHDLLKIIKDKDFLDNEENEDILEDIVLTLTLFEDREMIEERLKTYAHLFDDKVMKQLKRRRYTGWGRLSRKLINGIRDKQSGKTILDFLKSDGFANRNFMQLIHDDSLTFKEDIQKAQVSGQGDSLHEHIANLAGSPAIKKGILQTVKVVDELVKVMGRHKPENIVIEMARENQTTQKGQKNSRERMKRIEEGIKELGSQILKEHPVENTQLQNEKLYLYYLQNGRDMYVDQELDINRLSDYDVDHIVPQSFLKDDSIDNKVLTRSDKNRGKSDNVPSEEVVKKMKNYWRQLLNAKLITQRKFDNLTKAERGGLSELDKAGFIKRQLVETRQITKHVAQILDSRMNTKYDENDKLIREVKVITLKSKLVSDFRKDFQFYKVREINNYHHAHDAYLNAVVGTALIKKYPKLESEFVYGDYKVYDVRKMIAKSEQEIGKATAKYFFYSNIMNFFKTEITLANGEIRKRPLIETNGETGEIVWDKGRDFATVRKVLSMPQVNIVKKTEIQTVGQNGGLFDDNPKSPLEVTPSKLVPLKKELNPKKYGGYQKPTTAYPVLLITDTKQLIPISVMNKKQFEQNPVKFLRDRGYQQVGKNDFIKLPKYTLVDIGDGIKRLWASSKEIHKGNQLVVSKKSQILLYHAHHLDSDLSNDYLQNHNQQFDVLFNEIISFSKKCKLGKEHIQKIENVYSNKKNSASIEELAESFIKLLGFTQLGATSPFNFLGVKLNQKQYKGKKDYILPCTEGTLIRQSITGLYETRVDLSKIGEDSGGSGGSKRTADGSEFES

SEQ ID NO: 9021 - protein, 1082 aa, Neisseria meningitidis
MAAFKPNSINYILGLDIGIASVGWAMVEIDEEENPIRLIDLGVRVFERAEVPKTGDSLAMARRLARSVRRLTRRRAHRLLRTRRLLKREGVLQAANFDENGLIKSLPNTPWQLRAAALDRKLTPLEWSAVLLHLIKHRGYLSQRKNEGETADKELGALLKGVAGNAHALQTGDFRTPAELALNKFEKESGHIRNQRSDYSHTFSRKDLQAELILLFEKQKEFGNPHVSGGLKEGIETLLMTQRPALSGDAVQKMLGHCTFEPAEPKAAKNTYTAERFIWLTKLNNLRILEQGSERPLTDTERATLMDEPYRKSKLTYAQARKLLGLEDTAFFKGLRYGKDNAEASTLMEMKAYHAISRALEKEGLKDKKSPLNLSPELQDEIGTAFSLFKTDEDITGRLKDRIQPEILEALLKHISFDKFVQISLKALRRIVPLMEQGKRYDEACAEIYGDHYGKKNTEEKIYLPPIPADEIRNPVVLRALSQARKVINGVVRRYGSPARIHIETAREVGKSFKDRKEIEKRQEENRKDREKAAAKFREYFPNFVGEPKSKDILKLRLYEQQHGKCLYSGKEINLGRLNEKGYVEIDHALPFSRTWDDSFNNKVLVLGSENQNKGNQTPYEYFNGKDNSREWQEFKARVETSRFPRSKKQRILLQKFDEDGFKERNLNDTRYVNRFLCQFVADRMRLTGKGKKRVFASNGQITNLLRGFWGLRKVRAENDRHHALDAVVVACSTVAMQQKITRFVRYKEMNAFDGKTIDKETGEVLHQKTHFPQPWEFFAQEVMIRVFGKPDGKPEFEEADTLEKLRTLLAEKLSSRPEAVHEYVTPLFVSRAPNRKMSGQGHMETVKSAKRLDEGVSVLRVPLTQLKLKDLEKMVNREREPKLYEALKARLEAHKDDPAKAFAEPFYKYDKAGNRTQQVKAVRVEQVQKTGVWVRNHNGIADNATMVRVDVFEKGDKYYLVPIYSWQVAKGILPDRAVVQGKDEEDWQLIDDSFNFKFSLHPNDLVEVITKKARMFGYFASCHRGTGNINIRIHDLDHKIGKNGILEGIGVKTALSFQKYQIDELGKEIRPCRLKKRPPVR

SEQ ID NO: 9022 - protein, 1375 aa, Streptococcus canis
MEKKYSIGLDIGTNSVGWAVITDDYKVPSKKFKVLGNTNRKSIKKNLMGALLFDSGETAEATRLKRTARRRYTRRKNRIRYLQEIFANEMAKLDDSFFQRLEESFLVEEDKKNERHPIFGNLADEVAYHRNYPTIYHLRKKLADSPEKADLRLIYLALAHIIKFRGHFLIEGKLNAENSDVAKLFYQLIQTYNQLFEESPLDEIEVDAKGILSARLSKSKRLEKLIAVFPNEKKNGLFGNIIALALGLTPNFKSNFDLTEDAKLQLSKDTYDDDLDELLGQIGDQYADLFSAAKNLSDAILLSDILRSNSEVTKAPLSASMVKRYDEHHQDLALLKTLVRQQFPEKYAEIFKDDTKNGYAGYVGIGIKHRKRTTKLATQEEFYKFIKPILEKMDGAEELLAKLNRDDLLRKQRTFDNGSIPHQIHLKELHAILRRQEEFYPFLKENREKIEKILTFRIPYYVGPLARGNSRFAWLTRKSEEAITPWNFEEVVDKGASAQSFIERMTNFDEQLPNKKVLPKHSLLYEYFTVYNELTKVKYVTERMRKPEFLSGEQKKAIVDLLFKTNRKVTVKQLKEDYFKKIECFDSVEIIGVEDRFNASLGTYHDLLKIIKDKDFLDNEENEDILEDIVLTLTLFEDREMIEERLKTYAHLFDDKVMKQLKRRHYTGWGRLSRKMINGIRDKQSGKTILDFLKSDGFSNRNFMQLIHDDSLTFKEEIEKAQVSGQGDSLHEQIADLAGSPAIKKGILQTVKIVDELVKVMGHKPENIVIEMARENQTTTKGLQQSRERKKRIEEGIKELESQILKENPVENTQLQNEKLYLYYLQNGRDMYVDQELDINRLSDYDVDHIVPQSFIKDDSIDNKVLTRSVENRGKSDNVPSEEVVKKMKNYWRQLLNAKLITQRKFDNLTKAERGGLSEADKAGFIKRQLVETRQITKHVARILDSRMNTKRDKNDKPIREVKVITLKSKLVSDFRKDFQLYKVRDINNYHHAHDAYLNAVVGTALIKKYPKLESEFVYGDYKVYDVRKMIAKSEQEIGKATAKRFFYSNIMNFFKTEVKLANGEIRKRPLIETNGETGEVVWNKEKDFATVRKVLAMPQVNIVKKTEVQTGGFSKESILSKRESAKLIPRKKGWDTRKYGGFGSPTVAYSILVVAKVEKGKAKKLKSVKVLVGITIMEKGSYEKDPIGFLEAKGYKDIKKELIFKLPKYSLFELENGRRRMLASATELQKANELVLPQHLVRLLYYTQNISATTGSNNLGYIEQHREEFKEIFEKIIDFSEKYILKNKVNSNLKSSFDEQFAVSDSILLSNSFVSLLKYTSFGASGGFTFLDLDVKQGRLRYQTVTEVLDATLIYQSITGLYETRTDLSQLGGD

SEQ ID NO: 9023 - protein, 1375 aa, Streptococcus canis
MEKKYSIGLDIGTNSVGWAVITDDYKVPSKKFKVLGNTNRKSIKKNLMGALLFDSGETAEATRLKRTARRRYTRRKNRIRYLQEIFANEMAKLDDSFFQRLEESFLVEEDKKNERHPIFGNLADEVAYHRNYPTIYHLRKKLADSPEKADLRLIYLALAHIIKFRGHFLIEGKLNAENSDVAKLFYQLIQTYNQLFEESPLDEIEVDAKGILSARLSKSKRLEKLIAVFPNEKKNGLFGNIIALALGLTPNFKSNFDLTEDAKLQLSKDTYDDDLDELLGQIGDQYADLFSAAKNLSDAILLSDILRSNSEVTKAPLSASMVKRYDEHHQDLALLKTLVRQQFPEKYAEIFKDDTKNGYAGYVGADKKLRKRSGKLATEEEFYKFIKPILEKMDGAEELLAKLNRDDLLRKQRTFDNGSIPHQIHLKELHAILRRQEEFYPFLKENREKIEKILTFRIPYYVGPLARGNSRFAWLTRKSEEAITPWNFEEVVDKGASAQSFIERMTNFDEQLPNKKVLPKHSLLYEYFTVYNELTKVKYVTERMRKPEFLSGEQKKAIVDLLFKTNRKVTVKQLKEDYFKKIECFDSVEIIGVEDRFNASLGTYHDLLKIIKDKDFLDNEENEDILEDIVLTLTLFEDREMIEERLKTYAHLFDDKVMKQLKRRHYTGWGRLSRKMINGIRDKQSGKTILDFLKSDGFSNANFMQLIHDDSLTFKEEIEKAQVSGQGDSLHEQIADLAGSPAIKKGILQTVKIVDELVKVMGHKPENIVIEMARENQTTTKGLQQSRERKKRIEEGIKELESQILKENPVENTQLQNEKLYLYYLQNGRDMYVDQELDINRLSDYDVDHIVPQSFIKDDSIDNKVLTRSVENRGKSDNVPSEEVVKKMKNYWRQLLNAKLITQRKFDNLTKAERGGLSEADKAGFIKRQLVETRQITKHVARILDSRMNTKRDKNDKPIREVKVITLKSKLVSDFRKDFQLYKVRDINNYHHAHDAYLNAVVGTALIKKYPKLESEFVYGDYKVYDVRKMIAKSEQEIGKATAKRFFYSNIMNFFKTEVKLANGEIRKRPLIETNGETGEVVWNKEKDFATVRKVLAMPQVNIVKKTEVQTGGFSKESILSKRESAKLIPRKKGWDTRKYGGFGSPTVAYSILVVAKVEKGKAKKLKSVKVLVGITIMEKGSYEKDPIGFLEAKGYKDIKKELIFKLPKYSLFELENGRRRMLASAKELQKANELVLPQHLVRLLYYTQNISATTGSNNLGYIEQHREEFKEIFEKIIDFSEKYILKNKVNSNLKSSFDEQFAVSDSILLSNSFVSLLKYTSFGASGGFTFLDLDVKQGRLRYQTVTEVLDATLIYQSITGLYETRTDLSQLGGD

SEQ ID NO: 9024 - protein, 1368 aa, Streptococcus pyogenes
MDKKYSIGLDIGTNSVGWAVITDEYKVPSKKFKVLGNTDRHSIKKNLIGALLFDSGETAEATRLKRTARRRYTRRKNRICYLQEIFSNEMAKVDDSFFHRLEESFLVEEDKKHERHPIFGNIVDEVAYHEKYPTIYHLRKKLVDSTDKADLRLIYLALAHMIKFRGHFLIEGDLNPDNSDVDKLFIQLVQTYNQLFEENPINASGVDAKAILSARLSKSRRLENLIAQLPGEKKNGLFGNLIALSLGLTPNFKSNFDLAEDAKLQLSKDTYDDDLDNLLAQIGDQYADLFLAAKNLSDAILLSDILRVNTEITKAPLSASMVKRYDEHHQDLTLLKALVRQQLPEKYKEIFFDQSKNGYAGYIDGGASQEEFYKFIKPILEKMDGTEELLVKLNREDLLRKQRTFDNGIIPHQIHLGELHAILRRQGDFYPFLKDNREKIEKILTFRIPYYVGPLARGNSRFAWMTRKSEETITPWNFEEVVDKGASAQSFIERMTNFDKNLPNEKVLPKHSLLYEYFTVYNELTKVKYVTEGMRKPAFLSGEQKKAIVDLLFKTNRKVTVKQLKEDYFKKIECFDSVEISGVEDRFNASLGTYHDLLKIIKDKDFLDNEENEDILEDIVLTLTLFEDREMIEERLKTYAHLFDDKVMKQLKRLRYTGWGRLSRKLINGIRDKQSGKTILDFLKSDGFANRNFMQLIHDDSLTFKEDIQKAQVSGQGDSLHEHIANLAGSPAIKKGILQTVKVVDELVKVMGGHKPENIVIEMARENQTTQKGQKNSRERMKRIEEGIKELGSQILKEHPVENTQLQNEKLYLYYLQNGRDMYVDQELDINRLSDYDVDHIVPQSFLKDDSIDNKVLTRSDKNRGKSDNVPSEEVVKKMKNYWRQLLNAKLITQRKFDNLTKAERGGLSELDKAGFIKRQLVETRQITKHVAQILDSRMNTKYDENDKLIREVKVITLKSKLVSDFRKDFQFYKVREINNYHHAHDAYLNAVVGTALIKKYPKLESEFVYGDYKVYDVRKMIAKSEQEIGKATAKYFFYSNIMNFFKTEITLANGEIRKRPLIETNGETGEIVWDKGRDFATVRKVLSMPQVNIVKKTEVQTGGFSKESILPKGNSDKLIARKKDWDPKKYGGFNSPTAAYSVLVVAKVEKGKSKKLKSVKELLGITIMERSSFEKNPIGFLEAKGYKEVKKDLIIKLPKYSLFELENGRKRMLASAGVLHKGNELALPSKYVNFLYLASHYEKLKGSPEDNEQKQLFVEQHKHYLDEIIEQISEFSKRVILADANLDKVLSAYNKHRDKPIREQAENIIHLFTLTNLGVPAAFKYFDTTIDKKRYTSTKEVLDATLIHQSITGLYETRIDLSQLGGD

SEQ ID NO: 9025 - protein, 1368 aa, Streptococcus pyogenes
MDKKYSIGLDIGTNSVGWAVITDEYKVPSKKFKVLGNTDRHSIKKNLIGALLFDSGETAEATRLKRTARRRYTRRKNRICYLQEIFSNEMAKVDDSFFHRLEESFLVEEDKKHERHPIFGNIVDEVAYHEKYPTIYHLRKKLVDSTDKADLRLIYLALAHMIKFRGHFLIEGDLNPDNSDVDKLFIQLVQTYNQLFEENPINASGVDAKAILSARLSKSRRLENLIAQLPGEKKNGLFGNLIALSLGLTPNFKSNFDLAEDAKLQLSKDTYDDDLDNLLAQIGDQYADLFLAAKNLSDAILLSDILRVNTEITKAPLSASMVKRYDEHHQDLTLLKALVRQQLPEKYKEIFFDQSKNGYAGYIDGGASQEEFYKFIKPILEKMDGTEELLVKLNREDLLRKQRTFDNGIIPHQIHLGELHAILRRQGDFYPFLKDNREKIEKILTFRIPYYVGPLARGNSRFAWMTRKSEETITPWNFEEVVDKGASAQSFIERMTNFDKNLPNEKVLPKHSLLYEYFTVYNELTKVKYVTEGMRKPAFLSGEQKKAIVDLLFKTNRKVTVKQLKEDYFKKIECFDSVEISGVEDRFNASLGTYHDLLKIIKDKDFLDNEENEDILEDIVLTLTLFEDREMIEERLKTYAHLFDDKVMKQLKRLRYTGWGRLSRKLINGIRDKQSGKTILDFLKSDGFANRNFMQLIHDDSLTFKEDIQKAQVSGQGDSLHEHIANLAGSPAIKKGILQTVKVVDELVKVMGGHKPENIVIEMARENQTTQKGQKNSRERMKRIEEGIKELGSQILKEHPVENTQLQNEKLYLYYLQNGRDMYVDQELDINRLSDYDVDHIVPQSFLKDDSIDNKVLTRSDKNRGKSDNVPSEEVVKKMKNYWRQLLNAKLITQRKFDNLTKAERGGLSELDKAGFIKRQLVETRQITKHVAQILDSRMNTKYDENDKLIREVKVITLKSKLVSDFRKDFQFYKVREINNYHHAHDAYLNAVVGTALIKKYPKLESEFVYGDYKVYDVRKMIAKSEQEIGKATAKYFFYSNIMNFFKTEITLANGEIRKRPLIETNGETGEIVWDKGRDFATVRKVLSMPQVNIVKKTEVQTGGFSKESILPKGNSDKLIARKKDWDPKKYGGFNSPTVAYSVLVVAKVEKGKSKKLKSVKELLGITIMERSSFEKNPIGFLEAKGYKEVKKDLIIKLPKYSLFELENGRKRMLASASVLHKGNELALPSKYVNFLYLASHYEKLKGSSEDNKQKQLFVEQHKHYLDEIIEQISEFSKRVILADANLDKVLSAYNKHRDKPIREQAENIIHLFTLTNLGASAAFKYFDTTIGRKLYTSTKEVLDATLIHQSITGLYETRIDLSQLGGD

SEQ ID NO: 9026 - protein, 1368 aa, Streptococcus pyogenes
MDKKYSIGLDIGTNSVGWAVITDEYKVPSKKFKVLGNTDRHSIKKNLIGALLFDSGETAEATRLKRTARRRYTRRKNRICYLQEIFSNEMAKVDDSFFHRLEESFLVEEDKKHERHPIFGNIVDEVAYHEKYPTIYHLRKKLVDSTDKADLRLIYLALAHMIKFRGHFLIEGDLNPDNSDVDKLFIQLVQTYNQLFEENPINASGVDAKAILSARLSKSRRLENLIAQLPGEKKNGLFGNLIALSLGLTPNFKSNFDLAEDAKLQLSKDTYDDDLDNLLAQIGDQYADLFLAAKNLSDAILLSDILRVNTEITKAPLSASMVKRYDEHHQDLTLLKALVRQQLPEKYKEIFFDQSKNGYAGYIDGGASQEEFYKFIKPILEKMDGTEELLVKLNREDLLRKQRTFDNGIIPHQIHLGELHAILRRQGDFYPFLKDNREKIEKILTFRIPYYVGPLARGNSRFAWMTRKSEETITPWNFEEVVDKGASAQSFIERMTNFDKNLPNEKVLPKHSLLYEYFTVYNELTKVKYVTEGMRKPAFLSGEQKKAIVDLLFKTNRKVTVKQLKEDYFKKIECFDSVEISGVEDRFNASLGTYHDLLKIIKDKDFLDNEENEDILEDIVLTLTLFEDREMIEERLKTYAHLFDDKVMKQLKRLRYTGWGRLSRKLINGIRDKQSGKTILDFLKSDGFANRNFMQLIHDDSLTFKEDIQKAQVSGQGDSLHEHIANLAGSPAIKKGILQTVKVVDELVKVMGGHKPENIVIEMARENQTTQKGQKNSRERMKRIEEGIKELGSQILKEHPVENTQLQNEKLYLYYLQNGRDMYVDQELDINRLSDYDVDHIVPQSFLKDDSIDNKVLTRSDKNRGKSDNVPSEEVVKKMKNYWRQLLNAKLITQRKFDNLTKAERGGLSELDKAGFIKRQLVETRQITKHVAQILDSRMNTKYDENDKLIREVKVITLKSKLVSDFRKDFQFYKVREINNYHHAHDAYLNAVVGTALIKKYPKLESEFVYGDYKVYDVRKMIAKSEQEIGKATAKYFFYSNIMNFFKTEITLANGEIRKRPLIETNGETGEIVWDKGRDFATVRKVLSMPQVNIVKKTEVQTGGFSKESILPKGNSDKLIARKKDWDPKKYGGFNSPTVAYSVLVVAKVEKGKSKKLKSVKELLGITIMERSSFEKNPIDFLEAKGYKEVKKDLIIKLPKYSLFELENGRKRMLASAGVLQKGNELALPSKYVNFLYLASHYEKLKGSPEDNEQKQLFVEQHKHYLDEIIEQISEFSKRVILADANLDKVLSAYNKHRDKPIREQAENIIHLFTLTNLGAPAAFKYFDTTINRKQYNTTKEVLDATLIRQSITGLYETRIDLSQLGGD

SEQ ID NO: 9027 - protein, 1368 aa, Streptococcus pyogenes [sequence omitted]

SEQ ID NO: 9028 - protein, 1368 aa, Streptococcus pyogenes
MDKKYSIGLDIGTNSVGWAVITDEYKVPSKKFKVLGNTDRHSIKKNLIGALLFDSGETAEATRLKRTARRRYTRRKNRICYLQEIFSNEMAKVDDSFFHRLEESFLVEEDKKHERHPIFGNIVDEVAYHEKYPTIYHLRKKLVDSTDKADLRLIYLALAHMIKFRGHFLIEGDLNPDNSDVDKLFIQLVQTYNQLFEENPINASGVDAKAILSARLSKSRRLENLIAQLPGEKKNGLFGNLIALSLGLTPNFKSNFDLAEDAKLQLSKDTYDDDLDNLLAQIGDQYADLFLAAKNLSDAILLSDILRVNTEITKAPLSASMIKRYDEHHQDLTLLKALVRQQLPEKYKEIFFDQSKNGYAGYIDGGASQEEFYKFIKPILEKMDGTEELLVKLNREDLLRKQRTFDNGSIPHQIHLGELHAILRRQEDFYPFLKDNREKIEKILTFRIPYYVGPLARGNSRFAWMTRKSEETITPWNFEEVVDKGASAQSFIERMTNFDKNLPNEKVLPKHSLLYEYFTVYNELTKVKYVTEGMRKPAFLSGEQKKAIVDLLFKTNRKVTVKQLKEDYFKKIECFDSVEISGVEDRFNASLGTYHDLLKIIKDKDFLDNEENEDILEDIVLTLTLFEDREMIEERLKTYAHLFDDKVMKQLKRRRYTGWGRLSRKLINGIRDKQSGKTILDFLKSDGFANRNFMQLIHDDSLTFKEDIQKAQVSGQGDSLHEHIANLAGSPAIKKGILQTVKVVDELVKVMGRHKPENIVIEMARENQTTQKGQKNSRERMKRIEEGIKELGSQILKEHPVENTQLQNEKLYLYYLQNGRDMYVDQELDINRLSDYDVDHIVPQSFLKDDSIDNKVLTRSDKNRGKSDNVPSEEVVKKMKNYWRQLLNAKLITQRKFDNLTKAERGGLSELDKAGFIKRQLVETRQITKHVAQILDSRMNTKYDENDKLIREVKVITLKSKLVSDFRKDFQFYKVREINNYHHAHDAYLNAVVGTALIKKYPKLESEFVYGDYKVYDVRKMIAKSEQEIGKATAKYFFYSNIMNFFKTEITLANGEIRKRPLIETNGETGEIVWDKGRDFATVRKVLSMPQVNIVKKTEVQTGGFSKESILPKRNSDKLIARKKDWDPKKYGGFDSPTVAYSVLVVAKVEKGKSKKLKSVKELLGITIMERSSFEKNPIDFLEAKGYKEVKKDLIIKLPKYSLFELENGRKRMLASARELQKGNELALPSKYVNFLYLASHYEKLKGSPEDNEQKQLFVEQHKHYLDEIIEQISEFSKRVILADAQLDKVLSAYNKHRDKPIREQAENIIHLFTLTNLGAPAAFKYFDTTFKQKQYRSTKEVLDATLIHQSITGLYETRIDLSQLGGD

SEQ ID NO: 9029 - protein, 1368 aa, Streptococcus pyogenes
MDKKYSIGLDIGTNSVGWAVITDEYKVPSKKFKVLGNTDRHSIKKNLIGALLFDSGETAEATRLKRTARRRYTRRKNRICYLQEIFSNEMAKVDDSFFHRLEESFLVEEDKKHERHPIFGNIVDEVAYHEKYPTIYHLRKKLVDSTDKADLRLIYLALAHMIKFRGHFLIEGDLNPDNSDVDKLFIQLVQTYNQLFEENPINASGVDAKAILSARLSKSRRLENLIAQLPGEKKNGLFGNLIALSLGLTPNFKSNFDLAEDAKLQLSKDTYDDDLDNLLAQIGDQYADLFLAAKNLSDAILLSDILRVNTEITKAPLSASMIKRYDEHHQDLTLLKALVRQQLPEKYKEIFFDQSKNGYAGYIDGGASQEEFYKFIKPILEKMDGTEELLVKLNREDLLRKQRTFDNGSIPHQIHLGELHAILRRQEDFYPFLKDNREKIEKILTFRIPYYVGPLARGNSRFAWMTRKSEETITPWNFEEVVDKGASAQSFIERMTNFDKNLPNEKVLPKHSLLYEYFTVYNELTKVKYVTEGMRKPAFLSGEQKKAIVDLLFKTNRKVTVKQLKEDYFKKIECFDSVEISGVEDRFNASLGTYHDLLKIIKDKDFLDNEENEDILEDIVLTLTLFEDREMIEERLKTYAHLFDDKVMKQLKRRRYTGWGRLSRKLINGIRDKQSGKTILDFLKSDGFANRNFMQLIHDDSLTFKEDIQKAQVSGQGDSLHEHIANLAGSPAIKKGILQTVKVVDELVKVMGRHKPENIVIEMARENQTTQKGQKNSRERMKRIEEGIKELGSQILKEHPVENTQLQNEKLYLYYLQNGRDMYVDQELDINRLSDYDVDHIVPQSFLKDDSIDNKVLTRSDKNRGKSDNVPSEEVVKKMKNYWRQLLNAKLITQRKFDNLTKAERGGLSELDKAGFIKRQLVETRQITKHVAQILDSRMNTKYDENDKLIREVKVITLKSKLVSDFRKDFQFYKVREINNYHHAHDAYLNAVVGTALIKKYPKLESEFVYGDYKVYDVRKMIAKSEQEIGKATAKYFFYSNIMNFFKTEITLANGEIRKRPLIETNGETGEIVWDKGRDFATVRKVLSMPQVNIVKKTEVQTGGFSKESILPKRNSDKLIARKKDWDPKKYGGFLWPTVAYSVLVVAKVEKGKSKKLKSVKELLGITIMERSSFEKNPIDFLEAKGYKEVKKDLIIKLPKYSLFELENGRKRMLASAKQLQKGNELALPSKYVNFLYLASHYEKLKGSPEDNEQKQLFVEQHKHYLDEIIEQISEFSKRVILADANLDKVLSAYNKHRDKPIREQAENIIHLFTLTNLGAPAAFKYFDTTIDRKQYRSTKEVLDATLIHQSITGLYETRIDLSQLGGD

SEQ ID NO: 9030 - protein, 1368 aa, Streptococcus pyogenes
MDKKYSIGLDIGTNSVGWAVITDEYKVPSKKFKVLGNTDRHSIKKNLIGALLFDSGETAEATRLKRTARRRYTRRKNRICYLQEIFSNEMAKVDDSFFHRLEESFLVEEDKKHERHPIFGNIVDEVAYHEKYPTIYHLRKKLVDSTDKADLRLIYLALAHMIKFRGHFLIEGDLNPDNSDVDKLFIQLVQTYNQLFEENPINASGVDAKAILSARLSKSRRLENLIAQLPGEKKNGLFGNLIALSLGLTPNFKSNFDLAEDAKLQLSKDTYDDDLDNLLAQIGDQYADLFLAAKNLSDAILLSDILRVNTEITKAPLSASMIKRYDEHHQDLTLLKALVRQQLPEKYKEIFFDQSKNGYAGYIDGGASQEEFYKFIKPILEKMDGTEELLVKLNREDLLRKQRTFDNGSIPHQIHLGELHAILRRQEDFYPFLKDNREKIEKILTFRIPYYVGPLARGNSRFAWMTRKSEETITPWNFEEVVDKGASAQSFIERMTNFDKNLPNEKVLPKHSLLYEYFTVYNELTKVKYVTEGMRKPAFLSGEQKKAIVDLLFKTNRKVTVKQLKEDYFKKIECFDSVEISGVEDRFNASLGTYHDLLKIIKDKDFLDNEENEDILEDIVLTLTLFEDREMIEERLKTYAHLFDDKVMKQLKRRRYTGWGRLSRKLINGIRDKQSGKTILDFLKSDGFANRNFMQLIHDDSLTFKEDIQKAQVSGQGDSLHEHIANLAGSPAIKKGILQTVKVVDELVKVMGRHKPENIVIEMARENQTTQKGQKNSRERMKRIEEGIKELGSQILKEHPVENTQLQNEKLYLYYLQNGRDMYVDQELDINRLSDYDVDHIVPQSFLKDDSIDNKVLTRSDKNRGKSDNVPSEEVVKKMKNYWRQLLNAKLITQRKFDNLTKAERGGLSELDKAGFIKRQLVETRQITKHVAQILDSRMNTKYDENDKLIREVKVITLKSKLVSDFRKDFQFYKVREINNYHHAHDAYLNAVVGTALIKKYPKLESEFVYGDYKVYDVRKMIAKSEQEIGKATAKYFFYSNIMNFFKTEITLANGEIRKRPLIETNGETGEIVWDKGRDFATVRKVLSMPQVNIVKKTEVQTGGFSKESILPKRNSDKLIARKKDWDPKKYGGFVSPTVAYSVLVVAKVEKGKSKKLKSVKELLGITIMERSSFEKNPIDFLEAKGYKEVKKDLIIKLPKYSLFELENGRKRMLASAGELQKGNELALPSKYVNFLYLASHYEKLKGSPEDNEQKQLFVEQHKHYLDEIIEQISEFSKRVILADANLDKVLSAYNKHRDKPIREQAENIIHLFTLTNLGAPAAFKYFDTTIDRKQYRSTKEVLDATLIHQSITGLYETRIDLSQLGGD

SEQ ID NO: 9031 - protein, 1368 aa, Streptococcus pyogenes
MDKKYSIGLDIGTNSVGWAVITDEYKVPSKKFKVLGNTDRHSIKKNLIGALLFDSGETAEATRLKRTARRRYTRRKNRICYLQEIFSNEMAKVDDSFFHRLEESFLVEEDKKHERHPIFGNIVDEVAYHEKYPTIYHLRKKLVDSTDKADLRLIYLALAHMIKFRGHFLIEGDLNPDNSDVDKLFIQLVQTYNQLFEENPINASGVDAKAILSARLSKSRRLENLIAQLPGEKKNGLFGNLIALSLGLTPNFKSNFDLAEDAKLQLSKDTYDDDLDNLLAQIGDQYADLFLAAKNLSDAILLSDILRVNTEITKAPLSASMIKRYDEHHQDLTLLKALVRQQLPEKYKEIFFDQSKNGYAGYIDGGASQEEFYKFIKPILEKMDGTEELLVKLNREDLLRKQRTFDNGSIPHQIHLGELHAILRRQEDFYPFLKDNREKIEKILTFRIPYYVGPLARGNSRFAWMTRKSEETITPWNFEEVVDKGASAQSFIERMTNFDKNLPNEKVLPKHSLLYEYFTVYNELTKVKYVTEGMRKPAFLSGEQKKAIVDLLFKTNRKVTVKQLKEDYFKKIECFDSVEISGVEDRFNASLGTYHDLLKIIKDKDFLDNEENEDILEDIVLTLTLFEDREMIEERLKTYAHLFDDKVMKQLKRRRYTGWGRLSRKLINGIRDKQSGKTILDFLKSDGFANRNFMQLIHDDSLTFKEDIQKAQVSGQGDSLHEHIANLAGSPAIKKGILQTVKVVDELVKVMGRHKPENIVIEMARENQTTQKGQKNSRERMKRIEEGIKELGSQILKEHPVENTQLQNEKLYLYYLQNGRDMYVDQELDINRLSDYDVDHIVPQSFLKDDSIDNKVLTRSDKNRGKSDNVPSEEVVKKMKNYWRQLLNAKLITQRKFDNLTKAERGGLSELDKAGFIKRQLVETRQITKHVAQILDSRMNTKYDENDKLIREVKVITLKSKLVSDFRKDFQFYKVREINNYHHAHDAYLNAVVGTALIKKYPKLESEFVYGDYKVYDVRKMIAKSEQEIGKATAKYFFYSNIMNFFKTEITLANGEIRKRPLIETNGETGEIVWDKGRDFATVRKVLSMPQVNIVKKTEVQTGGFSKESILPKRNSDKLIARKKDWDPKKYGGFVSPTVAYSVLVVAKVEKGKSKKLKSVKELLGITIMERSSFEKNPIDFLEAKGYKEVKKDLIIKLPKYSLFELENGRKRMLASARELQKGNELALPSKYVNFLYLASHYEKLKGSPEDNEQKQLFVEQHKHYLDEIIEQISEFSKRVILADANLDKVLSAYNKHRDKPIREQAENIIHLFTLTNLGAPAAFKYFDTTIDRKEYRSTKEVLDATLIHQSITGLYETRIDLSQLGGD

SEQ ID NO: 9032 - protein, 1368 aa, Streptococcus pyogenes
MDKKYSIGLDIGTNSVGWAVITDEYKVPSKKFKVLGNTDRHSIKKNLIGALLFDSGETAEATRLKRTARRRYTRRKNRICYLQEIFSNEMAKVDDSFFHRLEESFLVEEDKKHERHPIFGNIVDEVAYHEKYPTIYHLRKKLVDSTDKADLRLIYLALAHMIKFRGHFLIEGDLNPDNSDVDKLFIQLVQTYNQLFEENPINASGVDAKAILSARLSKSRRLENLIAQLPGEKKNGLFGNLIALSLGLTPNFKSNFDLAEDTKLQLSKDTYDDDLDNLLAQIGDQYADLFLAAKNLSDAILLSDILRVNTEITKAPLSASMIKLYDEHHQDLTLLKALVRQQLPEKYKEIFFDQSKNGYAGYIDGGASQEEFYKFIKPILEKMDGTEELLVKLNREDLLRKQRTFDNGIIPHQIHLGELHAILRRQEDFYPFLKDNREKIEKILTFRIPYYVGPLARGNSRFAWMTRKSEETITPWNFEKVVDKGASAQSFIERMTNFDKNLPNEKVLPKHSLLYEYFTVYNELTKVKYVTEGMRKPAFLSGDQKKAIVDLLFKTNRKVTVKQLKEDYFKKIECFDSVEISGVEDRFNASLGTYHDLLKIIKDKDFLDNEENEDILEDIVLTLTLFEDREMIEERLKTYAHLFDDKVMKQLKRRRYTGWGRLSRKLINGIRDKQSGKTILDFLKSDGFANRNFIQLIHDDSLTFKEDIQKAQVSGQGDSLHEHIANLAGSPAIKKGILQTVKVVDELVKVMGRHKPENIVIEMARENQTTQKGQKNSRERMKRIEEGIKELGSQILKEHPVENTQLQNEKLYLYYLQNGRDMYVDQELDINRLSDYDVDHIVPQSFLKDDSIDNKVLTRSDKNRGKSDNVPSEEVVKKMKNYWRQLLNAKLITQRKFDNLTKAERGGLSELDKAGFIKRQLVETRQITKHVAQILDSRMNTKYDENDKLIREVKVITLKSKLVSDFRKDFQFYKVREINNYHHAHDAYLNAVVGTALIKKYPKLESEFVYGDYKVYDVRKMIAKSEQEIGKATAKYFFYSNIMNFFKTEITLANGEIRKRPLIETNGETGEIVWDKGRDFATVRKVLSMPQVNIVKKTEVQTGGFSKESILPKRNSDKLIARKKDWDPKKYGGFDSPTVAYSVLVVAKVEKGKSKKLKSVKELLGITIMERSSFEKNPIDFLEAKGYKEVKKDLIIKLPKYSLFELENGRKRMLASAGVLQKGNELALPSKYVNFLYLASHYEKLKGSPEDNEQKQLFVEQHKHYLDEIIEQISEFSKRVILADANLDKVLSAYNKHRDKPIREQAENIIHLFTLTNLGAPAAFKYFDTTIDRKRYTSTKEVLDATLIHQSITGLYETRIDLSQLGGD

SEQ ID NO: 9033 - protein, 1368 aa, Streptococcus pyogenes
MDKKYSIGLDIGTNSVGWAVITDEYKVPSKKFKVLGNTDRHSIKKNLIGALLFDSGETAEATRLKRTARRRYTRRKNRICYLQEIFSNEMAKVDDSFFHRLEESFLVEEDKKHERHPIFGNIVDEVAYHEKYPTIYHLRKKLVDSTDKADLRLIYLALAHMIKFRGHFLIEGDLNPDNSDVDKLFIQLVQTYNQLFEENPINASGVDAKAILSARLSKSRRLENLIAQLPGEKKNGLFGNLIALSLGLTPNFKSNFDLAEDTKLQLSKDTYDDDLDNLLAQIGDQYADLFLAAKNLSDAILLSDILRVNTEITKAPLSASMIKLYDEHHQDLTLLKALVRQQLPEKYKEIFFDQSKNGYAGYIDGGASQEEFYKFIKPILEKMDGTEELLVKLNREDLLRKQRTFDNGIIPHQIHLGELHAILRRQEDFYPFLKDNREKIEKILTFRIPYYVGPLARGNSRFAWMTRKSEETITPWNFEKVVDKGASAQSFIERMTNFDKNLPNEKVLPKHSLLYEYFTVYNELTKVKYVTEGMRKPAFLSGDQKKAIVDLLFKTNRKVTVKQLKEDYFKKIECFDSVEISGVEDRFNASLGTYHDLLKIIKDKDFLDNEENEDILEDIVLTLTLFEDREMIEERLKTYAHLFDDKVMKQLKRRRYTGWGRLSRKLINGIRDKQSGKTILDFLKSDGFANRNFIQLIHDDSLTFKEDIQKAQVSGQGDSLHEHIANLAGSPAIKKGILQTVKVVDELVKVMGRHKPENIVIEMARENQTTQKGQKNSRERMKRIEEGIKELGSQILKEHPVENTQLQNEKLYLYYLQNGRDMYVDQELDINRLSDYDVDHIVPQSFLKDDSIDNKVLTRSDKNRGKSDNVPSEEVVKKMKNYWRQLLNAKLITQRKFDNLTKAERGGLSELDKAGFIKRQLVETRQITKHVAQILDSRMNTKYDENDKLIREVKVITLKSKLVSDFRKDFQFYKVREINNYHHAHDAYLNAVVGTALIKKYPKLESEFVYGDYKVYDVRKMIAKSEQEIGKATAKYFFYSNIMNFFKTEITLANGEIRKRPLIETNGETGEIVWDKGRDFATVRKVLSMPQVNIVKKTEVQTGGFSKESIRPKRNSDKLIARKKDWDPKKYGGFVSPTVAYSVLVVAKVEKGKSKKLKSVKELLGITIMERSSFEKNPIDFLEAKGYKEVKKDLIIKLPKYSLFELENGRKRMLASARFLQKGNELALPSKYVNFLYLASHYEKLKGSPEDNEQKQLFVEQHKHYLDEIIEQISEFSKRVILADANLDKVLSAYNKHRDKPIREQAENIIHLFTLTNLGAPRAFKYFDTTIDRKVYRSTKEVLDATLIHQSITGLYETRIDLSQLGGD

SEQ ID NO: 9034 - protein, 1122 aa, Streptococcus thermophilus
MSDLVLGLDIGIGSVGVGILNKVTGEIIHKNSRIFPAAQAENNLVRRTNRQGRRLARRKKHRRVRLNRLFEESGLITDFTKISINLNPYQLRVKGLTDELSNEELFIALKNMVKHRGISYLDDASDDGNSSVGDYAQIVKENSKQLETKTPGQIQLERYQTYGQLRGDFTVEKDGKKHRLINVFPTSAYRSEALRILQTQQEFNPQITDEFINRYLEILTGKRKYYHGPGNEKSRTDYGRYRTSGETLDNIFGILIGKCTFYPDEFRAAKASYTAQEFNLLNDLNNLTVPTETKKLSKEQKNQIINYVKNEKAMGPAKLFKYIAKLLSCDVADIKGYRIDKSGKAEIHTFEAYRKMKTLETLDIEQMDRETLDKLAYVLTLNTEREGIQEALEHEFADGSFSQKQVDELVQFRKANSSIFGKGWHNFSVKLMMELIPELYETSEEQMTILTRLGKQKTTSSSNKTKYIDEKLLTEEIYNPVVAKSVRQAIKIVNAAIKEYGDFDNIVIEMARETNEDDEKKAIQKIQKANKDEKDAAMLKAANQYNGKAELPHSVFHGHKQLATKIRLWHQQGERCLYTGKTISIHDLINNSNQFEVDHILPLSITFDDSLANKVLVYATANQEKGQRTPYQALDSMDDAWSFRELKAFVRESKTLSNKKKEYLLTEEDISKFDVRKKFIERNLVDTRYASRVVLNALQEHFRAHKIDTKVSVVRGQFTSQLRRHWGIEKTRDTYHHHAVDALIIAASSQLNLWKKQKNTLVSYSEEQLLDIETGELISDDEYKESVFKAPYQHFVDTLKSKEFEDSILFSYQVDSKFNRKISDATIYATRQAKVGKDKKDETYVLGKIKDIYTQDGYDAFMKIYKKDKSKFLMYRHDPQTFEKVIEPILENYPNKQMNEKGKEVPCNPFLKYKEEHGYIRKYSKKGNGPEIKSLKYYDSKLLGNPIDITPENSKNKVVLQSLKPWRTDVYFNKATGKYEILGLKYADLQFEKGTGTYKISQEKYNDIKKKEGVDSDSEFKFTLYKNDLLLVKDTETKEQQLFRFLSRTLPKQKHYVELKPYDKQKFEGGEALIKVLGNVANGGQCIKGLAKSNISIYKVRTDVLGNQHIIKNEGDKPKLDF

SEQ ID NO: 9035 - protein, 1122 aa, Streptococcus thermophilus
MSDLVLGLDIGIGSVGVGILNKVTGEIIHKNSRIFPAAQAENNLVRRTNRQGRRLARRKKHRRVRLNRLFEESGLITDFTKISINLNPYQLRVKGLTDELSNEELFIALKNMVKHRGISYLDDASDDGNSSVGDYAQIVKENSKQLETKTPGQIQLERYQTYGQLRGDFTVEKDGKKHRLINVFPTSAYRSEALRILQTQQEFNPQITDEFINRYLEILTGKRKYYHGPGNEKSRTDYGRYRTSGETLDNIFGILIGKCTFYPDEFRAAKASYTAQEFNLLNDLNNLTVPTETKKLSKEQKNQIINYVKNEKAMGPAKLFKYIAKLLSCDVADIKGYRIDKSGKAEIHTFEAYRKMKTLETLDIEQMDRETLDKLAYVLTLNTEREGIQEALEHEFADGSFSQKQVDELVQFRKANSSIFGKGWHNFSVKLMMELIPELYETSEEQMTILTRLGKQKTTSSSNKTKYIDEKLLTEEIYNPVVAKSVRQAIKIVNAAIKEYGDFDNIVIEMARETNEDDEKKAIQKIQKANKDEKDAAMLKAANQYNGKAELPHSVFHGHKQLATKIRLWHQQGERCLYTGKTISIHDLINNSNQFEVDHILPLSITFDDSLANKVLVYATANQEKGQRTPYQALDSMDDAWSFRELKAFVRESKTLSNKKKEYLLTEEDISKFDVRKKFIERNLVDTRYASRVVLNALQEHFRAHKIDTKVSVVRGQFTSQLRRHWGIEKTRDTYHHHAVDALIIAASSQLNLWKKQKNTLVSYSEEQLLDIETGELISDDEYKESVFKAPYQHFVDTLKSKEFEDSILFSYQVDSKFNRKISDATIYATRQAKVGKDKKDETYVLGKIKDIYTQDGYDAFMKIYKKDKSKFLMYRHDPQTFEKVIEPILENYPNKQMNEKGKEVPCNPFLKYKEEHGYIRKYSKKGNGPEIKSLKYYDSKLLGNPIDITPENSKNKVVLQSLKPWRTDVYFNKNTGKYEILGLKYADLQFEKKTGTYKISQEKYNGIMKEEGVDSDSEFKFTLYKNDLLLVKDTETKEQQLFRFLSRTMPNVKYYVELKPYSKDKFEKNESLIEILGSADKSGRCIKGLGKSNISIYKVRTDVLGNQHIIKNEGDKPKLDF

SEQ ID NO: 9036 - protein, 1120 aa, Streptococcus thermophilus
MSDLVLGLDIGIGSVGVGILNKVTGEIIHKNSRIFPAAQAENNLVRRTNRQGRRLARRKKHRRVRLNRLFEESGLITDFTKISINLNPYQLRVKGLTDELSNEELFIALKNMVKHRGISYLDDASDDGNSSVGDYAQIVKENSKQLETKTPGQIQLERYQTYGQLRGDFTVEKDGKKHRLINVFPTSAYRSEALRILQTQQEFNPQITDEFINRYLEILTGKRKYYHGPGNEKSRTDYGRYRTSGETLDNIFGILIGKCTFYPDEFRAAKASYTAQEFNLLNDLNNLTVPTETKKLSKEQKNQIINYVKNEKAMGPAKLFKYIAKLLSCDVADIKGYRIDKSGKAEIHTFEAYRKMKTLETLDIEQMDRETLDKLAYVLTLNTEREGIQEALEHEFADGSFSQKQVDELVQFRKANSSIFGKGWHNFSVKLMMELIPELYETSEEQMTILTRLGKQKTTSSSNKTKYIDEKLLTEEIYNPVVAKSVRQAIKIVNAAIKEYGDFDNIVIEMARETNEDDEKKAIQKIQKANKDEKDAAMLKAANQYNGKAELPHSVFHGHKQLATKIRLWHQQGERCLYTGKTISIHDLINNSNQFEVDHILPLSITFDDSLANKVLVYATANQEKGQRTPYQALDSMDDAWSFRELKAFVRESKTLSNKKKEYLLTEEDISKFDVRKKFIERNLVDTRYASRVVLNALQEHFRAHKIDTKVSVVRGQFTSQLRRHWGIEKTRDTYHHHAVDALIIAASSQLNLWKKQKNTLVSYSEDQLLDIETGELISDDEYKESVFKAPYQHFVDTLKSKEFEDSILFSYQVDSKFNRKISDATIYATRQAKVGKDKADETYVLGKIKDIYTQDGYDAFMKIYKKDKSKFLMYRHDPQTFEKVIEPILENYPNKQINEKGKEVPCNPFLKYKEEHGYIRKYSKKGNGPEIKSLKYYDSKLGNHIDITPKDSNNKVVLQSLKPWRTDVYFNKNTGKYEILGLKYSDMQFEKGTGKYSISKEQYENIKVREGVDENSEFKFTLYKNDLLLLKDSENGEQILLRFTSRNDTSKHYVELKPYNRQKFEGSEYLIKSLGTVAKGGQCIKGLGKSNISIYKVRTDVLGNQHIIKNEGDKPKLDF

SEQ ID NO: 9037 - protein, 1120 aa, Streptococcus thermophilus
MSDLVLGLDIGIGSVGVGILNKVTGEIIHKNSRIFPAAQAENNLVRRTNRQGRRLARRKKHRRVRLNRLFEESGLITDFTKISINLNPYQLRVKGLTDELSNEELFIALKNMVKHRGISYLDDASDDGNSSVGDYAQIVKENSKQLETKTPGQIQLERYQTYGQLRGDFTVEKDGKKHRLINVFPTSAYRSEALRILQTQQEFNPQITDEFINRYLEILTGKRKYYHGPGNEKSRTDYGRYRTSGETLDNIFGILIGKCTFYPDEFRAAKASYTAQEFNLLNDLNNLTVPTETKKLSKEQKNQIINYVKNEKAMGPAKLFKYIAKLLSCDVADIKGYRIDKSGKAEIHTFEAYRKMKTLETLDIEQMDRETLDKLAYVLTLNTEREGIQEALEHEFADGSFSQKQVDELVQFRKANSSIFGKGWHNFSVKLMMELIPELYETSEEQMTILTRLGKQKTTSSSNKTKYIDEKLLTEEIYNPVVAKSVRQAIKIVNAAIKEYGDFDNIVIEMARETNEDDEKKAIQKIQKANKDEKDAAMLKAANQYNGKAELPHSVFHGHKQLATKIRLWHQQGERCLYTGKTISIHDLINNSNQFEVDHILPLSITFDDSLANKVLVYATANQEKGQRTPYQALDSMDDAWSFRELKAFVRESKTLSNKKKEYLLTEEDISKFDVRKKFIERNLVDTRYASRVVLNALQEHFRAHKIDTKVSVVRGQFTSQLRRHWGIEKTRDTYHHHAVDALIIAASSQLNLWKKQKNTLVSYSEDQLLDIETGELISDDEYKESVFKAPYQHFVDTLKSKEFEDSILFSYQVDSKFNRKISDATIYATRQAKVGKDKADETYVLGKIKDIYTQDGYDAFMKIYKKDKSKFLMYRHDPQTFEKVIEPILENYPNKQINEKGKEVPCNPFLKYKEEHGYIRKYSKKGNGPEIKSLKYYDSKLGNHIDITPKDSNNKVVLQSLKPWRTDVYFNKNTGKYEILGLKYSDMQFEKGTGKYSISKEQYENIKVREGVDENSEFKFTLYKNDLLLLKDSENGEQILLRFTSRNDTSKHYVELKPYNRQKFEGSEYLIKSLGTVVKGGRCIKGLGKSNISIYKVRTDVLGNQHIIKNEGDKPKLDF

SEQ ID NO: 9038 - protein, 1057 aa, Staphylococcus sp.
MNQKFILGLDIGITSVGYGLIDYETKNIIDAGVRLFPEANVENNEGRRSKRGSRRLKRRRIHRLERVKLLLTEYDLINKEQIPTSNNPYQIRVKGLSEILSKDELAIALLHLAKRRGIHNVDVAADKEETASDSLSTKDQINKNAKFLESRYVCELQKERLENEGHVRGVENRFLTKDIVREAKKIIDTQMQYYPEIDETFKEKYISLVETRREYFEGPGQGSPFGWNGDLKKWYEMLMGHCTYFPQELRSVKYAYSADLFNALNDLNNLIIQRDNSEKLEYHEKYHIIENVFKQKKKPTLKQIAKEIGVNPEDIKGYRITKSGTPEFTSFKLFHDLKKVVKDHAILDDIDLLNQIAEILTIYQDKDSIVAELGQLEYLMSEADKQSISELTGYTGTHSLSLKCMNMIIDELWHSSMNQMEVFTYLNMRPKKYELKGYQRIPTDMIDDAILSPVVKRTFIQSINVINKVIEKYGIPEDIIIELARENNSDDRKKFINNLQKKNEATRKRINEIIGQTGNQNAKRIVEKIRLHDQQEGKCLYSLESIPLEDLLNNPNHYEVDHIIPRSVSFDNSYHNKVLVKQSENSKKSNLTPYQYFNSGKSKLSYNQFKQHILNLSKSQDRISKKKKEYLLEERDINKFEVQKEFINRNLVDTRYATRELTNYLKAYFSANNMNVKVKTINGSFTDYLRKVWKFKKERNHGYKHHAEDALIIANADFLFKENKKLKAVNSVLEKPEIETKQLDIQVDSEDNYSEMFIIPKQVQDIKDFRNFKYSHRVDKKPNRQLINDTLYSTRKKDNSTYIVQTIKDIYAKDNTTLKKQFDKSPEKFLMYQHDPRTFEKLEVIMKQYANEKNPLAKYHEETGEYLTKYSKKNNGPIVKSLKYIGNKLGSHLDVTHQFKSSTKKLVKLSIKNYRFDVYLTEKGYKFVTIAYLNVFKKDNYYYIPKDKYQELKEKKKIKDTDQFIASFYKNDLIKLNGDLYKIIGVNSDDRNIIELDYYDIKYKDYCEINNIKGEPRIKKTIGKKTESIEKFTTDVLGNLYLHSTEKAPQLIFKRGL

SEQ ID NO: 9039 - protein, 1057 aa, Staphylococcus sp.
MNQKFILGLDIGITSVGYGLIDYETKNIIDAGVRLFPEANVENNEGRRSKRGSRRLKRRRIHRLERVKLLLTEYDLINKEQIPTSNNPYQIRVKGLSEILSKDELAIALLHLAKRRGIHNVDVAADKEETASDSLSTKDQINKNAKFLESRYVCELQKERLENEGHVRGVENRFLTKDIVREAKKIIDTQMQYYPEIDETFKEKYISLVETRREYFEGPGQGSPFGWNGDLKKWYEMLMGHCTYFPQELRSVKYAYSADLFNALNDLNNLIIQRDNSEKLEYHEKYHIIENVFKQKKKPTLKQIAKEIGVNPEDIKGYRITKSGTPEFTSFKLFHDLKKVVKDHAILDDIDLLNQIAEILTIYQDKDSIVAELGQLEYLMSEADKQSISELTGYTGTHSLSLKCMNMIIDELWHSSMNQMEVFTYLNMRPKKYELKGYQRIPTDMIDDAILSPVVKRTFIQSINVINKVIEKYGIPEDIIIELARENNSDDRKKFINNLQKKNEATRKRINEIIGQTGNQNAKRIVEKIRLHDQQEGKCLYSLESIPLEDLLNNPNHYEVDHIIPRSVSFDNSYHNKVLVKQSENSKKSNLTPYQYFNSGKSKLSYNQFKQHILNLSKSQDRISKKKKEYLLEERDINKFEVQKEFINRNLVDTRYATRELTSYLKAYFSANNMDVKVKTINGSFTNHLRKVWRFDKYRNHGYKHHAEDALIIANADFLFKENKKLQNTNKILEKPTIENNTKKVTVEKEEDYNNVFETPKLVEDIKQYRDYKFSHRVDKKPNRQLINDTLYSTRMKDEHDYIVQTITDIYGKDNTNLKKQFNKNPEKFLMYQNDPKTFEKLSIIMKQYSDEKNPLAKYYEETGEYLTKYSKKNNGPIVKKIKLLGNKVGNHLDVTNKYENSTKKLVKLSIKNYRFDVYLTEKGYKFVTIAYLNVFKKDNYYYIPKDKYQELKEKKKIKDTDQFIASFYKNDLIKLNGDLYKIIGVNSDDRNIIELDYYDIKYKDYCEINNIKGEPRIKKTIGKKTESIEKFTTDVLGNLYLHSTEKAPQLIFKRGL

SEQ ID NO: 9040-10050 - skipped (1011 entries)

SEQ ID NO: 10051 - DNA, 24 bp, synthetic construct
  source 1..24: mol_type = other DNA
gttgtagctccctttctcatttcg

SEQ ID NO: 10052 - DNA, 25 bp, synthetic construct
  source 1..25: mol_type = other DNA
gttgtagctccctttttcatttcgc

SEQ ID NO: 10053 - DNA, 14 bp, synthetic construct
  source 1..14: mol_type = other DNA
gttttagtactctg

SEQ ID NO: 10054 - DNA, 14 bp, synthetic construct
  source 1..14: mol_type = other DNA
gttttagtactctg

SEQ ID NO: 10055 - DNA, 14 bp, synthetic construct
  source 1..14: mol_type = other DNA
gttttagtactctg

SEQ ID NO: 10056 - DNA, 14 bp, synthetic construct
  source 1..14: mol_type = other DNA
gttttagtactctg

SEQ ID NO: 10057 - DNA, 12 bp, synthetic construct
  source 1..12: mol_type = other DNA
gttttagagcta

SEQ ID NO: 10058 - DNA, 12 bp, synthetic construct
  source 1..12: mol_type = other DNA
gttttagagcta

SEQ ID NO: 10059 - DNA, 12 bp, synthetic construct
  source 1..12: mol_type = other DNA
gttttagagcta

SEQ ID NO: 10060 - DNA, 12 bp, synthetic construct
  source 1..12: mol_type = other DNA
gttttagagcta

SEQ ID NO: 10061 - DNA, 14 bp, synthetic construct
  source 1..14: mol_type = other DNA
gtctttgtactctg

SEQ ID NO: 10062 - DNA, 16 bp, synthetic construct
  source 1..16: mol_type = other DNA
gctatagttccttact

SEQ ID NO: 10063 - DNA, 14 bp, synthetic construct
  source 1..14: mol_type = other DNA
gtcttagtactctg

SEQ ID NO: 10064 - DNA, 14 bp, synthetic construct
  source 1..14: mol_type = other DNA
gtcttagtactctg

SEQ ID NO: 10065 - DNA, 14 bp, synthetic construct
  source 1..14: mol_type = other DNA
gtcttagtactctg

SEQ ID NO: 10066 - DNA, 14 bp, synthetic construct
  source 1..14: mol_type = other DNA
gtcttagtactctg

SEQ ID NO: 10067 - DNA, 12 bp, synthetic construct
  source 1..12: mol_type = other DNA
actggggttcag

SEQ ID NO: 10068 - DNA, 12 bp, synthetic construct
  source 1..12: mol_type = other DNA
gttttagtccct

SEQ ID NO: 10069 - DNA, 16 bp, synthetic construct
  source 1..16: mol_type = other DNA
gtcatagttcccctga

SEQ ID NO: 10070 - DNA, 12 bp, synthetic construct
  source 1..12: mol_type = other DNA
gttttagagcta

SEQ ID NO: 10071 - DNA, 24 bp, synthetic construct
  source 1..24: mol_type = other DNA
gttgtagctccctttctcatttcg

SEQ ID NO: 10072 - DNA, 12 bp, synthetic construct
  source 1..12: mol_type = other DNA
gttttagagcta

SEQ ID NO: 10073 - DNA, 12 bp, synthetic construct
  source 1..12: mol_type = other DNA
gttttagagcta

SEQ ID NO: 10074 - DNA, 17 bp, synthetic construct
  source 1..17: mol_type = other DNA
gtttaagagctatgctg

SEQ ID NO: 10075 - DNA, 17 bp, synthetic construct
  source 1..17: mol_type = other DNA
gtttaagagctatgctg

SEQ ID NO: 10076 - DNA, 17 bp, synthetic construct
  source 1..17: mol_type = other DNA
gtttaagagctatgctg

SEQ ID NO: 10077 - DNA, 12 bp, synthetic construct
  source 1..12: mol_type = other DNA
gttttagagcta

SEQ ID NO: 10078 - DNA, 12 bp, synthetic construct
  source 1..12: mol_type = other DNA
gttttagagcta

SEQ ID NO: 10079 - DNA, 12 bp, synthetic construct
  source 1..12: mol_type = other DNA
gttttagagcta

SEQ ID NO: 10080 - DNA, 12 bp, synthetic construct
  source 1..12: mol_type = other DNA
gttttagagcta

SEQ ID NO: 10081 - DNA, 12 bp, synthetic construct
  source 1..12: mol_type = other DNA
gttttagagcta

SEQ ID NO: 10082 - DNA, 17 bp, synthetic construct
  source 1..17: mol_type = other DNA
gtttaagagctatgctg

SEQ ID NO: 10083 - DNA, 17 bp, synthetic construct
  source 1..17: mol_type = other DNA
gtttaagagctatgctg

SEQ ID NO: 10084 - DNA, 14 bp, synthetic construct
  source 1..14: mol_type = other DNA
gtctttgtactctg

SEQ ID NO: 10085 - DNA, 14 bp, synthetic construct
  source 1..14: mol_type = other DNA
gtctttgtactctg

SEQ ID NO: 10086 - DNA, 14 bp, synthetic construct
  source 1..14: mol_type = other DNA
gtctttgtactctg

SEQ ID NO: 10087 - DNA, 14 bp, synthetic construct
  source 1..14: mol_type = other DNA
gtctttgtactctg

SEQ ID NO: 10088 - DNA, 14 bp, synthetic construct
  source 1..14: mol_type = other DNA
gttttagtactctg

SEQ ID NO: 10089 - DNA, 14 bp, synthetic construct
  source 1..14: mol_type = other DNA
gttttagtactctg

SEQ ID NO: 10090-10150 - skipped (61 entries)

SEQ ID NO: 10151 - DNA, 93 bp, synthetic construct
  source 1..93: mol_type = other DNA
cgaaatgagaaccgttgctacaataaggccgtctgaaaagatgtgccgcaacgctctgccccttaaagcttctgctttaaggggcatcgttta

SEQ ID NO: 10152 - DNA, 82 bp, synthetic construct
  source 1..82: mol_type = other DNA
gcgaaatgaaaaacgttgttacaataagagatgaatttctcgcaaagctctgcctcttgaaatttcggtttcaagaggcatc

SEQ ID NO: 10153 - DNA, 58 bp, synthetic construct
  source 1..58: mol_type = other DNA
cagaatctactaaaacaaggcaaaatgccgtgtttatctcgtcaacttgttggcgaga

SEQ ID NO: 10154 - DNA, 58 bp, synthetic construct; identical to SEQ ID NO: 10153
  source 1..58: mol_type = other DNA

SEQ ID NO: 10155 - DNA, 58 bp, synthetic construct; identical to SEQ ID NO: 10153
  source 1..58: mol_type = other DNA

SEQ ID NO: 10156 - DNA, 58 bp, synthetic construct; identical to SEQ ID NO: 10153
  source 1..58: mol_type = other DNA

SEQ ID NO: 10157 - DNA, 60 bp, synthetic construct
  source 1..60: mol_type = other DNA
tagcaagttaaaataaggctagtccgttatcaacttgaaaaagtggcaccgagtcggtgc

SEQ ID NO: 10158 - DNA, 60 bp, synthetic construct; identical to SEQ ID NO: 10157
  source 1..60: mol_type = other DNA

SEQ ID NO: 10159 - DNA, 60 bp, synthetic construct; identical to SEQ ID NO: 10157
  source 1..60: mol_type = other DNA

SEQ ID NO: 10160 - DNA, 60 bp, synthetic construct; identical to SEQ ID NO: 10157
  source 1..60: mol_type = other DNA

SEQ ID NO: 10161 - DNA, 66 bp, synthetic construct
  source 1..66: mol_type = other DNA
cagaagctacaaagataaggcttcatgccgaaatcaacaccctgtcattttatggcagggtgtttt

SEQ ID NO: 10162 - DNA, 127 bp, synthetic construct
  source 1..127: mol_type = other DNA
ggtaagttgctatagtaagggcaacagacccgaggcgttggggatcgcctagcccgtgtttacgggctctccccatattcaaaataatgacagacgagcaccttggagcatttatctccgaggtgct

SEQ ID NO: 10163 - DNA, 58 bp, synthetic construct
  source 1..58: mol_type = other DNA
cagaatctactaagacaaggcaaaatgccgtgtttatctcgtcaacttgttggcgaga

SEQ ID NO: 10164 - DNA, 58 bp, synthetic construct; identical to SEQ ID NO: 10163
  source 1..58: mol_type = other DNA

SEQ ID NO: 10165 - DNA, 58 bp, synthetic construct; identical to SEQ ID NO: 10163
  source 1..58: mol_type = other DNA

SEQ ID NO: 10166 - DNA, 58 bp, synthetic construct; identical to SEQ ID NO: 10163
  source 1..58: mol_type = other DNA

SEQ ID NO: 10167 - DNA, 76 bp, synthetic construct
  source 1..76: mol_type = other DNA
ctgaacctcagtaagcattggctcgtttccaatgttgattgctccgccggtgctccttatttttaagggcgccggc

SEQ ID NO: 10168 - DNA, 57 bp, synthetic construct
  source 1..57: mol_type = other DNA
agggactaaaataaagagtttgcgggactctgcggggttacaatcccctaaaaccgc

SEQ ID NO: 10169 - DNA, 98 bp, synthetic construct
  source 1..98: mol_type = other DNA
tcagggttactatgataagggctttctgcctaaggcagactgacccgcggcgttggggatcgcctgtcgcccgcttttggcgggcattccccatcctt

SEQ ID NO: 10170 - DNA, 60 bp, synthetic construct; identical to SEQ ID NO: 10157
  source 1..60: mol_type = other DNA

SEQ ID NO: 10171 - DNA, 93 bp, synthetic construct; identical to SEQ ID NO: 10151
  source 1..93: mol_type = other DNA

SEQ ID NO: 10172 - DNA, 60 bp, synthetic construct; identical to SEQ ID NO: 10157
  source 1..60: mol_type = other DNA

SEQ ID NO: 10173 - DNA, 60 bp, synthetic construct; identical to SEQ ID NO: 10157
  source 1..60: mol_type = other DNA

SEQ ID NO: 10174 - DNA, 65 bp, synthetic construct
  source 1..65: mol_type = other DNA
cagcatagcaagtttaaataaggctagtccgttatcaacttgaaaaagtggcaccgagtcggtgc

SEQ ID NO: 10175 - DNA, 65 bp, synthetic construct; identical to SEQ ID NO: 10174
  source 1..65: mol_type = other DNA

SEQ ID NO: 10176 - DNA, 65 bp, synthetic construct; identical to SEQ ID NO: 10174
  source 1..65: mol_type = other DNA

SEQ ID NO: 10177 - DNA, 60 bp, synthetic construct; identical to SEQ ID NO: 10157
  source 1..60: mol_type = other DNA

SEQ ID NO: 10178 - DNA, 60 bp, synthetic construct; identical to SEQ ID NO: 10157
  source 1..60: mol_type = other DNA

SEQ ID NO: 10179 - DNA, 60 bp, synthetic construct; identical to SEQ ID NO: 10157
  source 1..60: mol_type = other DNA

SEQ ID NO: 10180 - DNA, 60 bp, synthetic construct; identical to SEQ ID NO: 10157
  source 1..60: mol_type = other DNA

SEQ ID NO: 10181 - DNA, 60 bp, synthetic construct; identical to SEQ ID NO: 10157
  source 1..60: mol_type = other DNA

SEQ ID NO: 10182 - DNA, 65 bp, synthetic construct; identical to SEQ ID NO: 10174
  source 1..65: mol_type = other DNA

SEQ ID NO: 10183 - DNA, 65 bp, synthetic construct; identical to SEQ ID NO: 10174
  source 1..65: mol_type = other DNA

SEQ ID NO: 10184 - DNA, 66 bp, synthetic construct; identical to SEQ ID NO: 10161
  source 1..66: mol_type = other DNA

SEQ ID NO: 10185 - DNA, 66 bp, synthetic construct; identical to SEQ ID NO: 10161
  source 1..66: mol_type = other DNA

SEQ ID NO: 10186 - DNA, 66 bp, synthetic construct; identical to SEQ ID NO: 10161
  source 1..66: mol_type = other DNA

SEQ ID NO: 10187 - DNA, 66 bp, synthetic construct; identical to SEQ ID NO: 10161
  source 1..66: mol_type = other DNA

SEQ ID NO: 10188 - DNA, 62 bp, synthetic construct
  source 1..62: mol_type = other DNA
cagaatctactgaaacaagacaatatgtcgtgtttatcccatcaatttattggtgggatttt

SEQ ID NO: 10189 - DNA, 62 bp, synthetic construct; identical to SEQ ID NO: 10188
  source 1..62: mol_type = other DNA

SEQ ID NO: 10190-10192 - skipped (3 entries)

SEQ ID NO: 10193 - DNA, 68 bp, synthetic construct
  source 1..68: mol_type = other DNA
tagcaagttaaaataaggctagtccgttatcaacttggacttcggtccaagtggcaccgagtcggtgc

SEQ ID NO: 10194 - DNA, 68 bp, synthetic construct
  source 1..68: mol_type = other DNA
tagcaagttaaaataaggctagtccgttatcaacttggagcttgctccaagtggcaccgagtcggtgc

SEQ ID NO: 10195 - DNA, 76 bp, synthetic construct
  source 1..76: mol_type = other DNA
gttttagagctagaaatagcaagttaaaataaggctagtccgttatcgacttgaaaaagtcgcaccgagtcggtgc

SEQ ID NO: 10196-11000 - skipped (805 entries)

SEQ ID NO: 11001 - protein, 1367 aa, unidentified
DKKYSIGLDIGTNSVGWAVITDEYKVPSKKFKVLGNTDRHSIKKNLIGALLFDSGETAEATRLKRTARRRYTRRKNRICYLQEIFSNEMAKVDDSFFHRLEESFLVEEDKKHERHPIFGNIVDEVAYHEKYPTIYHLRKKLVDSTDKADLRLIYLALAHMIKFRGHFLIEGDLNPDNSDVDKLFIQLVQTYNQLFEENPINASGVDAKAILSARLSKSRRLENLIAQLPGEKKNGLFGNLIALSLGLTPNFKSNFDLAEDAKLQLSKDTYDDDLDNLLAQIGDQYADLFLAAKNLSDAILLSDILRVNTEITKAPLSASMIKRYDEHHQDLTLLKALVRQQLPEKYKEIFFDQSKNGYAGYIDGGASQEEFYKFIKPILEKMDGTEELLVKLNREDLLRKQRTFDNGSIPHQIHLGELHAILRRQEDFYPFLKDNREKIEKILTFRIPYYVGPLARGNSRFAWMTRKSEETITPWNFEEVVDKGASAQSFIERMTNFDKNLPNEKVLPKHSLLYEYFTVYNELTKVKYVTEGMRKPAFLSGEQKKAIVDLLFKTNRKVTVKQLKEDYFKKIECFDSVEISGVEDRFNASLGTYHDLLKIIKDKDFLDNEENEDILEDIVLTLTLFEDREMIEERLKTYAHLFDDKVMKQLKRRRYTGWGRLSRKLINGIRDKQSGKTILDFLKSDGFANRNFMQLIHDDSLTFKEDIQKAQVSGQGDSLHEHIANLAGSPAIKKGILQTVKVVDELVKVMGRHKPENIVIEMARENQTTQKGQKNSRERMKRIEEGIKELGSQILKEHPVENTQLQNEKLYLYYLQNGRDMYVDQELDINRLSDYDVDAIVPQSFLKDDSIDNKVLTRSDKNRGKSDNVPSEEVVKKMKNYWRQLLNAKLITQRKFDNLTKAERGGLSELDKAGFIKRQLVETRQITKHVAQILDSRMNTKYDENDKLIREVKVITLKSKLVSDFRKDFQFYKVREINNYHHAHDAYLNAVVGTALIKKYPKLESEFVYGDYKVYDVRKMIAKSEQEIGKATAKYFFYSNIMNFFKTEITLANGEIRKRPLIETNGETGEIVWDKGRDFATVRKVLSMPQVNIVKKTEVQTGGFSKESILPKRNSDKLIARKKDWDPKKYGGFDSPTVAYSVLVVAKVEKGKSKKLKSVKELLGITIMERSSFEKNPIDFLEAKGYKEVKKDLIIKLPKYSLFELENGRKRMLASAGELQKGNELALPSKYVNFLYLASHYEKLKGSPEDNEQKQLFVEQHKHYLDEIIEQISEFSKRVILADANLDKVLSAYNKHRDKPIREQAENIIHLFTLTNLGAPAAFKYFDTTIDRKRYTSTKEVLDATLIHQSITGLYETRIDLSQLGGD

SEQ ID NO: 11002 - protein, 33 aa, synthetic construct; identical to SEQ ID NO: 5006

SEQ ID NO: 11003 - skipped

SEQ ID NO: 11004 - DNA, 62 bp, synthetic construct
  source 1..62: mol_type = other DNA
cactcctccccatcctctccctctgtccctctgtccctctgaccctgcactgtcccagcacc

SEQ ID NO: 11005 - DNA, 122 bp, synthetic construct
  source 1..122: mol_type = other DNA
caggacacagccttggatcaggacagagacttgggggccatcctgcccctccaacccgacatgtgtacctcagctttttccctcacttgcatcaataaagcttctgtgtttggaacagctaa

SEQ ID NO: 11006 - RNA, 47 nt, synthetic construct
  source 1..47: mol_type = other RNA
gggaaataagagagaaaagaagagtaagaagaaatataagagccacc

SEQ ID NO: 11007 - RNA, 110 nt, synthetic construct
  source 1..110: mol_type = other RNA
tgataataggctggagcctcggtggccatgcttcttgccccttgggcctccccccagcccctcctccccttcctgcacccgtacccccgtggtctttgaataaagtctga

SEQ ID NO: 11008 - RNA, 47 nt, synthetic construct; identical to SEQ ID NO: 11006
  source 1..47: mol_type = other RNA

SEQ ID NO: 11009 - RNA, 110 nt, synthetic construct; identical to SEQ ID NO: 11007
  source 1..110: mol_type = other RNA

SEQ ID NO: 11010 - skipped

SEQ ID NO: 11011 - DNA, 20 bp, synthetic construct
  source 1..20: mol_type = other DNA
gccgaagcactgcacgccgt

SEQ ID NO: 11012 - DNA, 76 bp, synthetic construct
  source 1..76: mol_type = other DNA
gttttagagctagaaatagcaagttaaaataaggctagtccgttatcaacttgaaaaagtggcaccgagtcggtgc

SEQ ID NO: 11013 - DNA, 13 bp, synthetic construct
  source 1..13: mol_type = other DNA
accctgacgtacg

SEQ ID NO: 11014 - DNA, 13 bp, synthetic construct
  source 1..13: mol_type = other DNA
gcgtgcagtgctt

SEQ ID NO: 11015 - DNA, 20 bp, synthetic construct
  source 1..20: mol_type = other DNA
agaagtcgtgctgcttcatg

SEQ ID NO: 11016 - DNA, 76 bp, synthetic construct; identical to SEQ ID NO: 11012
  source 1..76: mol_type = other DNA

SEQ ID NO: 11017 - DNA, 47 bp, synthetic construct
  source 1..47: mol_type = other DNA
accctgacctacggcgtgcagtgcttcggccgctaccccgatcacat

SEQ ID NO: 11018 - DNA, 13 bp, synthetic construct
  source 1..13: mol_type = other DNA
gaagcagcacgac

SEQ ID NO: 11019-11094 - skipped (76 entries)

SEQ ID NO: 11095 - protein, 9 aa, synthetic construct
PAAKRVKLD

SEQ ID NO: 11096 - protein, 1367 aa, synthetic construct
DKKYSIGLDIGTNSVGWAVITDEYKVPSKKFKVLGNTDRHSIKKNLIGALLFDSGETAEATRLKRTARRRYTRRKNRICYLQEIFSNEMAKVDDSFFHRLEESFLVEEDKKHERHPIFGNIVDEVAYHEKYPTIYHLRKKLVDSTDKADLRLIYLALAHMIKFRGHFLIEGDLNPDNSDVDKLFIQLVQTYNQLFEENPINASGVDAKAILSARLSKSRRLENLIAQLPGEKKNGLFGNLIALSLGLTPNFKSNFDLAEDAKLQLSKDTYDDDLDNLLAQIGDQYADLFLAAKNLSDAILLSDILRVNTEITKAPLSASMIKRYDEHHQDLTLLKALVRQQLPEKYKEIFFDQSKNGYAGYIDGGASQEEFYKFIKPILEKMDGTEELLVKLNREDLLRKQRTFDNGSIPHQIHLGELHAILRRQEDFYPFLKDNREKIEKILTFRIPYYVGPLARGNSRFAWMTRKSEETITPWNFEEVVDKGASAQSFIERMTNFDKNLPNEKVLPKHSLLYEYFTVYNELTKVKYVTEGMRKPAFLSGEQKKAIVDLLFKTNRKVTVKQLKEDYFKKIECFDSVEISGVEDRFNASLGTYHDLLKIIKDKDFLDNEENEDILEDIVLTLTLFEDREMIEERLKTYAHLFDDKVMKQLKRRRYTGWGRLSRKLINGIRDKQSGKTILDFLKSDGFANRNFMQLIHDDSLTFKEDIQKAQVSGQGDSLHEHIANLAGSPAIKKGILQTVKVVDELVKVMGRHKPENIVIEMARENQTTQKGQKNSRERMKRIEEGIKELGSQILKEHPVENTQLQNEKLYLYYLQNGRDMYVDQELDINRLSDYDVDHIVPQSFLKDDSIDNKVLTRSDKARGKSDNVPSEEVVKKMKNYWRQLLNAKLITQRKFDNLTKAERGGLSELDKAGFIKRQLVETRQITKHVAQILDSRMNTKYDENDKLIREVKVITLKSKLVSDFRKDFQFYKVREINNYHHAHDAYLNAVVGTALIKKYPKLESEFVYGDYKVYDVRKMIAKSEQEIGKATAKYFFYSNIMNFFKTEITLANGEIRKRPLIETNGETGEIVWDKGRDFATVRKVLSMPQVNIVKKTEVQTGGFSKESILPKRNSDKLIARKKDWDPKKYGGFDSPTVAYSVLVVAKVEKGKSKKLKSVKELLGITIMERSSFEKNPIDFLEAKGYKEVKKDLIIKLPKYSLFELENGRKRMLASAGELQKGNELALPSKYVNFLYLASHYEKLKGSPEDNEQKQLFVEQHKHYLDEIIEQISEFSKRVILADANLDKVLSAYNKHRDKPIREQAENIIHLFTLTNLGAPAAFKYFDTTIDRKRYTSTKEVLDATLIHQSITGLYETRIDLSQLGGD

SEQ ID NO: 11097 - protein, 10 aa, synthetic construct
KRTADGSEFE

SEQ ID NO: 11098 - protein, 19 aa, synthetic construct
KRTADGSEFESPKKKAKVE

SEQ ID NO: 11099 - protein, 29 aa, synthetic construct
KRTADGSEFEKRTADGSEFESPKKKAKVE

SEQ ID NO: 11100-12000 - skipped (901 entries)

SEQ ID NO: 12001 - protein, 8 aa, synthetic construct
EAAAKGSS

SEQ ID NO: 12002 - protein, 20 aa, synthetic construct
EAAAKEAAAKEAAAKEAAAK

SEQ ID NO: 12003 - protein, 8 aa, synthetic construct
PAPEAAAK

SEQ ID NO: 12004 - protein, 11 aa, synthetic construct
EAAAKPAPGGG

SEQ ID NO: 12005 - protein, 18 aa, synthetic construct
GSSGSSGSSGSSGSSGSS

SEQ ID NO: 12006 - protein, 11 aa, synthetic construct
PAPGGGEAAAK

SEQ ID NO: 12007 - protein, 46 aa, synthetic construct; identical to SEQ ID NO: 5217

SEQ ID NO: 12008 - protein, 8 aa, synthetic construct
GSSEAAAK

SEQ ID NO: 12009 - protein, 11 aa, synthetic construct
EAAAKPAPGGS

SEQ ID NO: 12010 - protein, 18 aa, synthetic construct
GGSGGSGGSGGSGGSGGS

SEQ ID NO: 12011 - protein, 46 aa, synthetic construct; identical to SEQ ID NO: 5217

SEQ ID NO: 12012 - protein, 46 aa, synthetic construct; identical to SEQ ID NO: 5217

SEQ ID NO: 12013 - protein, 15 aa, synthetic construct
EAAAKEAAAKEAAAK

SEQ ID NO: 12014 - protein, 11 aa, synthetic construct
PAPEAAAKGSS

SEQ ID NO: 12015 - protein, 46 aa, synthetic construct; identical to SEQ ID NO: 5217

SEQ ID NO: 12016 - protein, 15 aa, synthetic construct
EAAAKEAAAKEAAAK

SEQ ID NO: 12017 - protein, 46 aa, synthetic construct; identical to SEQ ID NO: 5217

SEQ ID NO: 12018 - protein, 11 aa, synthetic construct
PAPAPAPAPAP

SEQ ID NO: 12019 - protein, 11 aa, synthetic construct
PAPAPAPAPAP

SEQ ID NO: 12020 - protein, 11 aa, synthetic construct
EAAAKGGSPAP

SEQ ID NO: 12021 - skipped

SEQ ID NO: 12022 - protein, 9 aa, synthetic construct
PAPGGGGSS

SEQ ID NO: 12023 - protein, 16 aa, synthetic construct
SGSETPGTSESATPES

SEQ ID NO: 12024 - protein, 11 aa, synthetic construct
PAPEAAAKGSS

SEQ ID NO: 12025 - protein, 11 aa, synthetic construct
EAAAKGGSGGG

SEQ ID NO: 12026 - protein, 10 aa, synthetic construct
GGGGSGGGGS

SEQ ID NO: 12027 - protein, 9 aa, synthetic construct
GGGPAPGSS

SEQ ID NO: 12028 - protein, 18 aa, synthetic construct
GGSGGSGGSGGSGGSGGS

SEQ ID NO: 12029 - protein, 30 aa, synthetic construct; identical to SEQ ID NO: 5112

SEQ ID NO: 12030 - protein, 6 aa, synthetic construct
GSSPAP

SEQ ID NO: 12031 - protein, 11 aa, synthetic construct
EAAAKGSSPAP

SEQ ID NO: 12032 - protein, 11 aa, synthetic construct
GSSGGGEAAAK

SEQ ID NO: 12033 - protein, 18 aa, synthetic construct
GGSGGSGGSGGSGGSGGS

SEQ ID NO: 12034 - protein, 9 aa, synthetic construct
PAPAPAPAP

SEQ ID NO: 12035 - protein, 20 aa, synthetic construct
EAAAKEAAAKEAAAKEAAAK

SEQ ID NO: 12036 - protein, 11 aa, synthetic construct
EAAAKGGSPAP

SEQ ID NO: 12037 - protein, 11 aa, synthetic construct
PAPGGSEAAAK

SEQ ID NO: 12038 - protein, 30 aa, synthetic construct; identical to SEQ ID NO: 5112

SEQ ID NO: 12039 - protein, 15 aa, synthetic construct
EAAAKGGGGSEAAAK

SEQ ID NO: 12040 - protein, 46 aa, synthetic construct; identical to SEQ ID NO: 5217

SEQ ID NO: 12041 - skipped

SEQ ID NO: 12042 - protein, 12 aa, synthetic construct
GSSGSSGSSGSS

SEQ ID NO: 12043 - protein, 11 aa, synthetic construct
GSSPAPEAAAK

SEQ ID NO: 12044 - protein, 11 aa, synthetic construct
GGSPAPEAAAK

SEQ ID NO: 12045 - protein, 11 aa, synthetic construct
GGGEAAAKGGS

SEQ ID NO: 12046 - protein, 25 aa, synthetic construct
EAAAKEAAAKEAAAKEAAAKEAAAK

SEQ ID NO: 12047 - protein, 8 aa, synthetic construct
GGGGGGGG

SEQ ID NO: 12048 - protein, 6 aa, synthetic construct
GGGPAP

SEQ ID NO: 12049 - protein, 13 aa, synthetic construct
PAPAPAPAPAPAP

SEQ ID NO: 12050 - protein, 18 aa, synthetic construct
GGSGGSGGSGGSGGSGGS

SEQ ID NO: 12051 - skipped

SEQ ID NO: 12052 - protein, 18 aa, synthetic construct
GGSGGSGGSGGSGGSGGS

SEQ ID NO: 12053 - protein, 13 aa, synthetic construct
PAPAPAPAPAPAP

SEQ ID NO: 12054 - protein, 11 aa, synthetic construct
EAAAKPAPGSS

SEQ ID NO: 12055 - protein, 20 aa, synthetic construct
EAAAKEAAAKEAAAKEAAAK

SEQ ID NO: 12056 - protein, 8 aa, synthetic construct
EAAAKGGS

SEQ ID NO: 12057 - protein, 15 aa, synthetic construct
GGGGSEAAAKGGGGS

SEQ ID NO: 12058 - protein, 11 aa, synthetic construct
EAAAKPAPGSS

SEQ ID NO: 12059 - protein, 20 aa, synthetic construct
GGGGSGGGGSGGGGSGGGGS

SEQ ID NO: 12060 - protein, 11 aa, synthetic construct
EAAAKGGGGGS

SEQ ID NO: 12061 - protein, 6 aa, synthetic construct
GGSPAP

SEQ ID NO: 12062 - protein, 11 aa, synthetic construct
EAAAKGGGPAP

SEQ ID NO: 12063 - protein, 25 aa, synthetic construct
EAAAKEAAAKEAAAKEAAAKEAAAK

SEQ ID NO: 12064 - skipped

SEQ ID NO: 12065 - protein, 5 aa, synthetic construct
EAAAK

SEQ ID NO: 12066 - protein, 9 aa, synthetic construct
GGSGSSPAP

SEQ ID NO: 12067 - protein, 18 aa, synthetic construct
GSSGSSGSSGSSGSSGSS

SEQ ID NO: 12068 - protein, 11 aa, synthetic construct
GSSEAAAKGGG

SEQ ID NO: 12069 - protein, 11 aa, synthetic construct
GGGEAAAKGGS

SEQ ID NO: 12070 - protein, 15 aa, synthetic construct
EAAAKGGGGSEAAAK

SEQ ID NO: 12071 - protein, 15 aa, synthetic construct
GGGGSGGGGSGGGGS

SEQ ID NO: 12072 - protein, 20 aa, synthetic construct
GGGGSGGGGSGGGGSGGGGS

SEQ ID NO: 12073 - protein, 16 aa, synthetic construct
SGSETPGTSESATPES

SEQ ID NO: 12074 - protein, 11 aa, synthetic construct
GGGEAAAKPAP

SEQ ID NO: 12075 - protein, 11 aa, synthetic construct
EAAAKGSSGGG

SEQ ID NO: 12076 - protein, 25 aa, synthetic construct
EAAAKEAAAKEAAAKEAAAKEAAAK

SEQ ID NO: 12077 - protein, 12 aa, synthetic construct
GGSGGSGGSGGS

SEQ ID NO: 12078 - protein, 11 aa, synthetic construct
GGSEAAAKPAP

SEQ ID NO: 12079 - protein, 11 aa, synthetic construct
EAAAKGSSGGG

SEQ ID NO: 12080 - protein, 5 aa, synthetic construct
GGGGS

SEQ ID NO: 12081 - protein, 11 aa, synthetic construct
GGGEAAAKGSS

SEQ ID NO: 12082 - protein, 13 aa, synthetic construct
PAPAPAPAPAPAP

SEQ ID NO: 12083 - protein, 20 aa, synthetic construct
GGGGSGGGGSGGGGSGGGGS

SEQ ID NO: 12084 - protein, 11 aa, synthetic construct
GGGEAAAKGSS

SEQ ID NO: 12085 - protein, 9 aa, synthetic construct
PAPGGSGSS

SEQ ID NO: 12086 - protein, 12 aa, synthetic construct
GSAGSAAGSGEF

SEQ ID NO: 12087 - protein, 11 aa, synthetic construct
PAPGGSEAAAK

SEQ ID NO: 12088 - protein, 6 aa, synthetic construct
GGSGSS

SEQ ID NO: 12089 - protein, 9 aa, synthetic construct
PAPGGGGSS

SEQ ID NO: 12090 - protein, 9 aa, synthetic construct
GSSGSSGSS

SEQ ID NO: 12091 - protein, 46 aa, synthetic construct; identical to SEQ ID NO: 5217

SEQ ID NO: 12092 - protein, 5 aa, synthetic construct
EAAAK

SEQ ID NO: 12093 - protein, 12 aa, synthetic construct
GSSGSSGSSGSS

SEQ ID NO: 12094 - protein, 9 aa, synthetic construct
PAPGGGGSS

SEQ ID NO: 12095 - protein, 11 aa, synthetic construct
GGGEAAAKGGS

SEQ ID NO: 12096 - protein, 11 aa, synthetic construct
PAPGGGEAAAK

SEQ ID NO: 12097 - protein, 9 aa, synthetic construct
GGGGGSPAP

SEQ ID NO: 12098 - protein, 8 aa, synthetic construct
EAAAKGGS

SEQ ID NO: 12099 - protein, 11 aa, synthetic construct
EAAAKGSSPAP

SEQ ID NO: 12100 - protein, 8 aa, synthetic construct
PAPEAAAK

SEQ ID NO: 12101 - protein, 12 aa, synthetic construct
GGSGGSGGSGGS

SEQ ID NO: 12102 - protein, 9 aa, synthetic construct
GGGPAPGGS

SEQ ID NO: 12103 - protein, 12 aa, synthetic construct
GSSGSSGSSGSS

SEQ ID NO: 12104 - protein, 11 aa, synthetic construct
EAAAKPAPGGS

SEQ ID NO: 12105 - protein, 6 aa, synthetic construct
GSSGSS

SEQ ID NO: 12106 - protein, 20 aa, synthetic construct
EAAAKEAAAKEAAAKEAAAK

SEQ ID NO: 12107 - protein, 20 aa, synthetic construct
EAAAKEAAAKEAAAKEAAAK

SEQ ID NO: 12108 - skipped

SEQ ID NO: 12109 - protein, 10 aa, synthetic construct
EAAAKEAAAK

SEQ ID NO: 12110 - protein, 11 aa, synthetic construct
PAPEAAAKGGG

SEQ ID NO: 12111 - protein, 11 aa, synthetic construct
GGSGSSEAAAK

SEQ ID NO: 12112 - protein, 25 aa, synthetic construct
EAAAKEAAAKEAAAKEAAAKEAAAK

SEQ ID NO: 12113 - protein, 11 aa, synthetic construct
GSSEAAAKPAP

SEQ ID NO: 12114 - protein, 25 aa, synthetic construct
EAAAKEAAAKEAAAKEAAAKEAAAK

SEQ ID NO: 12115 - protein, 8 aa, synthetic construct
EAAAKGGG

SEQ ID NO: 12116 - protein, 9 aa, synthetic construct
GSSPAPGGG

SEQ ID NO: 12117 - protein, 9 aa, synthetic construct
GGGPAPGSS

SEQ ID NO: 12118 - protein, 6 aa, synthetic construct
GGGGGS

SEQ ID NO: 12119 - protein, 30 aa, synthetic construct; identical to SEQ ID NO: 5130

SEQ ID NO: 12120 - protein, 25 aa, synthetic construct
GGGGSGGGGSGGGGSGGGGSGGGGS

SEQ ID NO: 12121 - protein, 15 aa, synthetic construct
EAAAKEAAAKEAAAK

SEQ ID NO: 12122 - protein, 9 aa, synthetic construct
PAPAPAPAP

SEQ ID NO: 12123 - protein, 15 aa, synthetic construct
GSSGSSGSSGSSGSS

SEQ ID NO: 12124 - protein, 11 aa, synthetic construct
GGGGSSEAAAK

SEQ ID NO: 12125 - protein, 12 aa, synthetic construct
GGSGGSGGSGGS

SEQ ID NO: 12126 - protein, 11 aa, synthetic construct
PAPEAAAKGGS

SEQ ID NO: 12127 - protein, 30 aa, synthetic construct; identical to SEQ ID NO: 5130

SEQ ID NO: 12128 - protein, 15 aa, synthetic construct
EAAAKGGGGSEAAAK

SEQ ID NO: 12129 - protein, 15 aa, synthetic construct
EAAAKGGGGSEAAAK

SEQ ID NO: 12130 - protein, 11 aa, synthetic construct
EAAAKGGGPAP

SEQ ID NO: 12131 - protein, 25 aa, synthetic construct
EAAAKEAAAKEAAAKEAAAKEAAAK

SEQ ID NO: 12132 - protein, 46 aa, synthetic construct; identical to SEQ ID NO: 5217

SEQ ID NO: 12133 - protein, 11 aa, synthetic construct
GGSEAAAKGGG

SEQ ID NO: 12134 - protein, 30 aa, synthetic construct; identical to SEQ ID NO: 5112

SEQ ID NO: 12135 - protein, 9 aa, synthetic construct
GGGPAPGGS

SEQ ID NO: 12136 - protein, 13 aa, synthetic construct
PAPAPAPAPAPAP

SEQ ID NO: 12137 - protein, 9 aa, synthetic construct
GGSGSSGGG

SEQ ID NO: 12138 - protein, 9 aa, synthetic construct
GGSGSSGGG

SEQ ID NO: 12139 - protein, 11 aa, synthetic construct
GGGEAAAKGGS

SEQ ID NO: 12140 - protein, 5 aa, synthetic construct
EAAAK

SEQ ID NO: 12141 - protein, 9 aa, synthetic construct
GGSPAPGSS

SEQ ID NO: 12142 - protein, 11 aa, synthetic construct
GGGGSSEAAAK

SEQ ID NO: 12143 - protein, 11 aa, synthetic construct
PAPAPAPAPAP

SEQ ID NO: 12144 - protein, 20 aa, synthetic construct
EAAAKEAAAKEAAAKEAAAK

SEQ ID NO: 12145 - protein, 9 aa, synthetic construct
GGGGGSGSS

SEQ ID NO: 12146 - protein, 11 aa, synthetic construct
EAAAKGSSPAP

SEQ ID NO: 12147 - protein, 13 aa, synthetic construct
PAPAPAPAPAPAP

SEQ ID NO: 12148 - protein, 9 aa, synthetic construct
GSSGGGGGS

SEQ ID NO: 12149 - protein, 9 aa, synthetic construct
PAPGSSGGG

SEQ ID NO: 12150 - protein, 9 aa, synthetic construct
GGSGGGPAP

SEQ ID NO: 12151 - protein, 7 aa, synthetic construct
GGGGGGG

SEQ ID NO: 12152 - protein, 18 aa, synthetic construct
GSSGSSGSSGSSGSSGSS

SEQ ID NO: 12153 - protein, 9 aa, synthetic construct
GGGPAPGGS

SEQ ID NO: 12154 - protein, 11 aa, synthetic construct
EAAAKGGSGGG

SEQ ID NO: 12155 - protein, 11 aa, synthetic construct
EAAAKGGGGSS

SEQ ID NO: 12156 - protein, 18 aa, synthetic construct
GSSGSSGSSGSSGSSGSS

SEQ ID NO: 12157 - protein, 20 aa, synthetic construct
GGGGSGGGGSGGGGSGGGGS

SEQ ID NO: 12158 - protein, 11 aa, synthetic construct
PAPAPAPAPAP

SEQ ID NO: 12159 - protein, 11 aa, synthetic construct
GGGEAAAKGGS

SEQ ID NO: 12160 - protein, 46 aa, synthetic construct; identical to SEQ ID NO: 5217

SEQ ID NO: 12161 - protein, 12 aa, synthetic construct
GSAGSAAGSGEF

SEQ ID NO: 12162 - protein, 15 aa, synthetic construct
GSSGSSGSSGSSGSS

SEQ ID NO: 12163 - protein, 11 aa, synthetic construct
EAAAKGGSGSS

SEQ ID NO: 12164 - protein, 6 aa, synthetic construct
PAPGGG

SEQ ID NO: 12165 - protein, 9 aa, synthetic construct
GGGPAPGSS

SEQ ID NO: 12166 - protein, 11 aa, synthetic construct
PAPEAAAKGGS

SEQ ID NO: 12167 - protein, 11 aa, synthetic construct
PAPGGGEAAAK

SEQ ID NO: 12168 - protein, 11 aa, synthetic construct
GGGGSSEAAAK

SEQ ID NO: 12169 - protein, 5 aa, synthetic construct
EAAAK

SEQ ID NO: 12170 - protein, 30 aa, synthetic construct; identical to SEQ ID NO: 5112

SEQ ID NO: 12171 - protein, 11 aa, synthetic construct
GGSGGGEAAAK

SEQ ID NO: 12172 - protein, 46 aa, synthetic construct; identical to SEQ ID NO: 5217

SEQ ID NO: 12173 - protein, 9 aa, synthetic construct
GSSPAPGGS

SEQ ID NO: 12174 - protein, 9 aa, synthetic construct
GGSGGGPAP

SEQ ID NO: 12175 - protein, 5 aa, synthetic construct
EAAAK

SEQ ID NO: 12176 - skipped

SEQ ID NO: 12177 - protein, 9 aa, synthetic construct
GGSGGSGGS

SEQ ID NO: 12178 - protein, 20 aa, synthetic construct
EAAAKEAAAKEAAAKEAAAK

SEQ ID NO: 12179 - protein, 11 aa, synthetic construct
PAPEAAAKGGG

SEQ ID NO: 12180 - protein, 11 aa, synthetic construct
GGGGGSEAAAK

SEQ ID NO: 12181 - protein, 9 aa, synthetic construct
GGSGSSGGG

SEQ ID NO: 12182 - protein, 7 aa, synthetic construct
GGGGGGG

SEQ ID NO: 12183 - protein, 11 aa, synthetic construct
GSSEAAAKPAP

SEQ ID NO: 12184 - protein, 11 aa, synthetic construct
GGGGGSEAAAK

SEQ ID NO: 12185 - protein, 25 aa, synthetic construct
GGGGSGGGGSGGGGSGGGGSGGGGS

SEQ ID NO: 12186 - protein, 11 aa, synthetic construct
GGGEAAAKGGS

SEQ ID NO: 12187 - protein, 9 aa, synthetic construct
GGSPAPGGG

SEQ ID NO: 12188 - protein, 12 aa, synthetic construct
GSAGSAAGSGEF

SEQ ID NO: 12189 - protein, 5 aa, synthetic construct
EAAAK

SEQ ID NO: 12190 - protein, 11 aa, synthetic construct
EAAAKPAPGSS

SEQ ID NO: 12191 - protein, 30 aa, synthetic construct; identical to SEQ ID NO: 5130

SEQ ID NO: 12192 - protein, 11 aa, synthetic construct
GGSEAAAKPAP

SEQ ID NO: 12193 - protein, 13 aa, synthetic construct
PAPAPAPAPAPAP

SEQ ID NO: 12194 - protein, 9 aa, synthetic construct
GGSPAPGGG

SEQ ID NO: 12195 - protein, 11 aa, synthetic construct
GGSEAAAKGGG

SEQ ID NO: 12196 - protein, 12 aa, synthetic construct
GGSGGSGGSGGS

SEQ ID NO: 12197 - protein, 30 aa, synthetic construct; identical to SEQ ID NO: 5130

SEQ ID NO: 12198 - skipped

SEQ ID NO: 12199 - protein, 46 aa, synthetic construct; identical to SEQ ID NO: 5217

SEQ ID NO: 12200 - protein, 12 aa, synthetic construct
GGSGGSGGSGGS

SEQ ID NO: 12201 - protein, 8 aa, synthetic construct
GGGEAAAK

SEQ ID NO: 12202 - protein, 18 aa, synthetic construct
GSSGSSGSSGSSGSSGSS

SEQ ID NO: 12203 - protein, 9 aa, synthetic construct
GSSGGGPAP

SEQ ID NO: 12204 - protein, 11 aa, synthetic construct
GSSEAAAKPAP

SEQ ID NO: 12205 - protein, 10 aa, synthetic construct
EAAAKEAAAK

SEQ ID NO: 12206 - protein, 30 aa, synthetic construct; identical to SEQ ID NO: 5112

SEQ ID NO: 12207 - protein, 6 aa, synthetic construct
GGGGGG

SEQ ID NO: 12208 - protein, 9 aa, synthetic construct
GGSGSSGGG

SEQ ID NO: 12209 - protein, 11 aa, synthetic construct
GSSGGGEAAAK

SEQ ID NO: 12210 - protein, 11 aa, synthetic construct
PAPAPAPAPAP

SEQ ID NO: 12211 - protein, 30 aa, synthetic construct; identical to SEQ ID NO: 5130

SEQ ID NO: 12212 - protein, 11 aa, synthetic construct
EAAAKGGSGGG

SEQ ID NO: 12213 - protein, 9 aa, synthetic construct
GGGGSSPAP

SEQ ID NO: 12214 - protein, 11 aa, synthetic construct
GGGEAAAKPAP

SEQ ID NO: 12215 - protein, 9 aa, synthetic construct
GGSGGGPAP

SEQ ID NO: 12216 - protein, 9 aa, synthetic construct
PAPGSSGGS

SEQ ID NO: 12217 - protein, 9 aa, synthetic construct
GGSGGGPAP

SEQ ID NO: 12218 - protein, 11 aa, synthetic construct
EAAAKGGSPAP

SEQ ID NO: 12219 - protein, 11 aa, synthetic construct
EAAAKGGSGGG

SEQ ID NO: 12220 - protein, 9 aa, synthetic construct
PAPGSSGGG

SEQ ID NO: 12221 - protein, 11 aa, synthetic construct
GSSEAAAKGGS

SEQ ID NO: 12222 - protein, 11 aa, synthetic construct
PAPGSSEAAAK

SEQ ID NO: 12223 - protein, 11 aa, synthetic construct
EAAAKGSSPAP

SEQ ID NO: 12224 - protein, 25 aa, synthetic construct
EAAAKEAAAKEAAAKEAAAKEAAAK

SEQ ID NO: 12225 - protein, 11 aa, synthetic construct
PAPGSSEAAAK

SEQ ID NO: 12226 - protein, 11 aa, synthetic construct
EAAAKGSSGGG

SEQ ID NO: 12227 - protein, 11 aa, synthetic construct
EAAAKGGGGGS

SEQ ID NO: 12228 - protein, 15 aa, synthetic construct
EAAAKEAAAKEAAAK

SEQ ID NO: 12229 - protein, 13 aa, synthetic construct
PAPAPAPAPAPAP

SEQ ID NO: 12230 - protein, 15 aa, synthetic construct
GGGGSGGGGSGGGGS

SEQ ID NO: 12231 - protein, 11 aa, synthetic construct
PAPGGSEAAAK

SEQ ID NO: 12232 - protein, 11 aa, synthetic construct
PAPGSSEAAAK

SEQ ID NO: 12233 - protein, 11 aa, synthetic construct
PAPEAAAKGSS

SEQ ID NO: 12234 - protein, 9 aa, synthetic construct
GGSPAPGSS

SEQ ID NO: 12235 - protein, 9 aa, synthetic construct
PAPGGSGGG

SEQ ID NO: 12236 - protein, 11 aa, synthetic construct
EAAAKGGSGSS

SEQ ID NO: 12237 - protein, 6 aa, synthetic construct
GGSGGG

SEQ ID NO: 12238 - protein, 11 aa, synthetic construct
GGSEAAAKGSS

SEQ ID NO: 12239 - protein, 46 aa, synthetic construct; identical to SEQ ID NO: 5217

SEQ ID NO: 12240 - protein, 13 aa, synthetic construct
PAPAPAPAPAPAP

SEQ ID NO: 12241 - protein, 8 aa, synthetic construct
PAPEAAAK

SEQ ID NO: 12242 - protein, 11 aa, synthetic construct
GGSEAAAKGGG

SEQ ID NO: 12243 - protein, 6 aa, synthetic construct
GSSPAP

SEQ ID NO: 12244 - protein, 6 aa, synthetic construct
GGGGSS

SEQ ID NO: 12245 - protein, 11 aa, synthetic construct
GGGEAAAKPAP

SEQ ID NO: 12246 - protein, 11 aa, synthetic construct
EAAAKPAPGGS

SEQ ID NO: 12247 - protein, 11 aa, synthetic construct
EAAAKGGGPAP

SEQ ID NO: 12248 - protein, 11 aa, synthetic construct
PAPGGSEAAAK

SEQ ID NO: 12249 - protein, 9 aa, synthetic construct
PAPGGSGSS

SEQ ID NO: 12250 - protein, 9 aa, synthetic construct
PAPGGSGSS

SEQ ID NO: 12251 - protein, 9 aa, synthetic construct
GGSGGGPAP

SEQ ID NO: 12252 - protein, 20 aa, synthetic construct
EAAAKEAAAKEAAAKEAAAK

SEQ ID NO: 12253 - protein, 25 aa, synthetic construct
GGGGSGGGGSGGGGSGGGGSGGGGS

SEQ ID NO: 12254 - protein, 9 aa, synthetic construct
GGGGSSPAP

SEQ ID NO: 12255 - protein, 9 aa, synthetic construct
GSSGGGPAP

SEQ ID NO: 12256 - protein, 9 aa, synthetic construct
GGGGSSGGS

SEQ ID NO: 12257 - protein, 6 aa, synthetic construct
GGSGGG

SEQ ID NO: 12258 - protein, 9 aa, synthetic construct
GSSGGGGGS

SEQ ID NO: 12259 - protein, 33 aa, synthetic construct; identical to SEQ ID NO: 5006

SEQ ID NO: 12260 - protein, 9 aa, synthetic construct
GGGGGSGSS

SEQ ID NO: 12261 - protein, 11 aa, synthetic construct
GGGEAAAKGGS

SEQ ID NO: 12262 - protein, 6 aa, synthetic construct
GGSGGG

SEQ ID NO: 12263 - protein, 7 aa, synthetic construct
PAPAPAP

SEQ ID NO: 12264 - protein, 46 aa, synthetic construct; identical to SEQ ID NO: 5217

SEQ ID NO: 12265 - protein, 46 aa, synthetic construct; identical to SEQ ID NO: 5217

SEQ ID NO: 12266 - protein, 15 aa, synthetic construct
GSSGSSGSSGSSGSS

SEQ ID NO: 12267 - protein, 11 aa, synthetic construct
GSSGGGEAAAK

SEQ ID NO: 12268 - protein, 11 aa, synthetic construct
GSSGGSEAAAK

SEQ ID NO: 12269 - skipped

SEQ ID NO: 12270 - protein, 15 aa, synthetic construct
EAAAKGGGGSEAAAK

SEQ ID NO: 12271 - protein, 5 aa, synthetic construct
PAPAP

SEQ ID NO: 12272 - skipped

SEQ ID NO: 12273 - protein, 6 aa, synthetic construct
GSSGGG

SEQ ID NO: 12274 - protein, 9 aa, synthetic construct
GSSPAPGGS

SEQ ID NO: 12275 - protein, 9 aa, synthetic construct
PAPAPAPAP

SEQ ID NO: 12276 - protein, 11 aa, synthetic construct
EAAAKGSSGGS

SEQ ID NO: 12277 - protein, 11 aa, synthetic construct
PAPEAAAKGGG

SEQ ID NO: 12278 - protein, 6 aa, synthetic construct
PAPGGS

SEQ ID NO: 12279 - protein, 8 aa, synthetic construct
EAAAKGGG

SEQ ID NO: 12280 - protein, 11 aa, synthetic construct
GSSEAAAKPAP

SEQ ID NO: 12281 - protein, 6 aa, synthetic construct
PAPGGS

SEQ ID NO: 12282 - protein, 8 aa, synthetic construct
EAAAKGGS

SEQ ID NO: 12283 - protein, 30 aa, synthetic construct; identical to SEQ ID NO: 5130

SEQ ID NO: 12284 - protein, 11 aa, synthetic construct
PAPGGSEAAAK

SEQ ID NO: 12285 - skipped

SEQ ID NO: 12286 - protein, 12 aa, synthetic construct
GSSGSSGSSGSS

SEQ ID NO: 12287 - protein, 9 aa, synthetic construct
GSSGSSGSS

SEQ ID NO: 12288 - protein, 6 aa, synthetic construct
GSSGGG

SEQ ID NO: 12289 - protein, 5 aa, synthetic construct
EAAAK

SEQ ID NO: 12290 - protein, 11 aa, synthetic construct
GGSPAPEAAAK

SEQ ID NO: 12291 - protein, 6 aa, synthetic construct
GGSGSS

SEQ ID NO: 12292 - protein, 9 aa, synthetic construct
GSSPAPGGG

SEQ ID NO: 12293 - protein, 25 aa, synthetic construct
EAAAKEAAAKEAAAKEAAAKEAAAK

SEQ ID NO: 12294 - protein, 11 aa, synthetic construct
EAAAKGSSPAP

SEQ ID NO: 12295 - protein, 6 aa, synthetic construct
GGGGSS

SEQ ID NO: 12296 - protein, 9 aa, synthetic construct
GGSPAPGSS

SEQ ID NO: 12297 - protein, 25 aa, synthetic construct
EAAAKEAAAKEAAAKEAAAKEAAAK

SEQ ID NO: 12298 - protein, 11 aa, synthetic construct
PAPEAAAKGGG

SEQ ID NO: 12299 - protein, 11 aa, synthetic construct
EAAAKPAPGGS

SEQ ID NO: 12300 - protein, 5 aa, synthetic construct
PAPAP

SEQ ID NO: 12301 - protein, 20 aa, synthetic construct
EAAAKEAAAKEAAAKEAAAK

SEQ ID NO: 12302 - protein, 9 aa, synthetic construct
GSSPAPGGG

SEQ ID NO: 12303 - protein, 11 aa, synthetic construct
EAAAKGGGPAP

SEQ ID NO: 12304 - protein, 8 aa, synthetic construct
PAPEAAAK

SEQ ID NO: 12305 - protein, 11 aa, synthetic construct
PAPGGGEAAAK

SEQ ID NO: 12306 - protein, 11 aa, synthetic construct
EAAAKGSSGGS

SEQ ID NO: 12307 - protein, 15 aa, synthetic construct
EAAAKEAAAKEAAAK

SEQ ID NO: 12308 - protein, 8 aa, synthetic construct
GSSEAAAK

SEQ ID NO: 12309 - protein, 12 aa, synthetic construct
GSSGSSGSSGSS

SEQ ID NO: 12310 - protein, 20 aa, synthetic construct
GGGGSGGGGSGGGGSGGGGS

SEQ ID NO: 12311 - protein, 15 aa, synthetic construct
EAAAKGGGGSEAAAK

SEQ ID NO: 12312 - skipped

SEQ ID NO: 12313 - protein, 30 aa, synthetic construct; identical to SEQ ID NO: 5112

SEQ ID NO: 12314 - protein, 9 aa, synthetic construct
GGSGSSPAP

SEQ ID NO: 12315 - protein, 15 aa, synthetic construct
GGGGSGGGGSGGGGS

SEQ ID NO: 12316 - protein, 11 aa, synthetic construct
PAPAPAPAPAP

SEQ ID NO: 12317 - protein, 11 aa, synthetic construct
PAPAPAPAPAP

SEQ ID NO: 12318 - protein, 20 aa, synthetic construct
EAAAKEAAAKEAAAKEAAAK

SEQ ID NO: 12319 - protein, 25 aa, synthetic construct
GGGGSGGGGSGGGGSGGGGSGGGGS

SEQ ID NO: 12320 - protein, 9 aa, synthetic construct
GGSGGSGGS

SEQ ID NO: 12321 - protein, 11 aa, synthetic construct
EAAAKPAPGSS

SEQ ID NO: 12322 - skipped

SEQ ID NO: 12323 - protein, 11 aa, synthetic construct
PAPEAAAKGGS

SEQ ID NO: 12324 - protein, 9 aa, synthetic construct
GGGPAPGGS

SEQ ID NO: 12325 - protein, 11 aa, synthetic construct
EAAAKGGGGSS

SEQ ID NO: 12326 - protein, 15 aa, synthetic construct
GSSGSSGSSGSSGSS

SEQ ID NO: 12327 - protein, 16 aa, synthetic construct
SGSETPGTSESATPES

SEQ ID NO: 12328 - protein, 11 aa, synthetic construct
GGSEAAAKGGG

SEQ ID NO: 12329 - protein, 18 aa, synthetic construct
GSSGSSGSSGSSGSSGSS

SEQ ID NO: 12330 - protein, 13 aa, synthetic construct
PAPAPAPAPAPAP

SEQ ID NO: 12331 - protein, 6 aa, synthetic construct
GGSGGS

SEQ ID NO: 12332 - protein, 11 aa, synthetic construct
PAPGSSEAAAK

SEQ ID NO: 12333 - protein, 11 aa, synthetic construct
GGSPAPEAAAK

SEQ ID NO: 12334 - protein, 11 aa, synthetic construct
EAAAKGGGGGS

SEQ ID NO: 12335 - protein, 12 aa, synthetic construct
GGSGGSGGSGGS

SEQ ID NO: 12336 - protein, 11 aa, synthetic construct
GGGGSSEAAAK

SEQ ID NO: 12337 - protein, 11 aa, synthetic construct
GSSEAAAKGGG

SEQ ID NO: 12338 - protein, 6 aa, synthetic construct
PAPGGS

SEQ ID NO: 12339 - protein, 11 aa, synthetic construct
EAAAKGGSGGG

SEQ ID NO: 12340 - protein, 8 aa, synthetic construct
EAAAKGGG

SEQ ID NO: 12341 - protein, 6 aa, synthetic construct
PAPGGS

SEQ ID NO: 12342 - protein, 9 aa, synthetic construct
GSSPAPGGG

SEQ ID NO: 12343 - protein, 11 aa, synthetic construct
PAPEAAAKGGG

SEQ ID NO: 12344 - protein, 11 aa, synthetic construct
GSSEAAAKGGG

SEQ ID NO: 12345 - protein, 11 aa, synthetic construct
PAPGGSEAAAK

SEQ ID NO: 12346 - protein, 6 aa, synthetic construct
GGGGGS

SEQ ID NO: 12347 - protein, 11 aa, synthetic construct
GGSPAPEAAAK

SEQ ID NO: 12348 - protein, 6 aa, synthetic construct
GGGPAP

SEQ ID NO: 12349 - protein, 9 aa, synthetic construct
PAPGSSGGG

SEQ ID NO: 12350 - protein, 9 aa, synthetic construct
PAPGSSGGG

SEQ ID NO: 12351 - protein, 11 aa, synthetic construct
GGGEAAAKGSS

SEQ ID NO: 12352 - protein, 11 aa, synthetic construct
GSSEAAAKGGS

SEQ ID NO: 12353 - protein, 9 aa, synthetic construct
PAPGGSGSS

SEQ ID NO: 12354 - protein, 15 aa, synthetic construct
EAAAKGGGGSEAAAK

SEQ ID NO: 12355 - protein, 7 aa, synthetic construct
PAPAPAP

SEQ ID NO: 12356 - protein, 6 aa, synthetic construct
GGGGGG

SEQ ID NO: 12357 - protein, 11 aa, synthetic construct
GSSPAPEAAAK

SEQ ID NO: 12358 - protein, 9 aa, synthetic construct
GGSGGSGGS

SEQ ID NO: 12359 - protein, 15 aa, synthetic construct
GSSGSSGSSGSSGSS

SEQ ID NO: 12360 - protein, 9 aa, synthetic construct
GGGPAPGGS

SEQ ID NO: 12361 - protein, 11 aa, synthetic construct
GGGPAPEAAAK

SEQ ID NO: 12362 - protein, 6 aa, synthetic construct
GGSGGG

SEQ ID NO: 12363 - protein, 16 aa, synthetic construct
SGSETPGTSESATPES

SEQ ID NO: 12364 - protein, 11 aa, synthetic construct
EAAAKGSSPAP

SEQ ID NO: 12365 - protein, 8 aa, synthetic construct
GSSEAAAK

SEQ ID NO: 12366 - protein, 9 aa, synthetic construct
GSSGGSGGG

SEQ ID NO: 12367 - protein, 25 aa, synthetic construct
EAAAKEAAAKEAAAKEAAAKEAAAK

SEQ ID NO: 12368 - protein, 15 aa, synthetic construct
GGGGSEAAAKGGGGS

SEQ ID NO: 12369 - protein, 9 aa, synthetic construct
PAPGGGGSS

SEQ ID NO: 12370 - protein, 16 aa, synthetic construct
SGSETPGTSESATPES

SEQ ID NO: 12371 - protein, 11 aa, synthetic construct
GGSPAPEAAAK

SEQ ID NO: 12372 - protein, 11 aa, synthetic construct
GSSEAAAKGGG

SEQ ID NO: 12373 - protein, 8 aa, synthetic construct
GSSEAAAK

SEQ ID NO: 12374 - protein, 15 aa, synthetic construct
GGGGSEAAAKGGGGS

SEQ ID NO: 12375 - skipped

SEQ ID NO: 12376 - protein, 11 aa, synthetic construct
PAPGGSEAAAK

SEQ ID NO: 12377 - protein, 5 aa, synthetic construct
GGGGS

SEQ ID NO: 12378 - protein, 6 aa, synthetic construct
GGGPAP

SEQ ID NO: 12379 - protein, 30 aa, synthetic construct; identical to SEQ ID NO: 5130

SEQ ID NO: 12380 - protein, 11 aa, synthetic construct
EAAAKPAPGSS

SEQ ID NO: 12381 - protein, 11 aa, synthetic construct
EAAAKPAPGSS

SEQ ID NO: 12382 - protein, 6 aa, synthetic construct
GGGGGG

SEQ ID NO: 12383 - protein, 11 aa, synthetic construct
EAAAKPAPGGS

SEQ ID NO: 12384 - protein, 11 aa, synthetic construct
PAPGGGEAAAK

SEQ ID NO: 12385 - protein, 25 aa, synthetic construct
EAAAKEAAAKEAAAKEAAAKEAAAK

SEQ ID NO: 12386 - protein, 11 aa, synthetic construct
GSSEAAAKPAP

SEQ ID NO: 12387 - protein, 11 aa, synthetic construct
PAPGGSEAAAK

SEQ ID NO: 12388 - protein, 6 aa, synthetic construct
PAPGSS

SEQ ID NO: 12389 - protein, 8 aa, synthetic construct
EAAAKGGG

SEQ ID NO: 12390 - protein, 8 aa, synthetic construct
EAAAKPAP

SEQ ID NO: 12391 - protein, 11 aa, synthetic construct
PAPEAAAKGGS

SEQ ID NO: 12392 - protein, 9 aa, synthetic construct
GGSPAPGGG

SEQ ID NO: 12393 - protein, 9 aa, synthetic construct
PAPGGSGSS

SEQ ID NO: 12394 - protein, 30 aa, synthetic construct; identical to SEQ ID NO: 5130

SEQ ID NO: 12395 - protein, 9 aa, synthetic construct
GGSGGGPAP

SEQ ID NO: 12396 - protein, 46 aa, synthetic construct; identical to SEQ ID NO: 5217

SEQ ID NO: 12397 - protein, 11 aa, synthetic construct
PAPEAAAKGSS

SEQ ID NO: 12398 - protein, 8 aa, synthetic construct
EAAAKGSS

SEQ ID NO: 12399 - protein, 6 aa, synthetic construct
GGSGGS

SEQ ID NO: 12400 - protein, 25 aa, synthetic construct
EAAAKEAAAKEAAAKEAAAKEAAAK

SEQ ID NO: 12401 - protein, 15 aa, synthetic construct
GGGGSEAAAKGGGGS

SEQ ID NO: 12402 - protein, 11 aa, synthetic construct
GGSEAAAKGGG

SEQ ID NO: 12403 - protein, 15 aa, synthetic construct
GSSGSSGSSGSSGSS

SEQ ID NO: 12404 - protein, 30 aa, synthetic construct; identical to SEQ ID NO: 5112

SEQ ID NO: 12405 - protein, 8 aa, synthetic construct
EAAAKGGG

SEQ ID NO: 12406 - protein, 11 aa, synthetic construct
GGGGGSEAAAK

SEQ ID NO: 12407 - protein, 11 aa, synthetic construct
EAAAKPAPGGS

SEQ ID NO: 12408 - protein, 9 aa, synthetic construct
GGGGGSGSS

SEQ ID NO: 12409 - protein, 11 aa, synthetic construct
PAPGSSEAAAK

SEQ ID NO: 12410 - protein, 11 aa, synthetic construct
GSSEAAAKPAP

SEQ ID NO: 12411 - protein, 11 aa, synthetic construct
EAAAKGSSPAP

SEQ ID NO: 12412 - protein, 9 aa, synthetic construct
GGGPAPGGS

SEQ ID NO: 12413 - protein, 6 aa, synthetic construct
GGSPAP

SEQ ID NO: 12414 - protein, 11 aa, synthetic construct
GGSEAAAKGGG

SEQ ID NO: 12415 - protein, 8 aa, synthetic construct
GGGGGGGG

SEQ ID NO: 12416 - protein, 30 aa, synthetic construct; identical to SEQ ID NO: 5112

SEQ ID NO: 12417 - protein, 30 aa, synthetic construct; identical to SEQ ID NO: 5112

SEQ ID NO: 12418 - protein, 9 aa, synthetic construct
GSSPAPGGG

SEQ ID NO: 12419 - protein, 6 aa, synthetic construct
GGGGGG

SEQ ID NO: 12420 - protein, 6 aa, synthetic construct
GSSGGS

SEQ ID NO: 12421 - protein, 9 aa, synthetic construct
GGSPAPGSS

SEQ ID NO: 12422 - protein, 11 aa, synthetic construct
PAPEAAAKGGG

SEQ ID NO: 12423 - protein, 11 aa, synthetic construct
EAAAKGGGPAP

SEQ ID NO: 12424 - protein, 11 aa, synthetic construct
GGGEAAAKGGS

SEQ ID NO: 12425 - protein, 9 aa, synthetic construct
GGSGSSPAP

SEQ ID NO: 12426 - protein, 16 aa, synthetic construct
SGSETPGTSESATPES

SEQ ID NO: 12427 - protein, 11 aa, synthetic construct
PAPGGSEAAAK

SEQ ID NO: 12428 - protein, 6 aa, synthetic construct
GGSGGG

SEQ ID NO: 12429 - protein, 9 aa, synthetic construct
GGGGSSPAP

SEQ ID NO: 12430 - protein, 11 aa, synthetic construct
GGGEAAAKGSS

SEQ ID NO: 12431 - protein, 13 aa, synthetic construct
PAPAPAPAPAPAP

SEQ ID NO: 12432 - protein, 15 aa, synthetic construct
EAAAKGGGGSEAAAK

SEQ ID NO: 12433 - protein, 25 aa, synthetic construct
EAAAKEAAAKEAAAKEAAAKEAAAK

SEQ ID NO: 12434 - protein, 11 aa, synthetic construct
GGGGGSEAAAK

SEQ ID NO: 12435 - protein, 11 aa, synthetic construct
PAPGSSEAAAK

SEQ ID NO: 12436 - protein, 12 aa, synthetic construct
GSAGSAAGSGEF

SEQ ID NO: 12437 - protein, 15 aa, synthetic construct
EAAAKGGGGSEAAAK

SEQ ID NO: 12438 - protein, 9 aa, synthetic construct
GGSPAPGGG

SEQ ID NO: 12439 - protein, 11 aa, synthetic construct
GSSEAAAKGGG

SEQ ID NO: 12440 - protein, 11 aa, synthetic construct
GGGEAAAKPAP

SEQ ID NO: 12441 - protein, 6 aa, synthetic construct
GGGPAP

SEQ ID NO: 12442 - protein, 8 aa, synthetic construct
GGSEAAAK

SEQ ID NO: 12443 - protein, 33 aa, synthetic construct; identical to SEQ ID NO: 5006

SEQ ID NO: 12444 - protein, 11 aa, synthetic construct
EAAAKPAPGGS

SEQ ID NO: 12445 - protein, 46 aa, synthetic construct; identical to SEQ ID NO: 5217

SEQ ID NO: 12446 - protein, 8 aa, synthetic construct
GGGGGGGG

SEQ ID NO: 12447 - protein, 6 aa, synthetic construct
PAPGSS

SEQ ID NO: 12448 - protein, 5 aa, synthetic construct
EAAAK

SEQ ID NO: 12449 - protein, 12 aa, synthetic construct
GSAGSAAGSGEF

SEQ ID NO: 12450 - protein, 11 aa, synthetic construct
PAPGGGEAAAK

SEQ ID NO: 12451 - protein, 11 aa, synthetic construct
EAAAKGSSGGS

SEQ ID NO: 12452 - protein, 15 aa, synthetic construct
GGGGSEAAAKGGGGS

SEQ ID NO: 12453 - protein, 15 aa, synthetic construct
GGGGSGGGGSGGGGS

SEQ ID NO: 12454 - protein, 15 aa, synthetic construct
EAAAKGGGGSEAAAK

SEQ ID NO: 12455 - protein, 11 aa, synthetic construct
PAPGGGEAAAK

SEQ ID NO: 12456 - protein, 11 aa, synthetic construct
GGSEAAAKPAP

SEQ ID NO: 12457 - protein, 5 aa, synthetic construct
PAPAP

SEQ ID NO: 12458 - protein, 5 aa, synthetic construct
PAPAP

SEQ ID NO: 12459 - protein, 6 aa, synthetic construct
GGSPAP

SEQ ID NO: 12460 - protein, 11 aa, synthetic construct
EAAAKGSSGGS

SEQ ID NO: 12461 - protein, 9 aa, synthetic construct
PAPGSSGGS

SEQ ID NO: 12462 - protein, 15 aa, synthetic construct
EAAAKGGGGSEAAAK

SEQ ID NO: 12463 - protein, 7 aa, synthetic construct
PAPAPAP

SEQ ID NO: 12464 - protein, 18 aa, synthetic construct
GGSGGSGGSGGSGGSGGS

SEQ ID NO: 12465 - protein, 9 aa, synthetic construct
GGGGGSGSS

SEQ ID NO: 12466 - protein, 11 aa, synthetic construct
PAPGSSEAAAK

SEQ ID NO: 12467 - protein, 11 aa, synthetic construct
GGSEAAAKPAP

SEQ ID NO: 12468 - protein, 20 aa, synthetic construct
EAAAKEAAAKEAAAKEAAAK

SEQ ID NO: 12469 - protein, 46 aa, synthetic construct; identical to SEQ ID NO: 5217

SEQ ID NO: 12470 - protein, 11 aa, synthetic construct
GGSGGGEAAAK

SEQ ID NO: 12471 - protein, 8 aa, synthetic construct
GGGEAAAK

SEQ ID NO: 12472 - protein, 15 aa, synthetic construct
GGGGSGGGGSGGGGS

SEQ ID NO: 12473 - protein, 15 aa, synthetic construct
GGSGGSGGSGGSGGS

SEQ ID NO: 12474 - protein, 9 aa, synthetic construct
GSSGGGGGS

SEQ ID NO: 12475 - protein, 11 aa, synthetic construct
PAPGGSEAAAK

SEQ ID NO: 12476 - protein, 9 aa, synthetic construct
GSSGGSPAP

SEQ ID NO: 12477 - protein, 16 aa, synthetic construct
SGSETPGTSESATPES

SEQ ID NO: 12478 - protein, 10 aa, synthetic construct
GGGGSGGGGS

SEQ ID NO: 12479 - protein, 11 aa, synthetic construct
PAPAPAPAPAP

SEQ ID NO: 12480 - protein, 6 aa, synthetic construct
GSSGSS

SEQ ID NO: 12481 - protein, 11 aa, synthetic construct
GSSEAAAKPAP

SEQ ID NO: 12482 - protein, 9 aa, synthetic construct
GGSGSSGGG

SEQ ID NO: 12483 - protein, 10 aa, synthetic construct
EAAAKEAAAK

SEQ ID NO: 12484 - protein, 12 aa, synthetic construct
GSSGSSGSSGSS

SEQ ID NO: 12485 - protein, 9 aa, synthetic construct
GSSPAPGGG

SEQ ID NO: 12486 - protein, 15 aa, synthetic construct
EAAAKEAAAKEAAAK

SEQ ID NO: 12487 - protein, 46 aa, synthetic construct; identical to SEQ ID NO: 5217

SEQ ID NO: 12488 - protein, 30 aa, synthetic construct; identical to SEQ ID NO: 5112

SEQ ID NO: 12489 - protein, 12 aa, synthetic construct
GSAGSAAGSGEF

SEQ ID NO: 12490 - protein, 11 aa, synthetic construct
PAPGSSEAAAK

SEQ ID NO: 12491 - protein, 8 aa, synthetic construct
GGSEAAAK

SEQ ID NO: 12492 - protein, 15 aa, synthetic construct
GSSGSSGSSGSSGSS

SEQ ID NO: 12493 - protein, 11 aa, synthetic construct
GGSEAAAKPAP

SEQ ID NO: 12494 - protein, 9 aa, synthetic construct
GGSGGSGGS

SEQ ID NO: 12495 - protein, 11 aa, synthetic construct
EAAAKGGSGSS

SEQ ID NO: 12496 - protein, 25 aa, synthetic construct
GGGGSGGGGSGGGGSGGGGSGGGGS

SEQ ID NO: 12497 - protein, 20 aa, synthetic construct
EAAAKEAAAKEAAAKEAAAK

SEQ ID NO: 12498 - protein, 9 aa, synthetic construct
GGSGSSPAP

SEQ ID NO: 12499 - protein, 25 aa, synthetic construct
EAAAKEAAAKEAAAKEAAAKEAAAK

SEQ ID NO: 12500 - protein, 25 aa, synthetic construct
GGGGSGGGGSGGGGSGGGGSGGGGS

SEQ ID NO: 12501 - protein, 6 aa, synthetic construct
GGSGSS

SEQ ID NO: 12502 - protein, 8 aa, synthetic construct
PAPEAAAK

SEQ ID NO: 12503 - protein, 8 aa, synthetic construct
EAAAKPAP

SEQ ID NO: 12504 - protein, 6 aa, synthetic construct
GSSPAP

SEQ ID NO: 12505 - protein, 6 aa, synthetic construct
GGGPAP

SEQ ID NO: 12506 - protein, 11 aa, synthetic construct
EAAAKGGSGSS

SEQ ID NO: 12507 - protein, 15 aa, synthetic construct
EAAAKGGGGSEAAAK

SEQ ID NO: 12508 - protein, 6 aa, synthetic construct
GGSGGG

SEQ ID NO: 12509 - protein, 6 aa, synthetic construct
GSSPAP

SEQ ID NO: 12510 - protein, 11 aa, synthetic construct
GGSGSSEAAAK

SEQ ID NO: 12511 - protein, 9 aa, synthetic construct
PAPGSSGGS

SEQ ID NO: 12512 - protein, 6 aa, synthetic construct
GGGGGG

SEQ ID NO: 12513 - protein, 11 aa, synthetic construct
PAPGGSEAAAK

SEQ ID NO: 12514 - protein, 6 aa, synthetic construct
PAPGGS

SEQ ID NO: 12515 - protein, 12 aa, synthetic construct
GGSGGSGGSGGS

SEQ ID NO: 12516 - protein, 6 aa, synthetic construct
GSSPAP

SEQ ID NO: 12517 - protein, 9 aa, synthetic construct
PAPAPAPAP

SEQ ID NO: 12518 - protein, 6 aa, synthetic construct
GGGGGG

SEQ ID NO: 12519 - protein, 18 aa, synthetic construct
GSSGSSGSSGSSGSSGSS

SEQ ID NO: 12520 - protein, 11 aa, synthetic construct
GSSEAAAKGGS

SEQ ID NO: 12521 - protein, 8 aa, synthetic construct
GGSEAAAK

SEQ ID NO: 12522 - protein, 15 aa, synthetic construct
GGSGGSGGSGGSGGS

SEQ ID NO: 12523 - protein, 11 aa, synthetic construct
GSSPAPEAAAK

SEQ ID NO: 12524 - protein, 15 aa, synthetic construct
GSSGSSGSSGSSGSS

SEQ ID NO: 12525 - protein, 11 aa, synthetic construct
EAAAKPAPGGS

SEQ ID NO: 12526 - protein, 33 aa, synthetic construct; identical to SEQ ID NO: 5006

SEQ ID NO: 12527 - protein, 11 aa, synthetic construct
GGSPAPEAAAK

SEQ ID NO: 12528 - protein, 11 aa, synthetic construct
EAAAKGGSGGG

SEQ ID NO: 12529 - protein, 20 aa, synthetic construct
EAAAKEAAAKEAAAKEAAAK

SEQ ID NO: 12530 - protein, 6 aa, synthetic construct
GSSPAP

SEQ ID NO: 12531 - protein, 9 aa, synthetic construct
PAPAPAPAP

SEQ ID NO: 12532 - protein, 11 aa, synthetic construct
PAPGGSEAAAK

SEQ ID NO: 12533 - protein, 11 aa, synthetic construct
GGSGSSEAAAK

SEQ ID NO: 12534 - protein, 6 aa, synthetic construct
GSSGGG

SEQ ID NO: 12535 - protein, 11 aa, synthetic construct
GGGEAAAKGSS

SEQ ID NO: 12536 - protein, 9 aa, synthetic construct
PAPGGSGGG

SEQ ID NO: 12537 - protein, 46 aa, synthetic construct; identical to SEQ ID NO: 5217

SEQ ID NO: 12538 - protein, 9 aa, synthetic construct
PAPGGGGSS

SEQ ID NO: 12539 - protein, 8 aa, synthetic construct
EAAAKGGS

SEQ ID NO: 12540 - protein, 30 aa, synthetic construct; identical to SEQ ID NO: 5130

SEQ ID NO: 12541 - protein, 9 aa, synthetic construct
GGSGGSGGS

SEQ ID NO: 12542 - protein, 5 aa, synthetic construct
PAPAP

SEQ ID NO: 12543 - protein, 11 aa, synthetic construct
GSSGGGEAAAK

SEQ ID NO: 12544 - protein, 11 aa, synthetic construct
GGGGSSEAAAK

SEQ ID NO: 12545 - protein, 11 aa, synthetic construct
EAAAKGSSGGS

SEQ ID NO: 12546 - protein, 15 aa, synthetic construct
EAAAKGGGGSEAAAK

SEQ ID NO: 12547 - protein, 8 aa, synthetic construct
GGGGGGGG

SEQ ID NO: 12548 - protein, 9 aa, synthetic construct
GSSGSSGSS

SEQ ID NO: 12549 - protein, 11 aa, synthetic construct
GGGEAAAKPAP

SEQ ID NO: 12550 - protein, 9 aa, synthetic construct
GGGGGSGSS

SEQ ID NO: 12551 - protein, 7 aa, synthetic construct
GGGGGGG

SEQ ID NO: 12552 - skipped

SEQ ID NO: 12553 - protein, 6 aa, synthetic construct
GSSGGG

SEQ ID NO: 12554 - protein, 11 aa, synthetic construct
EAAAKGGSGSS

SEQ ID NO: 12555 - protein, 11 aa, synthetic construct
PAPGSSEAAAK

SEQ ID NO: 12556 - protein, 11 aa, synthetic construct
GSSEAAAKPAP

SEQ ID NO: 12557 - protein, 9 aa, synthetic construct
GGSPAPGSS

SEQ ID NO: 12558 - protein, 12 aa, synthetic construct
GSAGSAAGSGEF

SEQ ID NO: 12559 - protein, 9 aa, synthetic construct
GGSPAPGGG

SEQ ID NO: 12560 - protein, 20 aa, synthetic construct
GGGGSGGGGSGGGGSGGGGS

SEQ ID NO: 12561 - protein, 9 aa, synthetic construct
GSSGSSGSS

SEQ ID NO: 12562 - protein, 30 aa, synthetic construct; identical to SEQ ID NO: 5130

SEQ ID NO: 12563 - protein, 15 aa, synthetic construct
GGGGSEAAAKGGGGS

SEQ ID NO: 12564 - protein, 11 aa, synthetic construct
GGSEAAAKGSS

SEQ ID NO: 12565 - protein, 15 aa, synthetic construct
EAAAKGGGGSEAAAK

SEQ ID NO: 12566 - protein, 30 aa, synthetic construct; identical to SEQ ID NO: 5130

SEQ ID NO: 12567 - protein, 11 aa, synthetic construct
PAPGGGEAAAK

SEQ ID NO: 12568 - protein, 11 aa, synthetic construct
GSSGGGEAAAK

SEQ ID NO: 12569 - protein, 6 aa, synthetic construct
GSSGSS

SEQ ID NO: 12570 - protein, 13 aa, synthetic construct
PAPAPAPAPAPAP

SEQ ID NO: 12571 - protein, 9 aa, synthetic construct
GGSPAPGGG

SEQ ID NO: 12572 - protein, 15 aa, synthetic construct
GGSGGSGGSGGSGGS

SEQ ID NO: 12573 - protein, 10 aa, synthetic construct
EAAAKEAAAK

SEQ ID NO: 12574 - protein, 46 aa, synthetic construct; identical to SEQ ID NO: 5217

SEQ ID NO: 12575 - protein, 13 aa, synthetic construct
PAPAPAPAPAPAP

SEQ ID NO: 12576 - protein, 11 aa, synthetic construct
GGGEAAAKGGS

SEQ ID NO: 12577 - protein, 11 aa, synthetic construct
EAAAKGGGPAP

SEQ ID NO: 12578 - protein, 11 aa, synthetic construct
PAPEAAAKGSS

SEQ ID NO: 12579 - protein, 11 aa, synthetic construct
PAPEAAAKGSS

SEQ ID NO: 12580 - protein, 11 aa, synthetic construct
PAPGGSEAAAK

SEQ ID NO: 12581 - protein, 9 aa, synthetic construct
GSSPAPGGG

SEQ ID NO: 12582 - protein, 11 aa, synthetic construct
GGGEAAAKPAP

SEQ ID NO: 12583 - protein, 10 aa, synthetic construct
GGGGSGGGGS

SEQ ID NO: 12584 - protein, 11 aa, synthetic construct
GGGEAAAKGSS

SEQ ID NO: 12585 - protein, 9 aa, synthetic construct
PAPGGGGSS

SEQ ID NO: 12586 - protein, 8 aa, synthetic construct
GSSEAAAK

SEQ ID NO: 12587 - protein, 8 aa, synthetic construct
GGGGGGGG

SEQ ID NO: 12588 - protein, 9 aa, synthetic construct
PAPGSSGGS

SEQ ID NO: 12589 - protein, 20 aa, synthetic construct
GGGGSGGGGSGGGGSGGGGS

SEQ ID NO: 12590 - skipped

SEQ ID NO: 12591 - protein, 11 aa, synthetic construct
EAAAKGSSPAP

SEQ ID NO: 12592 - protein, 11 aa, synthetic construct
PAPEAAAKGGS

SEQ ID NO: 12593 - protein, 11 aa, synthetic construct
GSSGGGEAAAK

SEQ ID NO: 12594 - protein, 7 aa, synthetic construct
PAPAPAP

SEQ ID NO: 12595 - protein, 11 aa, synthetic construct
GGSEAAAKGGG

SEQ ID NO: 12596 - protein, 8 aa, synthetic construct
GSSEAAAK

SEQ ID NO: 12597 - protein, 4 aa, synthetic construct
GGGG

SEQ ID NO: 12598 - protein, 6 aa, synthetic construct
GGGGGS

SEQ ID NO: 12599 - protein, 11 aa, synthetic construct
GGGGSSEAAAK

SEQ ID NO: 12600 - protein, 30 aa, synthetic construct; identical to SEQ ID NO: 5130

SEQ ID NO: 12601 - protein, 11 aa, synthetic construct
GGSEAAAKGSS

SEQ ID NO: 12602 - protein, 9 aa, synthetic construct
PAPGSSGGS

SEQ ID NO: 12603 - protein, 6 aa, synthetic construct
GGSPAP

SEQ ID NO: 12604 - protein, 11 aa, synthetic construct
GGGGSSEAAAK

SEQ ID NO: 12605 - protein, 12 aa, synthetic construct
GGSGGSGGSGGS

SEQ ID NO: 12606 - protein, 9 aa, synthetic construct
PAPGSSGGS

SEQ ID NO: 12607 - protein, 9 aa, synthetic construct
GSSPAPGGG

SEQ ID NO: 12608 - protein, 7 aa, synthetic construct
GGGGGGG

SEQ ID NO: 12609 - protein, 11 aa, synthetic construct
EAAAKGGGGGS

SEQ ID NO: 12610 - protein, 11 aa, synthetic construct
EAAAKGGSGGG

SEQ ID NO: 12611 - protein, 11 aa, synthetic construct
GGGGSSEAAAK

SEQ ID NO: 12612 - protein, 15 aa, synthetic construct
GGGGSEAAAKGGGGS

SEQ ID NO: 12613 - protein, 6 aa, synthetic construct
GSSGSS

SEQ ID NO: 12614 - protein, 6 aa, synthetic construct
GGSGGG

SEQ ID NO: 12615 - protein, 11 aa, synthetic construct
PAPEAAAKGGG

SEQ ID NO: 12616 - protein, 46 aa, synthetic construct; identical to SEQ ID NO: 5217

SEQ ID NO: 12617 - protein, 9 aa, synthetic construct
GGGGGSGSS

SEQ ID NO: 12618 - protein, 15 aa, synthetic construct
GSSGSSGSSGSSGSS

SEQ ID NO: 12619 - protein, 15 aa, synthetic construct
GGGGSEAAAKGGGGS

SEQ ID NO: 12620 - protein, 9 aa, synthetic construct
GGGGGSPAP

SEQ ID NO: 12621 - protein, 8 aa, synthetic construct
GGGEAAAK

SEQ ID NO: 12622 - protein, 12 aa, synthetic construct
GGSGGSGGSGGS

SEQ ID NO: 12623 - skipped

SEQ ID NO: 12624 - protein, 11 aa, synthetic construct
GGSPAPEAAAK

SEQ ID NO: 12625 - protein, 10 aa, synthetic construct
EAAAKEAAAK

SEQ ID NO: 12626 - protein, 11 aa, synthetic construct
GGGEAAAKPAP

SEQ ID NO: 12627 - protein, 11 aa, synthetic construct
GGGEAAAKGGS

SEQ ID NO: 12628 - protein, 9 aa, synthetic construct
GGSGGSGGS

SEQ ID NO: 12629 - protein, 11 aa, synthetic construct
EAAAKGGGPAP

SEQ ID NO: 12630 - protein, 5 aa, synthetic construct
EAAAK

SEQ ID NO: 12631 - protein, 11 aa, synthetic construct
PAPEAAAKGGG

SEQ ID NO: 12632 - protein, 8 aa, synthetic construct
EAAAKGSS

SEQ ID NO: 12633 - protein, 11 aa, synthetic construct
GGSEAAAKGGG

SEQ ID NO: 12634 - protein, 20 aa, synthetic construct
GGGGSGGGGSGGGGSGGGGS

SEQ ID NO: 12635 - protein, 25 aa, synthetic construct
GGGGSGGGGSGGGGSGGGGSGGGGS

SEQ ID NO: 12636 - protein, 9 aa, synthetic construct
GGGGSSPAP

SEQ ID NO: 12637 - protein, 18 aa, synthetic construct
GGSGGSGGSGGSGGSGGS

SEQ ID NO: 12638 - protein, 11 aa, synthetic construct
GGGEAAAKPAP

SEQ ID NO: 12639 - protein, 10 aa, synthetic construct
EAAAKEAAAK

SEQ ID NO: 12640 - protein, 11 aa, synthetic construct
GGSGSSEAAAK

SEQ ID NO: 12641 - protein, 11 aa, synthetic construct
PAPEAAAKGSS

SEQ ID NO: 12642 - protein, 11 aa, synthetic construct
PAPAPAPAPAP

SEQ ID NO: 12643 - protein, 11 aa, synthetic construct
GSSGGGEAAAK

SEQ ID NO: 12644 - protein, 9 aa, synthetic construct
GSSPAPGGG

SEQ ID NO: 12645 - protein, 11 aa, synthetic construct
GGSPAPEAAAK

SEQ ID NO: 12646 - protein, 11 aa, synthetic construct
PAPGGSEAAAK

SEQ ID NO: 12647 - protein, 6 aa, synthetic construct
GGGGSS

SEQ ID NO: 12648 - protein, 9 aa, synthetic construct
GGSGSSGGG

SEQ ID NO: 12649 - protein, 11 aa, synthetic construct
GSSGGGEAAAK

SEQ ID NO: 12650 - protein, 8 aa, synthetic construct
EAAAKGGS

SEQ ID NO: 12651 - protein, 9 aa, synthetic construct
GGGPAPGGS

SEQ ID NO: 12652 - protein, 10 aa, synthetic construct
EAAAKEAAAK

SEQ ID NO: 12653 - protein, 9 aa, synthetic construct
GSSGSSGSS

SEQ ID NO: 12654 - protein, 11 aa, synthetic construct
GGGEAAAKPAP

SEQ ID NO: 12655 - protein, 16 aa, synthetic construct
SGSETPGTSESATPES

SEQ ID NO: 12656 - protein, 11 aa, synthetic construct
PAPAPAPAPAP

SEQ ID NO: 12657 - protein, 46 aa, synthetic construct; identical to SEQ ID NO: 5217

SEQ ID NO: 12658 - protein, 9 aa, synthetic construct
PAPGSSGGG

SEQ ID NO: 12659 - protein, 11 aa, synthetic construct
GSSGGGEAAAK

SEQ ID NO: 12660 - protein, 25 aa, synthetic construct
GGGGSGGGGSGGGGSGGGGSGGGGS

SEQ ID NO: 12661 - protein, 9 aa, synthetic construct
GGGGSSPAP

SEQ ID NO: 12662 - protein, 9 aa, synthetic construct
GGSGGGPAP

SEQ ID NO: 12663 - skipped

SEQ ID NO: 12664 - protein, 11 aa, synthetic construct
EAAAKGSSPAP

SEQ ID NO: 12665 - protein, 8 aa, synthetic construct
EAAAKGGG

SEQ ID NO: 12666 - protein, 12 aa, synthetic construct
GSSGSSGSSGSS

SEQ ID NO: 12667 - protein, 11 aa, synthetic construct
PAPEAAAKGSS

SEQ ID NO: 12668 - protein, 8 aa, synthetic construct
GSSEAAAK

SEQ ID NO: 12669 - protein, 11 aa, synthetic construct
EAAAKGGSGSS

SEQ ID NO: 12670 - protein, 8 aa, synthetic construct
GSSEAAAK

SEQ ID NO: 12671 - protein, 11 aa, synthetic construct
GGSGSSEAAAK

SEQ ID NO: 12672 - protein, 11 aa, synthetic construct
GGSEAAAKGGG

SEQ ID NO: 12673 - protein, 20 aa, synthetic construct
GGGGSGGGGSGGGGSGGGGS

SEQ ID NO: 12674 - protein, 13 aa, synthetic construct
PAPAPAPAPAPAP

SEQ ID NO: 12675 - protein, 11 aa, synthetic construct
EAAAKPAPGSS

SEQ ID NO: 12676 - protein, 11 aa, synthetic construct
PAPGSSEAAAK

SEQ ID NO: 12677 - protein, 9 aa, synthetic construct
GGGGSSPAP

SEQ ID NO: 12678 - protein, 11 aa, synthetic construct
EAAAKGGGGGS

SEQ ID NO: 12679 - protein, 11 aa, synthetic construct
GGGEAAAKGGS

SEQ ID NO: 12680 - protein, 9 aa, synthetic construct
GGSGSSGGG

SEQ ID NO: 12681 - protein, 9 aa, synthetic construct
GGGPAPGGS

SEQ ID NO: 12682 - protein, 9 aa, synthetic construct
PAPGGGGGS

SEQ ID NO: 12683 - protein, 9 aa, synthetic construct
GGGPAPGSS

SEQ ID NO: 12684 - protein, 7 aa, synthetic construct
GGGGGGG

SEQ ID NO: 12685 - protein, 9 aa, synthetic construct
GGSGGGGSS

SEQ ID NO: 12686 - protein, 6 aa, synthetic construct
GGGGGG

SEQ ID NO: 12687 - protein, 11 aa, synthetic construct
GGSEAAAKGSS

SEQ ID NO: 12688 - protein, 9 aa, synthetic construct
GGSPAPGGG

SEQ ID NO: 12689 - protein, 9 aa, synthetic construct
GGSPAPGSS

SEQ ID NO: 12690 - protein, 12 aa, synthetic construct
GGSGGSGGSGGS

SEQ ID NO: 12691 - protein, 25 aa, synthetic construct
EAAAKEAAAKEAAAKEAAAKEAAAK

SEQ ID NO: 12692 - protein, 9 aa, synthetic construct
PAPGSSGGS

SEQ ID NO: 12693 - protein, 11 aa, synthetic construct
EAAAKGGGGSS

SEQ ID NO: 12694 - protein, 15 aa, synthetic construct
GGSGGSGGSGGSGGS

SEQ ID NO: 12695 - protein, 9 aa, synthetic construct
PAPGGSGGG

SEQ ID NO: 12696 - protein, 9 aa, synthetic construct
PAPGSSGGG

SEQ ID NO: 12697 - protein, 6 aa, synthetic construct
GSSGSS

SEQ ID NO: 12698 - protein, 8 aa, synthetic construct
EAAAKGSS

SEQ ID NO: 12699 - protein, 6 aa, synthetic construct
GGGPAP

SEQ ID NO: 12700 - protein, 11 aa, synthetic construct
EAAAKGGGGGS

SEQ ID NO: 12701 - protein, 11 aa, synthetic construct
EAAAKGGSPAP

SEQ ID NO: 12702 - protein, 30 aa, synthetic construct; identical to SEQ ID NO: 5130

SEQ ID NO: 12703 - protein, 9 aa, synthetic construct
GSSPAPGGG

SEQ ID NO: 12704 - protein, 11 aa, synthetic construct
GGGEAAAKGSS

SEQ ID NO: 12705 - protein, 11 aa, synthetic construct
GGGGSSEAAAK

SEQ ID NO: 12706 - protein, 8 aa, synthetic construct
GGGGGGGG

SEQ ID NO: 12707 - protein, 11 aa, synthetic construct
PAPGSSEAAAK

SEQ ID NO: 12708 - protein, 8 aa, synthetic construct
EAAAKGSS

SEQ ID NO: 12709 - protein, 11 aa, synthetic construct
GSSEAAAKGGG

SEQ ID NO: 12710 - protein, 8 aa, synthetic construct
GGSEAAAK

SEQ ID NO: 12711 - protein, 11 aa, synthetic construct
GSSEAAAKGGG

SEQ ID NO: 12712 - protein, 9 aa, synthetic construct
PAPGGSGGG

SEQ ID NO: 12713 - protein, 9 aa, synthetic construct
GSSGGSGGG

SEQ ID NO: 12714 - protein, 11 aa, synthetic construct
EAAAKGSSGGG

SEQ ID NO: 12715 - protein, 8 aa, synthetic construct
GSSEAAAK

SEQ ID NO: 12716 - protein, 11 aa, synthetic construct
GSSGGGEAAAK

SEQ ID NO: 12717 - protein, 10 aa, synthetic construct
GGGGSGGGGS

SEQ ID NO: 12718 - protein, 15 aa, synthetic construct
EAAAKGGGGSEAAAK

SEQ ID NO: 12719 - protein, 8 aa, synthetic construct
EAAAKGGG

SEQ ID NO: 12720 - protein, 11 aa, synthetic construct
EAAAKGGSPAP

SEQ ID NO: 12721 - protein, 9 aa, synthetic construct
GGGPAPGGS

SEQ ID NO: 12722 - protein, 8 aa, synthetic construct
GSSEAAAK

SEQ ID NO: 12723 - protein, 11 aa, synthetic construct
GSSGGGEAAAK

SEQ ID NO: 12724 - protein, 16 aa, synthetic construct
SGSETPGTSESATPES

SEQ ID NO: 12725 - protein, 9 aa, synthetic construct
GGSGSSPAP

SEQ ID NO: 12726 - protein, 6 aa, synthetic construct
GGGGGG

SEQ ID NO: 12727 - protein, 9 aa, synthetic construct
GGSPAPGGG

SEQ ID NO: 12728 - protein, 6 aa, synthetic construct
GGSGSS

SEQ ID NO: 12729 - skipped

SEQ ID NO: 12730 - protein, 11 aa, synthetic construct
EAAAKPAPGSS

SEQ ID NO: 12731 - protein, 8 aa, synthetic construct
EAAAKGGG

SEQ ID NO: 12732 - protein, 11 aa, synthetic construct
GSSEAAAKPAP

SEQ ID NO: 12733 - protein, 6 aa, synthetic construct
GGGGSS

SEQ ID NO: 12734 - protein, 11 aa, synthetic construct
GGSGSSEAAAK

SEQ ID NO: 12735 - protein, 6 aa, synthetic construct
GGGGSS

SEQ ID NO: 12736 - protein, 5 aa, synthetic construct
PAPAP

SEQ ID NO: 12737 - protein, 11 aa, synthetic construct
PAPEAAAKGGG

SEQ ID NO: 12738 - protein, 8 aa, synthetic construct
EAAAKGGS

SEQ ID NO: 12739 - protein, 13 aa, synthetic construct
PAPAPAPAPAPAP

SEQ ID NO: 12740 - protein, 11 aa, synthetic construct
GGGGGSEAAAK

SEQ ID NO: 12741 - protein, 6 aa, synthetic construct
PAPGGS

SEQ ID NO: 12742 - protein, 6 aa, synthetic construct
GGGGSS

SEQ ID NO: 12743 - protein, 5 aa, synthetic construct
GGGGS

SEQ ID NO: 12744 - protein, 11 aa, synthetic construct
GSSPAPEAAAK

SEQ ID NO: 12745 - protein, 9 aa, synthetic construct
GGGGSSGGS

SEQ ID NO: 12746 - protein, 11 aa, synthetic construct
PAPEAAAKGSS

SEQ ID NO: 12747 - protein, 11 aa, synthetic construct
GGSGSSEAAAK

SEQ ID NO: 12748 - protein, 8 aa, synthetic construct
EAAAKGGG

SEQ ID NO: 12749 - protein, 11 aa, synthetic construct
PAPGSSEAAAK

SEQ ID NO: 12750 - protein, 11 aa, synthetic construct
EAAAKGSSGGG

SEQ ID NO: 12751 - protein, 8 aa, synthetic construct
PAPEAAAK

SEQ ID NO: 12752 - protein, 11 aa, synthetic construct
GGSPAPEAAAK

SEQ ID NO: 12753 - protein, 18 aa, synthetic construct
GGSGGSGGSGGSGGSGGS

SEQ ID NO: 12754 - protein, 11 aa, synthetic construct
GSSEAAAKPAP

SEQ ID NO: 12755 - protein, 46 aa, synthetic construct; identical to SEQ ID NO: 5217

SEQ ID NO: 12756 - protein, 11 aa, synthetic construct
GSSGGGEAAAK

SEQ ID NO: 12757 - protein, 9 aa, synthetic construct
PAPGGSGGG

SEQ ID NO: 12758 - protein, 11 aa, synthetic construct
PAPGGSEAAAK

SEQ ID NO: 12759 - protein, 5 aa, synthetic construct
GGGGS

SEQ ID NO: 12760 - protein, 15 aa, synthetic construct
GGGGSGGGGSGGGGS

SEQ ID NO: 12761 - protein, 11 aa, synthetic construct
PAPAPAPAPAP

SEQ ID NO: 12762 - protein, 25 aa, synthetic construct
EAAAKEAAAKEAAAKEAAAKEAAAK

SEQ ID NO: 12763 - protein, 11 aa, synthetic construct
GSSGGSEAAAK

SEQ ID NO: 12764 - protein, 12 aa, synthetic construct
GGSGGSGGSGGS

SEQ ID NO: 12765 - protein, 11 aa, synthetic construct
EAAAKGSSGGG

SEQ ID NO: 12766 - protein, 8 aa, synthetic construct
EAAAKGGG

SEQ ID NO: 12767 - protein, 16 aa, synthetic construct
SGSETPGTSESATPES

SEQ ID NO: 12768 - protein, 9 aa, synthetic construct
PAPGSSGGS

SEQ ID NO: 12769 - protein, 11 aa, synthetic construct
PAPEAAAKGSS

SEQ ID NO: 12770 - protein, 8 aa, synthetic construct
PAPEAAAK

SEQ ID NO: 12771 - protein, 11 aa, synthetic construct
GSSEAAAKGGG

SEQ ID NO: 12772 - protein, 6 aa, synthetic construct
GSSPAP

SEQ ID NO: 12773 - protein, 20 aa, synthetic construct
EAAAKEAAAKEAAAKEAAAK

SEQ ID NO: 12774 - protein, 9 aa, synthetic construct
PAPGGSGSS

SEQ ID NO: 12775 - protein, 15 aa, synthetic construct
GGGGSGGGGSGGGGS

SEQ ID NO: 12776 - protein, 11 aa, synthetic construct
GSSGGSEAAAK

SEQ ID NO: 12777 - protein, 8 aa, synthetic construct
EAAAKGGS

SEQ ID NO: 12778 - protein, 8 aa, synthetic construct
EAAAKGGS

SEQ ID NO: 12779 - protein, 6 aa, synthetic construct
GGSPAP

SEQ ID NO: 12780 - protein, 6 aa, synthetic construct
GGSGSS

SEQ ID NO: 12781 - protein, 16 aa, synthetic construct
SGSETPGTSESATPES

SEQ ID NO: 12782 - protein, 7 aa, synthetic construct
GGGGGGG

SEQ ID NO: 12783 - protein, 9 aa, synthetic construct
GGSPAPGSS

SEQ ID NO: 12784 - protein, 9 aa, synthetic construct
GGGGSSGGS

SEQ ID NO: 12785 - protein, 6 aa, synthetic construct
PAPGGS

SEQ ID NO: 12786 - protein, 9 aa, synthetic construct
PAPGSSGGS

SEQ ID NO: 12787 - protein, 25 aa, synthetic construct
EAAAKEAAAKEAAAKEAAAKEAAAK

SEQ ID NO: 12788 - protein, 33 aa, synthetic construct; identical to SEQ ID NO: 5006

SEQ ID NO: 12789 - protein, 15 aa, synthetic construct
GGSGGSGGSGGSGGS

SEQ ID NO: 12790 - protein, 8 aa, synthetic construct
GSSEAAAK

SEQ ID NO: 12791 - protein, 20 aa, synthetic construct
EAAAKEAAAKEAAAKEAAAK

SEQ ID NO: 12792 - protein, 15 aa, synthetic construct
GGSGGSGGSGGSGGS

SEQ ID NO: 12793 - protein, 13 aa, synthetic construct
PAPAPAPAPAPAP

SEQ ID NO: 12794 - protein, 11 aa, synthetic construct
GGSPAPEAAAK

SEQ ID NO: 12795 - protein, 5 aa, synthetic construct
EAAAK

SEQ ID NO: 12796 - protein, 11 aa, synthetic construct
EAAAKGSSGGS

SEQ ID NO: 12797 - protein, 9 aa, synthetic construct
GGSGGGGSS

SEQ ID NO: 12798 - protein, 11 aa, synthetic construct
GGGEAAAKPAP

SEQ ID NO: 12799 - protein, 11 aa, synthetic construct
EAAAKGGSGGG

SEQ ID NO: 12800 - protein, 11 aa, synthetic construct
GGGGGSEAAAK

SEQ ID NO: 12801 - protein, 6 aa, synthetic construct
GGGGGG

SEQ ID NO: 12802 - protein, 6 aa, synthetic construct
GGGGGG

SEQ ID NO: 12803 - protein, 7 aa, synthetic construct
GGGGGGG

SEQ ID NO: 12804 - protein, 46 aa, synthetic construct; identical to SEQ ID NO: 5217

SEQ ID NO: 12805 - protein, 9 aa, synthetic construct
PAPGSSGGS

SEQ ID NO: 12806 - protein, 6 aa, synthetic construct
GGGGGS

SEQ ID NO: 12807 - protein, 8 aa, synthetic construct
EAAAKPAP

SEQ ID NO: 12808 - skipped

SEQ ID NO: 12809 - protein, 46 aa, synthetic construct; identical to SEQ ID NO: 5217

SEQ ID NO: 12810 - protein, 11 aa, synthetic construct
EAAAKGSSPAP

SEQ ID NO: 12811 - protein, 16 aa, synthetic construct
SGSETPGTSESATPES

SEQ ID NO: 12812 - protein, 11 aa, synthetic construct
GGSPAPEAAAK

SEQ ID NO: 12813 - protein, 12 aa, synthetic construct
GSSGSSGSSGSS

SEQ ID NO: 12814 - protein, 46 aa, synthetic construct; identical to SEQ ID NO: 5217

SEQ ID NO: 12815 - protein, 6 aa, synthetic construct
GGSPAP

SEQ ID NO: 12816 - protein, 11 aa, synthetic construct
GGGGGSEAAAK

SEQ ID NO: 12817 - protein, 5 aa, synthetic construct
GGGGG

SEQ ID NO: 12818 - protein, 8 aa, synthetic construct
GSSEAAAK

SEQ ID NO: 12819 - skipped

SEQ ID NO: 12820 - protein, 11 aa, synthetic construct
EAAAKGGSPAP

SEQ ID NO: 12821 - protein, 9 aa, synthetic construct
PAPAPAPAP

SEQ ID NO: 12822 - protein, 11 aa, synthetic construct
PAPGGGEAAAK

SEQ ID NO: 12823 - protein, 11 aa, synthetic construct
GGGGSSEAAAK

SEQ ID NO: 12824 - protein, 5 aa, synthetic construct
GGGGG

SEQ ID NO: 12825 - protein, 18 aa, synthetic construct
GGSGGSGGSGGSGGSGGS

SEQ ID NO: 12826 - protein, 5 aa, synthetic construct
GGGGG

SEQ ID NO: 12827 - protein, 11 aa, synthetic construct
PAPEAAAKGGG

SEQ ID NO: 12828 - protein, 9 aa, synthetic construct
GSSGGGPAP

SEQ ID NO: 12829 - protein, 18 aa, synthetic construct
GSSGSSGSSGSSGSSGSS

SEQ ID NO: 12830 - protein, 11 aa, synthetic construct
EAAAKGGSPAP

SEQ ID NO: 12831 - protein, 11 aa, synthetic construct
GSSGGSEAAAK

SEQ ID NO: 12832 - skipped

SEQ ID NO: 12833 - protein, 8 aa, synthetic construct
EAAAKGGS

SEQ ID NO: 12834 - protein, 9 aa, synthetic construct
GGGGGSPAP

SEQ ID NO: 12835 - protein, 8 aa, synthetic construct
EAAAKGSS

SEQ ID NO: 12836 - protein, 11 aa, synthetic construct
EAAAKGGGGSS

SEQ ID NO: 12837 - protein, 9 aa, synthetic construct
PAPGSSGGG

SEQ ID NO: 12838 - protein, 11 aa, synthetic construct
GGGGSSEAAAK

SEQ ID NO: 12839 - protein, 7 aa, synthetic construct
PAPAPAP

SEQ ID NO: 12840 - protein, 11 aa, synthetic construct
GSSGGSEAAAK

SEQ ID NO: 12841 - protein, 11 aa, synthetic construct
PAPEAAAKGSS

SEQ ID NO: 12842 - protein, 15 aa, synthetic construct
GGSGGSGGSGGSGGS

SEQ ID NO: 12843 - protein, 9 aa, synthetic construct
GGSGSSPAP

SEQ ID NO: 12844 - protein, 9 aa, synthetic construct
GGGGSSPAP

SEQ ID NO: 12845 - protein, 5 aa, synthetic construct
GGGGS

SEQ ID NO: 12846 - protein, 20 aa, synthetic construct
EAAAKEAAAKEAAAKEAAAK

SEQ ID NO: 12847 - protein, 10 aa, synthetic construct
EAAAKEAAAK

SEQ ID NO: 12848 - protein, 11 aa, synthetic construct
PAPGGGEAAAK

SEQ ID NO: 12849 - protein, 11 aa, synthetic construct
GSSGGSEAAAK

SEQ ID NO: 12850 - protein, 30 aa, synthetic construct; identical to SEQ ID NO: 5130

SEQ ID NO: 12851 - protein, 11 aa, synthetic construct
GSSEAAAKPAP

SEQ ID NO: 12852 - protein, 11 aa, synthetic construct
EAAAKPAPGSS

SEQ ID NO: 12853 - protein, 9 aa, synthetic construct
GSSGGSPAP

SEQ ID NO: 12854 - protein, 11 aa, synthetic construct
GSSEAAAKGGG

SEQ ID NO: 12855 - protein, 11 aa, synthetic construct
GGGEAAAKGGS

SEQ ID NO: 12856 - protein, 11 aa, synthetic construct
GSSEAAAKGGG

SEQ ID NO: 12857 - protein, 7 aa, synthetic construct
PAPAPAP

SEQ ID NO: 12858 - protein, 11 aa, synthetic construct
EAAAKGGSPAP

SEQ ID NO: 12859 - protein, 11 aa, synthetic construct
PAPGGSEAAAK

SEQ ID NO: 12860 - protein, 5 aa, synthetic construct
GGGGS

SEQ ID NO: 12861 - protein, 11 aa, synthetic construct
EAAAKGSSGGG

SEQ ID NO: 12862 - protein, 11 aa, synthetic construct
EAAAKGGGPAP

SEQ ID NO: 12863 - protein, 8 aa, synthetic construct
EAAAKGSS

SEQ ID NO: 12864 - protein, 9 aa, synthetic construct
GGSPAPGGG

SEQ ID NO: 12865 - protein, 15 aa, synthetic construct
GGGGSEAAAKGGGGS

SEQ ID NO: 12866 - protein, 11 aa, synthetic construct
GGGEAAAKGGS

SEQ ID NO: 12867 - protein, 11 aa, synthetic construct
EAAAKGGGGSS

SEQ ID NO: 12868 - protein, 11 aa, synthetic construct
EAAAKGGGPAP

SEQ ID NO: 12869 - protein, 6 aa, synthetic construct
GSSPAP

SEQ ID NO: 12870 - protein, 8 aa, synthetic construct
EAAAKGGS

SEQ ID NO: 12871 - protein, 6 aa, synthetic construct
GGGGSS

SEQ ID NO: 12872 - protein, 11 aa, synthetic construct
EAAAKGSSPAP

SEQ ID NO: 12873 - protein, 6 aa, synthetic construct
GGGPAP

SEQ ID NO: 12874 - protein, 11 aa, synthetic construct
EAAAKGSSGGS

SEQ ID NO: 12875 - protein, 6 aa, synthetic construct
PAPGGG

SEQ ID NO: 12876 - protein, 11 aa, synthetic construct
GSSPAPEAAAK

SEQ ID NO: 12877 - protein, 6 aa, synthetic construct
GGGPAP

SEQ ID NO: 12878 - protein, 9 aa, synthetic construct
GSSGGGGGS

SEQ ID NO: 12879 - protein, 16 aa, synthetic construct
SGSETPGTSESATPES

SEQ ID NO: 12880 - protein, 6 aa, synthetic construct
GGGPAP

SEQ ID NO: 12881 - protein, 11 aa, synthetic construct
EAAAKGGGGSS

SEQ ID NO: 12882 - protein, 9 aa, synthetic construct
GGGGSSPAP

SEQ ID NO: 12883 - protein, 15 aa, synthetic construct
GGGGSEAAAKGGGGS

SEQ ID NO: 12884 - protein, 6 aa, synthetic construct
GSSPAP

SEQ ID NO: 12885 - protein, 11 aa, synthetic construct
GGSGSSEAAAK

SEQ ID NO: 12886 - protein, 16 aa, synthetic construct
SGSETPGTSESATPES

SEQ ID NO: 12887 - protein, 6 aa, synthetic construct
PAPGGG

SEQ ID NO: 12888 - protein, 11 aa, synthetic construct
GGGEAAAKPAP

SEQ ID NO: 12889 - protein, 11 aa, synthetic construct
EAAAKGGSGSS

SEQ ID NO: 12890 - protein, 9 aa, synthetic construct
GGSPAPGGG

SEQ ID NO: 12891 - protein, 9 aa, synthetic construct
PAPGGSGSS

SEQ ID NO: 12892 - protein, 9 aa, synthetic construct
GSSGGSPAP

SEQ ID NO: 12893 - protein, 11 aa, synthetic construct
EAAAKGSSGGG

SEQ ID NO: 12894 - protein, 10 aa, synthetic construct
GGGGSGGGGS

SEQ ID NO: 12895 - protein, 9 aa, synthetic construct
GSSGGGGGS

SEQ ID NO: 12896 - protein, 9 aa, synthetic construct
GGGGSSGGS

SEQ ID NO: 12897 - protein, 8 aa, synthetic construct
EAAAKGGS

SEQ ID NO: 12898 - protein, 12 aa, synthetic construct
GSSGSSGSSGSS

SEQ ID NO: 12899 - skipped

SEQ ID NO: 12900 - protein, 11 aa, synthetic construct
GSSGGSEAAAK

SEQ ID NO: 12901 - protein, 33 aa, synthetic construct; identical to SEQ ID NO: 5006

SEQ ID NO: 12902 - protein, 5 aa, synthetic construct
GGGGG

SEQ ID NO: 12903 - protein, 11 aa, synthetic construct
PAPEAAAKGSS

SEQ ID NO: 12904 - protein, 6 aa, synthetic construct
GGGGGG

SEQ ID NO: 12905 - protein, 8 aa, synthetic construct
EAAAKGGG

SEQ ID NO: 12906 - protein, 6 aa, synthetic construct
GGGGSS

SEQ ID NO: 12907 - protein, 11 aa, synthetic construct
GSSGGGEAAAK

SEQ ID NO: 12908 - protein, 6 aa, synthetic construct
GGSGSS

SEQ ID NO: 12909 - protein, 8 aa, synthetic construct
EAAAKPAP

SEQ ID NO: 12910 - protein, 15 aa, synthetic construct
EAAAKEAAAKEAAAK

SEQ ID NO: 12911 - protein, 4 aa, synthetic construct
GGGG

SEQ ID NO: 12912 - protein, 9 aa, synthetic construct
GSSPAPGGS

SEQ ID NO: 12913 - protein, 9 aa, synthetic construct
GSSGGGGGS

SEQ ID NO: 12914 - protein, 9 aa, synthetic construct
GGGGSSGGS

SEQ ID NO: 12915 - skipped

SEQ ID NO: 12916 - protein, 5 aa, synthetic construct
GGGGG

SEQ ID NO: 12917 - protein, 18 aa, synthetic construct
GSSGSSGSSGSSGSSGSS

SEQ ID NO: 12918 - protein, 9 aa, synthetic construct
PAPGGGGSS

SEQ ID NO: 12919 - protein, 8 aa, synthetic construct
GGGGGGGG

SEQ ID NO: 12920 - protein, 16 aa, synthetic construct
SGSETPGTSESATPES

SEQ ID NO: 12921 - protein, 6 aa, synthetic construct
PAPGGG

SEQ ID NO: 12922 - protein, 9 aa, synthetic construct
GSSGSSGSS

SEQ ID NO: 12923 - protein, 6 aa, synthetic construct
GGSGSS

SEQ ID NO: 12924 - protein, 15 aa, synthetic construct
EAAAKGGGGSEAAAK

SEQ ID NO: 12925 - protein, 8 aa, synthetic construct
GGGGGGGG

SEQ ID NO: 12926 - protein, 6 aa, synthetic construct
GSSGSS

SEQ ID NO: 12927 - protein, 11 aa, synthetic construct
PAPEAAAKGGS

SEQ ID NO: 12928 - protein, 10 aa, synthetic construct
EAAAKEAAAK

SEQ ID NO: 12929 - protein, 15 aa, synthetic construct
GGGGSGGGGSGGGGS

SEQ ID NO: 12930 - protein, 11 aa, synthetic construct
EAAAKGSSPAP

SEQ ID NO: 12931 - protein, 11 aa, synthetic construct
GGGGSSEAAAK

SEQ ID NO: 12932 - protein, 11 aa, synthetic construct
GGGGSSEAAAK

SEQ ID NO: 12933 - protein, 9 aa, synthetic construct
PAPGGSGSS

SEQ ID NO: 12934 - protein, 11 aa, synthetic construct
GGSGGGEAAAK

SEQ ID NO: 12935 - protein, 11 aa, synthetic construct
PAPEAAAKGGS

SEQ ID NO: 12936 - protein, 9 aa, synthetic construct
GGGPAPGSS

SEQ ID NO: 12937 - protein, 9 aa, synthetic construct
PAPGGSGGG

SEQ ID NO: 12938 - protein, 8 aa, synthetic construct
GGGGGGGG

SEQ ID NO: 12939 - protein, 8 aa, synthetic construct
GSSEAAAK

SEQ ID NO: 12940 - protein, 15 aa, synthetic construct
GGGGSGGGGSGGGGS

SEQ ID NO: 12941 - protein, 8 aa, synthetic construct
EAAAKGGS

SEQ ID NO: 12942 - protein, 9 aa, synthetic construct
GGGGGSGSS

SEQ ID NO: 12943 - protein, 6 aa, synthetic construct
GGGPAP

SEQ ID NO: 12944 - protein, 11 aa, synthetic construct
EAAAKPAPGGG

SEQ ID NO: 12945 - protein, 9 aa, synthetic construct
GSSGGSPAP

SEQ ID NO: 12946 - protein, 33 aa, synthetic construct; identical to SEQ ID NO: 5006

SEQ ID NO: 12947 - protein, 9 aa, synthetic construct
PAPAPAPAP

SEQ ID NO: 12948 - protein, 6 aa, synthetic construct
GSSGGS

SEQ ID NO: 12949 - protein, 11 aa, synthetic construct
GSSEAAAKGGG

SEQ ID NO: 12950 - protein, 9 aa, synthetic construct
GGSGSSPAP

SEQ ID NO: 12951 - protein, 11 aa, synthetic construct
GSSEAAAKGGS

SEQ ID NO: 12952 - protein, 25 aa, synthetic construct
EAAAKEAAAKEAAAKEAAAKEAAAK

SEQ ID NO: 12953 - protein, 9 aa, synthetic construct
PAPGGGGSS

SEQ ID NO: 12954 - protein, 8 aa, synthetic construct
EAAAKGSS

SEQ ID NO: 12955 - protein, 46 aa, synthetic construct; identical to SEQ ID NO: 5217

SEQ ID NO: 12956 - protein, 18 aa, synthetic construct
GGSGGSGGSGGSGGSGGS

SEQ ID NO: 12957 - protein, 6 aa, synthetic construct
GGGGGG

SEQ ID NO: 12958 - protein, 8 aa, synthetic construct
PAPEAAAK

SEQ ID NO: 12959 - protein, 11 aa, synthetic construct
GGSGSSEAAAK

SEQ ID NO: 12960 - skipped

SEQ ID NO: 12961 - protein, 5 aa, synthetic construct
GGGGG

SEQ ID NO: 12962 - protein, 12 aa, synthetic construct
GGSGGSGGSGGS

SEQ ID NO: 12963 - protein, 18 aa, synthetic construct
GSSGSSGSSGSSGSSGSS

SEQ ID NO: 12964 - protein, 11 aa, synthetic construct
GSSEAAAKPAP

SEQ ID NO: 12965 - protein, 11 aa, synthetic construct
GGGEAAAKPAP

SEQ ID NO: 12966 - protein, 9 aa, synthetic construct
GSSGSSGSS

SEQ ID NO: 12967 - protein, 9 aa, synthetic construct
PAPAPAPAP

SEQ ID NO: 12968 - protein, 8 aa, synthetic construct
EAAAKGGG

SEQ ID NO: 12969 - protein, 13 aa, synthetic construct
PAPAPAPAPAPAP

SEQ ID NO: 12970 - protein, 11 aa, synthetic construct
EAAAKGGSGSS

SEQ ID NO: 12971 - protein, 6 aa, synthetic construct
GGGGGG

SEQ ID NO: 12972 - protein, 6 aa, synthetic construct
PAPGGG

SEQ ID NO: 12973 - protein, 9 aa, synthetic construct
GGGGGSGSS

SEQ ID NO: 12974 - protein, 20 aa, synthetic construct
GGGGSGGGGSGGGGSGGGGS

SEQ ID NO: 12975 - protein, 9 aa, synthetic construct
GGSGGSGGS

SEQ ID NO: 12976 - protein, 11 aa, synthetic construct
EAAAKPAPGGG

SEQ ID NO: 12977 - protein, 46 aa, synthetic construct; identical to SEQ ID NO: 5217

SEQ ID NO: 12978 - protein, 30 aa, synthetic construct; identical to SEQ ID NO: 5112

SEQ ID NO: 12979 - protein, 15 aa, synthetic construct
EAAAKGGGGSEAAAK

SEQ ID NO: 12980 - protein, 9 aa, synthetic construct
GGGPAPGSS

SEQ ID NO: 12981 - protein, 5 aa, synthetic construct
GGGGG

SEQ ID NO: 12982 - protein, 30 aa, synthetic construct; identical to SEQ ID NO: 5112

SEQ ID NO: 12983 - protein, 10 aa, synthetic construct
GGGGSGGGGS

SEQ ID NO: 12984 - protein, 11 aa, synthetic construct
EAAAKGGSPAP

SEQ ID NO: 12985 - protein, 11 aa, synthetic construct
EAAAKGSSPAP

SEQ ID NO: 12986 - protein, 9 aa, synthetic construct
PAPGGSGSS

SEQ ID NO: 12987-12988 - skipped (2 entries)

SEQ ID NO: 12989 - protein, 9 aa, synthetic construct
GGGPAPGSS

SEQ ID NO: 12990 - protein, 8 aa, synthetic construct
EAAAKPAP

SEQ ID NO: 12991 - protein, 11 aa, synthetic construct
GSSPAPEAAAK

SEQ ID NO: 12992 - protein, 9 aa, synthetic construct
GGSPAPGSS

SEQ ID NO: 12993 - protein, 11 aa, synthetic construct
GGGGGSEAAAK

SEQ ID NO: 12994 - protein, 11 aa, synthetic construct
PAPEAAAKGGG

SEQ ID NO: 12995 - protein, 6 aa, synthetic construct
PAPGGG

SEQ ID NO: 12996 - protein, 11 aa, synthetic construct
GGSPAPEAAAK

SEQ ID NO: 12997 - protein, 9 aa, synthetic construct
GGSGGGGSS

SEQ ID NO: 12998 - protein, 11 aa, synthetic construct
EAAAKGGGGSS

SEQ ID NO: 12999 - protein, 11 aa, synthetic construct
EAAAKGGSPAP

SEQ ID NO: 13000 - protein, 9 aa, synthetic construct
GGSGGGGSS

SEQ ID NO: 13001 - protein, 11 aa, synthetic construct
PAPGSSEAAAK

SEQ ID NO: 13002 - protein, 8 aa, synthetic construct
GSSEAAAK

SEQ ID NO: 13003 - protein, 12 aa, synthetic construct
GSAGSAAGSGEF

SEQ ID NO: 13004 - protein, 11 aa, synthetic construct
EAAAKGGSGSS

SEQ ID NO: 13005 - protein, 11 aa, synthetic construct
GGSEAAAKPAP

SEQ ID NO: 13006 - protein, 25 aa, synthetic construct
GGGGSGGGGSGGGGSGGGGSGGGGS

SEQ ID NO: 13007 - protein, 11 aa, synthetic construct
PAPGSSEAAAK

SEQ ID NO: 13008 - protein, 9 aa, synthetic construct
GGGGSSPAP

SEQ ID NO: 13009 - protein, 7 aa, synthetic construct
PAPAPAP

SEQ ID NO: 13010 - protein, 11 aa, synthetic construct
EAAAKPAPGGG

SEQ ID NO: 13011 - protein, 9 aa, synthetic construct
GGGPAPGSS

SEQ ID NO: 13012 - skipped

SEQ ID NO: 13013 - protein, 9 aa, synthetic construct
PAPGGSGGG

SEQ ID NO: 13014 - protein, 15 aa, synthetic construct
GGSGGSGGSGGSGGS

SEQ ID NO: 13015 - protein, 9 aa, synthetic construct
PAPAPAPAP

SEQ ID NO: 13016 - protein, 9 aa, synthetic construct
GSSPAPGGG

SEQ ID NO: 13017 - protein, 9 aa, synthetic construct
GSSPAPGGG

SEQ ID NO: 13018 - protein, 6 aa, synthetic construct
PAPGGG

SEQ ID NO: 13019 - protein, 11 aa, synthetic construct
GGGEAAAKGSS

SEQ ID NO: 13020 - protein, 8 aa, synthetic construct
EAAAKGSS

SEQ ID NO: 13021 - protein, 8 aa, synthetic construct
EAAAKGGS

SEQ ID NO: 13022 - protein, 25 aa, synthetic construct
EAAAKEAAAKEAAAKEAAAKEAAAK

SEQ ID NO: 13023 - protein, 11 aa, synthetic construct
PAPEAAAKGGG

SEQ ID NO: 13024 - protein, 11 aa, synthetic construct
EAAAKGSSGGG

SEQ ID NO: 13025 - protein, 46 aa, synthetic construct; identical to SEQ ID NO: 5217

SEQ ID NO: 13026 - protein, 30 aa, synthetic construct; identical to SEQ ID NO: 5130

SEQ ID NO: 13027 - protein, 9 aa, synthetic construct
GSSGGSGGG

SEQ ID NO: 13028 - protein, 12 aa, synthetic construct
GSSGSSGSSGSS

SEQ ID NO: 13029 - protein, 9 aa, synthetic construct
GGSPAPGGG

SEQ ID NO: 13030 - skipped

SEQ ID NO: 13031 - protein, 9 aa, synthetic construct
GGGPAPGSS

SEQ ID NO: 13032 - protein, 6 aa, synthetic construct
GGGGSS

SEQ ID NO: 13033 - protein, 9 aa, synthetic construct
GSSGGSGGG

SEQ ID NO: 13034 - protein, 15 aa, synthetic construct
EAAAKEAAAKEAAAK

SEQ ID NO: 13035 - protein, 33 aa, synthetic construct; identical to SEQ ID NO: 5006

SEQ ID NO: 13036 - protein, 9 aa, synthetic construct
PAPGGGGGS

SEQ ID NO: 13037 - protein, 11 aa, synthetic construct
PAPAPAPAPAP

SEQ ID NO: 13038 - protein, 5 aa, synthetic construct
EAAAK

SEQ ID NO: 13039 - skipped

SEQ ID NO: 13040 - protein, 11 aa, synthetic construct
GGSEAAAKGGG

SEQ ID NO: 13041 - protein, 9 aa, synthetic construct
GGGGGSGSS

SEQ ID NO: 13042 - protein, 11 aa, synthetic construct
EAAAKGSSPAP

SEQ ID NO: 13043 - protein, 9 aa, synthetic construct
GGSGGSGGS

SEQ ID NO: 13044 - protein, 11 aa, synthetic construct
EAAAKPAPGGG

SEQ ID NO: 13045 - protein, 11 aa, synthetic construct
GGGPAPEAAAK

SEQ ID NO: 13046 - protein, 11 aa, synthetic construct
GGSPAPEAAAK

SEQ ID NO: 13047 - protein, 15 aa, synthetic construct
GGSGGSGGSGGSGGS

SEQ ID NO: 13048 - protein, 11 aa, synthetic construct
EAAAKGGSGSS

SEQ ID NO: 13049 - protein, 11 aa, synthetic construct
GGGEAAAKGGS

SEQ ID NO: 13050 - protein, 9 aa, synthetic construct
PAPAPAPAP

SEQ ID NO: 13051 - protein, 20 aa, synthetic construct
EAAAKEAAAKEAAAKEAAAK

SEQ ID NO: 13052 - protein, 8 aa, synthetic construct
EAAAKPAP

SEQ ID NO: 13053 - protein, 10 aa, synthetic construct
EAAAKEAAAK

SEQ ID NO: 13054 - protein, 8 aa, synthetic construct
EAAAKGGG

SEQ ID NO: 13055 - protein, 8 aa, synthetic construct
EAAAKGSS

SEQ ID NO: 13056 - protein, 30 aa, synthetic construct; identical to SEQ ID NO: 5130

SEQ ID NO: 13057 - protein, 9 aa, synthetic construct
GGGPAPGSS

SEQ ID NO: 13058 - protein, 4 aa, synthetic construct
GGGG

SEQ ID NO: 13059 - protein, 11 aa, synthetic construct
EAAAKGGSGSS

SEQ ID NO: 13060 - protein, 15 aa, synthetic construct
GGGGSGGGGSGGGGS

SEQ ID NO: 13061 - protein, 5 aa, synthetic construct
EAAAK

SEQ ID NO: 13062 - protein, 6 aa, synthetic construct
GGGGSS

SEQ ID NO: 13063 - protein, 11 aa, synthetic construct
PAPEAAAKGGS

SEQ ID NO: 13064 - skipped

SEQ ID NO: 13065 - protein, 12 aa, synthetic construct
GSAGSAAGSGEF

SEQ ID NO: 13066 - protein, 30 aa, synthetic construct; identical to SEQ ID NO: 5130

SEQ ID NO: 13067 - protein, 10 aa, synthetic construct
GGGGSGGGGS

SEQ ID NO: 13068 - protein, 5 aa, synthetic construct
EAAAK

SEQ ID NO: 13069 - protein, 9 aa, synthetic construct
GGGPAPGGS

SEQ ID NO: 13070 - protein, 15 aa, synthetic construct
GGGGSGGGGSGGGGS

SEQ ID NO: 13071 - protein, 6 aa, synthetic construct
PAPGGG

SEQ ID NO: 13072 - protein, 11 aa, synthetic construct
GGGEAAAKPAP

SEQ ID NO: 13073 - protein, 11 aa, synthetic construct
EAAAKPAPGSS

SEQ ID NO: 13074 - protein, 6 aa, synthetic construct
PAPGSS

SEQ ID NO: 13075 - protein, 12 aa, synthetic construct
GSAGSAAGSGEF

SEQ ID NO: 13076 - protein, 9 aa, synthetic construct
PAPGGGGSS

SEQ ID NO: 13077 - protein, 11 aa, synthetic construct
GSSGGGEAAAK

SEQ ID NO: 13078 - skipped

SEQ ID NO: 13079 - protein, 12 aa, synthetic construct
GSSGSSGSSGSS

SEQ ID NO: 13080 - protein, 11 aa, synthetic construct
PAPEAAAKGGG

SEQ ID NO: 13081 - protein, 11 aa, synthetic construct
GGGPAPEAAAK

SEQ ID NO: 13082 - protein, 9 aa, synthetic construct
PAPGGGGGS

SEQ ID NO: 13083 - protein, 20 aa, synthetic construct
EAAAKEAAAKEAAAKEAAAK

SEQ ID NO: 13084 - protein, 9 aa, synthetic construct
GGGGGSPAP

SEQ ID NO: 13085 - protein, 15 aa, synthetic construct
GSSGSSGSSGSSGSS

SEQ ID NO: 13086 - protein, 11 aa, synthetic construct
GSSPAPEAAAK

SEQ ID NO: 13087 - protein, 18 aa, synthetic construct
GSSGSSGSSGSSGSSGSS

SEQ ID NO: 13088 - protein, 18 aa, synthetic construct
GSSGSSGSSGSSGSSGSS

SEQ ID NO: 13089 - protein, 11 aa, synthetic construct
GGSPAPEAAAK

SEQ ID NO: 13090 - protein, 6 aa, synthetic construct
GSSGGG

SEQ ID NO: 13091 - protein, 11 aa, synthetic construct
EAAAKGSSGGS

SEQ ID NO: 13092 - protein, 11 aa, synthetic construct
GGSGSSEAAAK

SEQ ID NO: 13093 - protein, 11 aa, synthetic construct
GGGPAPEAAAK

SEQ ID NO: 13094 - protein, 9 aa, synthetic construct
GGGPAPGGS

SEQ ID NO: 13095 - protein, 5 aa, synthetic construct
GGGGG

SEQ ID NO: 13096 - protein, 11 aa, synthetic construct
GGGEAAAKPAP

SEQ ID NO: 13097 - protein, 10 aa, synthetic construct
GGGGSGGGGS

SEQ ID NO: 13098 - protein, 11 aa, synthetic construct
GGGPAPEAAAK

SEQ ID NO: 13099 - protein, 11 aa, synthetic construct
GGSGSSEAAAK

SEQ ID NO: 13100 - protein, 11 aa, synthetic construct
EAAAKGGGPAP

SEQ ID NO: 13101 - protein, 15 aa, synthetic construct
GSSGSSGSSGSSGSS

SEQ ID NO: 13102 - protein, 5 aa, synthetic construct
PAPAP

SEQ ID NO: 13103 - protein, 9 aa, synthetic construct
GGSPAPGSS

SEQ ID NO: 13104 - protein, 9 aa, synthetic construct
GGSGGGPAP

SEQ ID NO: 13105 - protein, 6 aa, synthetic construct
GGSPAP

SEQ ID NO: 13106 - protein, 11 aa, synthetic construct
EAAAKGGSPAP

SEQ ID NO: 13107 - protein, 9 aa, synthetic construct
GSSPAPGGG

SEQ ID NO: 13108 - protein, 12 aa, synthetic construct
GSAGSAAGSGEF

SEQ ID NO: 13109 - protein, 6 aa, synthetic construct
GGSPAP

SEQ ID NO: 13110 - protein, 6 aa, synthetic construct
GSSGSS

SEQ ID NO: 13111 - protein, 9 aa, synthetic construct
GGGPAPGSS

SEQ ID NO: 13112 - protein, 46 aa, synthetic construct; identical to SEQ ID NO: 5217

SEQ ID NO: 13113 - protein, 9 aa, synthetic construct
PAPGSSGGG

SEQ ID NO: 13114 - protein, 11 aa, synthetic construct
GGSEAAAKPAP

SEQ ID NO: 13115 - protein, 6 aa, synthetic construct
GGGGGS

SEQ ID NO: 13116 - protein, 11 aa, synthetic construct
PAPEAAAKGGS

SEQ ID NO: 13117 - protein, 30 aa, synthetic construct; identical to SEQ ID NO: 5130

SEQ ID NO: 13118 - protein, 8 aa, synthetic construct
GGSEAAAK

SEQ ID NO: 13119 - protein, 11 aa, synthetic construct
GSSPAPEAAAK

SEQ ID NO: 13120 - protein, 6 aa, synthetic construct
PAPGGG

SEQ ID NO: 13121 - protein, 8 aa, synthetic construct
EAAAKPAP

SEQ ID NO: 13122 - protein, 15 aa, synthetic construct
GSSGSSGSSGSSGSS

SEQ ID NO: 13123 - protein, 6 aa, synthetic construct
PAPGGG

SEQ ID NO: 13124 - protein, 11 aa, synthetic construct
GGSGGGEAAAK

SEQ ID NO: 13125 - protein, 6 aa, synthetic construct
PAPGGS

SEQ ID NO: 13126 - protein, 12 aa, synthetic construct
GGSGGSGGSGGS

SEQ ID NO: 13127 - protein, 20 aa, synthetic construct
EAAAKEAAAKEAAAKEAAAK

SEQ ID NO: 13128 - protein, 11 aa, synthetic construct
GGSEAAAKGGG

SEQ ID NO: 13129 - protein, 6 aa, synthetic construct
GGGPAP

SEQ ID NO: 13130 - protein, 30 aa, synthetic construct; identical to SEQ ID NO: 5112

SEQ ID NO: 13131 - protein, 9 aa, synthetic construct
GGSPAPGSS

SEQ ID NO: 13132 - protein, 9 aa, synthetic construct
GGGPAPGSS

SEQ ID NO: 13133 - protein, 9 aa, synthetic construct
GGGGSSGGS

SEQ ID NO: 13134 - protein, 11 aa, synthetic construct
GGGEAAAKGSS

SEQ ID NO: 13135 - protein, 5 aa, synthetic construct
PAPAP

SEQ ID NO: 13136 - protein, 9 aa, synthetic construct
GGSPAPGGG

SEQ ID NO: 13137 - protein, 6 aa, synthetic construct
PAPGSS

SEQ ID NO: 13138 - protein, 9 aa, synthetic construct
GSSGGSPAP

SEQ ID NO: 13139 - protein, 15 aa, synthetic construct
EAAAKGGGGSEAAAK

SEQ ID NO: 13140 - protein, 11 aa, synthetic construct
GSSEAAAKGGS

SEQ ID NO: 13141 - protein, 9 aa, synthetic construct
PAPAPAPAP

SEQ ID NO: 13142 - protein, 11 aa, synthetic construct
GGSEAAAKPAP

SEQ ID NO: 13143 - protein, 6 aa, synthetic construct
PAPGGS

SEQ ID NO: 13144 - protein, 11 aa, synthetic construct
EAAAKGGGPAP

SEQ ID NO: 13145 - protein, 9 aa, synthetic construct
GGSGSSGGG

SEQ ID NO: 13146 - protein, 11 aa, synthetic construct
EAAAKGGSGSS

SEQ ID NO: 13147 - protein, 33 aa, synthetic construct; identical to SEQ ID NO: 5006

SEQ ID NO: 13148 - protein, 11 aa, synthetic construct
GSSEAAAKGGS

SEQ ID NO: 13149 - protein, 5 aa, synthetic construct
GGGGG

SEQ ID NO: 13150 - protein, 30 aa, synthetic construct; identical to SEQ ID NO: 5112

SEQ ID NO: 13151 - protein, 11 aa, synthetic construct
GGGEAAAKGSS

SEQ ID NO: 13152 - protein, 15 aa, synthetic construct
EAAAKGGGGSEAAAK

SEQ ID NO: 13153 - protein, 8 aa, synthetic construct
EAAAKGGG

SEQ ID NO: 13154 - protein, 6 aa, synthetic construct
GGSGGG

SEQ ID NO: 13155 - protein, 9 aa, synthetic construct
GGSGSSGGG

SEQ ID NO: 13156 - protein, 30 aa, synthetic construct; identical to SEQ ID NO: 5112

SEQ ID NO: 13157 - protein, 15 aa, synthetic construct
GGGGSEAAAKGGGGS

SEQ ID NO: 13158 - protein, 11 aa, synthetic construct
PAPAPAPAPAP

SEQ ID NO: 13159 - skipped

SEQ ID NO: 13160 - protein, 11 aa, synthetic construct
GGGGGSEAAAK

SEQ ID NO: 13161 - protein, 15 aa, synthetic construct
GSSGSSGSSGSSGSS

SEQ ID NO: 13162 - protein, 25 aa, synthetic construct
EAAAKEAAAKEAAAKEAAAKEAAAK

SEQ ID NO: 13163 - protein, 9 aa, synthetic construct
GGSGSSGGG

SEQ ID NO: 13164 - skipped

SEQ ID NO: 13165 - protein, 11 aa, synthetic construct
GSSPAPEAAAK

SEQ ID NO: 13166 - protein, 11 aa, synthetic construct
EAAAKGGGGSS

SEQ ID NO: 13167 - protein, 11 aa, synthetic construct
GGGEAAAKGGS

SEQ ID NO: 13168 - protein, 9 aa, synthetic construct
GGSGGGPAP

SEQ ID NO: 13169 - protein, 12 aa, synthetic construct
GSAGSAAGSGEF

SEQ ID NO: 13170 - protein, 8 aa, synthetic construct
GSSEAAAK

SEQ ID NO: 13171 - protein, 6 aa, synthetic construct
PAPGSS

SEQ ID NO: 13172 - protein, 15 aa, synthetic construct
EAAAKEAAAKEAAAK

SEQ ID NO: 13173 - protein, 12 aa, synthetic construct
GSAGSAAGSGEF

SEQ ID NO: 13174 - protein, 12 aa, synthetic construct
GSSGSSGSSGSS

SEQ ID NO: 13175 - protein, 46 aa, synthetic construct; identical to SEQ ID NO: 5217

SEQ ID NO: 13176 - protein, 11 aa, synthetic construct
GGGGSSEAAAK

SEQ ID NO: 13177 - protein, 11 aa, synthetic construct
GSSGGGEAAAK

SEQ ID NO: 13178 - protein, 8 aa, synthetic construct
EAAAKPAP

SEQ ID NO: 13179 - protein, 9 aa, synthetic construct
GGSPAPGGG

SEQ ID NO: 13180 - protein, 8 aa, synthetic construct
PAPEAAAK

SEQ ID NO: 13181 - protein, 9 aa, synthetic construct
GSSGSSGSS

SEQ ID NO: 13182 - protein, 11 aa, synthetic construct
GSSGGGEAAAK

SEQ ID NO: 13183 - protein, 6 aa, synthetic construct
GGSPAP

SEQ ID NO: 13184 - protein, 12 aa, synthetic construct
GSAGSAAGSGEF

SEQ ID NO: 13185 - protein, 11 aa, synthetic construct
PAPGGSEAAAK

SEQ ID NO: 13186 - protein, 11 aa, synthetic construct
GGSPAPEAAAK

SEQ ID NO: 13187 - protein, 9 aa, synthetic construct
GGGGGSPAP

SEQ ID NO: 13188 - protein, 11 aa, synthetic construct
EAAAKGSSPAP

SEQ ID NO: 13189 - protein, 11 aa, synthetic construct
EAAAKGGGPAP

SEQ ID NO: 13190 - protein, 6 aa, synthetic construct
PAPGSS

SEQ ID NO: 13191 - protein, 9 aa, synthetic construct
GGSGSSGGG

SEQ ID NO: 13192 - protein, 33 aa, synthetic construct; identical to SEQ ID NO: 5006

SEQ ID NO: 13193 - protein, 18 aa, synthetic construct
GGSGGSGGSGGSGGSGGS

SEQ ID NO: 13194 - protein, 9 aa, synthetic construct
GGSGGSGGS

SEQ ID NO: 13195 - protein, 5 aa, synthetic construct
GGGGG

SEQ ID NO: 13196 - protein, 6 aa, synthetic construct
GGGPAP

SEQ ID NO: 13197 - protein, 9 aa, synthetic construct
PAPGGSGGG

SEQ ID NO: 13198 - protein, 15 aa, synthetic construct
GGGGSEAAAKGGGGS

SEQ ID NO: 13199 - protein, 11 aa, synthetic construct
EAAAKGSSGGG

SEQ ID NO: 13200 - protein, 11 aa, synthetic construct
GSSGGSEAAAK

SEQ ID NO: 13201 - protein, 11 aa, synthetic construct
EAAAKGGSGSS

SEQ ID NO: 13202 - protein, 11 aa, synthetic construct
PAPAPAPAPAP

SEQ ID NO: 13203 - protein, 30 aa, synthetic construct; identical to SEQ ID NO: 5112

SEQ ID NO: 13204 - protein, 7 aa, synthetic construct
GGGGGGG

SEQ ID NO: 13205 - protein, 5 aa, synthetic construct
EAAAK

SEQ ID NO: 13206 - protein, 11 aa, synthetic construct
GGGEAAAKGGS

SEQ ID NO: 13207 - protein, 11 aa, synthetic construct
GGGEAAAKGGS

SEQ ID NO: 13208 - protein, 9 aa, synthetic construct
GGGGGSPAP

SEQ ID NO: 13209 - protein, 20 aa, synthetic construct
GGGGSGGGGSGGGGSGGGGS

SEQ ID NO: 13210 - protein, 7 aa, synthetic construct
GGGGGGG

SEQ ID NO: 13211 - protein, 13 aa, synthetic construct
PAPAPAPAPAPAP

SEQ ID NO: 13212 - protein, 9 aa, synthetic construct
GSSPAPGGG

SEQ ID NO: 13213 - protein, 9 aa, synthetic construct
GGGGGSPAP

SEQ ID NO: 13214 - protein, 15 aa, synthetic construct
GGGGSGGGGSGGGGS

SEQ ID NO: 13215 - protein, 15 aa, synthetic construct
GGGGSGGGGSGGGGS

SEQ ID NO: 13216 - protein, 11 aa, synthetic construct
GSSEAAAKGGS

SEQ ID NO: 13217 - protein, 15 aa, synthetic construct
GSSGSSGSSGSSGSS

SEQ ID NO: 13218 - protein, 11 aa, synthetic construct
EAAAKGGGGGS

SEQ ID NO: 13219 - protein, 9 aa, synthetic construct
GSSGGGGGS

SEQ ID NO: 13220 - protein, 11 aa, synthetic construct
GGGEAAAKPAP

SEQ ID NO: 13221 - protein, 9 aa, synthetic construct
GSSGGSPAP

SEQ ID NO: 13222 - protein, 9 aa, synthetic construct
GSSGGGPAP

SEQ ID NO: 13223 - protein, 9 aa, synthetic construct
GGGGGSGSS

SEQ ID NO: 13224 - protein, 46 aa, synthetic construct; identical to SEQ ID NO: 5217

SEQ ID NO: 13225 - protein, 8 aa, synthetic construct
PAPEAAAK

SEQ ID NO: 13226 - protein, 15 aa, synthetic construct
GGGGSGGGGSGGGGS

SEQ ID NO: 13227 - protein, 9 aa, synthetic construct
GGSGSSGGG

SEQ ID NO: 13228 - protein, 8 aa, synthetic construct
EAAAKGGS

SEQ ID NO: 13229 - protein, 11 aa, synthetic construct
EAAAKGSSPAP

SEQ ID NO: 13230 - protein, 11 aa, synthetic construct
EAAAKGGSGSS

SEQ ID NO: 13231 - protein, 6 aa, synthetic construct
GSSGSS

SEQ ID NO: 13232 - protein, 9 aa, synthetic construct
PAPAPAPAP

SEQ ID NO: 13233 - protein, 6 aa, synthetic construct
GGSGGG

SEQ ID NO: 13234-13235 - skipped (2 entries)

SEQ ID NO: 13236 - protein, 11 aa, synthetic construct
GGSGSSEAAAK

SEQ ID NO: 13237 - protein, 11 aa, synthetic construct
PAPEAAAKGSS

SEQ ID NO: 13238 - protein, 6 aa, synthetic construct
GGSGGS

SEQ ID NO: 13239 - protein, 7 aa, synthetic construct
GGGGGGG

SEQ ID NO: 13240 - protein, 11 aa, synthetic construct
GGSPAPEAAAK

SEQ ID NO: 13241 - protein, 30 aa, synthetic construct; identical to SEQ ID NO: 5130

SEQ ID NO: 13242 - protein, 6 aa, synthetic construct
GGSPAP

SEQ ID NO: 13243 - protein, 11 aa, synthetic construct
GGSEAAAKGGG

SEQ ID NO: 13244 - protein, 10 aa, synthetic construct
GGGGSGGGGS

SEQ ID NO: 13245 - protein, 8 aa, synthetic construct
GGGEAAAK

SEQ ID NO: 13246 - protein, 30 aa, synthetic construct; identical to SEQ ID NO: 5112

SEQ ID NO: 13247 - protein, 11 aa, synthetic construct
GGSEAAAKPAP

SEQ ID NO: 13248 - protein, 11 aa, synthetic construct
GSSGGGEAAAK

SEQ ID NO: 13249 - protein, 11 aa, synthetic construct
GGGGGSEAAAK

SEQ ID NO: 13250 - protein, 11 aa, synthetic construct
EAAAKGGSGGG

SEQ ID NO: 13251 - protein, 9 aa, synthetic construct
GGGGSSPAP

SEQ ID NO: 13252 - protein, 10 aa, synthetic construct
EAAAKEAAAK

SEQ ID NO: 13253 - protein, 46 aa, synthetic construct; identical to SEQ ID NO: 5217

SEQ ID NO: 13254 - protein, 15 aa, synthetic construct
GSSGSSGSSGSSGSS

SEQ ID NO: 13255 - protein, 6 aa, synthetic construct
GSSGGG

SEQ ID NO: 13256 - protein, 6 aa, synthetic construct
GSSGGS

SEQ ID NO: 13257 - protein, 10 aa, synthetic construct
GGGGSGGGGS

SEQ ID NO: 13258 - protein, 6 aa, synthetic construct
PAPGSS

SEQ ID NO: 13259 - protein, 11 aa, synthetic construct
GGGPAPEAAAK

SEQ ID NO: 13260 - protein, 8 aa, synthetic construct
EAAAKGGS

SEQ ID NO: 13261 - skipped

SEQ ID NO: 13262 - protein, 4 aa, synthetic construct
GGGG

SEQ ID NO: 13263 - protein, 11 aa, synthetic construct
GGGGGSEAAAK

SEQ ID NO: 13264 - protein, 15 aa, synthetic construct
GSSGSSGSSGSSGSS

SEQ ID NO: 13265 - protein, 9 aa, synthetic construct
PAPGGSGGG

SEQ ID NO: 13266 - protein, 6 aa, synthetic construct
GGGPAP

SEQ ID NO: 13267 - protein, 11 aa, synthetic construct
GGGPAPEAAAK

SEQ ID NO: 13268 - protein, 8 aa, synthetic construct
GGGEAAAK

SEQ ID NO: 13269 - skipped

SEQ ID NO: 13270 - protein, 11 aa, synthetic construct
EAAAKPAPGSS

SEQ ID NO: 13271 - protein, 11 aa, synthetic construct
GGSGSSEAAAK

SEQ ID NO: 13272 - protein, 8 aa, synthetic construct
EAAAKGSS

SEQ ID NO: 13273 - protein, 11 aa, synthetic construct
GGSGSSEAAAK

SEQ ID NO: 13274 - protein, 6 aa, synthetic construct
GGSGGG

SEQ ID NO: 13275 - protein, 6 aa, synthetic construct
GGGPAP

SEQ ID NO: 13276 - protein, 9 aa, synthetic construct
GGSPAPGGG

SEQ ID NO: 13277 - protein, 11 aa, synthetic construct
GGGGGSEAAAK

SEQ ID NO: 13278 - protein, 11 aa, synthetic construct
EAAAKGSSGGS

SEQ ID NO: 13279 - protein, 5 aa, synthetic construct
PAPAP

SEQ ID NO: 13280 - protein, 9 aa, synthetic construct
GSSPAPGGS

SEQ ID NO: 13281 - protein, 11 aa, synthetic construct
GSSEAAAKGGG

SEQ ID NO: 13282 - protein, 11 aa, synthetic construct
EAAAKGGGGGS

SEQ ID NO: 13283 - protein, 15 aa, synthetic construct
GSSGSSGSSGSSGSS

SEQ ID NO: 13284 - protein, 11 aa, synthetic construct
EAAAKGGGGSS

SEQ ID NO: 13285 - protein, 8 aa, synthetic construct
EAAAKGSS

SEQ ID NO: 13286 - protein, 30 aa, synthetic construct; identical to SEQ ID NO: 5130

SEQ ID NO: 13287 - protein, 8 aa, synthetic construct
EAAAKGGS

SEQ ID NO: 13288 - protein, 11 aa, synthetic construct
GSSGGSEAAAK

SEQ ID NO: 13289 - protein, 11 aa, synthetic construct
EAAAKPAPGGS

SEQ ID NO: 13290 - protein, 6 aa, synthetic construct
GGSGGS

SEQ ID NO: 13291 - protein, 11 aa, synthetic construct
EAAAKGSSGGG

SEQ ID NO: 13292 - protein, 12 aa, synthetic construct
GGSGGSGGSGGS

SEQ ID NO: 13293 - protein, 8 aa, synthetic construct
GGGGGGGG

SEQ ID NO: 13294 - protein, 11 aa, synthetic construct
GGSGSSEAAAK

SEQ ID NO: 13295 - protein, 8 aa, synthetic construct
EAAAKGGG

SEQ ID NO: 13296 - protein, 15 aa, synthetic construct
GGGGSGGGGSGGGGS

SEQ ID NO: 13297 - protein, 12 aa, synthetic construct
GGSGGSGGSGGS

SEQ ID NO: 13298 - protein, 11 aa, synthetic construct
PAPAPAPAPAP

SEQ ID NO: 13299 - protein, 20 aa, synthetic construct
EAAAKEAAAKEAAAKEAAAK

SEQ ID NO: 13300 - protein, 9 aa, synthetic construct
GGSGGSGGS

SEQ ID NO: 13301 - protein, 9 aa, synthetic construct
PAPGGGGSS

SEQ ID NO: 13302 - protein, 11 aa, synthetic construct
GSSEAAAKGGS

SEQ ID NO: 13303 - protein, 9 aa, synthetic construct
GSSGGGPAP

SEQ ID NO: 13304 - protein, 6 aa, synthetic construct
GGSGSS

SEQ ID NO: 13305 - protein, 11 aa, synthetic construct
GGGGGSEAAAK

SEQ ID NO: 13306 - protein, 8 aa, synthetic construct
GSSEAAAK

SEQ ID NO: 13307 - protein, 9 aa, synthetic construct
GGGGGSGSS

SEQ ID NO: 13308 - protein, 11 aa, synthetic construct
EAAAKGGSGSS

SEQ ID NO: 13309 - skipped

SEQ ID NO: 13310 - protein, 5 aa, synthetic construct
GGGGG

SEQ ID NO: 13311 - protein, 5 aa, synthetic construct
EAAAK

SEQ ID NO: 13312 - skipped

SEQ ID NO: 13313 - protein, 13 aa, synthetic construct
PAPAPAPAPAPAP

SEQ ID NO: 13314 - protein, 20 aa, synthetic construct
EAAAKEAAAKEAAAKEAAAK

SEQ ID NO: 13315 - protein, 15 aa, synthetic construct
EAAAKGGGGSEAAAK

SEQ ID NO: 13316 - protein, 9 aa, synthetic construct
PAPGGSGGG

SEQ ID NO: 13317 - protein, 9 aa, synthetic construct
GGSGGGPAP

SEQ ID NO: 13318 - protein, 11 aa, synthetic construct
GGGGSSEAAAK

SEQ ID NO: 13319 - protein, 9 aa, synthetic construct
PAPGGGGSS

SEQ ID NO: 13320 - protein, 12 aa, synthetic construct
GGSGGSGGSGGS

SEQ ID NO: 13321 - protein, 9 aa, synthetic construct
PAPGGSGGG

SEQ ID NO: 13322 - protein, 9 aa, synthetic construct
GSSPAPGGS

SEQ ID NO: 13323 - protein, 9 aa, synthetic construct
GSSGSSGSS

SEQ ID NO: 13324 - protein, 9 aa, synthetic construct
PAPGGGGGS

SEQ ID NO: 13325 - protein, 6 aa, synthetic construct
GSSPAP

SEQ ID NO: 13326 - protein, 6 aa, synthetic construct
GGSGGG

SEQ ID NO: 13327 - protein, 15 aa, synthetic construct
EAAAKGGGGSEAAAK

SEQ ID NO: 13328 - protein, 11 aa, synthetic construct
GGSPAPEAAAK

SEQ ID NO: 13329 - protein, 8 aa, synthetic construct
EAAAKPAP

SEQ ID NO: 13330 - protein, 30 aa, synthetic construct; identical to SEQ ID NO: 5112

SEQ ID NO: 13331 - protein, 11 aa, synthetic construct
EAAAKGGGGSS

SEQ ID NO: 13332 - protein, 10 aa, synthetic construct
EAAAKEAAAK

SEQ ID NO: 13333 - protein, 11 aa, synthetic construct
GSSEAAAKGGS

SEQ ID NO: 13334 - protein, 6 aa, synthetic construct
GGSPAP

SEQ ID NO: 13335 - protein, 20 aa, synthetic construct
EAAAKEAAAKEAAAKEAAAK

SEQ ID NO: 13336 - protein, 15 aa, synthetic construct
GSSGSSGSSGSSGSS

SEQ ID NO: 13337 - protein, 8 aa, synthetic construct
PAPEAAAK

SEQ ID NO: 13338 - protein, 9 aa, synthetic construct
GSSGGSPAP

SEQ ID NO: 13339 - protein, 9 aa, synthetic construct
GGGPAPGGS

SEQ ID NO: 13340 - protein, 11 aa, synthetic construct
EAAAKPAPGGS

SEQ ID NO: 13341 - protein, 10 aa, synthetic construct
GGGGSGGGGS

SEQ ID NO: 13342 - protein, 8 aa, synthetic construct
GGGEAAAK

SEQ ID NO: 13343 - protein, 11 aa, synthetic construct
EAAAKGGGGGS

SEQ ID NO: 13344 - protein, 9 aa, synthetic construct
GGSPAPGSS

SEQ ID NO: 13345 - protein, 11 aa, synthetic construct
GSSPAPEAAAK

SEQ ID NO: 13346 - protein, 12 aa, synthetic construct
GSAGSAAGSGEF

SEQ ID NO: 13347 - protein, 5 aa, synthetic construct
EAAAK

SEQ ID NO: 13348 - protein, 11 aa, synthetic construct
EAAAKGGGGSS

SEQ ID NO: 13349 - skipped

SEQ ID NO: 13350 - protein, 9 aa, synthetic construct
GGSGSSPAP

SEQ ID NO: 13351 - protein, 11 aa, synthetic construct
GGSEAAAKPAP

SEQ ID NO: 13352 - protein, 11 aa, synthetic construct
EAAAKGGSGSS

SEQ ID NO: 13353 - protein, 6 aa, synthetic construct
PAPGSS

SEQ ID NO: 13354 - protein, 11 aa, synthetic construct
PAPEAAAKGGG

SEQ ID NO: 13355 - protein, 46 aa, synthetic construct; identical to SEQ ID NO: 5217

SEQ ID NO: 13356 - protein, 9 aa, synthetic construct
GSSGSSGSS

SEQ ID NO: 13357 - protein, 6 aa, synthetic construct
PAPGGG

SEQ ID NO: 13358 - protein, 6 aa, synthetic construct
PAPGGS

SEQ ID NO: 13359 - protein, 6 aa, synthetic construct
GSSGGG

SEQ ID NO: 13360 - protein, 18 aa, synthetic construct
GSSGSSGSSGSSGSSGSS

SEQ ID NO: 13361 - skipped

SEQ ID NO: 13362 - protein, 11 aa, synthetic construct
EAAAKGSSPAP

SEQ ID NO: 13363 - protein, 12 aa, synthetic construct
GSSGSSGSSGSS

SEQ ID NO: 13364 - protein, 25 aa, synthetic construct
GGGGSGGGGSGGGGSGGGGSGGGGS

SEQ ID NO: 13365 - protein, 5 aa, synthetic construct
GGGGS

SEQ ID NO: 13366 - protein, 11 aa, synthetic construct
EAAAKGSSGGG

SEQ ID NO: 13367 - protein, 6 aa, synthetic construct
GGGGGG

SEQ ID NO: 13368 - protein, 11 aa, synthetic construct
GGSGSSEAAAK

SEQ ID NO: 13369 - protein, 11 aa, synthetic construct
GSSPAPEAAAK

SEQ ID NO: 13370 - protein, 10 aa, synthetic construct
GGGGSGGGGS

SEQ ID NO: 13371 - protein, 9 aa, synthetic construct
GSSGGGGGS

SEQ ID NO: 13372 - protein, 12 aa, synthetic construct
GSAGSAAGSGEF

SEQ ID NO: 13373 - protein, 11 aa, synthetic construct
GGGEAAAKGSS

SEQ ID NO: 13374 - protein, 46 aa, synthetic construct; identical to SEQ ID NO: 5217

SEQ ID NO: 13375 - protein, 9 aa, synthetic construct
PAPGGSGGG

SEQ ID NO: 13376 - protein, 25 aa, synthetic construct
EAAAKEAAAKEAAAKEAAAKEAAAK

SEQ ID NO: 13377 - protein, 9 aa, synthetic construct
GGSGSSPAP

SEQ ID NO: 13378 - protein, 6 aa, synthetic construct
GGGGGG

SEQ ID NO: 13379 - protein, 25 aa, synthetic construct
EAAAKEAAAKEAAAKEAAAKEAAAK

SEQ ID NO: 13380 - protein, 11 aa, synthetic construct
EAAAKGSSPAP

SEQ ID NO: 13381 - protein, 9 aa, synthetic construct
GGGPAPGGS

SEQ ID NO: 13382 - protein, 46 aa, synthetic construct; identical to SEQ ID NO: 5217

SEQ ID NO: 13383 - skipped

SEQ ID NO: 13384 - protein, 8 aa, synthetic construct
EAAAKGGS

SEQ ID NO: 13385 - protein, 11 aa, synthetic construct
GSSGGSEAAAK

SEQ ID NO: 13386 - protein, 11 aa, synthetic construct
GGSGSSEAAAK

SEQ ID NO: 13387 - protein, 15 aa, synthetic construct
EAAAKEAAAKEAAAK

SEQ ID NO: 13388 - protein, 11 aa, synthetic construct
GGSGGGEAAAK

SEQ ID NO: 13389 - protein, 20 aa, synthetic construct
GGGGSGGGGSGGGGSGGGGS

SEQ ID NO: 13390 - protein, 8 aa, synthetic construct
EAAAKGSS

SEQ ID NO: 13391 - protein, 9 aa, synthetic construct
GSSGGGGGS

SEQ ID NO: 13392 - protein, 18 aa, synthetic construct
GSSGSSGSSGSSGSSGSS

SEQ ID NO: 13393 - protein, 6 aa, synthetic construct
GGSGSS

SEQ ID NO: 13394 - protein, 15 aa, synthetic construct
EAAAKGGGGSEAAAK

SEQ ID NO: 13395 - protein, 11 aa, synthetic construct
EAAAKGGGPAP

SEQ ID NO: 13396 - protein, 11 aa, synthetic construct
GGSEAAAKGGG

SEQ ID NO: 13397 - protein, 30 aa, synthetic construct; identical to SEQ ID NO: 5130

SEQ ID NO: 13398 - protein, 30 aa, synthetic construct; identical to SEQ ID NO: 5130

SEQ ID NO: 13399 - protein, 11 aa, synthetic construct
GSSPAPEAAAK

SEQ ID NO: 13400 - protein, 15 aa, synthetic construct
GGGGSEAAAKGGGGS

SEQ ID NO: 13401 - protein, 12 aa, synthetic construct
GSSGSSGSSGSS

SEQ ID NO: 13402 - protein, 8 aa, synthetic construct
GGSEAAAK

SEQ ID NO: 13403 - protein, 8 aa, synthetic construct
GGGGGGGG

SEQ ID NO: 13404 - protein, 6 aa, synthetic construct
GSSGGG

SEQ ID NO: 13405 - protein, 8 aa, synthetic construct
EAAAKGGS

SEQ ID NO: 13406 - protein, 5 aa, synthetic construct
GGGGS

SEQ ID NO: 13407 - protein, 11 aa, synthetic construct
GGSEAAAKGGG

SEQ ID NO: 13408 - protein, 9 aa, synthetic construct
GGSGSSGGG

SEQ ID NO: 13409 - protein, 11 aa, synthetic construct
GGSGSSEAAAK

SEQ ID NO: 13410 - protein, 11 aa, synthetic construct
EAAAKGGSGSS

SEQ ID NO: 13411 - skipped

SEQ ID NO: 13412 - protein, 9 aa, synthetic construct
GGGPAPGSS

SEQ ID NO: 13413 - protein, 15 aa, synthetic construct
GSSGSSGSSGSSGSS

SEQ ID NO: 13414 - protein, 11 aa, synthetic construct
GGGEAAAKPAP

SEQ ID NO: 13415 - protein, 6 aa, synthetic construct
GSSGGG

SEQ ID NO: 13416 - protein, 9 aa, synthetic construct
GGSPAPGSS

SEQ ID NO: 13417 - protein, 6 aa, synthetic construct
PAPGGS

SEQ ID NO: 13418 - protein, 11 aa, synthetic construct
PAPAPAPAPAP

SEQ ID NO: 13419 - protein, 6 aa, synthetic construct
GSSGGS

SEQ ID NO: 13420 - protein, 11 aa, synthetic construct
GSSGGSEAAAK

SEQ ID NO: 13421 - protein, 11 aa, synthetic construct
EAAAKGSSGGS

SEQ ID NO: 13422 - protein, 8 aa, synthetic construct
EAAAKGGG

SEQ ID NO: 13423 - protein, 9 aa, synthetic construct
PAPGGGGGS

SEQ ID NO: 13424 - protein, 15 aa, synthetic construct
GGGGSEAAAKGGGGS

SEQ ID NO: 13425 - protein, 30 aa, synthetic construct; identical to SEQ ID NO: 5130

SEQ ID NO: 13426 - skipped

SEQ ID NO: 13427 - protein, 9 aa, synthetic construct
GSSGGSPAP

SEQ ID NO: 13428 - skipped

SEQ ID NO: 13429 - protein, 6 aa, synthetic construct
PAPGSS

SEQ ID NO: 13430 - protein, 11 aa, synthetic construct
GGSEAAAKGGG

SEQ ID NO: 13431 - protein, 11 aa, synthetic construct
GGSEAAAKPAP

SEQ ID NO: 13432 - protein, 9 aa, synthetic construct
GGGGSSPAP

SEQ ID NO: 13433 - protein, 25 aa, synthetic construct
EAAAKEAAAKEAAAKEAAAKEAAAK

SEQ ID NO: 13434 - protein, 4 aa, synthetic construct
GGGG

SEQ ID NO: 13435 - protein, 11 aa, synthetic construct
GGSEAAAKPAP

SEQ ID NO: 13436 - protein, 9 aa, synthetic construct
PAPGSSGGG

SEQ ID NO: 13437 - protein, 11 aa, synthetic construct
PAPEAAAKGGS

SEQ ID NO: 13438 - protein, 9 aa, synthetic construct
GGGGSSPAP

SEQ ID NO: 13439 - protein, 20 aa, synthetic construct
GGGGSGGGGSGGGGSGGGGS

SEQ ID NO: 13440 - protein, 8 aa, synthetic construct
GGGEAAAK

SEQ ID NO: 13441 - protein, 6 aa, synthetic construct
GGGGSS

SEQ ID NO: 13442 - protein, 9 aa, synthetic construct
GGSPAPGSS

SEQ ID NO: 13443 - protein, 5 aa, synthetic construct
GGGGS

SEQ ID NO: 13444 - protein, 11 aa, synthetic construct
EAAAKGSSGGS

SEQ ID NO: 13445 - skipped

SEQ ID NO: 13446 - protein, 4 aa, synthetic construct
GGGG

SEQ ID NO: 13447 - protein, 6 aa, synthetic construct
GSSGGS

SEQ ID NO: 13448 - protein, 12 aa, synthetic construct
GGSGGSGGSGGS

SEQ ID NO: 13449 - protein, 11 aa, synthetic construct
PAPEAAAKGGS

SEQ ID NO: 13450 - protein, 11 aa, synthetic construct
EAAAKGSSGGG

SEQ ID NO: 13451 - protein, 8 aa, synthetic construct
GSSEAAAK

SEQ ID NO: 13452 - protein, 12 aa, synthetic construct
GSAGSAAGSGEF

SEQ ID NO: 13453 - protein, 11 aa, synthetic construct
GGGGGSEAAAK

SEQ ID NO: 13454 - protein, 4 aa, synthetic construct
GGGG

SEQ ID NO: 13455 - protein, 11 aa, synthetic construct
GGGGSSEAAAK

SEQ ID NO: 13456 - protein, 6 aa, synthetic construct
PAPGGG

SEQ ID NO: 13457 - protein, 11 aa, synthetic construct
EAAAKGGSGGG

SEQ ID NO: 13458 - protein, 9 aa, synthetic construct
GGGPAPGGS

SEQ ID NO: 13459 - protein, 8 aa, synthetic construct
EAAAKPAP

SEQ ID NO: 13460 - protein, 9 aa, synthetic construct
GSSGSSGSS

SEQ ID NO: 13461 - protein, 9 aa, synthetic construct
GSSPAPGGS

SEQ ID NO: 13462 - protein, 9 aa, synthetic construct
GGGGGSPAP

SEQ ID NO: 13463 - protein, 9 aa, synthetic construct
GGSGSSGGG

SEQ ID NO: 13464 - protein, 11 aa, synthetic construct
GGGEAAAKGSS

SEQ ID NO: 13465 - protein, 8 aa, synthetic construct
GSSEAAAK

SEQ ID NO: 13466 - protein, 5 aa, synthetic construct
EAAAK

SEQ ID NO: 13467 - protein, 11 aa, synthetic construct
EAAAKGGSGSS

SEQ ID NO: 13468 - protein, 11 aa, synthetic construct
GSSEAAAKGGG

SEQ ID NO: 13469 - protein, 9 aa, synthetic construct
PAPGSSGGG

SEQ ID NO: 13470 - protein, 11 aa, synthetic construct
EAAAKGGGGGS

SEQ ID NO: 13471 - protein, 11 aa, synthetic construct
GGSEAAAKPAP

SEQ ID NO: 13472 - protein, 9 aa, synthetic construct
GGGPAPGGS

SEQ ID NO: 13473 - protein, 5 aa, synthetic construct
GGGGS

SEQ ID NO: 13474 - protein, 15 aa, synthetic construct
GGSGGSGGSGGSGGS

SEQ ID NO: 13475 - protein, 6 aa, synthetic construct
GGGPAP

SEQ ID NO: 13476 - protein, 8 aa, synthetic construct
EAAAKPAP

SEQ ID NO: 13477 - protein, 8 aa, synthetic construct
GGSEAAAK

SEQ ID NO: 13478 - protein, 11 aa, synthetic construct
GSSEAAAKPAP

SEQ ID NO: 13479 - protein, 6 aa, synthetic construct
GGSGSS

SEQ ID NO: 13480 - protein, 11 aa, synthetic construct
EAAAKPAPGGG

SEQ ID NO: 13481 - protein, 11 aa, synthetic construct
GGSPAPEAAAK

SEQ ID NO: 13482 - protein, 11 aa, synthetic construct
GGSEAAAKGGG

SEQ ID NO: 13483 - protein, 15 aa, synthetic construct
GGGGSEAAAKGGGGS

SEQ ID NO: 13484 - protein, 11 aa, synthetic construct
GSSGGGEAAAK

SEQ ID NO: 13485 - protein, 11 aa, synthetic construct
EAAAKGGGPAP

SEQ ID NO: 13486 - protein, 6 aa, synthetic construct
GSSPAP

SEQ ID NO: 13487 - protein, 46 aa, synthetic construct; identical to SEQ ID NO: 5217

SEQ ID NO: 13488 - protein, 11 aa, synthetic construct
GGSEAAAKGSS

SEQ ID NO: 13489 - protein, 11 aa, synthetic construct
GSSGGSEAAAK

SEQ ID NO: 13490 - protein, 11 aa, synthetic construct
GGSEAAAKGSS

SEQ ID NO: 13491 - protein, 8 aa, synthetic construct
EAAAKGGG

SEQ ID NO: 13492 - protein, 11 aa, synthetic construct
GSSGGSEAAAK

SEQ ID NO: 13493 - protein, 15 aa, synthetic construct
GGGGSEAAAKGGGGS

SEQ ID NO: 13494 - protein, 11 aa, synthetic construct
PAPGSSEAAAK

SEQ ID NO: 13495 - protein, 8 aa, synthetic construct
PAPEAAAK

SEQ ID NO: 13496 - protein, 9 aa, synthetic construct
PAPGGSGSS

SEQ ID NO: 13497 - protein, 6 aa, synthetic construct
PAPGSS

SEQ ID NO: 13498 - protein, 9 aa, synthetic construct
PAPGGGGGS

SEQ ID NO: 13499 - protein, 11 aa, synthetic construct
EAAAKPAPGSS

SEQ ID NO: 13500 - protein, 9 aa, synthetic construct
GSSPAPGGS

SEQ ID NO: 13501 - protein, 11 aa, synthetic construct
GGSGSSEAAAK

SEQ ID NO: 13502 - protein, 6 aa, synthetic construct
GGGGGG

SEQ ID NO: 13503 - protein, 20 aa, synthetic construct
EAAAKEAAAKEAAAKEAAAK

SEQ ID NO: 13504 - protein, 9 aa, synthetic construct
GGSPAPGSS

SEQ ID NO: 13505 - protein, 11 aa, synthetic construct
PAPAPAPAPAP

SEQ ID NO: 13506 - protein, 9 aa, synthetic construct
GGSGSSPAP

SEQ ID NO: 13507 - protein, 11 aa, synthetic construct
EAAAKGGSGGG

SEQ ID NO: 13508 - protein, 15 aa, synthetic construct
GSSGSSGSSGSSGSS

SEQ ID NO: 13509 - protein, 46 aa, synthetic construct; identical to SEQ ID NO: 5217

SEQ ID NO: 13510 - protein, 11 aa, synthetic construct
GSSGGGEAAAK

SEQ ID NO: 13511 - protein, 11 aa, synthetic construct
GSSGGSEAAAK

SEQ ID NO: 13512 - protein, 8 aa, synthetic construct
GGGGGGGG

SEQ ID NO: 13513 - protein, 11 aa, synthetic construct
PAPGGSEAAAK

SEQ ID NO: 13514 - protein, 9 aa, synthetic construct
GGGGSSPAP

SEQ ID NO: 13515 - protein, 9 aa, synthetic construct
PAPAPAPAP

SEQ ID NO: 13516 - protein, 11 aa, synthetic construct
GGSEAAAKPAP

SEQ ID NO: 13517 - protein, 9 aa, synthetic construct
PAPGGSGGG

SEQ ID NO: 13518 - protein, 30 aa, synthetic construct; identical to SEQ ID NO: 5130

SEQ ID NO: 13519 - protein, 15 aa, synthetic construct
GGGGSGGGGSGGGGS

SEQ ID NO: 13520 - protein, 9 aa, synthetic construct
GGSGGGPAP

SEQ ID NO: 13521 - protein, 11 aa, synthetic construct
GGGPAPEAAAK

SEQ ID NO: 13522 - protein, 9 aa, synthetic construct
GGGGGSGSS

SEQ ID NO: 13523 - skipped

SEQ ID NO: 13524 - protein, 9 aa, synthetic construct
GGGGGSPAP

SEQ ID NO: 13525 - protein, 6 aa, synthetic construct
GGSPAP

SEQ ID NO: 13526 - protein, 9 aa, synthetic construct
GGGPAPGGS

SEQ ID NO: 13527 - protein, 9 aa, synthetic construct
PAPGSSGGG

SEQ ID NO: 13528 - protein, 9 aa, synthetic construct
PAPGSSGGG

SEQ ID NO: 13529 - protein, 6 aa, synthetic construct
PAPGGS

SEQ ID NO: 13530 - protein, 11 aa, synthetic construct
GGGEAAAKGSS

SEQ ID NO: 13531 - protein, 11 aa, synthetic construct
GGSEAAAKGSS

SEQ ID NO: 13532 - protein, 11 aa, synthetic construct
PAPGGSEAAAK

SEQ ID NO: 13533 - protein, 11 aa, synthetic construct
GGSEAAAKGGG

SEQ ID NO: 13534 - protein, 9 aa, synthetic construct
GGSGGGGSS

SEQ ID NO: 13535 - protein, 11 aa, synthetic construct
GGGEAAAKPAP

SEQ ID NO: 13536 - protein, 8 aa, synthetic construct
EAAAKGSS

SEQ ID NO: 13537 - protein, 11 aa, synthetic construct
PAPEAAAKGSS

SEQ ID NO: 13538 - protein, 12 aa, synthetic construct
GSAGSAAGSGEF

SEQ ID NO: 13539 - protein, 11 aa, synthetic construct
EAAAKGGGGGS

SEQ ID NO: 13540 - protein, 11 aa, synthetic construct
EAAAKGSSPAP

SEQ ID NO: 13541 - protein, 15 aa, synthetic construct
GGGGSEAAAKGGGGS

SEQ ID NO: 13542 - protein, 11 aa, synthetic construct
GSSEAAAKPAP

SEQ ID NO: 13543 - protein, 6 aa, synthetic construct
GGGGGG

SEQ ID NO: 13544 - protein, 6 aa, synthetic construct
PAPGGS

SEQ ID NO: 13545 - skipped

SEQ ID NO: 13546 - protein, 7 aa, synthetic construct
PAPAPAP

SEQ ID NO: 13547 - protein, 4 aa, synthetic construct
GGGG

SEQ ID NO: 13548 - protein, 11 aa, synthetic construct
GSSGGSEAAAK

SEQ ID NO: 13549 - protein, 9 aa, synthetic construct
GGSGGGGSS

SEQ ID NO: 13550 - protein, 9 aa, synthetic construct
GGGGSSGGS

SEQ ID NO: 13551 - protein, 9 aa, synthetic construct
GSSPAPGGG

SEQ ID NO: 13552 - protein, 11 aa, synthetic construct
GGSEAAAKPAP

SEQ ID NO: 13553 - skipped

SEQ ID NO: 13554 - protein, 6 aa, synthetic construct
GSSGGS

SEQ ID NO: 13555 - protein, 5 aa, synthetic construct
GGGGG

SEQ ID NO: 13556 - protein, 9 aa, synthetic construct
GSSGGGPAP

SEQ ID NO: 13557 - protein, 11 aa, synthetic construct
GSSEAAAKGGG

SEQ ID NO: 13558 - protein, 30 aa, synthetic construct; identical to SEQ ID NO: 5130

SEQ ID NO: 13559 - protein, 11 aa, synthetic construct
GGSEAAAKPAP

SEQ ID NO: 13560 - protein, 13 aa, synthetic construct
PAPAPAPAPAPAP

SEQ ID NO: 13561 - protein, 15 aa, synthetic construct
GGGGSEAAAKGGGGS

SEQ ID NO: 13562 - protein, 11 aa, synthetic construct
EAAAKPAPGSS

SEQ ID NO: 13563 - protein, 15 aa, synthetic construct
GSSGSSGSSGSSGSS

SEQ ID NO: 13564 - protein, 11 aa, synthetic construct
PAPEAAAKGSS

SEQ ID NO: 13565 - protein, 46 aa, synthetic construct; identical to SEQ ID NO: 5217

SEQ ID NO: 13566 - protein, 46 aa, synthetic construct; identical to SEQ ID NO: 5217

SEQ ID NO: 13567 - protein, 11 aa, synthetic construct
GGSEAAAKGGG

SEQ ID NO: 13568 - protein, 9 aa, synthetic construct
GGSGGGGSS

SEQ ID NO: 13569 - protein, 11 aa, synthetic construct
PAPEAAAKGSS

SEQ ID NO: 13570 - skipped

SEQ ID NO: 13571 - protein, 11 aa, synthetic construct
GGSGGGEAAAK

SEQ ID NO: 13572 - protein, 11 aa, synthetic construct
EAAAKGGGGSS

SEQ ID NO: 13573 - protein, 9 aa, synthetic construct
GSSPAPGGG

SEQ ID NO: 13574 - protein, 11 aa, synthetic construct
EAAAKGSSGGG

SEQ ID NO: 13575 - protein, 11 aa, synthetic construct
GGSGGGEAAAK

SEQ ID NO: 13576 - protein, 15 aa, synthetic construct
GGSGGSGGSGGSGGS

SEQ ID NO: 13577 - protein, 11 aa, synthetic construct
EAAAKPAPGGS

SEQ ID NO: 13578 - protein, 11 aa, synthetic construct
GGGGGSEAAAK

SEQ ID NO: 13579 - protein, 6 aa, synthetic construct
GSSPAP

SEQ ID NO: 13580 - protein, 11 aa, synthetic construct
GGGEAAAKPAP

SEQ ID NO: 13581 - protein, 11 aa, synthetic construct
GSSGGSEAAAK

SEQ ID NO: 13582 - protein, 11 aa, synthetic construct
EAAAKPAPGGS

SEQ ID NO: 13583 - protein, 6 aa, synthetic construct
PAPGGG

SEQ ID NO: 13584 - protein, 11 aa, synthetic construct
EAAAKGSSPAP

SEQ ID NO: 13585 - protein, 11 aa, synthetic construct
GSSPAPEAAAK

SEQ ID NO: 13586 - protein, 11 aa, synthetic construct
GGSGGGEAAAK

SEQ ID NO: 13587 - protein, 9 aa, synthetic construct
GSSGSSGSS

SEQ ID NO: 13588 - protein, 8 aa, synthetic construct
EAAAKGGS

SEQ ID NO: 13589 - protein, 11 aa, synthetic construct
EAAAKPAPGGS

SEQ ID NO: 13590 - protein, 11 aa, synthetic construct
EAAAKPAPGGS

SEQ ID NO: 13591 - protein, 9 aa, synthetic construct
GSSGGGGGS

SEQ ID NO: 13592 - protein, 9 aa, synthetic construct
PAPGGGGSS

SEQ ID NO: 13593 - protein, 9 aa, synthetic construct
GSSGSSGSS

SEQ ID NO: 13594 - protein, 20 aa, synthetic construct
EAAAKEAAAKEAAAKEAAAK

SEQ ID NO: 13595 - skipped

SEQ ID NO: 13596 - protein, 11 aa, synthetic construct
EAAAKPAPGSS

SEQ ID NO: 13597 - protein, 8 aa, synthetic construct
EAAAKGGG

SEQ ID NO: 13598 - protein, 11 aa, synthetic construct
PAPGSSEAAAK

SEQ ID NO: 13599 - protein, 9 aa, synthetic construct
PAPGSSGGS

SEQ ID NO: 13600 - protein, 11 aa, synthetic construct
GSSPAPEAAAK

SEQ ID NO: 13601 - protein, 18 aa, synthetic construct
GSSGSSGSSGSSGSSGSS

SEQ ID NO: 13602 - protein, 5 aa, synthetic construct
GGGGS

SEQ ID NO: 13603 - protein, 6 aa, synthetic construct
GSSPAP

SEQ ID NO: 13604 - protein, 15 aa, synthetic construct
EAAAKGGGGSEAAAK

SEQ ID NO: 13605 - protein, 10 aa, synthetic construct
EAAAKEAAAK

SEQ ID NO: 13606 - protein, 9 aa, synthetic construct
GGGGSSGGS

SEQ ID NO: 13607 - protein, 11 aa, synthetic construct
PAPGGSEAAAK

SEQ ID NO: 13608 - protein, 11 aa, synthetic construct
EAAAKGGSPAP

SEQ ID NO: 13609 - protein, 9 aa, synthetic construct
GSSGGSGGG

SEQ ID NO: 13610 - protein, 6 aa, synthetic construct
GSSGGS

SEQ ID NO: 13611 - protein, 9 aa, synthetic construct
PAPGGSGSS

SEQ ID NO: 13612 - protein, 11 aa, synthetic construct
EAAAKGGSGSS

SEQ ID NO: 13613 - protein, 5 aa, synthetic construct
PAPAP

SEQ ID NO: 13614 - protein, 11 aa, synthetic construct
EAAAKGSSPAP

SEQ ID NO: 13615 - protein, 11 aa, synthetic construct
EAAAKPAPGGG

SEQ ID NO: 13616 - protein, 30 aa, synthetic construct; identical to SEQ ID NO: 5112

SEQ ID NO: 13617 - protein, 11 aa, synthetic construct
EAAAKGGGGSS

SEQ ID NO: 13618 - protein, 8 aa, synthetic construct
PAPEAAAK

SEQ ID NO: 13619 - protein, 11 aa, synthetic construct
EAAAKPAPGSS

SEQ ID NO: 13620 - protein, 6 aa, synthetic construct
GGSPAP

SEQ ID NO: 13621 - protein, 6 aa, synthetic construct
GGSGGS

SEQ ID NO: 13622 - protein, 11 aa, synthetic construct
PAPEAAAKGSS

SEQ ID NO: 13623 - protein, 6 aa, synthetic construct
PAPGSS

SEQ ID NO: 13624 - protein, 11 aa, synthetic construct
PAPAPAPAPAP

SEQ ID NO: 13625 - skipped

SEQ ID NO: 13626 - protein, 6 aa, synthetic construct
GGGPAP

SEQ ID NO: 13627 - protein, 11 aa, synthetic construct
GSSPAPEAAAK

SEQ ID NO: 13628 - skipped

SEQ ID NO: 13629 - protein, 6 aa, synthetic construct
GGSPAP

SEQ ID NO: 13630 - protein, 11 aa, synthetic construct
PAPEAAAKGGS

SEQ ID NO: 13631 - protein, 9 aa, synthetic construct
PAPGSSGGS

SEQ ID NO: 13632 - protein, 13 aa, synthetic construct
PAPAPAPAPAPAP

SEQ ID NO: 13633 - protein, 15 aa, synthetic construct
EAAAKEAAAKEAAAK

SEQ ID NO: 13634 - protein, 15 aa, synthetic construct
GGSGGSGGSGGSGGS

SEQ ID NO: 13635 - protein, 11 aa, synthetic construct
EAAAKPAPGGS

SEQ ID NO: 13636 - protein, 6 aa, synthetic construct
GGSGGS

SEQ ID NO: 13637 - protein, 8 aa, synthetic construct
EAAAKPAP

SEQ ID NO: 13638 - protein, 8 aa, synthetic construct
GGSEAAAK

SEQ ID NO: 13639 - protein, 6 aa, synthetic construct
GGSGGG

SEQ ID NO: 13640 - protein, 11 aa, synthetic construct
GGSGGGEAAAK

SEQ ID NO: 13641 - protein, 11 aa, synthetic construct
PAPEAAAKGGG

SEQ ID NO: 13642 - protein, 5 aa, synthetic construct
PAPAP

SEQ ID NO: 13643 - skipped

SEQ ID NO: 13644 - protein, 11 aa, synthetic construct
EAAAKGSSGGG

SEQ ID NO: 13645 - protein, 9 aa, synthetic construct
GGSPAPGSS

SEQ ID NO: 13646 - protein, 8 aa, synthetic construct
PAPEAAAK

SEQ ID NO: 13647 - protein, 11 aa, synthetic construct
EAAAKGGSPAP

SEQ ID NO: 13648 - protein, 9 aa, synthetic construct
PAPAPAPAP

SEQ ID NO: 13649 - protein, 11 aa, synthetic construct
PAPGGSEAAAK

SEQ ID NO: 13650 - protein, 12 aa, synthetic construct
GGSGGSGGSGGS

SEQ ID NO: 13651 - protein, 9 aa, synthetic construct
GGGGGSGSS

SEQ ID NO: 13652 - protein, 9 aa, synthetic construct
PAPGGSGGG

SEQ ID NO: 13653 - skipped

SEQ ID NO: 13654 - protein, 5 aa, synthetic construct
EAAAK

SEQ ID NO: 13655 - protein, 11 aa, synthetic construct
GGGEAAAKGSS

SEQ ID NO: 13656 - protein, 9 aa, synthetic construct
GGSPAPGSS

SEQ ID NO: 13657 - protein, 11 aa, synthetic construct
GGSEAAAKPAP

SEQ ID NO: 13658 - protein, 25 aa, synthetic construct
GGGGSGGGGSGGGGSGGGGSGGGGS

SEQ ID NO: 13659 - protein, 6 aa, synthetic construct
GGSGSS

SEQ ID NO: 13660 - protein, 11 aa, synthetic construct
GGGEAAAKGSS

SEQ ID NO: 13661 - protein, 11 aa, synthetic construct
EAAAKGGSPAP

SEQ ID NO: 13662 - protein, 11 aa, synthetic construct
GSSPAPEAAAK

SEQ ID NO: 13663 - protein, 12 aa, synthetic construct
GGSGGSGGSGGS

SEQ ID NO: 13664 - protein, 11 aa, synthetic construct
GSSPAPEAAAK

SEQ ID NO: 13665 - protein, 12 aa, synthetic construct
GSSGSSGSSGSS

SEQ ID NO: 13666 - protein, 11 aa, synthetic construct
GGSGSSEAAAK

SEQ ID NO: 13667 - protein, 6 aa, synthetic construct
GGSGGG

SEQ ID NO: 13668 - protein, 9 aa, synthetic construct
GGSPAPGGG

SEQ ID NO: 13669 - protein, 9 aa, synthetic construct
GGSGGSGGS

SEQ ID NO: 13670 - protein, 11 aa, synthetic construct
GGGGSSEAAAK

SEQ ID NO: 13671 - protein, 9 aa, synthetic construct
GGSPAPGSS

SEQ ID NO: 13672 - protein, 11 aa, synthetic construct
EAAAKPAPGSS

SEQ ID NO: 13673 - protein, 9 aa, synthetic construct
GGGGSSGGS

SEQ ID NO: 13674 - protein, 11 aa, synthetic construct
GGSPAPEAAAK

SEQ ID NO: 13675 - protein, 8 aa, synthetic construct
GGSEAAAK

SEQ ID NO: 13676 - protein, 12 aa, synthetic construct
GSSGSSGSSGSS

SEQ ID NO: 13677 - protein, 25 aa, synthetic construct
EAAAKEAAAKEAAAKEAAAKEAAAK

SEQ ID NO: 13678 - protein, 5 aa, synthetic construct
GGGGG

SEQ ID NO: 13679 - protein, 11 aa, synthetic construct
GGSEAAAKGSS

SEQ ID NO: 13680 - protein, 6 aa, synthetic construct
GSSGGG

SEQ ID NO: 13681 - protein, 9 aa, synthetic construct
PAPGSSGGG

SEQ ID NO: 13682 - protein, 6 aa, synthetic construct
GGSGGS

SEQ ID NO: 13683 - protein, 11 aa, synthetic construct
EAAAKGGGGGS

SEQ ID NO: 13684 - protein, 9 aa, synthetic construct
GGSGSSPAP

SEQ ID NO: 13685 - protein, 9 aa, synthetic construct
PAPGSSGGG

SEQ ID NO: 13686 - protein, 9 aa, synthetic construct
PAPGGSGGG

SEQ ID NO: 13687 - protein, 4 aa, synthetic construct
GGGG

SEQ ID NO: 13688 - protein, 11 aa, synthetic construct
EAAAKGGSPAP

SEQ ID NO: 13689 - protein, 6 aa, synthetic construct
GSSGSS

SEQ ID NO: 13690 - protein, 11 aa, synthetic construct
GGSEAAAKPAP

SEQ ID NO: 13691 - protein, 11 aa, synthetic construct
EAAAKGSSGGS

SEQ ID NO: 13692 - protein, 46 aa, synthetic construct; identical to SEQ ID NO: 5217

SEQ ID NO: 13693 - protein, 11 aa, synthetic construct
EAAAKGGSGSS

SEQ ID NO: 13694 - protein, 5 aa, synthetic construct
GGGGG

SEQ ID NO: 13695 - protein, 8 aa, synthetic construct
GGGEAAAK

SEQ ID NO: 13696 - protein, 12 aa, synthetic construct
GGSGGSGGSGGS

SEQ ID NO: 13697 - protein, 30 aa, synthetic construct; identical to SEQ ID NO: 5130

SEQ ID NO: 13698 - protein, 11 aa, synthetic construct
PAPAPAPAPAP

SEQ ID NO: 13699 - protein, 10 aa, synthetic construct
EAAAKEAAAK

SEQ ID NO: 13700 - protein, 11 aa, synthetic construct
GSSGGSEAAAK

SEQ ID NO: 13701 - protein, 11 aa, synthetic construct
PAPGGSEAAAK

SEQ ID NO: 13702 - protein, 11 aa, synthetic construct
EAAAKGGGPAP

SEQ ID NO: 13703 - protein, 9 aa, synthetic construct
PAPGGSGSS

SEQ ID NO: 13704 - protein, 16 aa, synthetic construct
SGSETPGTSESATPES

SEQ ID NO: 13705 - protein, 6 aa, synthetic construct
GGSGGS

SEQ ID NO: 13706 - protein, 8 aa, synthetic construct
EAAAKGGS

SEQ ID NO: 13707 - protein, 9 aa, synthetic construct
GGSPAPGSS

SEQ ID NO: 13708 - protein, 20 aa, synthetic construct
EAAAKEAAAKEAAAKEAAAK

SEQ ID NO: 13709 - protein, 9 aa, synthetic construct
GSSGGSGGG

SEQ ID NO: 13710 - protein, 11 aa, synthetic construct
PAPGSSEAAAK

SEQ ID NO: 13711 - protein, 13 aa, synthetic construct
PAPAPAPAPAPAP

SEQ ID NO: 13712 - protein, 6 aa, synthetic construct
GGGGSS

SEQ ID NO: 13713 - protein, 15 aa, synthetic construct
GGGGSEAAAKGGGGS

SEQ ID NO: 13714 - protein, 11 aa, synthetic construct
GSSPAPEAAAK

SEQ ID NO: 13715 - protein, 11 aa, synthetic construct
PAPEAAAKGGG

SEQ ID NO: 13716 - protein, 10 aa, synthetic construct
EAAAKEAAAK

SEQ ID NO: 13717 - protein, 5 aa, synthetic construct
EAAAK

SEQ ID NO: 13718 - protein, 9 aa, synthetic construct
GSSGGSGGG

SEQ ID NO: 13719 - protein, 11 aa, synthetic construct
GGGEAAAKPAP

SEQ ID NO: 13720 - protein, 6 aa, synthetic construct
GGSGGS

SEQ ID NO: 13721 - protein, 30 aa, synthetic construct; identical to SEQ ID NO: 5130

SEQ ID NO: 13722 - protein, 5 aa, synthetic construct
GGGGG

SEQ ID NO: 13723 - protein, 11 aa, synthetic construct
GSSGGSEAAAK

SEQ ID NO: 13724 - protein, 33 aa, synthetic construct; identical to SEQ ID NO: 5006

SEQ ID NO: 13725 - protein, 9 aa, synthetic construct
GGSGGGPAP

SEQ ID NO: 13726 - protein, 6 aa, synthetic construct
GGSGSS

SEQ ID NO: 13727 - protein, 16 aa, synthetic construct
SGSETPGTSESATPES

SEQ ID NO: 13728 - protein, 11 aa, synthetic construct
EAAAKGGSPAP

SEQ ID NO: 13729 - protein, 5 aa, synthetic construct
PAPAP

SEQ ID NO: 13730 - protein, 46 aa, synthetic construct; identical to SEQ ID NO: 5217

SEQ ID NO: 13731 - protein, 6 aa, synthetic construct
GGGGGS

SEQ ID NO: 13732 - protein, 10 aa, synthetic construct
EAAAKEAAAK

SEQ ID NO: 13733 - protein, 11 aa, synthetic construct
GSSGGSEAAAK

SEQ ID NO: 13734 - protein, 8 aa, synthetic construct
GGGEAAAK

SEQ ID NO: 13735 - protein, 11 aa, synthetic construct
GSSGGGEAAAK

SEQ ID NO: 13736 - skipped

SEQ ID NO: 13737 - protein, 15 aa, synthetic construct
GGGGSEAAAKGGGGS

SEQ ID NO: 13738 - protein, 4 aa, synthetic construct
GGGG

SEQ ID NO: 13739 - protein, 6 aa, synthetic construct
GGSGGS

SEQ ID NO: 13740 - protein, 9 aa, synthetic construct
GGSGGGGSS

SEQ ID NO: 13741 - protein, 9 aa, synthetic construct
GSSPAPGGS

SEQ ID NO: 13742 - protein, 11 aa, synthetic construct
GSSPAPEAAAK

SEQ ID NO: 13743 - protein, 8 aa, synthetic construct
EAAAKGGS

SEQ ID NO: 13744 - protein, 12 aa, synthetic construct
GGSGGSGGSGGS

SEQ ID NO: 13745 - protein, 11 aa, synthetic construct
GGGGSSEAAAK

SEQ ID NO: 13746 - protein, 13 aa, synthetic construct
PAPAPAPAPAPAP

SEQ ID NO: 13747 - protein, 11 aa, synthetic construct
EAAAKGSSGGG

SEQ ID NO: 13748 - protein, 5 aa, synthetic construct
GGGGG

SEQ ID NO: 13749 - protein, 46 aa, synthetic construct; identical to SEQ ID NO: 5217

SEQ ID NO: 13750 - protein, 33 aa, synthetic construct; identical to SEQ ID NO: 5006

SEQ ID NO: 13751 - protein, 9 aa, synthetic construct
GGSPAPGGG

SEQ ID NO: 13752 - protein, 11 aa, synthetic construct
GGGEAAAKGGS

SEQ ID NO: 13753 - protein, 8 aa, synthetic construct
GGGEAAAK

SEQ ID NO: 13754 - protein, 11 aa, synthetic construct
PAPEAAAKGGG

SEQ ID NO: 13755 - protein, 18 aa, synthetic construct
GSSGSSGSSGSSGSSGSS

SEQ ID NO: 13756 - protein, 46 aa, synthetic construct; identical to SEQ ID NO: 5217

SEQ ID NO: 13757 - protein, 11 aa, synthetic construct
EAAAKGGSPAP

SEQ ID NO: 13758 - protein, 10 aa, synthetic construct
EAAAKEAAAK

SEQ ID NO: 13759 - protein, 30 aa, synthetic construct; identical to SEQ ID NO: 5112

SEQ ID NO: 13760 - protein, 12 aa, synthetic construct
GGSGGSGGSGGS

SEQ ID NO: 13761 - protein, 25 aa, synthetic construct
EAAAKEAAAKEAAAKEAAAKEAAAK

SEQ ID NO: 13762 - protein, 18 aa, synthetic construct
GSSGSSGSSGSSGSSGSS

SEQ ID NO: 13763 - protein, 5 aa, synthetic construct
GGGGS

SEQ ID NO: 13764 - protein, 46 aa, synthetic construct; identical to SEQ ID NO: 5217

SEQ ID NO: 13765 - protein, 10 aa, synthetic construct
GGGGSGGGGS

SEQ ID NO: 13766 - protein, 10 aa, synthetic construct
GGGGSGGGGS

SEQ ID NO: 13767 - protein, 6 aa, synthetic construct
GGSGSS

SEQ ID NO: 13768 - protein, 9 aa, synthetic construct
GSSPAPGGG

SEQ ID NO: 13769 - protein, 9 aa, synthetic construct
GSSGGSPAP

SEQ ID NO: 13770 - protein, 6 aa, synthetic construct
PAPGGS

SEQ ID NO: 13771 - protein, 11 aa, synthetic construct
GGSPAPEAAAK

SEQ ID NO: 13772 - protein, 9 aa, synthetic construct
GGGPAPGGS

SEQ ID NO: 13773 - protein, 9 aa, synthetic construct
PAPGSSGGG

SEQ ID NO: 13774 - protein, 11 aa, synthetic construct
GSSGGGEAAAK

SEQ ID NO: 13775 - protein, 6 aa, synthetic construct
GSSGGG

SEQ ID NO: 13776 - protein, 6 aa, synthetic construct
GSSGSS

SEQ ID NO: 13777 - protein, 6 aa, synthetic construct
GSSGGG

SEQ ID NO: 13778 - protein, 9 aa, synthetic construct
PAPGGGGGS

SEQ ID NO: 13779 - protein, 8 aa, synthetic construct
GSSEAAAK

SEQ ID NO: 13780 - protein, 6 aa, synthetic construct
PAPGGG

SEQ ID NO: 13781 - protein, 10 aa, synthetic construct
GGGGSGGGGS

SEQ ID NO: 13782 - protein, 6 aa, synthetic construct
GSSGGS

SEQ ID NO: 13783 - protein, 10 aa, synthetic construct
GGGGSGGGGS

SEQ ID NO: 13784 - protein, 11 aa, synthetic construct
EAAAKGGSGSS

SEQ ID NO: 13785 - protein, 11 aa, synthetic construct
GSSEAAAKGGS

SEQ ID NO: 13786 - protein, 11 aa, synthetic construct
PAPGSSEAAAK

SEQ ID NO: 13787 - protein, 10 aa, synthetic construct
GGGGSGGGGS

SEQ ID NO: 13788 - protein, 11 aa, synthetic construct
PAPGSSEAAAK

SEQ ID NO: 13789 - protein, 11 aa, synthetic construct
PAPGSSEAAAK

SEQ ID NO: 13790 - protein, 9 aa, synthetic construct
GGSPAPGGG

SEQ ID NO: 13791 - protein, 6 aa, synthetic construct
GGGGGS

SEQ ID NO: 13792 - protein, 9 aa, synthetic construct
GGGGSSGGS

SEQ ID NO: 13793 - protein, 9 aa, synthetic construct
PAPAPAPAP

SEQ ID NO: 13794 - protein, 6 aa, synthetic construct
GGSGGS

SEQ ID NO: 13795 - protein, 9 aa, synthetic construct
GGGPAPGGS

SEQ ID NO: 13796 - protein, 15 aa, synthetic construct
GGSGGSGGSGGSGGS

SEQ ID NO: 13797 - protein, 6 aa, synthetic construct
GGSGGG

SEQ ID NO: 13798 - protein, 10 aa, synthetic construct
EAAAKEAAAK

SEQ ID NO: 13799 - protein, 6 aa, synthetic construct
PAPGSS

SEQ ID NO: 13800 - protein, 8 aa, synthetic construct
GSSEAAAK

SEQ ID NO: 13801 - protein, 9 aa, synthetic construct
GGSPAPGGG

SEQ ID NO: 13802 - protein, 8 aa, synthetic construct
EAAAKGGG

SEQ ID NO: 13803 - protein, 11 aa, synthetic construct
GSSEAAAKGGS

SEQ ID NO: 13804 - protein, 9 aa, synthetic construct
GSSGGSPAP

SEQ ID NO: 13805 - protein, 6 aa, synthetic construct
GGGGGS

SEQ ID NO: 13806 - protein, 6 aa, synthetic construct
GSSGGG

SEQ ID NO: 13807 - protein, 6 aa, synthetic construct
GSSGSS

SEQ ID NO: 13808 - protein, 11 aa, synthetic construct
GGSEAAAKPAP

SEQ ID NO: 13809 - protein, 11 aa, synthetic construct
EAAAKGGGGSS

SEQ ID NO: 13810 - protein, 11 aa, synthetic construct
EAAAKPAPGGS

SEQ ID NO: 13811 - protein, 15 aa, synthetic construct
GSSGSSGSSGSSGSS

SEQ ID NO: 13812 - protein, 15 aa, synthetic construct
GGGGSEAAAKGGGGS

SEQ ID NO: 13813 - protein, 6 aa, synthetic construct
GGSGSS

SEQ ID NO: 13814 - skipped

SEQ ID NO: 13815 - protein, 5 aa, synthetic construct
PAPAP

SEQ ID NO: 13816 - protein, 8 aa, synthetic construct
EAAAKPAP

SEQ ID NO: 13817 - protein, 25 aa, synthetic construct
EAAAKEAAAKEAAAKEAAAKEAAAK

SEQ ID NO: 13818 - protein, 7 aa, synthetic construct
GGGGGGG

SEQ ID NO: 13819 - protein, 5 aa, synthetic construct
GGGGS

SEQ ID NO: 13820 - protein, 6 aa, synthetic construct
GSSGGG

SEQ ID NO: 13821 - protein, 11 aa, synthetic construct
PAPAPAPAPAP

SEQ ID NO: 13822 - protein, 15 aa, synthetic construct
EAAAKEAAAKEAAAK

SEQ ID NO: 13823 - protein, 6 aa, synthetic construct
GSSGGS

SEQ ID NO: 13824 - protein, 11 aa, synthetic construct
EAAAKPAPGGG

SEQ ID NO: 13825 - protein, 9 aa, synthetic construct
GSSPAPGGS

SEQ ID NO: 13826 - protein, 9 aa, synthetic construct
PAPGSSGGG

SEQ ID NO: 13827 - protein, 6 aa, synthetic construct
GSSGGG

SEQ ID NO: 13828 - protein, 9 aa, synthetic construct
PAPGGSGSS

SEQ ID NO: 13829 - protein, 6 aa, synthetic construct
PAPGSS

SEQ ID NO: 13830 - protein, 9 aa, synthetic construct
GGGGGSGSS

SEQ ID NO: 13831 - protein, 11 aa, synthetic construct
EAAAKGGGGSS

SEQ ID NO: 13832 - protein, 7 aa, synthetic construct
GGGGGGG

SEQ ID NO: 13833 - protein, 11 aa, synthetic construct
PAPEAAAKGSS

SEQ ID NO: 13834 - protein, 11 aa, synthetic construct
GGSGGGEAAAK

SEQ ID NO: 13835 - protein, 11 aa, synthetic construct
EAAAKGGGGGS

SEQ ID NO: 13836 - protein, 6 aa, synthetic construct
PAPGGS

SEQ ID NO: 13837 - protein, 4 aa, synthetic construct
GGGG

SEQ ID NO: 13838 - protein, 11 aa, synthetic construct
EAAAKGGSGSS

SEQ ID NO: 13839 - protein, 9 aa, synthetic construct
GGGGSSGGS

SEQ ID NO: 13840 - protein, 8 aa, synthetic construct
GGGGGGGG

SEQ ID NO: 13841 - protein, 9 aa, synthetic construct
GGSGSSGGG

SEQ ID NO: 13842 - protein, 11 aa, synthetic construct
GSSEAAAKGGS

SEQ ID NO: 13843 - protein, 11 aa, synthetic construct
EAAAKPAPGSS

SEQ ID NO: 13844 - protein, 9 aa, synthetic construct
GGSPAPGSS

SEQ ID NO: 13845 - protein, 9 aa, synthetic construct
PAPGSSGGG

SEQ ID NO: 13846 - protein, 11 aa, synthetic construct
EAAAKPAPGSS

SEQ ID NO: 13847 - protein, 11 aa, synthetic construct
GGSPAPEAAAK

SEQ ID NO: 13848 - protein, 6 aa, synthetic construct
GSSPAP

SEQ ID NO: 13849 - skipped

SEQ ID NO: 13850 - protein, 11 aa, synthetic construct
EAAAKPAPGGS

SEQ ID NO: 13851 - protein, 9 aa, synthetic construct
GGSGSSPAP

SEQ ID NO: 13852 - protein, 9 aa, synthetic construct
PAPGSSGGS

SEQ ID NO: 13853 - protein, 12 aa, synthetic construct
GSAGSAAGSGEF

SEQ ID NO: 13854 - protein, 11 aa, synthetic construct
GSSGGSEAAAK

SEQ ID NO: 13855 - protein, 6 aa, synthetic construct
GSSGGS

SEQ ID NO: 13856 - protein, 15 aa, synthetic construct
EAAAKGGGGSEAAAK

SEQ ID NO: 13857 - protein, 6 aa, synthetic construct
GSSGGS

SEQ ID NO: 13858 - protein, 11 aa, synthetic construct
GGSPAPEAAAK

SEQ ID NO: 13859 - protein, 11 aa, synthetic construct
GGSEAAAKGSS

SEQ ID NO: 13860 - protein, 11 aa, synthetic construct
GSSPAPEAAAK

SEQ ID NO: 13861 - protein, 9 aa, synthetic construct
GGSGSSGGG

SEQ ID NO: 13862 - protein, 4 aa, synthetic construct
GGGG

SEQ ID NO: 13863 - protein, 11 aa, synthetic construct
GGSEAAAKPAP

SEQ ID NO: 13864 - protein, 9 aa, synthetic construct
GSSGGSPAP

SEQ ID NO: 13865 - protein, 11 aa, synthetic construct
GSSGGSEAAAK

SEQ ID NO: 13866 - protein, 11 aa, synthetic construct
PAPEAAAKGGS

SEQ ID NO: 13867 - protein, 6 aa, synthetic construct
GGSPAP

SEQ ID NO: 13868 - protein, 8 aa, synthetic construct
GGSEAAAK

SEQ ID NO: 13869 - protein, 15 aa, synthetic construct
EAAAKGGGGSEAAAK

SEQ ID NO: 13870 - protein, 33 aa, synthetic construct; identical to SEQ ID NO: 5006

SEQ ID NO: 13871 - protein, 8 aa, synthetic construct
GSSEAAAK

SEQ ID NO: 13872 - skipped

SEQ ID NO: 13873 - protein, 11 aa, synthetic construct
GGSEAAAKGSS

SEQ ID NO: 13874 - protein, 11 aa, synthetic construct
GGSEAAAKGSS

SEQ ID NO: 13875 - protein, 11 aa, synthetic construct
GGSPAPEAAAK

SEQ ID NO: 13876 - protein, 11 aa, synthetic construct
GGSGGGEAAAK

SEQ ID NO: 13877 - protein, 11 aa, synthetic construct
GGSEAAAKPAP

SEQ ID NO: 13878 - protein, 11 aa, synthetic construct
EAAAKGGSGSS

SEQ ID NO: 13879 - protein, 11 aa, synthetic construct
GGGEAAAKGGS

SEQ ID NO: 13880 - protein, 15 aa, synthetic construct
EAAAKGGGGSEAAAK

SEQ ID NO: 13881 - protein, 6 aa, synthetic construct
GGSPAP

SEQ ID NO: 13882 - protein, 9 aa, synthetic construct
GGGGSSGGS

SEQ ID NO: 13883-13884 - skipped (2 entries)

SEQ ID NO: 13885 - protein, 10 aa, synthetic construct
GGGGSGGGGS

SEQ ID NO: 13886 - protein, 11 aa, synthetic construct
GGGEAAAKGGS

SEQ ID NO: 13887 - protein, 18 aa, synthetic construct
GSSGSSGSSGSSGSSGSS

SEQ ID NO: 13888 - protein, 6 aa, synthetic construct
PAPGSS

SEQ ID NO: 13889 - protein, 9 aa, synthetic construct
GGSGGSGGS

SEQ ID NO: 13890 - protein, 9 aa, synthetic construct
PAPGGSGGG

SEQ ID NO: 13891 - protein, 15 aa, synthetic construct
GGGGSGGGGSGGGGS

SEQ ID NO: 13892 - protein, 9 aa, synthetic construct
GGSGSSGGG

SEQ ID NO: 13893 - protein, 9 aa, synthetic construct
GGSGGSGGS

SEQ ID NO: 13894 - protein, 11 aa, synthetic construct
GGGEAAAKGGS

SEQ ID NO: 13895 - protein, 16 aa, synthetic construct
SGSETPGTSESATPES

SEQ ID NO: 13896 - protein, 11 aa, synthetic construct
EAAAKGGGGGS

SEQ ID NO: 13897 - protein, 11 aa, synthetic construct
EAAAKGSSPAP

SEQ ID NO: 13898 - protein, 4 aa, synthetic construct
GGGG

SEQ ID NO: 13899 - protein, 25 aa, synthetic construct
GGGGSGGGGSGGGGSGGGGSGGGGS

SEQ ID NO: 13900 - protein, 9 aa, synthetic construct
GSSGGSGGG

SEQ ID NO: 13901 - protein, 6 aa, synthetic construct
GGSGSS

SEQ ID NO: 13902 - protein, 8 aa, synthetic construct
EAAAKGGS

SEQ ID NO: 13903 - protein, 11 aa, synthetic construct
GSSEAAAKGGS

SEQ ID NO: 13904 - protein, 11 aa, synthetic construct
EAAAKPAPGGG

SEQ ID NO: 13905 - protein, 9 aa, synthetic construct
PAPGSSGGG

SEQ ID NO: 13906 - protein, 11 aa, synthetic construct
GGGGSSEAAAK

SEQ ID NO: 13907 - protein, 11 aa, synthetic construct
GSSEAAAKPAP

SEQ ID NO: 13908 - protein, 11 aa, synthetic construct
PAPGGGEAAAK

SEQ ID NO: 13909 - protein, 11 aa, synthetic construct
GGSGGGEAAAK

SEQ ID NO: 13910 - protein, 30 aa, synthetic construct; identical to SEQ ID NO: 5112

SEQ ID NO: 13911 - protein, 11 aa, synthetic construct
EAAAKGGGGGS

SEQ ID NO: 13912 - protein, 9 aa, synthetic construct
GGSPAPGGG

SEQ ID NO: 13913 - protein, 9 aa, synthetic construct
GSSGSSGSS

SEQ ID NO: 13914 - protein, 5 aa, synthetic construct
EAAAK

SEQ ID NO: 13915 - protein, 9 aa, synthetic construct
GGGGSSGGS

SEQ ID NO: 13916 - protein, 9 aa, synthetic construct
GGSGSSPAP

SEQ ID NO: 13917 - protein, 20 aa, synthetic construct
EAAAKEAAAKEAAAKEAAAK

SEQ ID NO: 13918 - protein, 9 aa, synthetic construct
GGGPAPGSS

SEQ ID NO: 13919 - protein, 9 aa, synthetic construct
GSSPAPGGS

SEQ ID NO: 13920 - protein, 5 aa, synthetic construct
PAPAP

SEQ ID NO: 13921 - protein, 9 aa, synthetic construct
PAPAPAPAP

SEQ ID NO: 13922 - protein, 11 aa, synthetic construct
GGGGGSEAAAK

SEQ ID NO: 13923 - protein, 9 aa, synthetic construct
GGGGGSGSS

SEQ ID NO: 13924 - protein, 11 aa, synthetic construct
GGGEAAAKGSS

SEQ ID NO: 13925 - protein, 9 aa, synthetic construct
GGGGGSPAP

SEQ ID NO: 13926 - protein, 11 aa, synthetic construct
GGGGGSEAAAK

SEQ ID NO: 13927 - skipped

SEQ ID NO: 13928 - protein, 7 aa, synthetic construct
GGGGGGG

SEQ ID NO: 13929 - protein, 16 aa, synthetic construct
SGSETPGTSESATPES

SEQ ID NO: 13930 - protein, 11 aa, synthetic construct
EAAAKGGSGGG

SEQ ID NO: 13931 - protein, 5 aa, synthetic construct
GGGGS

SEQ ID NO: 13932 - protein, 11 aa, synthetic construct
EAAAKGSSGGG

SEQ ID NO: 13933 - protein, 11 aa, synthetic construct
EAAAKPAPGGS

SEQ ID NO: 13934 - protein, 33 aa, synthetic construct; identical to SEQ ID NO: 5006

SEQ ID NO: 13935 - protein, 9 aa, synthetic construct
GGSPAPGGG

SEQ ID NO: 13936 - protein, 12 aa, synthetic construct
GSAGSAAGSGEF

SEQ ID NO: 13937 - protein, 9 aa, synthetic construct
GGGGSSGGS

SEQ ID NO: 13938 - protein, 7 aa, synthetic construct
GGGGGGG

SEQ ID NO: 13939 - protein, 8 aa, synthetic construct
GSSEAAAK

SEQ ID NO: 13940 - protein, 6 aa, synthetic construct
PAPGSS

SEQ ID NO: 13941 - protein, 6 aa, synthetic construct
GSSGGG

SEQ ID NO: 13942 - protein, 6 aa, synthetic construct
PAPGGG

SEQ ID NO: 13943 - protein, 9 aa, synthetic construct
GGGGGSPAP

SEQ ID NO: 13944 - protein, 8 aa, synthetic construct
GGSEAAAK

SEQ ID NO: 13945 - protein, 6 aa, synthetic construct
GSSGGG

SEQ ID NO: 13946 - protein, 12 aa, synthetic construct
GGSGGSGGSGGS

SEQ ID NO: 13947 - protein, 5 aa, synthetic construct
PAPAP

SEQ ID NO: 13948 - protein, 8 aa, synthetic construct
GGSEAAAK

SEQ ID NO: 13949 - protein, 5 aa, synthetic construct
GGGGS

SEQ ID NO: 13950 - protein, 4 aa, synthetic construct
GGGG

SEQ ID NO: 13951 - protein, 11 aa, synthetic construct
EAAAKGGGGSS

SEQ ID NO: 13952 - protein, 15 aa, synthetic construct
EAAAKEAAAKEAAAK

SEQ ID NO: 13953 - protein, 11 aa, synthetic construct
PAPGGGEAAAK

SEQ ID NO: 13954 - protein, 11 aa, synthetic construct
EAAAKGGSPAP

SEQ ID NO: 13955 - protein, 11 aa, synthetic construct
GGSGSSEAAAK

SEQ ID NO: 13956 - protein, 11 aa, synthetic construct
GGSPAPEAAAK

SEQ ID NO: 13957 - protein, 7 aa, synthetic construct
GGGGGGG

SEQ ID NO: 13958 - protein, 30 aa, synthetic construct; identical to SEQ ID NO: 5130

SEQ ID NO: 13959 - protein, 11 aa, synthetic construct
EAAAKGSSGGS

SEQ ID NO: 13960 - protein, 11 aa, synthetic construct
GSSEAAAKPAP

SEQ ID NO: 13961 - protein, 6 aa, synthetic construct
GGGGSS

SEQ ID NO: 13962 - protein, 11 aa, synthetic construct
EAAAKGGSGGG

SEQ ID NO: 13963 - protein, 6 aa, synthetic construct
GGSGGS

SEQ ID NO: 13964 - protein, 9 aa, synthetic construct
GGGGGSPAP

SEQ ID NO: 13965 - protein, 15 aa, synthetic construct
EAAAKEAAAKEAAAK

SEQ ID NO: 13966 - protein, 11 aa, synthetic construct
PAPEAAAKGGS

SEQ ID NO: 13967 - protein, 11 aa, synthetic construct
GSSGGSEAAAK

SEQ ID NO: 13968 - protein, 11 aa, synthetic construct
EAAAKGGSGGG

SEQ ID NO: 13969 - protein, 9 aa, synthetic construct
GGSGGGPAP

SEQ ID NO: 13970 - skipped

SEQ ID NO: 13971 - protein, 11 aa, synthetic construct
GGSEAAAKPAP

SEQ ID NO: 13972 - protein, 8 aa, synthetic construct
EAAAKGGG

SEQ ID NO: 13973 - protein, 12 aa, synthetic construct
GSSGSSGSSGSS

SEQ ID NO: 13974 - protein, 9 aa, synthetic construct
GGSGSSPAP

SEQ ID NO: 13975 - protein, 8 aa, synthetic construct
GGGEAAAK

SEQ ID NO: 13976 - protein, 9 aa, synthetic construct
GSSPAPGGS

SEQ ID NO: 13977 - protein, 11 aa, synthetic construct
GSSEAAAKGGG

SEQ ID NO: 13978 - protein, 11 aa, synthetic construct
EAAAKPAPGGS

SEQ ID NO: 13979 - protein, 11 aa, synthetic construct
GGSGGGEAAAK

SEQ ID NO: 13980 - protein, 6 aa, synthetic construct
GGSGSS

SEQ ID NO: 13981 - protein, 11 aa, synthetic construct
GGSGGGEAAAK

SEQ ID NO: 13982 - protein, 18 aa, synthetic construct
GGSGGSGGSGGSGGSGGS

SEQ ID NO: 13983 - protein, 11 aa, synthetic construct
PAPEAAAKGSS

SEQ ID NO: 13984 - protein, 11 aa, synthetic construct
EAAAKGSSGGS

SEQ ID NO: 13985 - protein, 11 aa, synthetic construct
GGSGSSEAAAK

SEQ ID NO: 13986 - protein, 11 aa, synthetic construct
GGSGSSEAAAK

SEQ ID NO: 13987 - protein, 9 aa, synthetic construct
GSSGGSGGG

SEQ ID NO: 13988 - protein, 11 aa, synthetic construct
EAAAKGGSGGG

SEQ ID NO: 13989 - protein, 6 aa, synthetic construct
GGSGGS

SEQ ID NO: 13990 - protein, 12 aa, synthetic construct
GSAGSAAGSGEF

SEQ ID NO: 13991 - protein, 6 aa, synthetic construct
GGSGSS

SEQ ID NO: 13992 - protein, 4 aa, synthetic construct
GGGG

SEQ ID NO: 13993 - protein, 20 aa, synthetic construct
GGGGSGGGGSGGGGSGGGGS

SEQ ID NO: 13994 - protein, 16 aa, synthetic construct
SGSETPGTSESATPES

SEQ ID NO: 13995 - protein, 20 aa, synthetic construct
EAAAKEAAAKEAAAKEAAAK

SEQ ID NO: 13996 - protein, 11 aa, synthetic construct
GGGEAAAKGGS

SEQ ID NO: 13997 - protein, 11 aa, synthetic construct
GSSGGSEAAAK

SEQ ID NO: 13998 - protein, 11 aa, synthetic construct
EAAAKGGGGSS

SEQ ID NO: 13999 - protein, 11 aa, synthetic construct
PAPGGSEAAAK

SEQ ID NO: 14000 - protein, 5 aa, synthetic construct
EAAAK

SEQ ID NO: 14001 - protein, 18 aa, synthetic construct
GSSGSSGSSGSSGSSGSS

SEQ ID NO: 14002 - protein, 4 aa, synthetic construct
GGGG

SEQ ID NO: 14003 - protein, 6 aa, synthetic construct
GSSGSS

SEQ ID NO: 14004 - protein, 9 aa, synthetic construct
GSSGGSPAP

SEQ ID NO: 14005 - protein, 9 aa, synthetic construct
GGSGGSGGS

SEQ ID NO: 14006 - protein, 11 aa, synthetic construct
EAAAKGGGPAP

SEQ ID NO: 14007 - protein, 10 aa, synthetic construct
GGGGSGGGGS

SEQ ID NO: 14008 - protein, 11 aa, synthetic construct
GGSEAAAKGSS

SEQ ID NO: 14009 - protein, 30 aa, synthetic construct; identical to SEQ ID NO: 5130

SEQ ID NO: 14010 - protein, 11 aa, synthetic construct
GGSGSSEAAAK

SEQ ID NO: 14011 - protein, 20 aa, synthetic construct
EAAAKEAAAKEAAAKEAAAK

SEQ ID NO: 14012 - protein, 11 aa, synthetic construct
GSSEAAAKGGS

SEQ ID NO: 14013 - protein, 6 aa, synthetic construct
GGSGSS

SEQ ID NO: 14014 - protein, 11 aa, synthetic construct
GGSGSSEAAAK

SEQ ID NO: 14015 - protein, 9 aa, synthetic construct
GSSGSSGSS

SEQ ID NO: 14016 - protein, 11 aa, synthetic construct
EAAAKGSSPAP

SEQ ID NO: 14017 - protein, 8 aa, synthetic construct
EAAAKPAP

SEQ ID NO: 14018 - protein, 11 aa, synthetic construct
GGSGSSEAAAK

SEQ ID NO: 14019 - protein, 30 aa, synthetic construct; identical to SEQ ID NO: 5112

SEQ ID NO: 14020 - protein, 15 aa, synthetic construct
GGGGSGGGGSGGGGS

SEQ ID NO: 14021 - protein, 7 aa, synthetic construct
GGGGGGG

SEQ ID NO: 14022 - protein, 8 aa, synthetic construct
EAAAKGSS

SEQ ID NO: 14023 - protein, 11 aa, synthetic construct
EAAAKGGGPAP

SEQ ID NO: 14024 - protein, 6 aa, synthetic construct
GSSGSS

SEQ ID NO: 14025 - protein, 11 aa, synthetic construct
EAAAKGGGGGS

SEQ ID NO: 14026 - protein, 11 aa, synthetic construct
GGSGGGEAAAK

SEQ ID NO: 14027 - protein, 6 aa, synthetic construct
PAPGSS

SEQ ID NO: 14028 - protein, 6 aa, synthetic construct
PAPGSS

SEQ ID NO: 14029 - protein, 9 aa, synthetic construct
GGSPAPGSS

SEQ ID NO: 14030 - protein, 11 aa, synthetic construct
GGGGSSEAAAK

SEQ ID NO: 14031 - protein, 9 aa, synthetic construct
GSSGGGGGS

SEQ ID NO: 14032 - protein, 11 aa, synthetic construct
EAAAKGSSPAP

SEQ ID NO: 14033 - protein, 9 aa, synthetic construct
GSSPAPGGS

SEQ ID NO: 14034 - protein, 6 aa, synthetic construct
GGGGGG

SEQ ID NO: 14035 - protein, 11 aa, synthetic construct
EAAAKGGGGSS

SEQ ID NO: 14036 - protein, 11 aa, synthetic construct
PAPGGSEAAAK

SEQ ID NO: 14037 - protein, 33 aa, synthetic construct; identical to SEQ ID NO: 5006

SEQ ID NO: 14038 - protein, 12 aa, synthetic construct
GSSGSSGSSGSS

SEQ ID NO: 14039 - protein, 11 aa, synthetic construct
EAAAKGSSGGG

SEQ ID NO: 14040 - protein, 11 aa, synthetic construct
GGSEAAAKPAP

SEQ ID NO: 14041 - protein, 15 aa, synthetic construct
GSSGSSGSSGSSGSS

SEQ ID NO: 14042 - protein, 11 aa, synthetic construct
GGGEAAAKPAP

SEQ ID NO: 14043 - protein, 9 aa, synthetic construct
PAPGSSGGG

SEQ ID NO: 14044 - protein, 6 aa, synthetic construct
GSSGSS

SEQ ID NO: 14045 - protein, 8 aa, synthetic construct
PAPEAAAK

SEQ ID NO: 14046 - protein, 9 aa, synthetic construct
GGGPAPGSS

SEQ ID NO: 14047 - protein, 9 aa, synthetic construct
GSSGGSPAP

SEQ ID NO: 14048 - protein, 6 aa, synthetic construct
GGGGSS

SEQ ID NO: 14049 - protein, 11 aa, synthetic construct
PAPEAAAKGSS

SEQ ID NO: 14050 - protein, 9 aa, synthetic construct
GGSGGGPAP

SEQ ID NO: 14051 - protein, 6 aa, synthetic construct
PAPGGS

SEQ ID NO: 14052 - protein, 11 aa, synthetic construct
EAAAKGGGGGS

SEQ ID NO: 14053 - protein, 9 aa, synthetic construct
GSSGGSPAP

SEQ ID NO: 14054 - protein, 9 aa, synthetic construct
GSSGGGGGS

SEQ ID NO: 14055 - protein, 11 aa, synthetic construct
GGGEAAAKGGS

SEQ ID NO: 14056 - protein, 11 aa, synthetic construct
GGGEAAAKGSS

SEQ ID NO: 14057 - protein, 11 aa, synthetic construct
PAPEAAAKGSS

SEQ ID NO: 14058 - protein, 15 aa, synthetic construct
GSSGSSGSSGSSGSS

SEQ ID NO: 14059 - protein, 9 aa, synthetic construct
GGSPAPGSS

SEQ ID NO: 14060 - protein, 11 aa, synthetic construct
EAAAKGSSPAP

SEQ ID NO: 14061 - protein, 18 aa, synthetic construct
GGSGGSGGSGGSGGSGGS

SEQ ID NO: 14062 - protein, 11 aa, synthetic construct
GGGGSSEAAAK

SEQ ID NO: 14063 - protein, 9 aa, synthetic construct
GGGGSSPAP

SEQ ID NO: 14064 - protein, 9 aa, synthetic construct
GSSGGSPAP

SEQ ID NO: 14065 - protein, 9 aa, synthetic construct
GGGPAPGSS

SEQ ID NO: 14066 - protein, 9 aa, synthetic construct
PAPGSSGGS

SEQ ID NO: 14067 - protein, 9 aa, synthetic construct
GGGGGSPAP

SEQ ID NO: 14068 - protein, 16 aa, synthetic construct
SGSETPGTSESATPES

SEQ ID NO: 14069 - protein, 15 aa, synthetic construct
GSSGSSGSSGSSGSS

SEQ ID NO: 14070 - protein, 9 aa, synthetic construct
GSSPAPGGG

SEQ ID NO: 14071 - protein, 13 aa, synthetic construct
PAPAPAPAPAPAP

SEQ ID NO: 14072 - protein, 9 aa, synthetic construct
GGGPAPGGS

SEQ ID NO: 14073 - protein, 11 aa, synthetic construct
PAPGGSEAAAK

SEQ ID NO: 14074 - protein, 11 aa, synthetic construct
GGGGSSEAAAK

SEQ ID NO: 14075 - protein, 9 aa, synthetic construct
GGSPAPGGG

SEQ ID NO: 14076 - protein, 11 aa, synthetic construct
GSSPAPEAAAK

SEQ ID NO: 14077 - protein, 8 aa, synthetic construct
GGGEAAAK

SEQ ID NO: 14078 - protein, 11 aa, synthetic construct
PAPEAAAKGGG

SEQ ID NO: 14079 - protein, 9 aa, synthetic construct
GGSPAPGGG

SEQ ID NO: 14080 - protein, 9 aa, synthetic construct
GGSGGGGSS

SEQ ID NO: 14081 - protein, 11 aa, synthetic construct
GSSPAPEAAAK

SEQ ID NO: 14082 - protein, 9 aa, synthetic construct
GGSPAPGGG

SEQ ID NO: 14083 - protein, 9 aa, synthetic construct
PAPGGSGSS

SEQ ID NO: 14084 - protein, 6 aa, synthetic construct
GSSPAP

SEQ ID NO: 14085 - protein, 16 aa, synthetic construct
SGSETPGTSESATPES

SEQ ID NO: 14086 - protein, 9 aa, synthetic construct
GSSGSSGSS

SEQ ID NO: 14087 - protein, 9 aa, synthetic construct
PAPGSSGGS

SEQ ID NO: 14088 - protein, 6 aa, synthetic construct
PAPGGS

SEQ ID NO: 14089 - protein, 11 aa, synthetic construct
PAPEAAAKGGG

SEQ ID NO: 14090 - protein, 9 aa, synthetic construct
GGSGGSGGS

SEQ ID NO: 14091 - protein, 6 aa, synthetic construct
PAPGGS

SEQ ID NO: 14092 - protein, 9 aa, synthetic construct
GSSGGSPAP

SEQ ID NO: 14093 - protein, 9 aa, synthetic construct
GSSGGGGGS

SEQ ID NO: 14094 - protein, 9 aa, synthetic construct
GGGGGSPAP

SEQ ID NO: 14095 - protein, 11 aa, synthetic construct
EAAAKPAPGSS

SEQ ID NO: 14096 - protein, 11 aa, synthetic construct
EAAAKGGSPAP

SEQ ID NO: 14097 - protein, 11 aa, synthetic construct
GGGPAPEAAAK

SEQ ID NO: 14098 - protein, 11 aa, synthetic construct
GGSEAAAKGSS

SEQ ID NO: 14099 - protein, 11 aa, synthetic construct
PAPEAAAKGSS

SEQ ID NO: 14100 - protein, 11 aa, synthetic construct
PAPEAAAKGGS

SEQ ID NO: 14101 - protein, 6 aa, synthetic construct
GSSGGG

SEQ ID NO: 14102 - protein, 11 aa, synthetic construct
EAAAKGGGGSS

SEQ ID NO: 14103 - protein, 11 aa, synthetic construct
EAAAKGGSPAP

SEQ ID NO: 14104 - protein, 9 aa, synthetic construct
GGGGSSGGS

SEQ ID NO: 14105 - protein, 11 aa, synthetic construct
PAPEAAAKGSS

SEQ ID NO: 14106 - protein, 11 aa, synthetic construct
EAAAKGGGGGS

SEQ ID NO: 14107 - protein, 9 aa, synthetic construct
GSSGGGGGS

SEQ ID NO: 14108 - protein, 9 aa, synthetic construct
PAPAPAPAP

SEQ ID NO: 14109 - protein, 12 aa, synthetic construct
GGSGGSGGSGGS

SEQ ID NO: 14110 - protein, 9 aa, synthetic construct
PAPAPAPAP

SEQ ID NO: 14111 - protein, 11 aa, synthetic construct
GSSEAAAKPAP

SEQ ID NO: 14112 - protein, 11 aa, synthetic construct
GGSGGGEAAAK

SEQ ID NO: 14113 - protein, 9 aa, synthetic construct
GSSGGSGGG

SEQ ID NO: 14114 - protein, 9 aa, synthetic construct
GGGGGSPAP

SEQ ID NO: 14115 - protein, 11 aa, synthetic construct
GGGEAAAKGSS

SEQ ID NO: 14116 - protein, 9 aa, synthetic construct
GGGGSSPAP

SEQ ID NO: 14117 - protein, 6 aa, synthetic construct
GGSGGG

SEQ ID NO: 14118 - protein, 6 aa, synthetic construct
GGGGSS

SEQ ID NO: 14119 - protein, 11 aa, synthetic construct
EAAAKGSSGGS

SEQ ID NO: 14120 - protein, 9 aa, synthetic construct
GSSGGGGGS

SEQ ID NO: 14121 - protein, 11 aa, synthetic construct
EAAAKGSSGGS

SEQ ID NO: 14122 - protein, 10 aa, synthetic construct
EAAAKEAAAK

SEQ ID NO: 14123 - protein, 11 aa, synthetic construct
GSSGGGEAAAK

SEQ ID NO: 14124 - protein, 9 aa, synthetic construct
GSSPAPGGG

SEQ ID NO: 14125 - protein, 15 aa, synthetic construct
GGGGSGGGGSGGGGS

SEQ ID NO: 14126 - protein, 20 aa, synthetic construct
EAAAKEAAAKEAAAKEAAAK

SEQ ID NO: 14127 - protein, 11 aa, synthetic construct
EAAAKGGSGSS

SEQ ID NO: 14128 - protein, 8 aa, synthetic construct
PAPEAAAK

SEQ ID NO: 14129 - protein, 6 aa, synthetic construct
GSSGGG

SEQ ID NO: 14130 - protein, 11 aa, synthetic construct
GGSGGGEAAAK

SEQ ID NO: 14131 - protein, 5 aa, synthetic construct
EAAAK

SEQ ID NO: 14132 - protein, 9 aa, synthetic construct
GGGGSSPAP

SEQ ID NO: 14133 - skipped

SEQ ID NO: 14134 - protein, 11 aa, synthetic construct
PAPEAAAKGSS

SEQ ID NO: 14135 - protein, 9 aa, synthetic construct
GGGGGSPAP

SEQ ID NO: 14136 - protein, 9 aa, synthetic construct
GSSGSSGSS

SEQ ID NO: 14137 - protein, 20 aa, synthetic construct
GGGGSGGGGSGGGGSGGGGS

SEQ ID NO: 14138 - protein, 11 aa, synthetic construct
GGGGSSEAAAK

SEQ ID NO: 14139 - protein, 20 aa, synthetic construct
GGGGSGGGGSGGGGSGGGGS

SEQ ID NO: 14140 - protein, 11 aa, synthetic construct
PAPGSSEAAAK

SEQ ID NO: 14141 - protein, 9 aa, synthetic construct
GGGGGSGSS

SEQ ID NO: 14142 - protein, 11 aa, synthetic construct
GGSEAAAKGGG

SEQ ID NO: 14143 - protein, 9 aa, synthetic construct
PAPGSSGGG

SEQ ID NO: 14144 - skipped

SEQ ID NO: 14145 - protein, 11 aa, synthetic construct
EAAAKGGSGSS

SEQ ID NO: 14146 - protein, 8 aa, synthetic construct
GGGEAAAK

SEQ ID NO: 14147 - protein, 11 aa, synthetic construct
GGSEAAAKPAP

SEQ ID NO: 14148 - protein, 16 aa, synthetic construct
SGSETPGTSESATPES

SEQ ID NO: 14149 - protein, 11 aa, synthetic construct
EAAAKPAPGGS

SEQ ID NO: 14150 - protein, 11 aa, synthetic construct
EAAAKGGGGGS

SEQ ID NO: 14151 - protein, 5 aa, synthetic construct
GGGGS

SEQ ID NO: 14152 - protein, 11 aa, synthetic construct
GGSEAAAKGSS

SEQ ID NO: 14153 - protein, 11 aa, synthetic construct
GGSEAAAKGGG

SEQ ID NO: 14154 - protein, 18 aa, synthetic construct
GGSGGSGGSGGSGGSGGS

SEQ ID NO: 14155 - protein, 11 aa, synthetic construct
GGSEAAAKGSS

SEQ ID NO: 14156 - protein, 11 aa, synthetic construct
GGGEAAAKPAP

SEQ ID NO: 14157 - protein, 8 aa, synthetic construct
GGSEAAAK

SEQ ID NO: 14158 - protein, 9 aa, synthetic construct
GGSPAPGSS

SEQ ID NO: 14159 - protein, 11 aa, synthetic construct
GSSPAPEAAAK

SEQ ID NO: 14160 - protein, 6 aa, synthetic construct
GGSGSS

SEQ ID NO: 14161 - protein, 9 aa, synthetic construct
PAPGGGGGS

SEQ ID NO: 14162 - protein, 11 aa, synthetic construct
PAPEAAAKGSS

SEQ ID NO: 14163 - protein, 11 aa, synthetic construct
GGSGGGEAAAK

SEQ ID NO: 14164 - protein, 6 aa, synthetic construct
PAPGGG

SEQ ID NO: 14165 - protein, 8 aa, synthetic construct
EAAAKGGG

SEQ ID NO: 14166 - protein, 12 aa, synthetic construct
GSSGSSGSSGSS

SEQ ID NO: 14167 - protein, 11 aa, synthetic construct
EAAAKGGSGGG

SEQ ID NO: 14168 - protein, 9 aa, synthetic construct
GSSPAPGGS

SEQ ID NO: 14169 - protein, 9 aa, synthetic construct
GSSPAPGGS

SEQ ID NO: 14170 - protein, 6 aa, synthetic construct
GGGPAP

SEQ ID NO: 14171 - protein, 6 aa, synthetic construct
GGGPAP

SEQ ID NO: 14172 - protein, 9 aa, synthetic construct
GGSPAPGSS

SEQ ID NO: 14173 - protein, 5 aa, synthetic construct
PAPAP

SEQ ID NO: 14174 - protein, 7 aa, synthetic construct
GGGGGGG

SEQ ID NO: 14175 - protein, 5 aa, synthetic construct
GGGGG

SEQ ID NO: 14176 - protein, 12 aa, synthetic construct
GSAGSAAGSGEF

SEQ ID NO: 14177 - protein, 5 aa, synthetic construct
PAPAP

SEQ ID NO: 14178 - protein, 11 aa, synthetic construct
GGSEAAAKGGG

SEQ ID NO: 14179 - protein, 5 aa, synthetic construct
PAPAP

SEQ ID NO: 14180 - protein, 15 aa, synthetic construct
GGGGSGGGGSGGGGS

SEQ ID NO: 14181 - protein, 6 aa, synthetic construct
PAPGGS

SEQ ID NO: 14182 - protein, 11 aa, synthetic construct
GGGEAAAKPAP

SEQ ID NO: 14183 - protein, 6 aa, synthetic construct
GGGGGS

SEQ ID NO: 14184 - protein, 11 aa, synthetic construct
GSSEAAAKGGG

SEQ ID NO: 14185 - protein, 11 aa, synthetic construct
EAAAKGGGGSS

SEQ ID NO: 14186 - protein, 6 aa, synthetic construct
GSSGGS

SEQ ID NO: 14187 - protein, 6 aa, synthetic construct
GSSGGG

SEQ ID NO: 14188 - protein, 7 aa, synthetic construct
PAPAPAP

SEQ ID NO: 14189 - protein, 4 aa, synthetic construct
GGGG

SEQ ID NO: 14190 - protein, 11 aa, synthetic construct
EAAAKPAPGGS

SEQ ID NO: 14191 - protein, 10 aa, synthetic construct
GGGGSGGGGS

SEQ ID NO: 14192 - protein, 8 aa, synthetic construct
EAAAKGGG

SEQ ID NO: 14193 - protein, 9 aa, synthetic construct
GGGGSSPAP

SEQ ID NO: 14194 - protein, 11 aa, synthetic construct
GSSEAAAKGGG

SEQ ID NO: 14195 - protein, 5 aa, synthetic construct
GGGGG

SEQ ID NO: 14196 - protein, 11 aa, synthetic construct
GGGEAAAKGSS

SEQ ID NO: 14197 - protein, 9 aa, synthetic construct
GSSGSSGSS

SEQ ID NO: 14198 - protein, 9 aa, synthetic construct
GSSGGSPAP

SEQ ID NO: 14199 - protein, 8 aa, synthetic construct
EAAAKGGS

SEQ ID NO: 14200 - protein, 11 aa, synthetic construct
GGSPAPEAAAK

SEQ ID NO: 14201 - protein, 8 aa, synthetic construct
GGSEAAAK

SEQ ID NO: 14202 - protein, 6 aa, synthetic construct
GSSGGS

SEQ ID NO: 14203 - protein, 11 aa, synthetic construct
GGGPAPEAAAK

SEQ ID NO: 14204 - protein, 6 aa, synthetic construct
PAPGSS

SEQ ID NO: 14205 - protein, 11 aa, synthetic construct
GGSEAAAKGSS

SEQ ID NO: 14206 - protein, 25 aa, synthetic construct
EAAAKEAAAKEAAAKEAAAKEAAAK

SEQ ID NO: 14207 - protein, 11 aa, synthetic construct
GSSEAAAKGGG

SEQ ID NO: 14208 - protein, 15 aa, synthetic construct
GGGGSEAAAKGGGGS

SEQ ID NO: 14209 - protein, 9 aa, synthetic construct
GGSGGSGGS

SEQ ID NO: 14210 - protein, 9 aa, synthetic construct
GGGGGSGSS

SEQ ID NO: 14211 - protein, 20 aa, synthetic construct
GGGGSGGGGSGGGGSGGGGS

SEQ ID NO: 14212 - protein, 8 aa, synthetic construct
EAAAKGGG

SEQ ID NO: 14213 - protein, 11 aa, synthetic construct
GGSEAAAKGGG

SEQ ID NO: 14214 - protein, 9 aa, synthetic construct
GSSGGSGGG

SEQ ID NO: 14215 - protein, 6 aa, synthetic construct
GGGGGS

SEQ ID NO: 14216 - protein, 12 aa, synthetic construct
GSAGSAAGSGEF

SEQ ID NO: 14217 - protein, 11 aa, synthetic construct
PAPEAAAKGSS

SEQ ID NO: 14218 - protein, 9 aa, synthetic construct
GSSPAPGGG

SEQ ID NO: 14219 - protein, 9 aa, synthetic construct
GGGGSSPAP

SEQ ID NO: 14220 - protein, 9 aa, synthetic construct
PAPGGSGGG

SEQ ID NO: 14221 - protein, 6 aa, synthetic construct
GSSPAP

SEQ ID NO: 14222 - protein, 6 aa, synthetic construct
PAPGSS

SEQ ID NO: 14223 - protein, 9 aa, synthetic construct
GGSGGGGSS

SEQ ID NO: 14224 - protein, 6 aa, synthetic construct
GSSGGS

SEQ ID NO: 14225 - protein, 11 aa, synthetic construct
EAAAKGGGGGS

SEQ ID NO: 14226 - protein, 5 aa, synthetic construct
GGGGG

SEQ ID NO: 14227 - protein, 8 aa, synthetic construct
EAAAKGSS

SEQ ID NO: 14228 - protein, 25 aa, synthetic construct
EAAAKEAAAKEAAAKEAAAKEAAAK

SEQ ID NO: 14229 - protein, 20 aa, synthetic construct
EAAAKEAAAKEAAAKEAAAK

SEQ ID NO: 14230 - protein, 12 aa, synthetic construct
GSAGSAAGSGEF

SEQ ID NO: 14231 - protein, 9 aa, synthetic construct
GGGPAPGGS

SEQ ID NO: 14232 - protein, 11 aa, synthetic construct
GGSEAAAKGGG

SEQ ID NO: 14233 - protein, 11 aa, synthetic construct
PAPGGGEAAAK

SEQ ID NO: 14234 - protein, 11 aa, synthetic construct
EAAAKPAPGSS

SEQ ID NO: 14235 - protein, 8 aa, synthetic construct
GGSEAAAK

SEQ ID NO: 14236 - protein, 6 aa, synthetic construct
GGSGSS

SEQ ID NO: 14237 - protein, 11 aa, synthetic construct
GGSPAPEAAAK

SEQ ID NO: 14238 - protein, 5 aa, synthetic construct
GGGGS

SEQ ID NO: 14239 - protein, 9 aa, synthetic construct
GGSPAPGGG

SEQ ID NO: 14240 - protein, 11 aa, synthetic construct
EAAAKPAPGGS

SEQ ID NO: 14241 - protein, 6 aa, synthetic construct
GSSPAP

SEQ ID NO: 14242 - protein, 9 aa, synthetic construct
GGSGSSGGG

SEQ ID NO: 14243 - protein, 6 aa, synthetic construct
PAPGGG

SEQ ID NO: 14244 - protein, 11 aa, synthetic construct
GSSGGSEAAAK

SEQ ID NO: 14245 - protein, 8 aa, synthetic construct
GGSEAAAK

SEQ ID NO: 14246 - protein, 9 aa, synthetic construct
GGGPAPGGS

SEQ ID NO: 14247 - protein, 12 aa, synthetic construct
GSAGSAAGSGEF

SEQ ID NO: 14248 - protein, 11 aa, synthetic construct
EAAAKPAPGGS

SEQ ID NO: 14249 - protein, 6 aa, synthetic construct
PAPGGG

SEQ ID NO: 14250 - protein, 11 aa, synthetic construct
GSSPAPEAAAK

SEQ ID NO: 14251 - protein, 8 aa, synthetic construct
PAPEAAAK

SEQ ID NO: 14252 - protein, 9 aa, synthetic construct
PAPGGGGGS

SEQ ID NO: 14253 - protein, 11 aa, synthetic construct
GGSEAAAKPAP

SEQ ID NO: 14254 - protein, 8 aa, synthetic construct
EAAAKGSS

SEQ ID NO: 14255 - protein, 8 aa, synthetic construct
GGGEAAAK

SEQ ID NO: 14256 - protein, 15 aa, synthetic construct
EAAAKEAAAKEAAAK

SEQ ID NO: 14257 - protein, 11 aa, synthetic construct
PAPEAAAKGGG

SEQ ID NO: 14258 - protein, 7 aa, synthetic construct
PAPAPAP

SEQ ID NO: 14259 - protein, 11 aa, synthetic construct
EAAAKPAPGGS

SEQ ID NO: 14260 - protein, 10 aa, synthetic construct
GGGGSGGGGS

SEQ ID NO: 14261 - protein, 15 aa, synthetic construct
GGGGSEAAAKGGGGS

SEQ ID NO: 14262 - protein, 5 aa, synthetic construct
EAAAK

SEQ ID NO: 14263 - protein, 7 aa, synthetic construct
PAPAPAP

SEQ ID NO: 14264 - protein, 15 aa, synthetic construct
GGGGSEAAAKGGGGS

SEQ ID NO: 14265 - protein, 11 aa, synthetic construct
GGSPAPEAAAK

SEQ ID NO: 14266 - protein, 9 aa, synthetic construct
GGSGSSGGG

SEQ ID NO: 14267 - protein, 9 aa, synthetic construct
GGSPAPGSS

SEQ ID NO: 14268 - protein, 33 aa, synthetic construct; identical to SEQ ID NO: 5006

SEQ ID NO: 14269 - protein, 11 aa, synthetic construct
EAAAKGGGPAP

SEQ ID NO: 14270 - protein, 11 aa, synthetic construct
GSSGGSEAAAK

SEQ ID NO: 14271 - protein, 16 aa, synthetic construct
SGSETPGTSESATPES

SEQ ID NO: 14272 - protein, 25 aa, synthetic construct
EAAAKEAAAKEAAAKEAAAKEAAAK

SEQ ID NO: 14273 - protein, 9 aa, synthetic construct
GSSGSSGSS

SEQ ID NO: 14274 - protein, 9 aa, synthetic construct
GSSPAPGGG

SEQ ID NO: 14275 - protein, 11 aa, synthetic construct
GSSGGGEAAAK

SEQ ID NO: 14276 - protein, 9 aa, synthetic construct
GGSGGGGSS

SEQ ID NO: 14277 - protein, 11 aa, synthetic construct
GSSGGGEAAAK

SEQ ID NO: 14278 - protein, 11 aa, synthetic construct
GSSEAAAKGGG

SEQ ID NO: 14279 - protein, 9 aa, synthetic construct
GGSGGGGSS

SEQ ID NO: 14280 - protein, 9 aa, synthetic construct
GGSGSSPAP

SEQ ID NO: 14281 - protein, 6 aa, synthetic construct
GSSPAP

SEQ ID NO: 14282 - protein, 11 aa, synthetic construct
GGGGSSEAAAK

SEQ ID NO: 14283 - skipped

SEQ ID NO: 14284 - protein, 10 aa, synthetic construct
EAAAKEAAAK

SEQ ID NO: 14285 - protein, 9 aa, synthetic construct
PAPAPAPAP

SEQ ID NO: 14286 - protein, 11 aa, synthetic construct
GGSEAAAKGGG

SEQ ID NO: 14287 - protein, 6 aa, synthetic construct
PAPGGG

SEQ ID NO: 14288 - protein, 8 aa, synthetic construct
EAAAKGSS

SEQ ID NO: 14289 - protein, 10 aa, synthetic construct
GGGGSGGGGS

SEQ ID NO: 14290 - protein, 9 aa, synthetic construct
GGSGGSGGS

SEQ ID NO: 14291 - protein, 5 aa, synthetic construct
EAAAK

SEQ ID NO: 14292 - protein, 9 aa, synthetic construct
GGGGSSGGS

SEQ ID NO: 14293 - protein, 11 aa, synthetic construct
GGGPAPEAAAK

SEQ ID NO: 14294 - protein, 15 aa, synthetic construct
EAAAKEAAAKEAAAK

SEQ ID NO: 14295 - protein, 11 aa, synthetic construct
GSSEAAAKGGG

SEQ ID NO: 14296 - protein, 9 aa, synthetic construct
GGGPAPGGS

SEQ ID NO: 14297 - protein, 11 aa, synthetic construct
GGSEAAAKGGG

SEQ ID NO: 14298 - protein, 11 aa, synthetic construct
EAAAKGGGGGS

SEQ ID NO: 14299 - protein, 11 aa, synthetic construct
EAAAKGGSGGG

SEQ ID NO: 14300 - protein, 11 aa, synthetic construct
GGSEAAAKGGG

SEQ ID NO: 14301 - protein, 5 aa, synthetic construct
GGGGS

SEQ ID NO: 14302 - protein, 6 aa, synthetic construct
GSSGGS

SEQ ID NO: 14303 - protein, 6 aa, synthetic construct
GSSGSS

SEQ ID NO: 14304 - protein, 9 aa, synthetic construct
GGSPAPGGG

SEQ ID NO: 14305 - protein, 9 aa, synthetic construct
GSSGGGGGS

SEQ ID NO: 14306 - protein, 9 aa, synthetic construct
PAPAPAPAP

SEQ ID NO: 14307 - protein, 5 aa, synthetic construct
PAPAP

SEQ ID NO: 14308 - protein, 9 aa, synthetic construct
PAPGSSGGS

SEQ ID NO: 14309 - protein, 9 aa, synthetic construct
PAPGSSGGG

SEQ ID NO: 14310 - protein, 8 aa, synthetic construct
GGGEAAAK

SEQ ID NO: 14311 - protein, 15 aa, synthetic construct
GGSGGSGGSGGSGGS

SEQ ID NO: 14312 - protein, 6 aa, synthetic construct
GGSGGG

SEQ ID NO: 14313 - protein, 11 aa, synthetic construct
PAPEAAAKGGG

SEQ ID NO: 14314 - skipped

SEQ ID NO: 14315 - protein, 9 aa, synthetic construct
PAPGGSGSS

SEQ ID NO: 14316 - protein, 30 aa, synthetic construct; identical to SEQ ID NO: 5130

SEQ ID NO: 14317 - protein, 12 aa, synthetic construct
GSSGSSGSSGSS

SEQ ID NO: 14318 - protein, 15 aa, synthetic construct
GSSGSSGSSGSSGSS

SEQ ID NO: 14319 - protein, 11 aa, synthetic construct
GGGEAAAKPAP

SEQ ID NO: 14320 - protein, 9 aa, synthetic construct
PAPGSSGGG

SEQ ID NO: 14321 - protein, 9 aa, synthetic construct
PAPGGSGSS

SEQ ID NO: 14322 - protein, 11 aa, synthetic construct
PAPAPAPAPAP

SEQ ID NO: 14323 - protein, 11 aa, synthetic construct
GGSGGGEAAAK

SEQ ID NO: 14324 - protein, 6 aa, synthetic construct
GSSPAP

SEQ ID NO: 14325 - protein, 8 aa, synthetic construct
EAAAKPAP

SEQ ID NO: 14326 - protein, 20 aa, synthetic construct
GGGGSGGGGSGGGGSGGGGS

SEQ ID NO: 14327 - protein, 6 aa, synthetic construct
GGSGGG

SEQ ID NO: 14328 - protein, 9 aa, synthetic construct
GGSGGSGGS

SEQ ID NO: 14329 - protein, 8 aa, synthetic construct
GGGGGGGG

SEQ ID NO: 14330 - protein, 6 aa, synthetic construct
GGGGSS

SEQ ID NO: 14331 - protein, 9 aa, synthetic construct
GSSGGGGGS

SEQ ID NO: 14332 - protein, 30 aa, synthetic construct; identical to SEQ ID NO: 5130

SEQ ID NO: 14333 - protein, 9 aa, synthetic construct
GSSGSSGSS

SEQ ID NO: 14334 - protein, 9 aa, synthetic construct
GSSPAPGGS

SEQ ID NO: 14335 - protein, 7 aa, synthetic construct
PAPAPAP

SEQ ID NO: 14336 - protein, 20 aa, synthetic construct
EAAAKEAAAKEAAAKEAAAK

SEQ ID NO: 14337 - protein, 9 aa, synthetic construct
PAPAPAPAP

SEQ ID NO: 14338 - protein, 6 aa, synthetic construct
GGGGSS

SEQ ID NO: 14339 - protein, 15 aa, synthetic construct
GSSGSSGSSGSSGSS

SEQ ID NO: 14340 - protein, 6 aa, synthetic construct
PAPGGS

SEQ ID NO: 14341 - protein, 11 aa, synthetic construct
GSSEAAAKGGG

SEQ ID NO: 14342 - protein, 9 aa, synthetic construct
GSSGGSPAP

SEQ ID NO: 14343 - protein, 18 aa, synthetic construct
GSSGSSGSSGSSGSSGSS

SEQ ID NO: 14344 - protein, 9 aa, synthetic construct
GGSGSSGGG

SEQ ID NO: 14345 - protein, 9 aa, synthetic construct
GGGPAPGSS

SEQ ID NO: 14346 - protein, 11 aa, synthetic construct
GSSEAAAKGGS

SEQ ID NO: 14347 - protein, 11 aa, synthetic construct
GSSEAAAKGGG

SEQ ID NO: 14348 - protein, 9 aa, synthetic construct
GGSGGGPAP

SEQ ID NO: 14349 - protein, 6 aa, synthetic construct
GSSGSS

SEQ ID NO: 14350 - protein, 9 aa, synthetic construct
PAPGGGGGS

SEQ ID NO: 14351 - protein, 11 aa, synthetic construct
EAAAKPAPGGS

SEQ ID NO: 14352 - protein, 6 aa, synthetic construct
GSSGSS

SEQ ID NO: 14353 - protein, 11 aa, synthetic construct
EAAAKPAPGGS

SEQ ID NO: 14354 - protein, 11 aa, synthetic construct
GGGPAPEAAAK

SEQ ID NO: 14355 - protein, 11 aa, synthetic construct
GSSEAAAKGGG

SEQ ID NO: 14356 - protein, 11 aa, synthetic construct
GGGEAAAKGGS

SEQ ID NO: 14357 - protein, 6 aa, synthetic construct
GSSGSS

SEQ ID NO: 14358 - protein, 15 aa, synthetic construct
EAAAKEAAAKEAAAK

SEQ ID NO: 14359 - protein, 9 aa, synthetic construct
PAPGSSGGS

SEQ ID NO: 14360 - protein, 11 aa, synthetic construct
PAPAPAPAPAP

SEQ ID NO: 14361 - protein, 8 aa, synthetic construct
GSSEAAAK

SEQ ID NO: 14362 - skipped

SEQ ID NO: 14363 - protein, 11 aa, synthetic construct
GGSEAAAKGGG

SEQ ID NO: 14364 - protein, 9 aa, synthetic construct
GGSGGGPAP

SEQ ID NO: 14365 - protein, 6 aa, synthetic construct
GSSGSS

SEQ ID NO: 14366 - protein, 8 aa, synthetic construct
GGSEAAAK

SEQ ID NO: 14367 - protein, 11 aa, synthetic construct
GSSEAAAKGGS

SEQ ID NO: 14368 - protein, 9 aa, synthetic construct
PAPGGGGGS

SEQ ID NO: 14369 - protein, 6 aa, synthetic construct
GSSGGG

SEQ ID NO: 14370 - protein, 6 aa, synthetic construct
GSSGGS

SEQ ID NO: 14371 - protein, 6 aa, synthetic construct
PAPGGG

SEQ ID NO: 14372 - protein, 9 aa, synthetic construct
PAPGSSGGG

SEQ ID NO: 14373 - protein, 8 aa, synthetic construct
GGSEAAAK

SEQ ID NO: 14374 - protein, 11 aa, synthetic construct
GSSPAPEAAAK

SEQ ID NO: 14375 - protein, 9 aa, synthetic construct
GSSGGSPAP

SEQ ID NO: 14376 - protein, 9 aa, synthetic construct
GGSPAPGSS

SEQ ID NO: 14377 - protein, 9 aa, synthetic construct
GGSGGSGGS

SEQ ID NO: 14378 - protein, 9 aa, synthetic construct
GGSGGGPAP

SEQ ID NO: 14379 - protein, 11 aa, synthetic construct
GGGPAPEAAAK

SEQ ID NO: 14380 - protein, 5 aa, synthetic construct
GGGGS

SEQ ID NO: 14381 - protein, 9 aa, synthetic construct
GSSGGSGGG

SEQ ID NO: 14382 - protein, 11 aa, synthetic construct
EAAAKGGGGSS

SEQ ID NO: 14383 - protein, 9 aa, synthetic construct
GGSGSSGGG

SEQ ID NO: 14384 - protein, 9 aa, synthetic construct
GGSGGSGGS

SEQ ID NO: 14385 - protein, 11 aa, synthetic construct
GGGPAPEAAAK

SEQ ID NO: 14386 - protein, 11 aa, synthetic construct
GSSGGGEAAAK

SEQ ID NO: 14387 - skipped

SEQ ID NO: 14388 - protein, 12 aa, synthetic construct
GSAGSAAGSGEF

SEQ ID NO: 14389 - protein, 9 aa, synthetic construct
GSSGGGPAP

SEQ ID NO: 14390 - protein, 6 aa, synthetic construct
GGGGSS

SEQ ID NO: 14391 - protein, 11 aa, synthetic construct
GGGGSSEAAAK

SEQ ID NO: 14392 - protein, 9 aa, synthetic construct
PAPGGSGGG

SEQ ID NO: 14393 - protein, 15 aa, synthetic construct
GSSGSSGSSGSSGSS

SEQ ID NO: 14394 - protein, 9 aa, synthetic construct
GSSGGSPAP

SEQ ID NO: 14395 - protein, 8 aa, synthetic construct
GGSEAAAK

SEQ ID NO: 14396 - protein, 10 aa, synthetic construct
GGGGSGGGGS

SEQ ID NO: 14397 - protein, 11 aa, synthetic construct
GSSEAAAKGGG

SEQ ID NO: 14398 - protein, 11 aa, synthetic construct
EAAAKPAPGGG

SEQ ID NO: 14399 - protein, 11 aa, synthetic construct
EAAAKGGSPAP

SEQ ID NO: 14400 - protein, 11 aa, synthetic construct
GSSEAAAKPAP

SEQ ID NO: 14401 - protein, 9 aa, synthetic construct
GGGPAPGGS

SEQ ID NO: 14402 - skipped

SEQ ID NO: 14403 - protein, 15 aa, synthetic construct
EAAAKGGGGSEAAAK

SEQ ID NO: 14404 - protein, 9 aa, synthetic construct
GGSGSSGGG

SEQ ID NO: 14405 - protein, 12 aa, synthetic construct
GSAGSAAGSGEF

SEQ ID NO: 14406 - protein, 8 aa, synthetic construct
GGGEAAAK

SEQ ID NO: 14407 - protein, 11 aa, synthetic construct
PAPEAAAKGGS

SEQ ID NO: 14408 - protein, 13 aa, synthetic construct
PAPAPAPAPAPAP

SEQ ID NO: 14409 - protein, 9 aa, synthetic construct
GGSGGGGSS

SEQ ID NO: 14410 - protein, 9 aa, synthetic construct
PAPGSSGGS

SEQ ID NO: 14411 - protein, 8 aa, synthetic construct
PAPEAAAK

SEQ ID NO: 14412 - protein, 18 aa, synthetic construct
GSSGSSGSSGSSGSSGSS

SEQ ID NO: 14413 - protein, 9 aa, synthetic construct
GGGGGSGSS

SEQ ID NO: 14414 - protein, 8 aa, synthetic construct
GGGGGGGG

SEQ ID NO: 14415 - protein, 6 aa, synthetic construct
GGGGGG

SEQ ID NO: 14416 - protein, 9 aa, synthetic construct
GSSGGSGGG

SEQ ID NO: 14417 - protein, 6 aa, synthetic construct
GGGGSS

SEQ ID NO: 14418 - protein, 9 aa, synthetic construct
GGSGGGPAP

SEQ ID NO: 14419 - protein, 6 aa, synthetic construct
GSSGSS

SEQ ID NO: 14420 - protein, 25 aa, synthetic construct
EAAAKEAAAKEAAAKEAAAKEAAAK

SEQ ID NO: 14421 - protein, 10 aa, synthetic construct
EAAAKEAAAK

SEQ ID NO: 14422 - protein, 11 aa, synthetic construct
GSSPAPEAAAK

SEQ ID NO: 14423 - protein, 11 aa, synthetic construct
GGSEAAAKPAP

SEQ ID NO: 14424 - protein, 11 aa, synthetic construct
GGSGGGEAAAK

SEQ ID NO: 14425 - protein, 11 aa, synthetic construct
EAAAKGSSPAP

SEQ ID NO: 14426 - protein, 11 aa, synthetic construct
GGSGSSEAAAK

SEQ ID NO: 14427 - skipped

SEQ ID NO: 14428 - protein, 9 aa, synthetic construct
GGGGGSGSS

SEQ ID NO: 14429 - protein, 11 aa, synthetic construct
GGSGGGEAAAK

SEQ ID NO: 14430 - protein, 9 aa, synthetic construct
GSSGGSGGG

SEQ ID NO: 14431 - protein, 11 aa, synthetic construct
EAAAKPAPGGG

SEQ ID NO: 14432 - protein, 9 aa, synthetic construct
PAPGGSGGG

SEQ ID NO: 14433 - protein, 7 aa, synthetic construct
PAPAPAP

SEQ ID NO: 14434 - protein, 11 aa, synthetic construct
GSSEAAAKPAP

SEQ ID NO: 14435 - protein, 33 aa, synthetic construct; identical to SEQ ID NO: 5006

SEQ ID NO: 14436 - protein, 9 aa, synthetic construct
GSSGGSGGG

SEQ ID NO: 14437 - protein, 18 aa, synthetic construct
GSSGSSGSSGSSGSSGSS

SEQ ID NO: 14438 - protein, 9 aa, synthetic construct
GSSGGGPAP

SEQ ID NO: 14439 - protein, 13 aa, synthetic construct
PAPAPAPAPAPAP

SEQ ID NO: 14440 - protein, 9 aa, synthetic construct
GGGGGSPAP

SEQ ID NO: 14441 - protein, 6 aa, synthetic construct
PAPGSS

SEQ ID NO: 14442 - protein, 11 aa, synthetic construct
PAPEAAAKGGS

SEQ ID NO: 14443 - protein, 9 aa, synthetic construct
GGGGSSPAP

SEQ ID NO: 14444 - protein, 8 aa, synthetic construct
GGSEAAAK

SEQ ID NO: 14445 - protein, 11 aa, synthetic construct
EAAAKPAPGGS

SEQ ID NO: 14446 - protein, 6 aa, synthetic construct
PAPGSS

SEQ ID NO: 14447 - protein, 9 aa, synthetic construct
PAPGSSGGG

SEQ ID NO: 14448 - protein, 15 aa, synthetic construct
EAAAKEAAAKEAAAK

SEQ ID NO: 14449 - skipped

SEQ ID NO: 14450 - protein, 5 aa, synthetic construct
GGGGS

SEQ ID NO: 14451 - protein, 9 aa, synthetic construct
GGSGGGGSS

SEQ ID NO: 14452 - protein, 6 aa, synthetic construct
GGSGGG

SEQ ID NO: 14453 - protein, 11 aa, synthetic construct
GGGEAAAKPAP

SEQ ID NO: 14454 - protein, 25 aa, synthetic construct
EAAAKEAAAKEAAAKEAAAKEAAAK

SEQ ID NO: 14455 - protein, 9 aa, synthetic construct
PAPGGSGGG

SEQ ID NO: 14456 - protein, 18 aa, synthetic construct
GSSGSSGSSGSSGSSGSS

SEQ ID NO: 14457 - protein, 11 aa, synthetic construct
GGGEAAAKPAP

SEQ ID NO: 14458 - protein, 9 aa, synthetic construct
GSSGGSPAP

SEQ ID NO: 14459 - protein, 11 aa, synthetic construct
PAPAPAPAPAP

SEQ ID NO: 14460 - protein, 11 aa, synthetic construct
GSSGGSEAAAK

SEQ ID NO: 14461 - protein, 9 aa, synthetic construct
GGSPAPGSS

SEQ ID NO: 14462 - protein, 9 aa, synthetic construct
GGSGGSGGS

SEQ ID NO: 14463 - protein, 11 aa, synthetic construct
PAPEAAAKGSS

SEQ ID NO: 14464 - protein, 8 aa, synthetic construct
EAAAKGGS

SEQ ID NO: 14465 - protein, 15 aa, synthetic construct
EAAAKGGGGSEAAAK

SEQ ID NO: 14466 - protein, 9 aa, synthetic construct
GGGGSSPAP

SEQ ID NO: 14467 - protein, 5 aa, synthetic construct
EAAAK

SEQ ID NO: 14468 - protein, 11 aa, synthetic construct
EAAAKGGGGSS

SEQ ID NO: 14469 - protein, 11 aa, synthetic construct
GGGGGSEAAAK

SEQ ID NO: 14470 - protein, 4 aa, synthetic construct
GGGG

SEQ ID NO: 14471 - protein, 11 aa, synthetic construct
GGGGGSEAAAK

SEQ ID NO: 14472 - protein, 11 aa, synthetic construct
EAAAKGGGPAP

SEQ ID NO: 14473 - protein, 20 aa, synthetic construct
GGGGSGGGGSGGGGSGGGGS

SEQ ID NO: 14474 - protein, 9 aa, synthetic construct
GSSGGSGGG

SEQ ID NO: 14475 - protein, 15 aa, synthetic construct
GGGGSGGGGSGGGGS

SEQ ID NO: 14476 - protein, 11 aa, synthetic construct
GGSGGGEAAAK

SEQ ID NO: 14477 - protein, 11 aa, synthetic construct
PAPEAAAKGGG

SEQ ID NO: 14478 - protein, 10 aa, synthetic construct
GGGGSGGGGS

SEQ ID NO: 14479 - protein, 11 aa, synthetic construct
GSSGGGEAAAK

SEQ ID NO: 14480 - protein, 5 aa, synthetic construct
GGGGG

SEQ ID NO: 14481 - protein, 6 aa, synthetic construct
GGSGSS

SEQ ID NO: 14482 - protein, 13 aa, synthetic construct
PAPAPAPAPAPAP

SEQ ID NO: 14483 - protein, 11 aa, synthetic construct
GGSEAAAKPAP

SEQ ID NO: 14484 - protein, 6 aa, synthetic construct
GGGGGG

SEQ ID NO: 14485 - protein, 11 aa, synthetic construct
GSSGGGEAAAK

SEQ ID NO: 14486 - protein, 33 aa, synthetic construct; identical to SEQ ID NO: 5006

SEQ ID NO: 14487 - protein, 9 aa, synthetic construct
GGSPAPGSS

SEQ ID NO: 14488 - protein, 9 aa, synthetic construct
GGGGSSPAP

SEQ ID NO: 14489 - protein, 15 aa, synthetic construct
GGGGSEAAAKGGGGS

SEQ ID NO: 14490 - protein, 8 aa, synthetic construct
GGGGGGGG

SEQ ID NO: 14491 - protein, 5 aa, synthetic construct
PAPAP

SEQ ID NO: 14492 - protein, 8 aa, synthetic construct
GGGEAAAK

SEQ ID NO: 14493 - protein, 9 aa, synthetic construct
GSSPAPGGG

SEQ ID NO: 14494 - protein, 15 aa, synthetic construct
GGSGGSGGSGGSGGS

SEQ ID NO: 14495 - protein, 6 aa, synthetic construct
GGGGGS

SEQ ID NO: 14496 - protein, 9 aa, synthetic construct
PAPGGGGSS

SEQ ID NO: 14497 - protein, 8 aa, synthetic construct
GGGEAAAK

SEQ ID NO: 14498 - protein, 11 aa, synthetic construct
PAPEAAAKGGG

SEQ ID NO: 14499 - protein, 8 aa, synthetic construct
GSSEAAAK

SEQ ID NO: 14500 - protein, 10 aa, synthetic construct
EAAAKEAAAK

SEQ ID NO: 14501 - protein, 11 aa, synthetic construct
EAAAKGGGGGS

SEQ ID NO: 14502 - protein, 11 aa, synthetic construct
GGGEAAAKGGS

SEQ ID NO: 14503 - protein, 11 aa, synthetic construct
PAPAPAPAPAP

SEQ ID NO: 14504 - protein, 11 aa, synthetic construct
PAPGSSEAAAK

SEQ ID NO: 14505 - protein, 15 aa, synthetic construct
EAAAKEAAAKEAAAK

SEQ ID NO: 14506 - protein, 9 aa, synthetic construct
GGSPAPGSS

SEQ ID NO: 14507 - protein, 9 aa, synthetic construct
PAPGSSGGS

SEQ ID NO: 14508 - protein, 20 aa, synthetic construct
EAAAKEAAAKEAAAKEAAAK

SEQ ID NO: 14509 - protein, 8 aa, synthetic construct
EAAAKGGG

SEQ ID NO: 14510 - protein, 11 aa, synthetic construct
EAAAKGGSGGG

SEQ ID NO: 14511 - protein, 6 aa, synthetic construct
GGGGGS

SEQ ID NO: 14512 - protein, 9 aa, synthetic construct
PAPGGSGGG

SEQ ID NO: 14513 - protein, 9 aa, synthetic construct
GGGPAPGGS

SEQ ID NO: 14514 - skipped

SEQ ID NO: 14515 - protein, 9 aa, synthetic construct
GGSGGSGGS

SEQ ID NO: 14516 - protein, 5 aa, synthetic construct
GGGGS

SEQ ID NO: 14517 - protein, 4 aa, synthetic construct
GGGG

SEQ ID NO: 14518 - protein, 11 aa, synthetic construct
GGSEAAAKPAP

SEQ ID NO: 14519 - protein, 9 aa, synthetic construct
PAPAPAPAP

SEQ ID NO: 14520 - skipped

SEQ ID NO: 14521 - protein, 15 aa, synthetic construct
EAAAKEAAAKEAAAK

SEQ ID NO: 14522 - protein, 8 aa, synthetic construct
EAAAKGSS

SEQ ID NO: 14523 - protein, 8 aa, synthetic construct
EAAAKGGG

SEQ ID NO: 14524 - protein, 11 aa, synthetic construct
PAPEAAAKGGG

SEQ ID NO: 14525 - protein, 11 aa, synthetic construct
GSSGGGEAAAK

SEQ ID NO: 14526 - protein, 11 aa, synthetic construct
PAPGGGEAAAK

SEQ ID NO: 14527 - protein, 20 aa, synthetic construct
GGGGSGGGGSGGGGSGGGGS

SEQ ID NO: 14528 - protein, 6 aa, synthetic construct
GSSGGG

SEQ ID NO: 14529 - protein, 20 aa, synthetic construct
GGGGSGGGGSGGGGSGGGGS

SEQ ID NO: 14530 - protein, 6 aa, synthetic construct
GGSGSS

SEQ ID NO: 14531 - protein, 11 aa, synthetic construct
GGSGSSEAAAK

SEQ ID NO: 14532 - protein, 7 aa, synthetic construct
PAPAPAP

SEQ ID NO: 14533 - protein, 9 aa, synthetic construct
GSSGGSPAP

SEQ ID NO: 14534 - protein, 6 aa, synthetic construct
GGSPAP

SEQ ID NO: 14535 - protein, 9 aa, synthetic construct
GGSGGGPAP

SEQ ID NO: 14536 - protein, 8 aa, synthetic construct
GSSEAAAK

SEQ ID NO: 14537 - protein, 9 aa, synthetic construct
GSSGGGPAP

SEQ ID NO: 14538 - protein, 11 aa, synthetic construct
GGGGSSEAAAK

SEQ ID NO: 14539 - protein, 11 aa, synthetic construct
GGSEAAAKPAP

SEQ ID NO: 14540 - protein, 9 aa, synthetic construct
GGSGGGPAP

SEQ ID NO: 14541 - protein, 20 aa, synthetic construct
GGGGSGGGGSGGGGSGGGGS

SEQ ID NO: 14542 - protein, 9 aa, synthetic construct
GGGGSSPAP

SEQ ID NO: 14543 - protein, 8 aa, synthetic construct
EAAAKGGS

SEQ ID NO: 14544 - protein, 11 aa, synthetic construct
GGSEAAAKGSS

SEQ ID NO: 14545 - protein, 11 aa, synthetic construct
GGGGSSEAAAK

SEQ ID NO: 14546 - protein, 11 aa, synthetic construct
EAAAKGGSGGG

SEQ ID NO: 14547 - protein, 6 aa, synthetic construct
GGSGGS

SEQ ID NO: 14548 - protein, 8 aa, synthetic construct
EAAAKGGG

SEQ ID NO: 14549 - protein, 15 aa, synthetic construct
GSSGSSGSSGSSGSS

SEQ ID NO: 14550 - protein, 9 aa, synthetic construct
GSSGGGPAP

SEQ ID NO: 14551 - protein, 11 aa, synthetic construct
PAPGGSEAAAK

SEQ ID NO: 14552 - protein, 6 aa, synthetic construct
GGSPAP

SEQ ID NO: 14553 - protein, 11 aa, synthetic construct
EAAAKPAPGSS

SEQ ID NO: 14554 - protein, 16 aa, synthetic construct
SGSETPGTSESATPES

SEQ ID NO: 14555 - protein, 6 aa, synthetic construct
GSSPAP

SEQ ID NO: 14556 - protein, 9 aa, synthetic construct
GSSPAPGGG

SEQ ID NO: 14557 - protein, 11 aa, synthetic construct
GGGEAAAKGSS

SEQ ID NO: 14558 - protein, 9 aa, synthetic construct
GGGPAPGGS

SEQ ID NO: 14559 - protein, 8 aa, synthetic construct
EAAAKGGG

SEQ ID NO: 14560 - protein, 6 aa, synthetic construct
GSSGGG

SEQ ID NO: 14561 - protein, 11 aa, synthetic construct
GGSPAPEAAAK

SEQ ID NO: 14562 - protein, 11 aa, synthetic construct
EAAAKGSSPAP

SEQ ID NO: 14563 - protein, 15 aa, synthetic construct
EAAAKGGGGSEAAAK

SEQ ID NO: 14564 - protein, 15 aa, synthetic construct
GSSGSSGSSGSSGSS

SEQ ID NO: 14565 - protein, 11 aa, synthetic construct
EAAAKGGSPAP

SEQ ID NO: 14566 - protein, 6 aa, synthetic construct
GGSGGS

SEQ ID NO: 14567 - protein, 11 aa, synthetic construct
EAAAKGSSGGS

SEQ ID NO: 14568 - protein, 9 aa, synthetic construct
GSSGGGPAP

SEQ ID NO: 14569 - protein, 11 aa, synthetic construct
PAPEAAAKGGS

SEQ ID NO: 14570 - protein, 11 aa, synthetic construct
EAAAKPAPGGG

SEQ ID NO: 14571 - protein, 6 aa, synthetic construct
GGSPAP

SEQ ID NO: 14572 - protein, 10 aa, synthetic construct
GGGGSGGGGS

SEQ ID NO: 14573 - protein, 6 aa, synthetic construct
GGGGSS

SEQ ID NO: 14574 - protein, 9 aa, synthetic construct
GGSPAPGGG

SEQ ID NO: 14575 - protein, 11 aa, synthetic construct
EAAAKPAPGSS

SEQ ID NO: 14576 - protein, 8 aa, synthetic construct
EAAAKPAP

SEQ ID NO: 14577 - protein, 11 aa, synthetic construct
PAPEAAAKGSS

SEQ ID NO: 14578 - protein, 11 aa, synthetic construct
EAAAKGGSGSS

SEQ ID NO: 14579 - protein, 11 aa, synthetic construct
GGGEAAAKGSS

SEQ ID NO: 14580 - protein, 15 aa, synthetic construct
GGGGSEAAAKGGGGS

SEQ ID NO: 14581 - protein, 9 aa, synthetic construct
PAPGGSGSS

SEQ ID NO: 14582 - protein, 11 aa, synthetic construct
GGSEAAAKPAP

SEQ ID NO: 14583 - protein, 15 aa, synthetic construct
GGSGGSGGSGGSGGS

SEQ ID NO: 14584 - protein, 11 aa, synthetic construct
GSSGGSEAAAK

SEQ ID NO: 14585 - skipped

SEQ ID NO: 14586 - protein, 11 aa, synthetic construct
PAPGGSEAAAK

SEQ ID NO: 14587 - protein, 11 aa, synthetic construct
PAPEAAAKGGS

SEQ ID NO: 14588 - protein, 9 aa, synthetic construct
GGSGSSPAP

SEQ ID NO: 14589 - protein, 6 aa, synthetic construct
GSSPAP

SEQ ID NO: 14590 - protein, 8 aa, synthetic construct
GGGEAAAK

SEQ ID NO: 14591 - protein, 6 aa, synthetic construct
GGGGSS

SEQ ID NO: 14592 - protein, 9 aa, synthetic construct
GGSPAPGSS

SEQ ID NO: 14593 - protein, 6 aa, synthetic construct
PAPGGS

SEQ ID NO: 14594 - protein, 11 aa, synthetic construct
EAAAKGSSPAP

SEQ ID NO: 14595 - protein, 9 aa, synthetic construct
GGGGSSGGS

SEQ ID NO: 14596 - protein, 13 aa, synthetic construct
PAPAPAPAPAPAP

SEQ ID NO: 14597 - protein, 11 aa, synthetic construct
GGSEAAAKGGG

SEQ ID NO: 14598 - protein, 6 aa, synthetic construct
GGSGGS

SEQ ID NO: 14599 - protein, 9 aa, synthetic construct
GSSGGGGGS

SEQ ID NO: 14600 - protein, 11 aa, synthetic construct
EAAAKGGGPAP

SEQ ID NO: 14601 - protein, 20 aa, synthetic construct
EAAAKEAAAKEAAAKEAAAK

SEQ ID NO: 14602 - protein, 9 aa, synthetic construct
GGGPAPGSS

SEQ ID NO: 14603 - protein, 20 aa, synthetic construct
GGGGSGGGGSGGGGSGGGGS

SEQ ID NO: 14604 - protein, 20 aa, synthetic construct
EAAAKEAAAKEAAAKEAAAK

SEQ ID NO: 14605 - protein, 9 aa, synthetic construct
PAPGSSGGS

SEQ ID NO: 14606 - protein, 11 aa, synthetic construct
PAPGSSEAAAK

SEQ ID NO: 14607 - protein, 11 aa, synthetic construct
GSSPAPEAAAK

SEQ ID NO: 14608 - protein, 15 aa, synthetic construct
EAAAKGGGGSEAAAK

SEQ ID NO: 14609 - protein, 6 aa, synthetic construct
GGSPAP

SEQ ID NO: 14610 - protein, 11 aa, synthetic construct
GGSGSSEAAAK

SEQ ID NO: 14611 - protein, 11 aa, synthetic construct
GGSEAAAKGGG

SEQ ID NO: 14612 - protein, 9 aa, synthetic construct
PAPGGGGSS

SEQ ID NO: 14613 - protein, 12 aa, synthetic construct
GGSGGSGGSGGS

SEQ ID NO: 14614 - protein, 9 aa, synthetic construct
GGGGSSGGS

SEQ ID NO: 14615 - protein, 33 aa, synthetic construct; identical to SEQ ID NO: 5006

SEQ ID NO: 14616 - protein, 6 aa, synthetic construct
GGGPAP

SEQ ID NO: 14617 - protein, 20 aa, synthetic construct
GGGGSGGGGSGGGGSGGGGS

SEQ ID NO: 14618 - protein, 8 aa, synthetic construct
GSSEAAAK

SEQ ID NO: 14619 - protein, 11 aa, synthetic construct
GGSPAPEAAAK

SEQ ID NO: 14620 - protein, 11 aa, synthetic construct
GGGGGSEAAAK

SEQ ID NO: 14621 - protein, 9 aa, synthetic construct
GSSPAPGGS

SEQ ID NO: 14622 - skipped

SEQ ID NO: 14623 - protein, 8 aa, synthetic construct
EAAAKPAP

SEQ ID NO: 14624 - protein, 8 aa, synthetic construct
EAAAKGGG

SEQ ID NO: 14625 - protein, 8 aa, synthetic construct
GGGEAAAK

SEQ ID NO: 14626 - protein, 9 aa, synthetic construct
PAPGSSGGG

SEQ ID NO: 14627 - protein, 11 aa, synthetic construct
EAAAKGGSPAP

SEQ ID NO: 14628 - protein, 9 aa, synthetic construct
GSSGGSGGG

SEQ ID NO: 14629 - protein, 11 aa, synthetic construct
GSSGGGEAAAK

SEQ ID NO: 14630 - protein, 9 aa, synthetic construct
GGGPAPGSS

SEQ ID NO: 14631 - protein, 11 aa, synthetic construct
PAPGGGEAAAK

SEQ ID NO: 14632 - protein, 12 aa, synthetic construct
GSSGSSGSSGSS

SEQ ID NO: 14633 - protein, 8 aa, synthetic construct
GGSEAAAK

SEQ ID NO: 14634 - protein, 11 aa, synthetic construct
GGGEAAAKPAP

SEQ ID NO: 14635 - protein, 11 aa, synthetic construct
EAAAKGGGPAP

SEQ ID NO: 14636 - protein, 9 aa, synthetic construct
GGGGSSPAP

SEQ ID NO: 14637 - protein, 11 aa, synthetic construct
EAAAKPAPGSS

SEQ ID NO: 14638 - protein, 9 aa, synthetic construct
GGGGSSPAP

SEQ ID NO: 14639 - protein, 6 aa, synthetic construct
GSSGSS

SEQ ID NO: 14640 - protein, 25 aa, synthetic construct
GGGGSGGGGSGGGGSGGGGSGGGGS

SEQ ID NO: 14641 - protein, 9 aa, synthetic construct
GGGGSSGGS

SEQ ID NO: 14642 - protein, 11 aa, synthetic construct
EAAAKGGSGSS

SEQ ID NO: 14643 - protein, 8 aa, synthetic construct
EAAAKPAP

SEQ ID NO: 14644 - protein, 11 aa, synthetic construct
GSSGGGEAAAK

SEQ ID NO: 14645 - protein, 9 aa, synthetic construct
PAPGGSGGG

SEQ ID NO: 14646 - protein, 11 aa, synthetic construct
EAAAKGGGPAP

SEQ ID NO: 14647 - protein, 9 aa, synthetic construct
GSSGSSGSS

SEQ ID NO: 14648 - protein, 6 aa, synthetic construct
GSSGGS

SEQ ID NO: 14649 - protein, 11 aa, synthetic construct
GGSEAAAKGGG

SEQ ID NO: 14650 - protein, 8 aa, synthetic construct
EAAAKGGS

SEQ ID NO: 14651 - protein, 9 aa, synthetic construct
GGSGSSGGG

SEQ ID NO: 14652 - protein, 5 aa, synthetic construct
EAAAK

SEQ ID NO: 14653 - protein, 9 aa, synthetic construct
GSSGGSPAP

SEQ ID NO: 14654 - protein, 9 aa, synthetic construct
GGGGSSGGS

SEQ ID NO: 14655 - protein, 9 aa, synthetic construct
PAPGGSGGG

SEQ ID NO: 14656 - protein, 9 aa, synthetic construct
GGGPAPGGS

SEQ ID NO: 14657 - protein, 11 aa, synthetic construct
GSSPAPEAAAK

SEQ ID NO: 14658 - protein, 9 aa, synthetic construct
GGSGSSPAP

SEQ ID NO: 14659 - protein, 11 aa, synthetic construct
GSSEAAAKGGS

SEQ ID NO: 14660 - protein, 6 aa, synthetic construct
PAPGGG

SEQ ID NO: 14661 - protein, 16 aa, synthetic construct
SGSETPGTSESATPES

SEQ ID NO: 14662 - protein, 5 aa, synthetic construct
GGGGS

SEQ ID NO: 14663 - protein, 11 aa, synthetic construct
GSSGGGEAAAK

SEQ ID NO: 14664 - protein, 15 aa, synthetic construct
EAAAKGGGGSEAAAK

SEQ ID NO: 14665 - protein, 11 aa, synthetic construct
GSSEAAAKPAP

SEQ ID NO: 14666 - protein, 6 aa, synthetic construct
GGGGGG

SEQ ID NO: 14667 - protein, 15 aa, synthetic construct
EAAAKEAAAKEAAAK

SEQ ID NO: 14668 - protein, 11 aa, synthetic construct
EAAAKPAPGSS

SEQ ID NO: 14669 - protein, 11 aa, synthetic construct
GGSGSSEAAAK

SEQ ID NO: 14670 - protein, 8 aa, synthetic construct
GGSEAAAK

SEQ ID NO: 14671 - protein, 11 aa, synthetic construct
GGSPAPEAAAK

SEQ ID NO: 14672 - protein, 9 aa, synthetic construct
GGGPAPGSS

SEQ ID NO: 14673 - protein, 11 aa, synthetic construct
GGGGGSEAAAK

SEQ ID NO: 14674 - protein, 11 aa, synthetic construct
EAAAKPAPGSS

SEQ ID NO: 14675 - protein, 12 aa, synthetic construct
GSSGSSGSSGSS

SEQ ID NO: 14676 - protein, 8 aa, synthetic construct
EAAAKPAP

SEQ ID NO: 14677 - protein, 8 aa, synthetic construct
GGGEAAAK

SEQ ID NO: 14678 - protein, 6 aa, synthetic construct
GGSGGS

SEQ ID NO: 14679 - protein, 11 aa, synthetic construct
EAAAKGSSGGS

SEQ ID NO: 14680 - protein, 16 aa, synthetic construct
SGSETPGTSESATPES

SEQ ID NO: 14681 - protein, 11 aa, synthetic construct
EAAAKGSSGGG

SEQ ID NO: 14682 - protein, 30 aa, synthetic construct; identical to SEQ ID NO: 5130

SEQ ID NO: 14683 - protein, 9 aa, synthetic construct
GGSGGGPAP

SEQ ID NO: 14684 - protein, 9 aa, synthetic construct
PAPAPAPAP

SEQ ID NO: 14685 - protein, 11 aa, synthetic construct
GGGEAAAKGGS

SEQ ID NO: 14686 - protein, 9 aa, synthetic construct
GSSGGSGGG

SEQ ID NO: 14687 - protein, 11 aa, synthetic construct
PAPEAAAKGGS

SEQ ID NO: 14688 - protein, 11 aa, synthetic construct
GGGEAAAKGSS

SEQ ID NO: 14689 - protein, 20 aa, synthetic construct
GGGGSGGGGSGGGGSGGGGS

SEQ ID NO: 14690 - protein, 9 aa, synthetic construct
PAPGSSGGG

SEQ ID NO: 14691 - protein, 9 aa, synthetic construct
GGSGSSGGG

SEQ ID NO: 14692 - protein, 11 aa, synthetic construct
EAAAKPAPGSS

SEQ ID NO: 14693 - protein, 11 aa, synthetic construct
GSSEAAAKGGG

SEQ ID NO: 14694 - protein, 15 aa, synthetic construct
GGSGGSGGSGGSGGS

SEQ ID NO: 14695 - protein, 11 aa, synthetic construct
GGSEAAAKPAP

SEQ ID NO: 14696 - protein, 11 aa, synthetic construct
EAAAKGGSPAP

SEQ ID NO: 14697 - protein, 11 aa, synthetic construct
EAAAKGGGGGS

SEQ ID NO: 14698 - protein, 11 aa, synthetic construct
GSSPAPEAAAK

SEQ ID NO: 14699 - protein, 5 aa, synthetic construct
PAPAP

SEQ ID NO: 14700 - protein, 11 aa, synthetic construct
PAPGGSEAAAK

SEQ ID NO: 14701 - protein, 6 aa, synthetic construct
GGSGSS

SEQ ID NO: 14702 - protein, 11 aa, synthetic construct
GGSEAAAKPAP

SEQ ID NO: 14703 - skipped

SEQ ID NO: 14704 - protein, 33 aa, synthetic construct; identical to SEQ ID NO: 5006

SEQ ID NO: 14705 - protein, 11 aa, synthetic construct
PAPGGGEAAAK

SEQ ID NO: 14706 - protein, 9 aa, synthetic construct
PAPGGGGGS

SEQ ID NO: 14707 - protein, 9 aa, synthetic construct
PAPGGSGSS

SEQ ID NO: 14708 - protein, 11 aa, synthetic construct
GSSGGGEAAAK

SEQ ID NO: 14709 - protein, 11 aa, synthetic construct
GGSEAAAKPAP

SEQ ID NO: 14710 - protein, 5 aa, synthetic construct
GGGGG

SEQ ID NO: 14711 - protein, 11 aa, synthetic construct
GGGEAAAKGSS

SEQ ID NO: 14712 - protein, 15 aa, synthetic construct
GSSGSSGSSGSSGSS

SEQ ID NO: 14713 - protein, 16 aa, synthetic construct
SGSETPGTSESATPES

SEQ ID NO: 14714 - protein, 9 aa, synthetic construct
PAPGSSGGG

SEQ ID NO: 14715 - protein, 9 aa, synthetic construct
GGGGSSPAP

SEQ ID NO: 14716 - protein, 8 aa, synthetic construct
GGGEAAAK

SEQ ID NO: 14717 - protein, 6 aa, synthetic construct
GGSGGG

SEQ ID NO: 14718 - protein, 11 aa, synthetic construct
EAAAKGSSGGG

SEQ ID NO: 14719 - protein, 11 aa, synthetic construct
GSSPAPEAAAK

SEQ ID NO: 14720 - protein, 9 aa, synthetic construct
GGGPAPGSS

SEQ ID NO: 14721 - protein, 11 aa, synthetic construct
EAAAKGSSGGG

SEQ ID NO: 14722 - protein, 11 aa, synthetic construct
GGGGGSEAAAK

SEQ ID NO: 14723 - protein, 11 aa, synthetic construct
EAAAKPAPGGS

SEQ ID NO: 14724 - protein, 11 aa, synthetic construct
EAAAKGSSPAP

SEQ ID NO: 14725 - protein, 7 aa, synthetic construct
GGGGGGG

SEQ ID NO: 14726 - protein, 15 aa, synthetic construct
EAAAKEAAAKEAAAK

SEQ ID NO: 14727 - protein, 9 aa, synthetic construct
GSSPAPGGS

SEQ ID NO: 14728 - protein, 11 aa, synthetic construct
GGGGSSEAAAK

SEQ ID NO: 14729 - protein, 11 aa, synthetic construct
GGSEAAAKGSS

SEQ ID NO: 14730 - protein, 11 aa, synthetic construct
GGSEAAAKGSS

SEQ ID NO: 14731 - protein, 11 aa, synthetic construct
EAAAKPAPGGG

SEQ ID NO: 14732 - protein, 18 aa, synthetic construct
GSSGSSGSSGSSGSSGSS

SEQ ID NO: 14733 - protein, 15 aa, synthetic construct
GGGGSEAAAKGGGGS

SEQ ID NO: 14734 - protein, 9 aa, synthetic construct
GSSPAPGGS

SEQ ID NO: 14735 - protein, 10 aa, synthetic construct
GGGGSGGGGS

SEQ ID NO: 14736 - protein, 9 aa, synthetic construct
GSSGGSPAP

SEQ ID NO: 14737 - protein, 6 aa, synthetic construct
GGSGGS

SEQ ID NO: 14738 - protein, 11 aa, synthetic construct
PAPGSSEAAAK

SEQ ID NO: 14739 - protein, 9 aa, synthetic construct
PAPGGGGSS

SEQ ID NO: 14740 - protein, 9 aa, synthetic construct
GGGGSSGGS

SEQ ID NO: 14741 - protein, 10 aa, synthetic construct
GGGGSGGGGS

SEQ ID NO: 14742 - protein, 20 aa, synthetic construct
GGGGSGGGGSGGGGSGGGGS

SEQ ID NO: 14743 - protein, 11 aa, synthetic construct
GGSGSSEAAAK

SEQ ID NO: 14744 - protein, 9 aa, synthetic construct
GGSGGGGSS

SEQ ID NO: 14745 - protein, 11 aa, synthetic construct
GGSEAAAKPAP

SEQ ID NO: 14746 - protein, 11 aa, synthetic construct
EAAAKGGSPAP

SEQ ID NO: 14747 - protein, 9 aa, synthetic construct
PAPAPAPAP

SEQ ID NO: 14748 - protein, 9 aa, synthetic construct
GSSGGSPAP

SEQ ID NO: 14749 - protein, 9 aa, synthetic construct
GGGGGSPAP

SEQ ID NO: 14750 - protein, 11 aa, synthetic construct
EAAAKGGGPAP

SEQ ID NO: 14751 - protein, 9 aa, synthetic construct
GSSGGSPAP

SEQ ID NO: 14752 - protein, 5 aa, synthetic construct
GGGGG

SEQ ID NO: 14753 - protein, 6 aa, synthetic construct
GGGGGS

SEQ ID NO: 14754 - protein, 15 aa, synthetic construct
EAAAKEAAAKEAAAK

SEQ ID NO: 14755 - protein, 6 aa, synthetic construct
PAPGGG

SEQ ID NO: 14756 - protein, 11 aa, synthetic construct
GSSGGSEAAAK

SEQ ID NO: 14757 - protein, 9 aa, synthetic construct
GGSPAPGGG

SEQ ID NO: 14758 - protein, 18 aa, synthetic construct
GSSGSSGSSGSSGSSGSS

SEQ ID NO: 14759 - protein, 11 aa, synthetic construct
GGSPAPEAAAK

SEQ ID NO: 14760 - protein, 9 aa, synthetic construct
PAPGGGGSS

SEQ ID NO: 14761 - protein, 11 aa, synthetic construct
GGGGSSEAAAK

SEQ ID NO: 14762 - protein, 6 aa, synthetic construct
PAPGGS

SEQ ID NO: 14763 - protein, 15 aa, synthetic construct
GGSGGSGGSGGSGGS

SEQ ID NO: 14764 - protein, 12 aa, synthetic construct
GSAGSAAGSGEF

SEQ ID NO: 14765 - protein, 6 aa, synthetic construct
GSSGGS

SEQ ID NO: 14766 - protein, 9 aa, synthetic construct
GGSGGGGSS

SEQ ID NO: 14767 - protein, 9 aa, synthetic construct
GGSGGGGSS

SEQ ID NO: 14768 - protein, 11 aa, synthetic construct
PAPEAAAKGSS

SEQ ID NO: 14769 - protein, 12 aa, synthetic construct
GSSGSSGSSGSS

SEQ ID NO: 14770 - protein, 13 aa, synthetic construct
PAPAPAPAPAPAP

SEQ ID NO: 14771 - protein, 9 aa, synthetic construct
PAPGSSGGG

SEQ ID NO: 14772 - protein, 9 aa, synthetic construct
GGSGSSPAP

SEQ ID NO: 14773 - protein, 9 aa, synthetic construct
GGSGGGPAP

SEQ ID NO: 14774 - protein, 9 aa, synthetic construct
PAPGGGGGS

SEQ ID NO: 14775 - protein, 11 aa, synthetic construct
EAAAKGSSPAP

SEQ ID NO: 14776 - protein, 9 aa, synthetic construct
GGSGSSPAP

SEQ ID NO: 14777 - protein, 8 aa, synthetic construct
EAAAKGSS

SEQ ID NO: 14778 - protein, 11 aa, synthetic construct
GGGGGSEAAAK

SEQ ID NO: 14779 - protein, 8 aa, synthetic construct
GGGGGGGG

SEQ ID NO: 14780 - protein, 10 aa, synthetic construct
EAAAKEAAAK

SEQ ID NO: 14781 - protein, 11 aa, synthetic construct
GGGEAAAKGGS

SEQ ID NO: 14782 - protein, 11 aa, synthetic construct
EAAAKGGSPAP

SEQ ID NO: 14783 - protein, 8 aa, synthetic construct
GSSEAAAK

SEQ ID NO: 14784 - protein, 11 aa, synthetic construct
PAPGGGEAAAK

SEQ ID NO: 14785 - protein, 6 aa, synthetic construct
GGSPAP

SEQ ID NO: 14786 - protein, 9 aa, synthetic construct
GSSPAPGGG

SEQ ID NO: 14787 - protein, 9 aa, synthetic construct
GGSGSSPAP

SEQ ID NO: 14788 - skipped

SEQ ID NO: 14789 - protein, 9 aa, synthetic construct
GGSGGGGSS

SEQ ID NO: 14790 - protein, 20 aa, synthetic construct
GGGGSGGGGSGGGGSGGGGS

SEQ ID NO: 14791 - protein, 11 aa, synthetic construct
EAAAKGGGPAP

SEQ ID NO: 14792 - protein, 11 aa, synthetic construct
GSSGGGEAAAK

SEQ ID NO: 14793 - protein, 33 aa, synthetic construct; identical to SEQ ID NO: 5006

SEQ ID NO: 14794 - protein, 46 aa, synthetic construct; identical to SEQ ID NO: 5217

SEQ ID NO: 14795 - protein, 10 aa, synthetic construct
EAAAKEAAAK

SEQ ID NO: 14796 - protein, 11 aa, synthetic construct
GSSPAPEAAAK

SEQ ID NO: 14797 - protein, 11 aa, synthetic construct
EAAAKPAPGGS

SEQ ID NO: 14798 - protein, 9 aa, synthetic construct
GSSGGSPAP

SEQ ID NO: 14799 - protein, 11 aa, synthetic construct
GGGPAPEAAAK

SEQ ID NO: 14800 - protein, 11 aa, synthetic construct
GGGEAAAKPAP

SEQ ID NO: 14801 - protein, 11 aa, synthetic construct
GGGGGSEAAAK

SEQ ID NO: 14802 - protein, 9 aa, synthetic construct
GGGPAPGSS

SEQ ID NO: 14803 - protein, 11 aa, synthetic construct
GGSEAAAKPAP

SEQ ID NO: 14804 - protein, 18 aa, synthetic construct
GSSGSSGSSGSSGSSGSS

SEQ ID NO: 14805 - protein, 11 aa, synthetic construct
EAAAKGSSGGS

SEQ ID NO: 14806 - protein, 6 aa, synthetic construct
GGGGGG

SEQ ID NO: 14807 - protein, 9 aa, synthetic construct
GSSPAPGGS

SEQ ID NO: 14808 - protein, 9 aa, synthetic construct
GGSGSSPAP

SEQ ID NO: 14809 - protein, 11 aa, synthetic construct
GGGPAPEAAAK

SEQ ID NO: 14810 - protein, 11 aa, synthetic construct
GGSGGGEAAAK

SEQ ID NO: 14811 - protein, 12 aa, synthetic construct
GSAGSAAGSGEF

SEQ ID NO: 14812 - protein, 11 aa, synthetic construct
GSSGGGEAAAK

SEQ ID NO: 14813 - skipped

SEQ ID NO: 14814 - protein, 9 aa, synthetic construct
PAPGSSGGS

SEQ ID NO: 14815 - protein, 9 aa, synthetic construct
GGGGSSPAP

SEQ ID NO: 14816 - protein, 33 aa, synthetic construct; identical to SEQ ID NO: 5006

SEQ ID NO: 14817 - protein, 7 aa, synthetic construct
GGGGGGG

SEQ ID NO: 14818 - protein, 11 aa, synthetic construct
PAPAPAPAPAP

SEQ ID NO: 14819 - protein, 20 aa, synthetic construct
GGGGSGGGGSGGGGSGGGGS

SEQ ID NO: 14820 - protein, 9 aa, synthetic construct
GGSGGGPAP

SEQ ID NO: 14821 - protein, 6 aa, synthetic construct
GGGGGG

SEQ ID NO: 14822 - protein, 11 aa, synthetic construct
EAAAKPAPGSS

SEQ ID NO: 14823 - protein, 9 aa, synthetic construct
GGGGSSGGS

SEQ ID NO: 14824 - protein, 11 aa, synthetic construct
PAPGSSEAAAK

SEQ ID NO: 14825 - protein, 9 aa, synthetic construct
GGGGSSPAP

SEQ ID NO: 14826 - protein, 9 aa, synthetic construct
PAPGSSGGS

SEQ ID NO: 14827 - protein, 46 aa, synthetic construct; identical to SEQ ID NO: 5217

SEQ ID NO: 14828 - protein, 7 aa, synthetic construct
PAPAPAP

SEQ ID NO: 14829 - protein, 9 aa, synthetic construct
PAPGGGGGS

SEQ ID NO: 14830 - protein, 6 aa, synthetic construct
GGGGSS

SEQ ID NO: 14831 - protein, 20 aa, synthetic construct
EAAAKEAAAKEAAAKEAAAK

SEQ ID NO: 14832 - protein, 15 aa, synthetic construct
GGSGGSGGSGGSGGS

SEQ ID NO: 14833 - protein, 7 aa, synthetic construct
GGGGGGG

SEQ ID NO: 14834 - protein, 11 aa, synthetic construct
PAPGGGEAAAK

SEQ ID NO: 14835 - protein, 6 aa, synthetic construct
PAPGSS

SEQ ID NO: 14836 - protein, 10 aa, synthetic construct
GGGGSGGGGS

SEQ ID NO: 14837 - protein, 9 aa, synthetic construct
GSSGGSGGG

SEQ ID NO: 14838 - protein, 30 aa, synthetic construct; identical to SEQ ID NO: 5112

SEQ ID NO: 14839 - protein, 11 aa, synthetic construct
GSSEAAAKGGG

SEQ ID NO: 14840 - protein, 11 aa, synthetic construct
GGSEAAAKPAP

SEQ ID NO: 14841 - protein, 9 aa, synthetic construct
GSSGGSGGG

SEQ ID NO: 14842 - protein, 11 aa, synthetic construct
EAAAKGGGGSS

SEQ ID NO: 14843 - protein, 6 aa, synthetic construct
GGGGGG

SEQ ID NO: 14844 - protein, 5 aa, synthetic construct
GGGGG

SEQ ID NO: 14845 - protein, 11 aa, synthetic construct
PAPEAAAKGGG

SEQ ID NO: 14846 - protein, 11 aa, synthetic construct
EAAAKGGSPAP

SEQ ID NO: 14847 - protein, 11 aa, synthetic construct
GGGEAAAKPAP

SEQ ID NO: 14848 - protein, 18 aa, synthetic construct
GSSGSSGSSGSSGSSGSS

SEQ ID NO: 14849 - protein, 20 aa, synthetic construct
EAAAKEAAAKEAAAKEAAAK

SEQ ID NO: 14850 - protein, 11 aa, synthetic construct
PAPGSSEAAAK

SEQ ID NO: 14851 - protein, 9 aa, synthetic construct
GSSGSSGSS

SEQ ID NO: 14852 - protein, 9 aa, synthetic construct
GSSGGGPAP

SEQ ID NO: 14853 - protein, 11 aa, synthetic construct
GGGPAPEAAAK

SEQ ID NO: 14854 - protein, 8 aa, synthetic construct
GGGEAAAK

SEQ ID NO: 14855 - protein, 12 aa, synthetic construct
GSSGSSGSSGSS

SEQ ID NO: 14856 - protein, 11 aa, synthetic construct
PAPAPAPAPAP

SEQ ID NO: 14857 - protein, 11 aa, synthetic construct
GGSPAPEAAAK

SEQ ID NO: 14858 - protein, 18 aa, synthetic construct
GSSGSSGSSGSSGSSGSS

SEQ ID NO: 14859 - protein, 25 aa, synthetic construct
EAAAKEAAAKEAAAKEAAAKEAAAK

SEQ ID NO: 14860 - protein, 11 aa, synthetic construct
GGGPAPEAAAK

SEQ ID NO: 14861 - protein, 9 aa, synthetic construct
PAPGGSGGG

SEQ ID NO: 14862 - protein, 9 aa, synthetic construct
PAPGGSGGG

SEQ ID NO: 14863 - protein, 11 aa, synthetic construct
GGGEAAAKGGS

SEQ ID NO: 14864 - protein, 12 aa, synthetic construct
GSAGSAAGSGEF

SEQ ID NO: 14865 - protein, 9 aa, synthetic construct
GSSPAPGGG

SEQ ID NO: 14866 - protein, 18 aa, synthetic construct
GSSGSSGSSGSSGSSGSS

SEQ ID NO: 14867 - protein, 9 aa, synthetic construct
GGSGGGGSS

SEQ ID NO: 14868 - protein, 11 aa, synthetic construct
PAPEAAAKGSS

SEQ ID NO: 14869 - skipped

SEQ ID NO: 14870 - protein, 11 aa, synthetic construct
EAAAKGGGGSS

SEQ ID NO: 14871 - protein, 30 aa, synthetic construct; identical to SEQ ID NO: 5130

SEQ ID NO: 14872 - protein, 30 aa, synthetic construct; identical to SEQ ID NO: 5112

SEQ ID NO: 14873 - protein, 11 aa, synthetic construct
GGGEAAAKGGS

SEQ ID NO: 14874 - protein, 6 aa, synthetic construct
GSSGSS

SEQ ID NO: 14875 - protein, 9 aa, synthetic construct
GSSGGGGGS

SEQ ID NO: 14876 - protein, 11 aa, synthetic construct
GGGGSSEAAAK

SEQ ID NO: 14877 - protein, 11 aa, synthetic construct
EAAAKGSSGGS

SEQ ID NO: 14878 - protein, 11 aa, synthetic construct
GSSEAAAKGGS

SEQ ID NO: 14879 - protein, 11 aa, synthetic construct
EAAAKGSSPAP

SEQ ID NO: 14880 - protein, 11 aa, synthetic construct
EAAAKPAPGSS

SEQ ID NO: 14881 - protein, 9 aa, synthetic construct
PAPGSSGGG

SEQ ID NO: 14882 - protein, 30 aa, synthetic construct; identical to SEQ ID NO: 5112

SEQ ID NO: 14883 - protein, 25 aa, synthetic construct
EAAAKEAAAKEAAAKEAAAKEAAAK

SEQ ID NO: 14884 - protein, 11 aa, synthetic construct
GGGGSSEAAAK

SEQ ID NO: 14885 - protein, 11 aa, synthetic construct
EAAAKGGSPAP

SEQ ID NO: 14886 - protein, 11 aa, synthetic construct
PAPEAAAKGSS

SEQ ID NO: 14887 - protein, 9 aa, synthetic construct
GSSGGGGGS

SEQ ID NO: 14888 - protein, 9 aa, synthetic construct
GGGGSSPAP

SEQ ID NO: 14889 - protein, 11 aa, synthetic construct
EAAAKGGGGSS

SEQ ID NO: 14890 - protein, 9 aa, synthetic construct
PAPAPAPAP

SEQ ID NO: 14891 - protein, 11 aa, synthetic construct
GGSEAAAKGSS

SEQ ID NO: 14892 - protein, 9 aa, synthetic construct
GSSPAPGGG

SEQ ID NO: 14893 - protein, 6 aa, synthetic construct
GGGGGG

SEQ ID NO: 14894 - protein, 9 aa, synthetic construct
GGSGGSGGS

SEQ ID NO: 14895 - protein, 13 aa, synthetic construct
PAPAPAPAPAPAP

SEQ ID NO: 14896 - protein, 6 aa, synthetic construct
GSSPAP

SEQ ID NO: 14897 - protein, 9 aa, synthetic construct
GGGGGSGSS

SEQ ID NO: 14898 - protein, 11 aa, synthetic construct
EAAAKGSSGGS

SEQ ID NO: 14899 - protein, 5 aa, synthetic construct
EAAAK

SEQ ID NO: 14900 - protein, 8 aa, synthetic construct
PAPEAAAK

SEQ ID NO: 14901 - protein, 11 aa, synthetic construct
EAAAKGGSGSS

SEQ ID NO: 14902 - protein, 9 aa, synthetic construct
GGSGGSGGS

SEQ ID NO: 14903 - protein, 11 aa, synthetic construct
GSSGGGEAAAK

SEQ ID NO: 14904 - protein, 33 aa, synthetic construct; identical to SEQ ID NO: 5006

SEQ ID NO: 14905 - protein, 18 aa, synthetic construct
GGSGGSGGSGGSGGSGGS

SEQ ID NO: 14906 - protein, 8 aa, synthetic construct
GGGEAAAK

SEQ ID NO: 14907 - protein, 9 aa, synthetic construct
GGGGGSGSS

SEQ ID NO: 14908 - protein, 9 aa, synthetic construct
GSSPAPGGS

SEQ ID NO: 14909 - protein, 8 aa, synthetic construct
EAAAKGSS

SEQ ID NO: 14910 - protein, 9 aa, synthetic construct
GSSGGSGGG

SEQ ID NO: 14911 - protein, 9 aa, synthetic construct
GGSGGGGSS

SEQ ID NO: 14912 - protein, 9 aa, synthetic construct
GGSPAPGSS

SEQ ID NO: 14913 - protein, 18 aa, synthetic construct
GGSGGSGGSGGSGGSGGS

SEQ ID NO: 14914 - protein, 11 aa, synthetic construct
GSSEAAAKGGG

SEQ ID NO: 14915 - protein, 9 aa, synthetic construct
GGSGGSGGS

SEQ ID NO: 14916 - protein, 18 aa, synthetic construct
GSSGSSGSSGSSGSSGSS

SEQ ID NO: 14917 - protein, 15 aa, synthetic construct
GSSGSSGSSGSSGSS

SEQ ID NO: 14918 - protein, 8 aa, synthetic construct
PAPEAAAK

SEQ ID NO: 14919 - protein, 15 aa, synthetic construct
GSSGSSGSSGSSGSS

SEQ ID NO: 14920 - protein, 15 aa, synthetic construct
EAAAKGGGGSEAAAK

SEQ ID NO: 14921 - protein, 11 aa, synthetic construct
GGSPAPEAAAK

SEQ ID NO: 14922 - protein, 6 aa, synthetic construct
GSSGSS

SEQ ID NO: 14923 - skipped

SEQ ID NO: 14924 - protein, 15 aa, synthetic construct
GGGGSGGGGSGGGGS

SEQ ID NO: 14925 - protein, 30 aa, synthetic construct; identical to SEQ ID NO: 5130

SEQ ID NO: 14926 - protein, 9 aa, synthetic construct
GGSGSSPAP

SEQ ID NO: 14927 - protein, 8 aa, synthetic construct
GGGGGGGG

SEQ ID NO: 14928 - protein, 11 aa, synthetic construct
PAPGSSEAAAK

SEQ ID NO: 14929 - protein, 9 aa, synthetic construct
GGGGSSPAP

SEQ ID NO: 14930 - protein, 9 aa, synthetic construct
GSSGGSPAP

SEQ ID NO: 14931 - protein, 9 aa, synthetic construct
GSSGGGGGS

SEQ ID NO: 14932 - protein, 25 aa, synthetic construct
EAAAKEAAAKEAAAKEAAAKEAAAK

SEQ ID NO: 14933 - protein, 9 aa, synthetic construct
GSSGGGGGS

SEQ ID NO: 14934 - protein, 15 aa, synthetic construct
GGGGSEAAAKGGGGS

SEQ ID NO: 14935 - protein, 11 aa, synthetic construct
GGGEAAAKPAP

SEQ ID NO: 14936 - protein, 11 aa, synthetic construct
PAPGGGEAAAK

SEQ ID NO: 14937 - protein, 11 aa, synthetic construct
GGSGGGEAAAK

SEQ ID NO: 14938 - protein, 6 aa, synthetic construct
GSSGGG

SEQ ID NO: 14939 - protein, 11 aa, synthetic construct
EAAAKGSSGGS

SEQ ID NO: 14940 - protein, 5 aa, synthetic construct
GGGGG

SEQ ID NO: 14941 - protein, 6 aa, synthetic construct
GGGPAP

SEQ ID NO: 14942 - protein, 11 aa, synthetic construct
GSSGGSEAAAK

SEQ ID NO: 14943 - protein, 33 aa, synthetic construct; identical to SEQ ID NO: 5006

SEQ ID NO: 14944 - protein, 11 aa, synthetic construct
GSSGGGEAAAK

SEQ ID NO: 14945 - protein, 15 aa, synthetic construct
GSSGSSGSSGSSGSS

SEQ ID NO: 14946 - protein, 11 aa, synthetic construct
GGSEAAAKPAP

SEQ ID NO: 14947 - protein, 10 aa, synthetic construct
GGGGSGGGGS

SEQ ID NO: 14948 - protein, 11 aa, synthetic construct
GSSEAAAKPAP

SEQ ID NO: 14949 - protein, 15 aa, synthetic construct
GGGGSEAAAKGGGGS

SEQ ID NO: 14950 - protein, 11 aa, synthetic construct
PAPGSSEAAAK

SEQ ID NO: 14951 - protein, 11 aa, synthetic construct
EAAAKGGSGGG

SEQ ID NO: 14952 - protein, 9 aa, synthetic construct
GGGPAPGGS

SEQ ID NO: 14953 - protein, 11 aa, synthetic construct
GSSEAAAKGGS

SEQ ID NO: 14954 - protein, 11 aa, synthetic construct
EAAAKGGSGGG

SEQ ID NO: 14955 - protein, 9 aa, synthetic construct
GSSGGSPAP

SEQ ID NO: 14956 - protein, 5 aa, synthetic construct
PAPAP

SEQ ID NO: 14957 - protein, 9 aa, synthetic construct
PAPGGSGSS

SEQ ID NO: 14958 - protein, 11 aa, synthetic construct
EAAAKGGGGGS

SEQ ID NO: 14959 - protein, 11 aa, synthetic construct
PAPEAAAKGGS

SEQ ID NO: 14960 - protein, 11 aa, synthetic construct
GSSEAAAKPAP

SEQ ID NO: 14961 - protein, 6 aa, synthetic construct
GGSGGS

SEQ ID NO: 14962 - protein, 11 aa, synthetic construct
GSSEAAAKGGG

SEQ ID NO: 14963 - protein, 5 aa, synthetic construct
EAAAK

SEQ ID NO: 14964 - protein, 6 aa, synthetic construct
GSSPAP

SEQ ID NO: 14965 - protein, 11 aa, synthetic construct
EAAAKPAPGGG

SEQ ID NO: 14966 - protein, 15 aa, synthetic construct
GGGGSEAAAKGGGGS

SEQ ID NO: 14967 - protein, 11 aa, synthetic construct
EAAAKGSSGGS

SEQ ID NO: 14968 - protein, 12 aa, synthetic construct
GSAGSAAGSGEF

SEQ ID NO: 14969 - protein, 11 aa, synthetic construct
PAPEAAAKGGS

SEQ ID NO: 14970 - protein, 30 aa, synthetic construct; identical to SEQ ID NO: 5130

SEQ ID NO: 14971 - skipped

SEQ ID NO: 14972 - protein, 11 aa, synthetic construct
GGSEAAAKPAP

SEQ ID NO: 14973 - protein, 11 aa, synthetic construct
EAAAKGSSGGG

SEQ ID NO: 14974 - protein, 11 aa, synthetic construct
GGSEAAAKGGG

SEQ ID NO: 14975 - protein, 6 aa, synthetic construct
GGSGGS

SEQ ID NO: 14976 - protein, 11 aa, synthetic construct
GSSEAAAKGGS

SEQ ID NO: 14977 - protein, 11 aa, synthetic construct
PAPAPAPAPAP

SEQ ID NO: 14978 - protein, 11 aa, synthetic construct
GGSEAAAKGGG

SEQ ID NO: 14979 - protein, 9 aa, synthetic construct
PAPAPAPAP

SEQ ID NO: 14980 - protein, 25 aa, synthetic construct
GGGGSGGGGSGGGGSGGGGSGGGGS

SEQ ID NO: 14981 - protein, 11 aa, synthetic construct
PAPGGSEAAAK

SEQ ID NO: 14982 - protein, 9 aa, synthetic construct
GGSGGGPAP

SEQ ID NO: 14983 - protein, 18 aa, synthetic construct
GSSGSSGSSGSSGSSGSS

SEQ ID NO: 14984 - protein, 11 aa, synthetic construct
GGSEAAAKPAP

SEQ ID NO: 14985 - protein, 11 aa, synthetic construct
GGGEAAAKGSS

SEQ ID NO: 14986 - protein, 9 aa, synthetic construct
GGGPAPGGS

SEQ ID NO: 14987 - protein, 6 aa, synthetic construct
PAPGGG

SEQ ID NO: 14988 - protein, 11 aa, synthetic construct
GGSEAAAKGSS

SEQ ID NO: 14989 - protein, 11 aa, synthetic construct
GGGEAAAKGSS

SEQ ID NO: 14990 - protein, 11 aa, synthetic construct
GGGEAAAKGSS

SEQ ID NO: 14991 - protein, 20 aa, synthetic construct
EAAAKEAAAKEAAAKEAAAK

SEQ ID NO: 14992 - protein, 11 aa, synthetic construct
EAAAKGGGPAP

SEQ ID NO: 14993 - protein, 11 aa, synthetic construct
EAAAKGGGGSS

SEQ ID NO: 14994 - protein, 25 aa, synthetic construct
EAAAKEAAAKEAAAKEAAAKEAAAK

SEQ ID NO: 14995 - protein, 9 aa, synthetic construct
GSSGGGGGS

SEQ ID NO: 14996 - protein, 7 aa, synthetic construct
PAPAPAP

SEQ ID NO: 14997 - protein, 12 aa, synthetic construct
GGSGGSGGSGGS

SEQ ID NO: 14998 - protein, 8 aa, synthetic construct
GGGEAAAK

SEQ ID NO: 14999 - protein, 6 aa, synthetic construct
GGGGGS

SEQ ID NO: 15000 - protein, 6 aa, synthetic construct
GGSGGS

SEQ ID NO: 15001 - protein, 8 aa, synthetic construct
EAAAKGGS

SEQ ID NO: 15002 - protein, 6 aa, synthetic construct
GGGGSS

SEQ ID NO: 15003 - protein, 5 aa, synthetic construct
PAPAP

SEQ ID NO: 15004 - protein, 6 aa, synthetic construct
PAPGGG

SEQ ID NO: 15005 - protein, 11 aa, synthetic construct
EAAAKGGGGSS

SEQ ID NO: 15006 - protein, 11 aa, synthetic construct
PAPAPAPAPAP

SEQ ID NO: 15007 - protein, 6 aa, synthetic construct
GGGPAP

SEQ ID NO: 15008 - protein, 9 aa, synthetic construct
GSSGGSGGG

SEQ ID NO: 15009 - protein, 11 aa, synthetic construct
EAAAKGGGPAP

SEQ ID NO: 15010 - protein, 12 aa, synthetic construct
GSSGSSGSSGSS

SEQ ID NO: 15011 - protein, 10 aa, synthetic construct
GGGGSGGGGS

SEQ ID NO: 15012 - protein, 9 aa, synthetic construct
GSSGGSGGG

SEQ ID NO: 15013 - protein, 11 aa, synthetic construct
GGGEAAAKPAP

SEQ ID NO: 15014 - protein, 8 aa, synthetic construct
PAPEAAAK

SEQ ID NO: 15015 - protein, 12 aa, synthetic construct
GSSGSSGSSGSS

SEQ ID NO: 15016 - protein, 11 aa, synthetic construct
GSSEAAAKPAP

SEQ ID NO: 15017 - protein, 11 aa, synthetic construct
PAPEAAAKGGG

SEQ ID NO: 15018 - protein, 11 aa, synthetic construct
GGSEAAAKGSS

SEQ ID NO: 15019 - protein, 11 aa, synthetic construct
EAAAKPAPGGS

SEQ ID NO: 15020 - protein, 11 aa, synthetic construct
GSSGGSEAAAK

SEQ ID NO: 15021 - protein, 30 aa, synthetic construct; identical to SEQ ID NO: 5112

SEQ ID NO: 15022 - protein, 11 aa, synthetic construct
EAAAKGGGGSS

SEQ ID NO: 15023 - protein, 9 aa, synthetic construct
GGGGGSGSS

SEQ ID NO: 15024 - protein, 5 aa, synthetic construct
PAPAP

SEQ ID NO: 15025 - protein, 9 aa, synthetic construct
GGGGGSPAP

SEQ ID NO: 15026 - protein, 6 aa, synthetic construct
GGGPAP

SEQ ID NO: 15027 - protein, 15 aa, synthetic construct
EAAAKGGGGSEAAAK

SEQ ID NO: 15028 - protein, 11 aa, synthetic construct
GGSEAAAKGGG

SEQ ID NO: 15029 - protein, 9 aa, synthetic construct
GSSPAPGGS

SEQ ID NO: 15030 - protein, 7 aa, synthetic construct
GGGGGGG

SEQ ID NO: 15031 - protein, 8 aa, synthetic construct
EAAAKGSS

SEQ ID NO: 15032 - protein, 15 aa, synthetic construct
EAAAKGGGGSEAAAK

SEQ ID NO: 15033 - protein, 15 aa, synthetic construct
GGGGSEAAAKGGGGS

SEQ ID NO: 15034 - protein, 11 aa, synthetic construct
EAAAKGGGGSS

SEQ ID NO: 15035 - protein, 11 aa, synthetic construct
GGGEAAAKGGS

SEQ ID NO: 15036 - protein, 11 aa, synthetic construct
PAPEAAAKGGG

SEQ ID NO: 15037 - protein, 9 aa, synthetic construct
GGGGSSGGS

SEQ ID NO: 15038 - protein, 6 aa, synthetic construct
GGSGSS

SEQ ID NO: 15039 - protein, 13 aa, synthetic construct
PAPAPAPAPAPAP

SEQ ID NO: 15040 - protein, 8 aa, synthetic construct
EAAAKGGG

SEQ ID NO: 15041 - protein, 13 aa, synthetic construct
PAPAPAPAPAPAP

SEQ ID NO: 15042 - protein, 15 aa, synthetic construct
GSSGSSGSSGSSGSS

SEQ ID NO: 15043 - protein, 6 aa, synthetic construct
GGGGSS

SEQ ID NO: 15044 - protein, 11 aa, synthetic construct
PAPGGGEAAAK

SEQ ID NO: 15045 - protein, 11 aa, synthetic construct
GGSGGGEAAAK

SEQ ID NO: 15046 - protein, 11 aa, synthetic construct
PAPAPAPAPAP

SEQ ID NO: 15047 - protein, 11 aa, synthetic construct
GGGEAAAKGGS

SEQ ID NO: 15048 - protein, 11 aa, synthetic construct
GGGEAAAKGSS

SEQ ID NO: 15049 - protein, 11 aa, synthetic construct
GSSPAPEAAAK

SEQ ID NO: 15050 - protein, 25 aa, synthetic construct
EAAAKEAAAKEAAAKEAAAKEAAAK

SEQ ID NO: 15051 - protein, 6 aa, synthetic construct
PAPGGG

SEQ ID NO: 15052 - protein, 11 aa, synthetic construct
GSSEAAAKGGG

SEQ ID NO: 15053 - protein, 11 aa, synthetic construct
GGGGSSEAAAK

SEQ ID NO: 15054 - protein, 9 aa, synthetic construct
PAPGSSGGS

SEQ ID NO: 15055 - protein, 18 aa, synthetic construct
GSSGSSGSSGSSGSSGSS

SEQ ID NO: 15056 - protein, 11 aa, synthetic construct
EAAAKGSSGGG

SEQ ID NO: 15057 - protein, 9 aa, synthetic construct
PAPGGGGSS

SEQ ID NO: 15058 - protein, 6 aa, synthetic construct
GGSPAP

SEQ ID NO: 15059 - protein, 15 aa, synthetic construct
GGSGGSGGSGGSGGS

SEQ ID NO: 15060 - protein, 9 aa, synthetic construct
PAPAPAPAP

SEQ ID NO: 15061 - protein, 5 aa, synthetic construct
GGGGG

SEQ ID NO: 15062 - protein, 12 aa, synthetic construct
GGSGGSGGSGGS

SEQ ID NO: 15063 - protein, 15 aa, synthetic construct
GSSGSSGSSGSSGSS

SEQ ID NO: 15064 - protein, 11 aa, synthetic construct
PAPGGSEAAAK

SEQ ID NO: 15065 - protein, 9 aa, synthetic construct
PAPAPAPAP

SEQ ID NO: 15066 - protein, 9 aa, synthetic construct
PAPGGGGSS

SEQ ID NO: 15067 - protein, 6 aa, synthetic construct
GGSGSS

SEQ ID NO: 15068 - protein, 20 aa, synthetic construct
EAAAKEAAAKEAAAKEAAAK

SEQ ID NO: 15069 - protein, 11 aa, synthetic construct
EAAAKGGSGGG

SEQ ID NO: 15070 - protein, 9 aa, synthetic construct
PAPGGGGSS

SEQ ID NO: 15071 - protein, 11 aa, synthetic construct
EAAAKGGGGGS

SEQ ID NO: 15072 - protein, 6 aa, synthetic construct
GGGGGS

SEQ ID NO: 15073 - protein, 11 aa, synthetic construct
GGGEAAAKGGS

SEQ ID NO: 15074 - protein, 11 aa, synthetic construct
EAAAKPAPGGG

SEQ ID NO: 15075 - protein, 9 aa, synthetic construct
GGSGGGPAP

SEQ ID NO: 15076 - protein, 11 aa, synthetic construct
GSSEAAAKPAP

SEQ ID NO: 15077 - protein, 13 aa, synthetic construct
PAPAPAPAPAPAP

SEQ ID NO: 15078 - protein, 9 aa, synthetic construct
GGSPAPGGG

SEQ ID NO: 15079 - protein, 11 aa, synthetic construct
GGSGGGEAAAK

SEQ ID NO: 15080 - protein, 5 aa, synthetic construct
PAPAP

SEQ ID NO: 15081 - protein, 8 aa, synthetic construct
GSSEAAAK

SEQ ID NO: 15082 - protein, 15 aa, synthetic construct
GGGGSGGGGSGGGGS

SEQ ID NO: 15083 - protein, 9 aa, synthetic construct
GSSGSSGSS

SEQ ID NO: 15084 - protein, 11 aa, synthetic construct
EAAAKGGSGGG

SEQ ID NO: 15085 - protein, 6 aa, synthetic construct
GSSPAP

SEQ ID NO: 15086 - protein, 8 aa, synthetic construct
GGGEAAAK

SEQ ID NO: 15087 - protein, 46 aa, synthetic construct; identical to SEQ ID NO: 5217

SEQ ID NO: 15088 - protein, 6 aa, synthetic construct
PAPGGS

SEQ ID NO: 15089 - protein, 9 aa, synthetic construct
PAPGSSGGS

SEQ ID NO: 15090 - protein, 8 aa, synthetic construct
PAPEAAAK

SEQ ID NO: 15091 - protein, 5 aa, synthetic construct
PAPAP

SEQ ID NO: 15092 - protein, 8 aa, synthetic construct
EAAAKGGS

SEQ ID NO: 15093 - protein, 15 aa, synthetic construct
GGGGSEAAAKGGGGS

SEQ ID NO: 15094 - protein, 11 aa, synthetic construct
EAAAKGSSGGS

SEQ ID NO: 15095 - protein, 9 aa, synthetic construct
PAPGGSGSS

SEQ ID NO: 15096 - protein, 11 aa, synthetic construct
PAPGGSEAAAK

SEQ ID NO: 15097 - protein, 11 aa, synthetic construct
PAPGSSEAAAK

SEQ ID NO: 15098 - protein, 9 aa, synthetic construct
PAPGSSGGG

SEQ ID NO: 15099 - protein, 11 aa, synthetic construct
GSSGGGEAAAK

SEQ ID NO: 15100 - protein, 6 aa, synthetic construct
GGGGGG

SEQ ID NO: 15101 - protein, 11 aa, synthetic construct
PAPEAAAKGGG

SEQ ID NO: 15102 - protein, 11 aa, synthetic construct
GGGEAAAKGGS

SEQ ID NO: 15103 - protein, 11 aa, synthetic construct
PAPAPAPAPAP

SEQ ID NO: 15104 - protein, 18 aa, synthetic construct
GSSGSSGSSGSSGSSGSS

SEQ ID NO: 15105 - protein, 11 aa, synthetic construct
EAAAKGGGPAP

SEQ ID NO: 15106 - protein, 11 aa, synthetic construct
PAPAPAPAPAP

SEQ ID NO: 15107 - protein, 11 aa, synthetic construct
PAPGGSEAAAK

SEQ ID NO: 15108 - protein, 9 aa, synthetic construct
GSSGGGPAP

SEQ ID NO: 15109 - protein, 9 aa, synthetic construct
GGGGGSPAP

SEQ ID NO: 15110 - protein, 9 aa, synthetic construct
GSSGGSGGG

SEQ ID NO: 15111 - protein, 5 aa, synthetic construct
PAPAP

SEQ ID NO: 15112 - protein, 9 aa, synthetic construct
GSSGGGPAP

SEQ ID NO: 15113 - protein, 6 aa, synthetic construct
GGSGSS

SEQ ID NO: 15114 - protein, 11 aa, synthetic construct
GGSPAPEAAAK

SEQ ID NO: 15115 - protein, 11 aa, synthetic construct
EAAAKGGSGGG

SEQ ID NO: 15116 - protein, 11 aa, synthetic construct
GGGGSSEAAAK

SEQ ID NO: 15117 - protein, 9 aa, synthetic construct
GGGGGSGSS

SEQ ID NO: 15118 - protein, 9 aa, synthetic construct
GGGGSSGGS

SEQ ID NO: 15119 - protein, 15 aa, synthetic construct
EAAAKGGGGSEAAAK

SEQ ID NO: 15120 - protein, 11 aa, synthetic construct
PAPGGGEAAAK

SEQ ID NO: 15121 - protein, 11 aa, synthetic construct
PAPEAAAKGGG

SEQ ID NO: 15122 - protein, 46 aa, synthetic construct; identical to SEQ ID NO: 5217

SEQ ID NO: 15123 - protein, 11 aa, synthetic construct
GSSGGSEAAAK

SEQ ID NO: 15124 - protein, 6 aa, synthetic construct
GGSPAP

SEQ ID NO: 15125 - protein, 8 aa, synthetic construct
GSSEAAAK

SEQ ID NO: 15126 - protein, 8 aa, synthetic construct
GSSEAAAK

SEQ ID NO: 15127 - protein, 11 aa, synthetic construct
EAAAKGSSGGS

SEQ ID NO: 15128 - protein, 11 aa, synthetic construct
GGGEAAAKPAP

SEQ ID NO: 15129 - protein, 11 aa, synthetic construct
EAAAKGGSPAP

SEQ ID NO: 15130 - protein, 11 aa, synthetic construct
GSSEAAAKPAP

SEQ ID NO: 15131 - protein, 9 aa, synthetic construct
GSSGSSGSS

SEQ ID NO: 15132 - protein, 20 aa, synthetic construct
EAAAKEAAAKEAAAKEAAAK

SEQ ID NO: 15133 - protein, 5 aa, synthetic construct
EAAAK

SEQ ID NO: 15134 - protein, 6 aa, synthetic construct
PAPGSS

SEQ ID NO: 15135 - protein, 6 aa, synthetic construct
PAPGGS

SEQ ID NO: 15136 - protein, 6 aa, synthetic construct
GGSGGS

SEQ ID NO: 15137 - protein, 33 aa, synthetic construct; identical to SEQ ID NO: 5006

SEQ ID NO: 15138 - protein, 11 aa, synthetic construct
GGSGGGEAAAK

SEQ ID NO: 15139 - protein, 9 aa, synthetic construct
PAPGSSGGG

SEQ ID NO: 15140 - protein, 6 aa, synthetic construct
GGSGGS

SEQ ID NO: 15141 - protein, 6 aa, synthetic construct
GSSGSS

SEQ ID NO: 15142 - protein, 11 aa, synthetic construct
PAPGGSEAAAK

SEQ ID NO: 15143 - protein, 12 aa, synthetic construct
GSAGSAAGSGEF

SEQ ID NO: 15144 - protein, 6 aa, synthetic construct
PAPGGG

SEQ ID NO: 15145 - protein, 11 aa, synthetic construct
EAAAKGGSGSS

SEQ ID NO: 15146 - protein, 11 aa, synthetic construct
GSSGGGEAAAK

SEQ ID NO: 15147 - protein, 9 aa, synthetic construct
GGSGGGPAP

SEQ ID NO: 15148 - protein, 13 aa, synthetic construct
PAPAPAPAPAPAP

SEQ ID NO: 15149 - protein, 16 aa, synthetic construct
SGSETPGTSESATPES

SEQ ID NO: 15150 - protein, 9 aa, synthetic construct
GGSGGSGGS

SEQ ID NO: 15151 - protein, 6 aa, synthetic construct
GGGGSS

SEQ ID NO: 15152 - protein, 11 aa, synthetic construct
GGGGGSEAAAK

SEQ ID NO: 15153 - protein, 16 aa, synthetic construct
SGSETPGTSESATPES

SEQ ID NO: 15154 - protein, 7 aa, synthetic construct
PAPAPAP

SEQ ID NO: 15155 - protein, 11 aa, synthetic construct
PAPEAAAKGSS

SEQ ID NO: 15156 - protein, 15 aa, synthetic construct
GSSGSSGSSGSSGSS

SEQ ID NO: 15157 - protein, 9 aa, synthetic construct
GGGPAPGSS

SEQ ID NO: 15158 - protein, 9 aa, synthetic construct
GGSGGGGSS

SEQ ID NO: 15159 - protein, 16 aa, synthetic construct
SGSETPGTSESATPES

SEQ ID NO: 15160 - protein, 11 aa, synthetic construct
EAAAKGSSGGS

SEQ ID NO: 15161 - protein, 11 aa, synthetic construct
GSSPAPEAAAK

SEQ ID NO: 15162 - protein, 11 aa, synthetic construct
GSSPAPEAAAK

SEQ ID NO: 15163 - protein, 9 aa, synthetic construct
GGGGSSPAP

SEQ ID NO: 15164 - protein, 11 aa, synthetic construct
PAPGGGEAAAK

SEQ ID NO: 15165 - protein, 11 aa, synthetic construct
PAPEAAAKGGS

SEQ ID NO: 15166 - protein, 18 aa, synthetic construct
GSSGSSGSSGSSGSSGSS

SEQ ID NO: 15167 - protein, 9 aa, synthetic construct
GGSPAPGSS

SEQ ID NO: 15168 - protein, 9 aa, synthetic construct
GGGPAPGGS

SEQ ID NO: 15169 - protein, 9 aa, synthetic construct
GGGPAPGSS

SEQ ID NO: 15170 - protein, 8 aa, synthetic construct
EAAAKPAP

SEQ ID NO: 15171 - protein, 15 aa, synthetic construct
EAAAKEAAAKEAAAK

SEQ ID NO: 15172 - protein, 11 aa, synthetic construct
GSSGGSEAAAK

SEQ ID NO: 15173 - protein, 9 aa, synthetic construct
PAPGGGGGS

SEQ ID NO: 15174 - protein, 8 aa, synthetic construct
GGGEAAAK

SEQ ID NO: 15175 - protein, 11 aa, synthetic construct
EAAAKGGGPAP

SEQ ID NO: 15176 - protein, 9 aa, synthetic construct
GGSGSSGGG

SEQ ID NO: 15177 - protein, 11 aa, synthetic construct
PAPEAAAKGSS

SEQ ID NO: 15178 - protein, 9 aa, synthetic construct
PAPGGGGGS

SEQ ID NO: 15179 - protein, 11 aa, synthetic construct
EAAAKGGGGGS

SEQ ID NO: 15180 - protein, 6 aa, synthetic construct
GGGGGS

SEQ ID NO: 15181 - protein, 25 aa, synthetic construct
GGGGSGGGGSGGGGSGGGGSGGGGS

SEQ ID NO: 15182 - protein, 11 aa, synthetic construct
EAAAKGGSPAP

SEQ ID NO: 15183 - protein, 9 aa, synthetic construct
GGGGSSPAP

SEQ ID NO: 15184 - protein, 9 aa, synthetic construct
GGGGSSGGS

SEQ ID NO: 15185 - protein, 9 aa, synthetic construct
PAPGSSGGS

SEQ ID NO: 15186 - protein, 6 aa, synthetic construct
GGGGGS

SEQ ID NO: 15187 - protein, 9 aa, synthetic construct
GGSGSSGGG

SEQ ID NO: 15188 - protein, 11 aa, synthetic construct
GSSGGSEAAAK

SEQ ID NO: 15189 - protein, 20 aa, synthetic construct
EAAAKEAAAKEAAAKEAAAK

SEQ ID NO: 15190 - protein, 11 aa, synthetic construct
GGSEAAAKGGG

SEQ ID NO: 15191 - protein, 33 aa, synthetic construct; identical to SEQ ID NO: 5006

SEQ ID NO: 15192 - protein, 11 aa, synthetic construct
GSSEAAAKGGS

SEQ ID NO: 15193 - protein, 30 aa, synthetic construct; identical to SEQ ID NO: 5112

SEQ ID NO: 15194 - protein, 8 aa, synthetic construct
GGGEAAAK

SEQ ID NO: 15195 - protein, 9 aa, synthetic construct
PAPAPAPAP

SEQ ID NO: 15196 - protein, 9 aa, synthetic construct
PAPGSSGGG

SEQ ID NO: 15197 - protein, 15 aa, synthetic construct
GSSGSSGSSGSSGSS

SEQ ID NO: 15198 - protein, 6 aa, synthetic construct
GGSPAP

SEQ ID NO: 15199 - protein, 30 aa, synthetic construct; identical to SEQ ID NO: 5112

SEQ ID NO: 15200 - protein, 8 aa, synthetic construct
PAPEAAAK

SEQ ID NO: 15201 - protein, 9 aa, synthetic construct
PAPGSSGGG

SEQ ID NO: 15202 - protein, 11 aa, synthetic construct
GGGGGSEAAAK

SEQ ID NO: 15203 - protein, 11 aa, synthetic construct
PAPAPAPAPAP

SEQ ID NO: 15204 - protein, 11 aa, synthetic construct
EAAAKGGSGSS

SEQ ID NO: 15205 - protein, 20 aa, synthetic construct
EAAAKEAAAKEAAAKEAAAK

SEQ ID NO: 15206 - protein, 9 aa, synthetic construct
PAPAPAPAP

SEQ ID NO: 15207 - protein, 9 aa, synthetic construct
GGGPAPGSS

SEQ ID NO: 15208 - protein, 11 aa, synthetic construct
PAPEAAAKGSS

SEQ ID NO: 15209 - protein, 9 aa, synthetic construct
GGSPAPGGG

SEQ ID NO: 15210 - protein, 20 aa, synthetic construct
GGGGSGGGGSGGGGSGGGGS

SEQ ID NO: 15211 - protein, 8 aa, synthetic construct
EAAAKGGS

SEQ ID NO: 15212 - protein, 9 aa, synthetic construct
PAPGSSGGS

SEQ ID NO: 15213 - protein, 10 aa, synthetic construct
GGGGSGGGGS

SEQ ID NO: 15214 - protein, 6 aa, synthetic construct
GGSGGS

SEQ ID NO: 15215 - protein, 15 aa, synthetic construct
EAAAKGGGGSEAAAK

SEQ ID NO: 15216 - protein, 20 aa, synthetic construct
EAAAKEAAAKEAAAKEAAAK

SEQ ID NO: 15217 - protein, 11 aa, synthetic construct
PAPGGGEAAAK

SEQ ID NO: 15218 - protein, 6 aa, synthetic construct
GSSGSS

SEQ ID NO: 15219 - protein, 11 aa, synthetic construct
EAAAKGGGGGS

SEQ ID NO: 15220 - protein, 11 aa, synthetic construct
GSSPAPEAAAK

SEQ ID NO: 15221 - protein, 8 aa, synthetic construct
GGGEAAAK

SEQ ID NO: 15222 - protein, 11 aa, synthetic construct
PAPEAAAKGSS

SEQ ID NO: 15223 - protein, 11 aa, synthetic construct
GGGGSSEAAAK

SEQ ID NO: 15224 - protein, 9 aa, synthetic construct
PAPGSSGGS

SEQ ID NO: 15225 - protein, 11 aa, synthetic construct
EAAAKGGGGGS

SEQ ID NO: 15226 - protein, 20 aa, synthetic construct
GGGGSGGGGSGGGGSGGGGS

SEQ ID NO: 15227 - protein, 11 aa, synthetic construct
EAAAKGGGGSS

SEQ ID NO: 15228 - protein, 11 aa, synthetic construct
GGGEAAAKGGS

SEQ ID NO: 15229 - protein, 9 aa, synthetic construct
GGGGGSPAP

SEQ ID NO: 15230 - protein, 11 aa, synthetic construct
GGSGGGEAAAK

SEQ ID NO: 15231 - protein, 9 aa, synthetic construct
PAPGGGGGS

SEQ ID NO: 15232 - protein, 15 aa, synthetic construct
EAAAKGGGGSEAAAK

SEQ ID NO: 15233 - protein, 11 aa, synthetic construct
PAPEAAAKGSS

SEQ ID NO: 15234 - protein, 11 aa, synthetic construct
GGSEAAAKGGG

SEQ ID NO: 15235 - protein, 15 aa, synthetic construct
GGSGGSGGSGGSGGS

SEQ ID NO: 15236 - protein, 15 aa, synthetic construct
GGSGGSGGSGGSGGS

SEQ ID NO: 15237 - protein, 6 aa, synthetic construct
GGGGGG

SEQ ID NO: 15238 - protein, 9 aa, synthetic construct
GGGGGSGSS

SEQ ID NO: 15239 - protein, 11 aa, synthetic construct
GGSEAAAKPAP

SEQ ID NO: 15240 - protein, 9 aa, synthetic construct
GGGPAPGSS

SEQ ID NO: 15241 - protein, 6 aa, synthetic construct
GGGGGS

SEQ ID NO: 15242 - protein, 11 aa, synthetic construct
GGSPAPEAAAK

SEQ ID NO: 15243 - protein, 11 aa, synthetic construct
PAPEAAAKGGS

SEQ ID NO: 15244 - protein, 11 aa, synthetic construct
EAAAKGGSGSS

SEQ ID NO: 15245 - protein, 11 aa, synthetic construct
GGGPAPEAAAK

SEQ ID NO: 15246 - protein, 9 aa, synthetic construct
PAPGGGGSS

SEQ ID NO: 15247 - protein, 9 aa, synthetic construct
GSSPAPGGG

SEQ ID NO: 15248 - protein, 9 aa, synthetic construct
GGGGSSGGS

SEQ ID NO: 15249 - protein, 11 aa, synthetic construct
EAAAKGGGGGS

SEQ ID NO: 15250 - protein, 11 aa, synthetic construct
GGSEAAAKGSS

SEQ ID NO: 15251 - protein, 6 aa, synthetic construct
GSSGGG

SEQ ID NO: 15252 - protein, 12 aa, synthetic construct
GGSGGSGGSGGS

SEQ ID NO: 15253 - protein, 8 aa, synthetic construct
EAAAKPAP

SEQ ID NO: 15254 - protein, 9 aa, synthetic construct
GGGGSSGGS

SEQ ID NO: 15255 - protein, 6 aa, synthetic construct
GGSGGS

SEQ ID NO: 15256 - protein, 11 aa, synthetic construct
EAAAKGGGGGS

SEQ ID NO: 15257 - protein, 30 aa, synthetic construct; identical to SEQ ID NO: 5112

SEQ ID NO: 15258 - protein, 9 aa, synthetic construct
GGSGGSGGS

SEQ ID NO: 15259 - protein, 11 aa, synthetic construct
GGGGGSEAAAK

SEQ ID NO: 15260 - protein, 9 aa, synthetic construct
GGSGSSPAP

SEQ ID NO: 15261 - protein, 15 aa, synthetic construct
EAAAKEAAAKEAAAK

SEQ ID NO: 15262 - protein, 11 aa, synthetic construct
PAPEAAAKGGS

SEQ ID NO: 15263 - protein, 11 aa, synthetic construct
GGSGSSEAAAK

SEQ ID NO: 15264 - protein, 9 aa, synthetic construct
GGGGGSGSS

SEQ ID NO: 15265 - protein, 9 aa, synthetic construct
GGGPAPGGS

SEQ ID NO: 15266 - protein, 16 aa, synthetic construct
SGSETPGTSESATPES

SEQ ID NO: 15267 - protein, 9 aa, synthetic construct
GSSPAPGGS

SEQ ID NO: 15268 - protein, 15 aa, synthetic construct
GSSGSSGSSGSSGSS

SEQ ID NO: 15269 - protein, 11 aa, synthetic construct
EAAAKGGGPAP

SEQ ID NO: 15270 - protein, 6 aa, synthetic construct
GSSGGG

SEQ ID NO: 15271 - protein, 11 aa, synthetic construct
GGGEAAAKPAP

SEQ ID NO: 15272 - protein, 9 aa, synthetic construct
PAPGGSGGG

SEQ ID NO: 15273 - protein, 9 aa, synthetic construct
GSSGGSGGG

SEQ ID NO: 15274 - protein, 6 aa, synthetic construct
GGSGGG

SEQ ID NO: 15275 - protein, 11 aa, synthetic construct
EAAAKGGSPAP

SEQ ID NO: 15276 - protein, 11 aa, synthetic construct
GGSPAPEAAAK

SEQ ID NO: 15277 - protein, 11 aa, synthetic construct
GSSGGSEAAAK

SEQ ID NO: 15278 - protein, 12 aa, synthetic construct
GSAGSAAGSGEF

SEQ ID NO: 15279 - protein, 9 aa, synthetic construct
PAPGGSGSS

SEQ ID NO: 15280 - protein, 11 aa, synthetic construct
GGSEAAAKGGG

SEQ ID NO: 15281 - protein, 9 aa, synthetic construct
GGSPAPGSS

SEQ ID NO: 15282 - protein, 9 aa, synthetic construct
GSSGGSGGG

SEQ ID NO: 15283 - protein, 11 aa, synthetic construct
PAPEAAAKGGG

SEQ ID NO: 15284 - protein, 11 aa, synthetic construct
GGGEAAAKPAP

SEQ ID NO: 15285 - protein, 8 aa, synthetic construct
GGSEAAAK

SEQ ID NO: 15286 - protein, 11 aa, synthetic construct
GGGEAAAKGSS

SEQ ID NO: 15287 - protein, 11 aa, synthetic construct
GGGGGSEAAAK

SEQ ID NO: 15288 - protein, 11 aa, synthetic construct
PAPAPAPAPAP

SEQ ID NO: 15289 - protein, 11 aa, synthetic construct
PAPAPAPAPAP

SEQ ID NO: 15290 - protein, 9 aa, synthetic construct
GGGGSSGGS

SEQ ID NO: 15291 - protein, 11 aa, synthetic construct
PAPGGSEAAAK

SEQ ID NO: 15292 - protein, 11 aa, synthetic construct
PAPAPAPAPAP

SEQ ID NO: 15293 - protein, 11 aa, synthetic construct
EAAAKPAPGGG

SEQ ID NO: 15294 - protein, 8 aa, synthetic construct
GGSEAAAK

SEQ ID NO: 15295 - protein, 11 aa, synthetic construct
GGGEAAAKGSS

SEQ ID NO: 15296 - protein, 9 aa, synthetic construct
GGSPAPGSS

SEQ ID NO: 15297 - protein, 11 aa, synthetic construct
GGSEAAAKPAP

SEQ ID NO: 15298 - protein, 11 aa, synthetic construct
PAPEAAAKGGG

SEQ ID NO: 15299 - protein, 11 aa, synthetic construct
GSSEAAAKPAP

SEQ ID NO: 15300 - protein, 15 aa, synthetic construct
GGGGSEAAAKGGGGS

SEQ ID NO: 15301 - protein, 11 aa, synthetic construct
GSSEAAAKGGS

SEQ ID NO: 15302 - protein, 15 aa, synthetic construct
GSSGSSGSSGSSGSS

SEQ ID NO: 15303 - protein, 9 aa, synthetic construct
GGGGGSPAP

SEQ ID NO: 15304 - protein, 8 aa, synthetic construct
GGSEAAAK

SEQ ID NO: 15305 - protein, 11 aa, synthetic construct
GSSPAPEAAAK

SEQ ID NO: 15306 - protein, 9 aa, synthetic construct
GGGPAPGGS

SEQ ID NO: 15307 - protein, 11 aa, synthetic construct
GGSPAPEAAAK

SEQ ID NO: 15308 - protein, 11 aa, synthetic construct
GGSEAAAKPAP

SEQ ID NO: 15309 - protein, 9 aa, synthetic construct
PAPAPAPAP

SEQ ID NO: 15310 - protein, 9 aa, synthetic construct
GSSPAPGGG

SEQ ID NO: 15311 - protein, 12 aa, synthetic construct
GSSGSSGSSGSS

SEQ ID NO: 15312 - protein, 11 aa, synthetic construct
GGSEAAAKGSS

SEQ ID NO: 15313 - protein, 9 aa, synthetic construct
GGSGSSGGG

SEQ ID NO: 15314 - protein, 18 aa, synthetic construct
GSSGSSGSSGSSGSSGSS

SEQ ID NO: 15315 - protein, 11 aa, synthetic construct
GGSEAAAKPAP

SEQ ID NO: 15316 - protein, 9 aa, synthetic construct
GSSGGSGGG

SEQ ID NO: 15317 - protein, 46 aa, synthetic construct; identical to SEQ ID NO: 5217

SEQ ID NO: 15318 - protein, 11 aa, synthetic construct
GGSPAPEAAAK

SEQ ID NO: 15319 - protein, 11 aa, synthetic construct
GGGGSSEAAAK

SEQ ID NO: 15320 - protein, 11 aa, synthetic construct
GGSGGGEAAAK

SEQ ID NO: 15321 - protein, 15 aa, synthetic construct
GGGGSEAAAKGGGGS

SEQ ID NO: 15322 - protein, 11 aa, synthetic construct
GGSGSSEAAAK

SEQ ID NO: 15323 - protein, 11 aa, synthetic construct
GGSEAAAKPAP

SEQ ID NO: 15324 - protein, 11 aa, synthetic construct
GSSGGGEAAAK

SEQ ID NO: 15325 - protein, 6 aa, synthetic construct
GSSGGS

SEQ ID NO: 15326 - protein, 11 aa, synthetic construct
GGSEAAAKPAP

SEQ ID NO: 15327 - protein, 11 aa, synthetic construct
GSSGGSEAAAK

SEQ ID NO: 15328 - protein, 11 aa, synthetic construct
GSSPAPEAAAK

SEQ ID NO: 15329 - protein, 18 aa, synthetic construct
GGSGGSGGSGGSGGSGGS

SEQ ID NO: 15330 - protein, 15 aa, synthetic construct
GSSGSSGSSGSSGSS

SEQ ID NO: 15331 - protein, 11 aa, synthetic construct
EAAAKGGGGSS

SEQ ID NO: 15332 - protein, 11 aa, synthetic construct
GGGEAAAKGSS

SEQ ID NO: 15333-15400 - skipped (68 entries)

SEQ ID NO: 15401 - protein, 46 aa, synthetic construct; identical to SEQ ID NO: 5217

SEQ ID NO: 15402 - protein, 46 aa, synthetic construct; identical to SEQ ID NO: 5217

SEQ ID NO: 15403 - protein, 46 aa, synthetic construct; identical to SEQ ID NO: 5217

SEQ ID NO: 15404 - protein, 46 aa, synthetic construct; identical to SEQ ID NO: 5217

SEQ ID NO: 15405 - protein, 20 aa, synthetic construct
GGGGSGGGGSGGGGSGGGGS

SEQ ID NO: 15406 - protein, 30 aa, synthetic construct; identical to SEQ ID NO: 5112

SEQ ID NO: 15407 - protein, 30 aa, synthetic construct; identical to SEQ ID NO: 5112

SEQ ID NO: 15408 - protein, 18 aa, synthetic construct
GSSGSSGSSGSSGSSGSS

SEQ ID NO: 15409 - protein, 20 aa, synthetic construct
EAAAKEAAAKEAAAKEAAAK

SEQ ID NO: 15410 - protein, 30 aa, synthetic construct; identical to SEQ ID NO: 5130

SEQ ID NO: 15411 - protein, 11 aa, synthetic construct
PAPAPAPAPAP

SEQ ID NO: 15412 - protein, 13 aa, synthetic construct
PAPAPAPAPAPAP

SEQ ID NO: 15413 - protein, 13 aa, synthetic construct
PAPAPAPAPAPAP

SEQ ID NO: 15414 - protein, 13 aa, synthetic construct
PAPAPAPAPAPAP

SEQ ID NO: 15415 - protein, 13 aa, synthetic construct
PAPAPAPAPAPAP

SEQ ID NO: 15416 - protein, 13 aa, synthetic construct
PAPAPAPAPAPAP

SEQ ID NO: 15417 - protein, 8 aa, synthetic construct
EAAAKGGG

SEQ ID NO: 15418 - protein, 8 aa, synthetic construct
EAAAKGGG

SEQ ID NO: 15419 - protein, 6 aa, synthetic construct
PAPGGG

SEQ ID NO: 15420 - protein, 9 aa, synthetic construct
GGGGSSGGS

SEQ ID NO: 15421 - protein, 11 aa, synthetic construct
GGGGGSEAAAK

SEQ ID NO: 15422 - protein, 11 aa, synthetic construct
GGGEAAAKGGS

SEQ ID NO: 15423 - protein, 11 aa, synthetic construct
GGGEAAAKGGS

SEQ ID NO: 15424 - protein, 11 aa, synthetic construct
GGGEAAAKGGS

SEQ ID NO: 15425 - protein, 9 aa, synthetic construct
GGSGGGPAP

SEQ ID NO: 15426 - protein, 9 aa, synthetic construct
PAPGGSGGG

SEQ ID NO: 15427 - protein, 9 aa, synthetic construct
PAPGGSGGG

SEQ ID NO: 15428 - protein, 11 aa, synthetic construct
GGSEAAAKPAP

SEQ ID NO: 15429 - protein, 11 aa, synthetic construct
GGSPAPEAAAK

SEQ ID NO: 15430 - protein, 11 aa, synthetic construct
GGSPAPEAAAK

SEQ ID NO: 15431 - protein, 11 aa, synthetic construct
EAAAKGGSPAP

SEQ ID NO: 15432 - protein, 11 aa, synthetic construct
EAAAKGGSPAP

SEQ ID NO: 15433 - protein, 11 aa, synthetic construct
EAAAKPAPGGS

SEQ ID NO: 15434 - protein, 11 aa, synthetic construct
EAAAKPAPGGS

SEQ ID NO: 15435 - protein, 11 aa, synthetic construct
GGGGSSEAAAK

SEQ ID NO: 15436 - protein, 11 aa, synthetic construct
GGGGSSEAAAK

SEQ ID NO: 15437 - protein, 11 aa, synthetic construct
GSSGGGEAAAK

SEQ ID NO: 15438 - protein, 11 aa, synthetic construct
GSSGGGEAAAK

SEQ ID NO: 15439 - protein, 11 aa, synthetic construct
GSSEAAAKGGG

SEQ ID NO: 15440 - protein, 9 aa, synthetic construct
GSSGGGPAP

SEQ ID NO: 15441 - protein, 9 aa, synthetic construct
GSSPAPGGG

SEQ ID NO: 15442 - protein, 9 aa, synthetic construct
PAPGGGGSS

SEQ ID NO: 15443 - protein, 11 aa, synthetic construct
GGGEAAAKPAP

SEQ ID NO: 15444 - protein, 11 aa, synthetic construct
GGGEAAAKPAP

SEQ ID NO: 15445 - protein, 11 aa, synthetic construct
GGGPAPEAAAK

SEQ ID NO: 15446 - protein, 11 aa, synthetic construct
GSSEAAAKPAP

SEQ ID NO: 15447 - protein, 11 aa, synthetic construct
GSSEAAAKPAP

SEQ ID NO: 15448 - protein, 11 aa, synthetic construct
GSSPAPEAAAK

SEQ ID NO: 15449 - protein, 11 aa, synthetic construct
GSSPAPEAAAK

SEQ ID NO: 15450 - protein, 11 aa, synthetic construct
GSSPAPEAAAK

SEQ ID NO: 15451 - protein, 11 aa, synthetic construct
PAPGSSEAAAK

SEQ ID NO: 15452 - protein, 11 aa, synthetic construct
PAPGSSEAAAK

SEQ ID NO: 15453 - protein, 46 aa, synthetic construct; identical to SEQ ID NO: 5217

SEQ ID NO: 15454 - protein, 46 aa, synthetic construct; identical to SEQ ID NO: 5217

SEQ ID NO: 15455 - protein, 46 aa, synthetic construct; identical to SEQ ID NO: 5217

SEQ ID NO: 15456 - protein, 46 aa, synthetic construct; identical to SEQ ID NO: 5217

SEQ ID NO: 15457 - protein, 46 aa, synthetic construct; identical to SEQ ID NO: 5217

SEQ ID NO: 15458 - protein, 46 aa, synthetic construct; identical to SEQ ID NO: 5217

SEQ ID NO: 15459 - protein, 46 aa, synthetic construct; identical to SEQ ID NO: 5217

SEQ ID NO: 15460 - protein, 16 aa, synthetic construct
SGSETPGTSESATPES

SEQ ID NO: 15461-17084 - skipped (1624 entries)

SEQ ID NO: 17085 - DNA, 21 bp, synthetic construct
  source 1..21: mol_type = other DNA
gctgtgctgaccatcgacaag

SEQ ID NO: 17086 - DNA, 21 bp, synthetic construct
  source 1..21: mol_type = other DNA
gctgtgctgaccatcgacaag

SEQ ID NO: 17087 - DNA, 20 bp, synthetic construct
  source 1..20: mol_type = other DNA
ctgtgctgaccatcgacaag

SEQ ID NO: 17088 - DNA, 21 bp, synthetic construct
  source 1..21: mol_type = other DNA
gctgtgctgaccatcgacaag

SEQ ID NO: 17089 - DNA, 20 bp, synthetic construct
  source 1..20: mol_type = other DNA
ctgtgctgaccatcgacaag

SEQ ID NO: 17090 - DNA, 21 bp, synthetic construct
  source 1..21: mol_type = other DNA
gctgtgctgaccatcgacaag

SEQ ID NO: 17091 - DNA, 21 bp, synthetic construct
  source 1..21: mol_type = other DNA
gctgtgctgaccatcgacaag

SEQ ID NO: 17092 - DNA, 21 bp, synthetic construct
  source 1..21: mol_type = other DNA
ggctgtgctgaccatcgacaa

SEQ ID NO: 17093 - DNA, 20 bp, synthetic construct
  source 1..20: mol_type = other DNA
cagcttcagtccctttcttg

SEQ ID NO: 17094 - DNA, 20 bp, synthetic construct
  source 1..20: mol_type = other DNA
cagcttcagtccctttcttg

SEQ ID NO: 17095 - DNA, 20 bp, synthetic construct
  source 1..20: mol_type = other DNA
cagcttcagtccctttcttg

SEQ ID NO: 17096 - DNA, 20 bp, synthetic construct
  source 1..20: mol_type = other DNA
cagcttcagtccctttcttg

SEQ ID NO: 17097 - DNA, 20 bp, synthetic construct
  source 1..20: mol_type = other DNA
gctgtgctgaccatcgacaa

SEQ ID NO: 17098 - DNA, 20 bp, synthetic construct
  source 1..20: mol_type = other DNA
gctgtgctgaccatcgacaa

SEQ ID NO: 17099 - DNA, 21 bp, synthetic construct
  source 1..21: mol_type = other DNA
ggctgtgctgaccatcgacaa

SEQ ID NO: 17100 - DNA, 21 bp, synthetic construct
  source 1..21: mol_type = other DNA
ggctgtgctgaccatcgacaa

SEQ ID NO: 17101 - DNA, 20 bp, synthetic construct
  source 1..20: mol_type = other DNA
gctgtgctgaccatcgacaa

SEQ ID NO: 17102 - DNA, 21 bp, synthetic construct
  source 1..21: mol_type = other DNA
ggctgtgctgaccatcgacaa

SEQ ID NO: 17103 - DNA, 21 bp, synthetic construct
  source 1..21: mol_type = other DNA
aggctgtgctgaccatcgaca

SEQ ID NO: 17104 - DNA, 21 bp, synthetic construct
  source 1..21: mol_type = other DNA
agcagcttcagtccctttctt

SEQ ID NO: 17105 - DNA, 21 bp, synthetic construct
  source 1..21: mol_type = other DNA
agcagcttcagtccctttctt

SEQ ID NO: 17106 - DNA, 21 bp, synthetic construct
  source 1..21: mol_type = other DNA
agcagcttcagtccctttctt

SEQ ID NO: 17107 - DNA, 21 bp, synthetic construct
  source 1..21: mol_type = other DNA
agcagcttcagtccctttctt

SEQ ID NO: 17108 - DNA, 20 bp, synthetic construct
  source 1..20: mol_type = other DNA
ggctgtgctgaccatcgaca

SEQ ID NO: 17109 - DNA, 20 bp, synthetic construct
  source 1..20: mol_type = other DNA
ggctgtgctgaccatcgaca

SEQ ID NO: 17110 - DNA, 20 bp, synthetic construct
  source 1..20: mol_type = other DNA
ggctgtgctgaccatcgaca

SEQ ID NO: 17111 - DNA, 20 bp, synthetic construct
  source 1..20: mol_type = other DNA
ggctgtgctgaccatcgaca

SEQ ID NO: 17112 - DNA, 20 bp, synthetic construct
  source 1..20: mol_type = other DNA
ggctgtgctgaccatcgaca

SEQ ID NO: 17113 - DNA, 20 bp, synthetic construct
  source 1..20: mol_type = other DNA
gcagcttcagtccctttctt

SEQ ID NO: 17114 - DNA, 21 bp, synthetic construct
  source 1..21: mol_type = other DNA
aggctgtgctgaccatcgaca

SEQ ID NO: 17115 - DNA, 21 bp, synthetic construct
  source 1..21: mol_type = other DNA
aggctgtgctgaccatcgaca

SEQ ID NO: 17116 - DNA, 20 bp, synthetic construct
  source 1..20: mol_type = other DNA
ggctgtgctgaccatcgaca

SEQ ID NO: 17117 - DNA, 20 bp, synthetic construct
  source 1..20: mol_type = other DNA
ggctgtgctgaccatcgaca

SEQ ID NO: 17118 - DNA, 23 bp, synthetic construct
  source 1..23: mol_type = other DNA
ataaggctgtgctgaccatcgac

SEQ ID NO: 17119 - DNA, 21 bp, synthetic construct
  source 1..21: mol_type = other DNA
aaggctgtgctgaccatcgac

SEQ ID NO: 17120 - DNA, 20 bp, synthetic construct
  source 1..20: mol_type = other DNA
aggctgtgctgaccatcgac

SEQ ID NO: 17121 - DNA, 20 bp, synthetic construct
  source 1..20: mol_type = other DNA
aggctgtgctgaccatcgac

SEQ ID NO: 17122 - DNA, 20 bp, synthetic construct
  source 1..20: mol_type = other DNA
aggctgtgctgaccatcgac

SEQ ID NO: 17123 - DNA, 20 bp, synthetic construct
  source 1..20: mol_type = other DNA
aggctgtgctgaccatcgac

SEQ ID NO: 17124 - DNA, 20 bp, synthetic construct
  source 1..20: mol_type = other DNA
agcagcttcagtccctttct

SEQ ID NO: 17125 - DNA, 20 bp, synthetic construct
  source 1..20: mol_type = other DNA
agcagcttcagtccctttct

SEQ ID NO: 17126 - DNA, 20 bp, synthetic construct
  source 1..20: mol_type = other DNA
agcagcttcagtccctttct

SEQ ID NO: 17127 - DNA, 20 bp, synthetic construct
  source 1..20: mol_type = other DNA
agcagcttcagtccctttct

SEQ ID NO: 17128 - DNA, 20 bp, synthetic construct
  source 1..20: mol_type = other DNA
agcagcttcagtccctttct

SEQ ID NO: 17129 - DNA, 20 bp, synthetic construct
  source 1..20: mol_type = other DNA
aggctgtgctgaccatcgac

SEQ ID NO: 17130 - DNA, 21 bp, synthetic construct
  source 1..21: mol_type = other DNA
aaggctgtgctgaccatcgac

SEQ ID NO: 17131 - DNA, 21 bp, synthetic construct
  source 1..21: mol_type = other DNA
aaggctgtgctgaccatcgac

SEQ ID NO: 17132 - DNA, 20 bp, synthetic construct
  source 1..20: mol_type = other DNA
aggctgtgctgaccatcgac

SEQ ID NO: 17133 - DNA, 20 bp, synthetic construct
  source 1..20: mol_type = other DNA
agcagcttcagtccctttct

SEQ ID NO: 17134 - DNA, 21 bp, synthetic construct
  source 1..21: mol_type = other DNA
taaggctgtgctgaccatcga

SEQ ID NO: 17135 - DNA, 21 bp, synthetic construct
  source 1..21: mol_type = other DNA
taaggctgtgctgaccatcga

SEQ ID NO: 17136 - DNA, 20 bp, synthetic construct
  source 1..20: mol_type = other DNA
aaggctgtgctgaccatcga

SEQ ID NO: 17137 - DNA, 21 bp, synthetic construct
  source 1..21: mol_type = other DNA
taaggctgtgctgaccatcga

SEQ ID NO: 17138 - DNA, 20 bp, synthetic construct
  source 1..20: mol_type = other DNA
cagcagcttcagtccctttc

SEQ ID NO: 17139 - DNA, 20 bp, synthetic construct
  source 1..20: mol_type = other DNA
cagcagcttcagtccctttc

SEQ ID NO: 17140 - DNA, 20 bp, synthetic construct
  source 1..20: mol_type = other DNA
cagcagcttcagtccctttc

SEQ ID NO: 17141 - DNA, 20 bp, synthetic construct
  source 1..20: mol_type = other DNA
cagcagcttcagtccctttc

SEQ ID NO: 17142 - DNA, 20 bp, synthetic construct
  source 1..20: mol_type = other DNA
aaggctgtgctgaccatcga

SEQ ID NO: 17143 - DNA, 20 bp, synthetic construct
  source 1..20: mol_type = other DNA
aaggctgtgctgaccatcga

SEQ ID NO: 17144 - DNA, 23 bp, synthetic construct
  source 1..23: mol_type = other DNA
ccccagcagcttcagtccctttc

SEQ ID NO: 17145 - DNA, 23 bp, synthetic construct
  source 1..23: mol_type = other DNA
ccccagcagcttcagtccctttc

SEQ ID NO: 17146 - DNA, 21 bp, synthetic construct
  source 1..21: mol_type = other DNA
taaggctgtgctgaccatcga

SEQ ID NO: 17147 - DNA, 21 bp, synthetic construct
  source 1..21: mol_type = other DNA
taaggctgtgctgaccatcga

SEQ ID NO: 17148 - DNA, 21 bp, synthetic construct
  source 1..21: mol_type = other DNA
ataaggctgtgctgaccatcg

SEQ ID NO: 17149 - DNA, 20 bp, synthetic construct
  source 1..20: mol_type = other DNA
ccagcagcttcagtcccttt

SEQ ID NO: 17150 - DNA, 20 bp, synthetic construct
  source 1..20: mol_type = other DNA
taaggctgtgctgaccatcg

SEQ ID NO: 17151 - DNA, 21 bp, synthetic construct
  source 1..21: mol_type = other DNA
ataaggctgtgctgaccatcg

SEQ ID NO: 17152 - DNA, 21 bp, synthetic construct
  source 1..21: mol_type = other DNA
ataaggctgtgctgaccatcg

SEQ ID NO: 17153 - DNA, 21 bp, synthetic construct
  source 1..21: mol_type = other DNA
cataaggctgtgctgaccatc

SEQ ID NO: 17154 - DNA, 20 bp, synthetic construct
  source 1..20: mol_type = other DNA
ataaggctgtgctgaccatc

SEQ ID NO: 17155 - DNA, 20 bp, synthetic construct
  source 1..20: mol_type = other DNA
cccagcagcttcagtccctt

SEQ ID NO: 17156 - DNA, 21 bp, synthetic construct
  source 1..21: mol_type = other DNA
cataaggctgtgctgaccatc

SEQ ID NO: 17157 - DNA, 21 bp, synthetic construct
  source 1..21: mol_type = other DNA
cataaggctgtgctgaccatc

SEQ ID NO: 17158 - DNA, 20 bp, synthetic construct
  source 1..20: mol_type = other DNA
ataaggctgtgctgaccatc

SEQ ID NO: 17159 - DNA, 20 bp, synthetic construct
  source 1..20: mol_type = other DNA
cataaggctgtgctgaccat

SEQ ID NO: 17160 - DNA, 20 bp, synthetic construct
  source 1..20: mol_type = other DNA
cataaggctgtgctgaccat

SEQ ID NO: 17161 - DNA, 20 bp, synthetic construct
  source 1..20: mol_type = other DNA
cataaggctgtgctgaccat

SEQ ID NO: 17162 - DNA, 20 bp, synthetic construct
  source 1..20: mol_type = other DNA
cataaggctgtgctgaccat

SEQ ID NO: 17163 - DNA, 20 bp, synthetic construct
  source 1..20: mol_type = other DNA
cataaggctgtgctgaccat

SEQ ID NO: 17164 - DNA, 20 bp, synthetic construct
  source 1..20: mol_type = other DNA
ccccagcagcttcagtccct

SEQ ID NO: 17165 - DNA, 20 bp, synthetic construct
  source 1..20: mol_type = other DNA
cataaggctgtgctgaccat

SEQ ID NO: 17166 - DNA, 20 bp, synthetic construct
  source 1..20: mol_type = other DNA
cataaggctgtgctgaccat

SEQ ID NO: 17167 - DNA, 20 bp, synthetic construct
  source 1..20: mol_type = other DNA
cataaggctgtgctgaccat

SEQ ID NO: 17168 - DNA, 20 bp, synthetic construct
  source 1..20: mol_type = other DNA
gcataaggctgtgctgacca

SEQ ID NO: 17169 - DNA, 20 bp, synthetic construct
  source 1..20: mol_type = other DNA
gcataaggctgtgctgacca

SEQ ID NO: 17170 - DNA, 20 bp, synthetic construct
  source 1..20: mol_type = other DNA
gcataaggctgtgctgacca

SEQ ID NO: 17171 - DNA, 20 bp, synthetic construct
  source 1..20: mol_type = other DNA
gcataaggctgtgctgacca

SEQ ID NO: 17172 - DNA, 20 bp, synthetic construct
  source 1..20: mol_type = other DNA
gccccagcagcttcagtccc

SEQ ID NO: 17173 - DNA, 23 bp, synthetic construct
  source 1..23: mol_type = other DNA
cgtgcataaggctgtgctgacca

SEQ ID NO: 17174 - DNA, 23 bp, synthetic construct
  source 1..23: mol_type = other DNA
cgtgcataaggctgtgctgacca

SEQ ID NO: 17175 - DNA, 21 bp, synthetic construct
  source 1..21: mol_type = other DNA
gtgcataaggctgtgctgacc

SEQ ID NO: 17176 - DNA, 20 bp, synthetic construct
  source 1..20: mol_type = other DNA
ggccccagcagcttcagtcc

SEQ ID NO: 17177 - DNA, 20 bp, synthetic construct
  source 1..20: mol_type = other DNA
tgcataaggctgtgctgacc

SEQ ID NO: 17178 - DNA, 23 bp, synthetic construct
  source 1..23: mol_type = other DNA
catggccccagcagcttcagtcc

SEQ ID NO: 17179 - DNA, 23 bp, synthetic construct
  source 1..23: mol_type = other DNA
catggccccagcagcttcagtcc

SEQ ID NO: 17180 - DNA, 21 bp, synthetic construct
  source 1..21: mol_type = other DNA
gtgcataaggctgtgctgacc

SEQ ID NO: 17181 - DNA, 21 bp, synthetic construct
  source 1..21: mol_type = other DNA
gtgcataaggctgtgctgacc

SEQ ID NO: 17182 - DNA, 20 bp, synthetic construct
  source 1..20: mol_type = other DNA
gtgcataaggctgtgctgac

SEQ ID NO: 17183 - DNA, 20 bp, synthetic construct
  source 1..20: mol_type = other DNA
tggccccagcagcttcagtc

SEQ ID NO: 17184 - DNA, 24 bp, synthetic construct
  source 1..24: mol_type = other DNA
ggccgtgcataaggctgtgctgac

SEQ ID NO: 17185 - DNA, 20 bp, synthetic construct
  source 1..20: mol_type = other DNA
gtgcataaggctgtgctgac

SEQ ID NO: 17186 - DNA, 20 bp, synthetic construct
  source 1..20: mol_type = other DNA
atggccccagcagcttcagt

SEQ ID NO: 17187 - DNA, 20 bp, synthetic construct
  source 1..20: mol_type = other DNA
cgtgcataaggctgtgctga

SEQ ID NO: 17188 - DNA, 23 bp, synthetic construct
  source 1..23: mol_type = other DNA
ggccgtgcataaggctgtgctga

SEQ ID NO: 17189 - DNA, 20 bp, synthetic construct
  source 1..20: mol_type = other DNA
catggccccagcagcttcag

SEQ ID NO: 17190 - DNA, 20 bp, synthetic construct
  source 1..20: mol_type = other DNA
ccgtgcataaggctgtgctg

SEQ ID NO: 17191 - DNA, 20 bp, synthetic construct
  source 1..20: mol_type = other DNA
gccgtgcataaggctgtgct

SEQ ID NO: 17192 - DNA, 20 bp, synthetic construct
  source 1..20: mol_type = other DNA
acatggccccagcagcttca

SEQ ID NO: 17193 - DNA, 23 bp, synthetic construct
  source 1..23: mol_type = other DNA
aaaacatggccccagcagcttca

SEQ ID NO: 17194 - DNA, 23 bp, synthetic construct
  source 1..23: mol_type = other DNA
aaaacatggccccagcagcttca

SEQ ID NO: 17195 - DNA, 20 bp, synthetic construct
  source 1..20: mol_type = other DNA
gccgtgcataaggctgtgct

SEQ ID NO: 17196 - DNA, 24 bp, synthetic construct
  source 1..24: mol_type = other DNA
taaaaacatggccccagcagcttc

SEQ ID NO: 17197 - DNA, 20 bp, synthetic construct
  source 1..20: mol_type = other DNA
aacatggccccagcagcttc

SEQ ID NO: 17198 - DNA, 20 bp, synthetic construct
  source 1..20: mol_type = other DNA
aacatggccccagcagcttc

SEQ ID NO: 17199 - DNA, 20 bp, synthetic construct
  source 1..20: mol_type = other DNA
aacatggccccagcagcttc

SEQ ID NO: 17200 - DNA, 20 bp, synthetic construct
  source 1..20: mol_type = other DNA
ggccgtgcataaggctgtgc

SEQ ID NO: 17201 - DNA, 20 bp, synthetic construct
  source 1..20: mol_type = other DNA
ggccgtgcataaggctgtgc

SEQ ID NO: 17202 - DNA, 20 bp, synthetic construct
  source 1..20: mol_type = other DNA
ggccgtgcataaggctgtgc

SEQ ID NO: 17203 - DNA, 20 bp, synthetic construct
  source 1..20: mol_type = other DNA
aacatggccccagcagcttc

SEQ ID NO: 17204 - DNA, 20 bp, synthetic construct
  source 1..20: mol_type = other DNA
aacatggccccagcagcttc

SEQ ID NO: 17205 - DNA, 20 bp, synthetic construct
  source 1..20: mol_type = other DNA
ggccgtgcataaggctgtgc

SEQ ID NO: 17206 - DNA, 20 bp, synthetic construct
  source 1..20: mol_type = other DNA
ggccgtgcataaggctgtgc

SEQ ID NO: 17207 - DNA, 23 bp, synthetic construct
  source 1..23: mol_type = other DNA
aaaaacatggccccagcagcttc

SEQ ID NO: 17208 - DNA, 23 bp, synthetic construct
  source 1..23: mol_type = other DNA
aaaaacatggccccagcagcttc

SEQ ID NO: 17209 - DNA, 23 bp, synthetic construct
  source 1..23: mol_type = other DNA
ccaggccgtgcataaggctgtgc

SEQ ID NO: 17210 - DNA, 22 bp, synthetic construct
  source 1..22: mol_type = other DNA
caggccgtgcataaggctgtgc

SEQ ID NO: 17211 - DNA, 20 bp, synthetic construct
  source 1..20: mol_type = other DNA
ggccgtgcataaggctgtgc

SEQ ID NO: 17212 - DNA, 20 bp, synthetic construct
  source 1..20: mol_type = other DNA
ggccgtgcataaggctgtgc

SEQ ID NO: 17213 - DNA, 20 bp, synthetic construct
  source 1..20: mol_type = other DNA
aacatggccccagcagcttc

SEQ ID NO: 17214 - DNA, 24 bp, synthetic construct
  source 1..24: mol_type = other DNA
ctaaaaacatggccccagcagctt

SEQ ID NO: 17215 - DNA, 24 bp, synthetic construct
  source 1..24: mol_type = other DNA
ctccaggccgtgcataaggctgtg

SEQ ID NO: 17216 - DNA, 20 bp, synthetic construct
  source 1..20: mol_type = other DNA
aaacatggccccagcagctt

SEQ ID NO: 17217 - DNA, 20 bp, synthetic construct
  source 1..20: mol_type = other DNA
aaacatggccccagcagctt

SEQ ID NO: 17218 - DNA, 20 bp, synthetic construct
  source 1..20: mol_type = other DNA
aaacatggccccagcagctt

SEQ ID NO: 17219 - DNA, 20 bp, synthetic construct
  source 1..20: mol_type = other DNA
aaacatggccccagcagctt

SEQ ID NO: 17220 - DNA, 20 bp, synthetic construct
  source 1..20: mol_type = other DNA
aggccgtgcataaggctgtg

SEQ ID NO: 17221 - DNA, 20 bp, synthetic construct
  source 1..20: mol_type = other DNA
aggccgtgcataaggctgtg

SEQ ID NO: 17222 - DNA, 20 bp, synthetic construct
  source 1..20: mol_type = other DNA
aggccgtgcataaggctgtg

SEQ ID NO: 17223 - DNA, 20 bp, synthetic construct
  source 1..20: mol_type = other DNA
aggccgtgcataaggctgtg

SEQ ID NO: 17224 - DNA, 23 bp, synthetic construct
  source 1..23: mol_type = other DNA
tccaggccgtgcataaggctgtg

SEQ ID NO: 17225 - DNA, 23 bp, synthetic construct
  source 1..23: mol_type = other DNA
taaaaacatggccccagcagctt

SEQ ID NO: 17226 - DNA, 23 bp, synthetic construct
  source 1..23: mol_type = other DNA
tccaggccgtgcataaggctgtg

SEQ ID NO: 17227 - DNA, 22 bp, synthetic construct
  source 1..22: mol_type = other DNA
aaaaacatggccccagcagctt

SEQ ID NO: 17228 - DNA, 20 bp, synthetic construct
  source 1..20: mol_type = other DNA
aaacatggccccagcagctt

SEQ ID NO: 17229 - DNA, 21 bp, synthetic construct
  source 1..21: mol_type = other DNA
ccaggccgtgcataaggctgt

SEQ ID NO: 17230 - DNA, 21 bp, synthetic construct
  source 1..21: mol_type = other DNA
aaaaacatggccccagcagct

SEQ ID NO: 17231 - DNA, 20 bp, synthetic construct
  source 1..20: mol_type = other DNA
aaaacatggccccagcagct

SEQ ID NO: 17232 - DNA, 20 bp, synthetic construct
  source 1..20: mol_type = other DNA
caggccgtgcataaggctgt

SEQ ID NO: 17233 - DNA, 21 bp, synthetic construct
  source 1..21: mol_type = other DNA
taaaaacatggccccagcagc

SEQ ID NO: 17234 - DNA, 21 bp, synthetic construct
  source 1..21: mol_type = other DNA
taaaaacatggccccagcagc

SEQ ID NO: 17235 - DNA, 21 bp, synthetic construct
  source 1..21: mol_type = other DNA
taaaaacatggccccagcagc

SEQ ID NO: 17236 - DNA, 21 bp, synthetic construct
  source 1..21: mol_type = other DNA
taaaaacatggccccagcagc

SEQ ID NO: 17237 - DNA, 20 bp, synthetic construct
  source 1..20: mol_type = other DNA
ccaggccgtgcataaggctg

SEQ ID NO: 17238 - DNA, 20 bp, synthetic construct
  source 1..20: mol_type = other DNA
ccaggccgtgcataaggctg

SEQ ID NO: 17239 - DNA, 20 bp, synthetic construct
  source 1..20: mol_type = other DNA
ccaggccgtgcataaggctg

SEQ ID NO: 17240 - DNA, 20 bp, synthetic construct
  source 1..20: mol_type = other DNA
ccaggccgtgcataaggctg

SEQ ID NO: 17241 - DNA, 20 bp, synthetic construct
  source 1..20: mol_type = other DNA
ccaggccgtgcataaggctg

SEQ ID NO: 17242 - DNA, 20 bp, synthetic construct
  source 1..20: mol_type = other DNA
aaaaacatggccccagcagc

SEQ ID NO: 17243 - DNA, 20 bp, synthetic construct
  source 1..20: mol_type = other DNA
ccaggccgtgcataaggctg

SEQ ID NO: 17244 - DNA, 20 bp, synthetic construct
  source 1..20: mol_type = other DNA
tccaggccgtgcataaggct

SEQ ID NO: 17245 - DNA, 20 bp, synthetic construct
  source 1..20: mol_type = other DNA
tccaggccgtgcataaggct

SEQ ID NO: 17246 - DNA, 20 bp, synthetic construct
  source 1..20: mol_type = other DNA
tccaggccgtgcataaggct

SEQ ID NO: 17247 - DNA, 20 bp, synthetic construct
  source 1..20: mol_type = other DNA
tccaggccgtgcataaggct

SEQ ID NO: 17248 - DNA, 20 bp, synthetic construct
  source 1..20: mol_type = other DNA
taaaaacatggccccagcag

SEQ ID NO: 17249 - DNA, 20 bp, synthetic construct
  source 1..20: mol_type = other DNA
ctccaggccgtgcataaggc

SEQ ID NO: 17250 - DNA, 20 bp, synthetic construct
  source 1..20: mol_type = other DNA
ctccaggccgtgcataaggc

SEQ ID NO: 17251 - DNA, 20 bp, synthetic construct
  source 1..20: mol_type = other DNA
ctccaggccgtgcataaggc

SEQ ID NO: 17252 - DNA, 20 bp, synthetic construct
  source 1..20: mol_type = other DNA
ctccaggccgtgcataaggc

SEQ ID NO: 17253 - DNA, 20 bp, synthetic construct
  source 1..20: mol_type = other DNA
ctccaggccgtgcataaggc

SEQ ID NO: 17254 - DNA, 20 bp, synthetic construct
  source 1..20: mol_type = other DNA
ctaaaaacatggccccagca

SEQ ID NO: 17255 - DNA, 23 bp, synthetic construct
  source 1..23: mol_type = other DNA
cctctaaaaacatggccccagca

SEQ ID NO: 17256 - DNA, 23 bp, synthetic construct
  source 1..23: mol_type = other DNA
cccctccaggccgtgcataaggc

SEQ ID NO: 17257 - DNA, 23 bp, synthetic construct
  source 1..23: mol_type = other DNA
cctctaaaaacatggccccagca

SEQ ID NO: 17258 - DNA, 23 bp, synthetic construct
  source 1..23: mol_type = other DNA
cccctccaggccgtgcataaggc

SEQ ID NO: 17259 - DNA, 20 bp, synthetic construct
  source 1..20: mol_type = other DNA
cctccaggccgtgcataagg

SEQ ID NO: 17260 - DNA, 20 bp, synthetic construct
  source 1..20: mol_type = other DNA
cctccaggccgtgcataagg

SEQ ID NO: 17261 - DNA, 20 bp, synthetic construct
  source 1..20: mol_type = other DNA
cctccaggccgtgcataagg

SEQ ID NO: 17262 - DNA, 20 bp, synthetic construct
  source 1..20: mol_type = other DNA
cctccaggccgtgcataagg

SEQ ID NO: 17263 - DNA, 20 bp, synthetic construct
  source 1..20: mol_type = other DNA
tctaaaaacatggccccagc

SEQ ID NO: 17264 - DNA, 20 bp, synthetic construct
  source 1..20: mol_type = other DNA
tctaaaaacatggccccagc

SEQ ID NO: 17265 - DNA, 20 bp, synthetic construct
  source 1..20: mol_type = other DNA
tctaaaaacatggccccagc

SEQ ID NO: 17266 - DNA, 20 bp, synthetic construct
  source 1..20: mol_type = other DNA
tctaaaaacatggccccagc

SEQ ID NO: 17267 - DNA, 20 bp, synthetic construct
  source 1..20: mol_type = other DNA
tctaaaaacatggccccagc

SEQ ID NO: 17268 - DNA, 20 bp, synthetic construct
  source 1..20: mol_type = other DNA
tctaaaaacatggccccagc

SEQ ID NO: 17269 - DNA, 20 bp, synthetic construct
  source 1..20: mol_type = other DNA
ctctaaaaacatggccccag

SEQ ID NO: 17270 - DNA, 20 bp, synthetic construct
  source 1..20: mol_type = other DNA
ctctaaaaacatggccccag

SEQ ID NO: 17271 - DNA, 20 bp, synthetic construct
  source 1..20: mol_type = other DNA
ctctaaaaacatggccccag

SEQ ID NO: 17272 - DNA, 20 bp, synthetic construct
  source 1..20: mol_type = other DNA
ctctaaaaacatggccccag

SEQ ID NO: 17273 - DNA, 20 bp, synthetic construct
  source 1..20: mol_type = other DNA
ccctccaggccgtgcataag

SEQ ID NO: 17274 - DNA, 22 bp, synthetic construct
  source 1..22: mol_type = other DNA
gcctctaaaaacatggccccag

SEQ ID NO: 17275 - DNA, 20 bp, synthetic construct
  source 1..20: mol_type = other DNA
ctctaaaaacatggccccag

SEQ ID NO: 17276 - DNA, 21 bp, synthetic construct
  source 1..21: mol_type = other DNA
gcctctaaaaacatggcccca

SEQ ID NO: 17277 - DNA, 20 bp, synthetic construct
  source 1..20: mol_type = other DNA
cccctccaggccgtgcataa

SEQ ID NO: 17278 - DNA, 20 bp, synthetic construct
  source 1..20: mol_type = other DNA
cccctccaggccgtgcataa

SEQ ID NO: 17279 - DNA, 20 bp, synthetic construct
  source 1..20: mol_type = other DNA
cccctccaggccgtgcataa

SEQ ID NO: 17280 - DNA, 20 bp, synthetic construct
  source 1..20: mol_type = other DNA
cccctccaggccgtgcataa

SEQ ID NO: 17281 - DNA, 20 bp, synthetic construct
  source 1..20: mol_type = other DNA
cccctccaggccgtgcataa

SEQ ID NO: 17282 - DNA, 20 bp, synthetic construct
  source 1..20: mol_type = other DNA
cctctaaaaacatggcccca

SEQ ID NO: 17283 - DNA, 23 bp, synthetic construct
  source 1..23: mol_type = other DNA
tggcctctaaaaacatggcccca

SEQ ID NO: 17284 - DNA, 21 bp, synthetic construct
  source 1..21: mol_type = other DNA
gcctctaaaaacatggcccca

SEQ ID NO: 17285 - DNA, 21 bp, synthetic construct
  source 1..21: mol_type = other DNA
gcctctaaaaacatggcccca

SEQ ID NO: 17286 - DNA, 20 bp, synthetic construct
  source 1..20: mol_type = other DNA
cccctccaggccgtgcataa

SEQ ID NO: 17287 - DNA, 21 bp, synthetic construct
  source 1..21: mol_type = other DNA
ggcctctaaaaacatggcccc

SEQ ID NO: 17288 - DNA, 20 bp, synthetic construct
  source 1..20: mol_type = other DNA
tcccctccaggccgtgcata

SEQ ID NO: 17289 - DNA, 20 bp, synthetic construct
  source 1..20: mol_type = other DNA
tcccctccaggccgtgcata

SEQ ID NO: 17290 - DNA, 20 bp, synthetic construct
  source 1..20: mol_type = other DNA
tcccctccaggccgtgcata

SEQ ID NO: 17291 - DNA, 20 bp, synthetic construct
  source 1..20: mol_type = other DNA
tcccctccaggccgtgcata

SEQ ID NO: 17292 - DNA, 20 bp, synthetic construct
  source 1..20: mol_type = other DNA
tcccctccaggccgtgcata

SEQ ID NO: 17293 - DNA, 20 bp, synthetic construct
  source 1..20: mol_type = other DNA
tcccctccaggccgtgcata

SEQ ID NO: 17294 - DNA, 20 bp, synthetic construct
  source 1..20: mol_type = other DNA
tcccctccaggccgtgcata

SEQ ID NO: 17295 - DNA, 20 bp, synthetic construct
  source 1..20: mol_type = other DNA
gcctctaaaaacatggcccc

SEQ ID NO: 17296 - DNA, 20 bp, synthetic construct
  source 1..20: mol_type = other DNA
gcctctaaaaacatggcccc

SEQ ID NO: 17297 - DNA, 20 bp, synthetic construct
  source 1..20: mol_type = other DNA
gcctctaaaaacatggcccc

SEQ ID NO: 17298 - DNA, 20 bp, synthetic construct
  source 1..20: mol_type = other DNA
tcccctccaggccgtgcata

SEQ ID NO: 17299 - DNA, 20 bp, synthetic construct
  source 1..20: mol_type = other DNA
tcccctccaggccgtgcata

SEQ ID NO: 17300 - DNA, 20 bp, synthetic construct
  source 1..20: mol_type = other DNA
tcccctccaggccgtgcata

SEQ ID NO: 17301 - DNA, 20 bp, synthetic construct
  source 1..20: mol_type = other DNA
gcctctaaaaacatggcccc

SEQ ID NO: 17302 - DNA, 20 bp, synthetic construct
  source 1..20: mol_type = other DNA
gcctctaaaaacatggcccc

SEQ ID NO: 17303 - DNA, 21 bp, synthetic construct
  source 1..21: mol_type = other DNA
ggcctctaaaaacatggcccc

SEQ ID NO: 17304 - DNA, 21 bp, synthetic construct
  source 1..21: mol_type = other DNA
ggcctctaaaaacatggcccc

SEQ ID NO: 17305 - DNA, 24 bp, synthetic construct
  source 1..24: mol_type = other DNA
tatggcctctaaaaacatggcccc

SEQ ID NO: 17306 - DNA, 20 bp, synthetic construct
  source 1..20: mol_type = other DNA
tcccctccaggccgtgcata

SEQ ID NO: 17307 - DNA, 20 bp, synthetic construct
  source 1..20: mol_type = other DNA
gcctctaaaaacatggcccc

SEQ ID NO: 17308 - DNA, 21 bp, synthetic construct
  source 1..21: mol_type = other DNA
tctcccctccaggccgtgcat

SEQ ID NO: 17309 - DNA, 21 bp, synthetic construct
  source 1..21: mol_type = other DNA
tctcccctccaggccgtgcat

SEQ ID NO: 17310 - DNA, 20 bp, synthetic construct
  source 1..20: mol_type = other DNA
ggcctctaaaaacatggccc

SEQ ID NO: 17311 - DNA, 20 bp, synthetic construct
  source 1..20: mol_type = other DNA
ggcctctaaaaacatggccc

SEQ ID NO: 17312 - DNA, 20 bp, synthetic construct
  source 1..20: mol_type = other DNA
ggcctctaaaaacatggccc

SEQ ID NO: 17313 - DNA, 20 bp, synthetic construct
  source 1..20: mol_type = other DNA
ggcctctaaaaacatggccc

SEQ ID NO: 17314 - DNA, 20 bp, synthetic construct
  source 1..20: mol_type = other DNA
ctcccctccaggccgtgcat

SEQ ID NO: 17315 - DNA, 20 bp, synthetic construct
  source 1..20: mol_type = other DNA
ctcccctccaggccgtgcat

SEQ ID NO: 17316 - DNA, 20 bp, synthetic construct
  source 1..20: mol_type = other DNA
ctcccctccaggccgtgcat

SEQ ID NO: 17317 - DNA, 20 bp, synthetic construct
  source 1..20: mol_type = other DNA
ctcccctccaggccgtgcat

SEQ ID NO: 17318 - DNA, 23 bp, synthetic construct
  source 1..23: mol_type = other DNA
tctctcccctccaggccgtgcat

SEQ ID NO: 17319 - DNA, 23 bp, synthetic construct
  source 1..23: mol_type = other DNA
tctctcccctccaggccgtgcat

SEQ ID NO: 17320 - DNA, 21 bp, synthetic construct
  source 1..21: mol_type = other DNA
tctcccctccaggccgtgcat

SEQ ID NO: 17321 - DNA, 21 bp, synthetic construct
  source 1..21: mol_type = other DNA
tctcccctccaggccgtgcat

SEQ ID NO: 17322 - DNA, 20 bp, synthetic construct
  source 1..20: mol_type = other DNA
ggcctctaaaaacatggccc

SEQ ID NO: 17323 - DNA, 21 bp, synthetic construct
  source 1..21: mol_type = other DNA
ctctcccctccaggccgtgca

SEQ ID NO: 17324 - DNA, 21 bp, synthetic construct
  source 1..21: mol_type = other DNA
atggcctctaaaaacatggcc

SEQ ID NO: 17325 - DNA, 21 bp, synthetic construct
  source 1..21: mol_type = other DNA
ctctcccctccaggccgtgca

SEQ ID NO: 17326 - DNA, 20 bp, synthetic construct
  source 1..20: mol_type = other DNA
tctcccctccaggccgtgca

SEQ ID NO: 17327 - DNA, 21 bp, synthetic construct
  source 1..21: mol_type = other DNA
ctctcccctccaggccgtgca

SEQ ID NO: 17328 - DNA, 20 bp, synthetic construct
  source 1..20: mol_type = other DNA
tctcccctccaggccgtgca

SEQ ID NO: 17329 - DNA, 20 bp, synthetic construct
  source 1..20: mol_type = other DNA
tggcctctaaaaacatggcc

SEQ ID NO: 17330 - DNA, 23 bp, synthetic construct
  source 1..23: mol_type = other DNA
gtatggcctctaaaaacatggcc

SEQ ID NO: 17331 - DNA, 21 bp, synthetic construct
  source 1..21: mol_type = other DNA
ctctcccctccaggccgtgca

SEQ ID NO: 17332 - DNA, 21 bp, synthetic construct
  source 1..21: mol_type = other DNA
ctctcccctccaggccgtgca

SEQ ID NO: 17333 - DNA, 21 bp, synthetic construct
  source 1..21: mol_type = other DNA
tatggcctctaaaaacatggc

SEQ ID NO: 17334 - DNA, 21 bp, synthetic construct
  source 1..21: mol_type = other DNA
tctctcccctccaggccgtgc

SEQ ID NO: 17335 - DNA, 20 bp, synthetic construct
  source 1..20: mol_type = other DNA
atggcctctaaaaacatggc

SEQ ID NO: 17336 - DNA, 20 bp, synthetic construct
  source 1..20: mol_type = other DNA
ctctcccctccaggccgtgc

SEQ ID NO: 17337 - DNA, 21 bp, synthetic construct
  source 1..21: mol_type = other DNA
tatggcctctaaaaacatggc

SEQ ID NO: 17338 - DNA, 21 bp, synthetic construct
  source 1..21: mol_type = other DNA
tatggcctctaaaaacatggc

SEQ ID NO: 17339 - DNA, 21 bp, synthetic construct
  source 1..21: mol_type = other DNA
tctctcccctccaggccgtgc

SEQ ID NO: 17340 - DNA, 21 bp, synthetic construct
  source 1..21: mol_type = other DNA
tctctcccctccaggccgtgc

SEQ ID NO: 17341 - DNA, 21 bp, synthetic construct
  source 1..21: mol_type = other DNA
ttctctcccctccaggccgtg

SEQ ID NO: 17342 - DNA, 20 bp, synthetic construct
  source 1..20: mol_type = other DNA
tctctcccctccaggccgtg

SEQ ID NO: 17343 - DNA, 20 bp, synthetic construct
  source 1..20: mol_type = other DNA
tatggcctctaaaaacatgg

SEQ ID NO: 17344 - DNA, 20 bp, synthetic construct
  source 1..20: mol_type = other DNA
tctctcccctccaggccgtg

SEQ ID NO: 17345 - DNA, 20 bp, synthetic construct
  source 1..20: mol_type = other DNA
gtatggcctctaaaaacatg

SEQ ID NO: 17346 - DNA, 20 bp, synthetic construct
  source 1..20: mol_type = other DNA
ttctctcccctccaggccgt

SEQ ID NO: 17347 - DNA, 23 bp, synthetic construct
  source 1..23: mol_type = other DNA
tgggtatggcctctaaaaacatg

SEQ ID NO: 17348 - DNA, 24 bp, synthetic construct
  source 1..24: mol_type = other DNA
catgggtatggcctctaaaaacat

SEQ ID NO: 17349 - DNA, 20 bp, synthetic construct
  source 1..20: mol_type = other DNA
ggtatggcctctaaaaacat

SEQ ID NO: 17350 - DNA, 20 bp, synthetic construct
  source 1..20: mol_type = other DNA
ggtatggcctctaaaaacat

SEQ ID NO: 17351 - DNA, 20 bp, synthetic construct
  source 1..20: mol_type = other DNA
ggtatggcctctaaaaacat

SEQ ID NO: 17352 - DNA, 20 bp, synthetic construct
  source 1..20: mol_type = other DNA
cttctctcccctccaggccg

SEQ ID NO: 17353 - DNA, 20 bp, synthetic construct
  source 1..20: mol_type = other DNA
cttctctcccctccaggccg

SEQ ID NO: 17354 - DNA, 20 bp, synthetic construct
  source 1..20: mol_type = other DNA
cttctctcccctccaggccg

SEQ ID NO: 17355 - DNA, 20 bp, synthetic construct
  source 1..20: mol_type = other DNA
ggtatggcctctaaaaacat

SEQ ID NO: 17356 - DNA, 20 bp, synthetic construct
  source 1..20: mol_type = other DNA
ggtatggcctctaaaaacat

SEQ ID NO: 17357 - DNA, 20 bp, synthetic construct
  source 1..20: mol_type = other DNA
cttctctcccctccaggccg

SEQ ID NO: 17358 - DNA, 20 bp, synthetic construct
  source 1..20: mol_type = other DNA
cttctctcccctccaggccg

SEQ ID NO: 17359 - DNA, 23 bp, synthetic construct
  source 1..23: mol_type = other DNA
atgggtatggcctctaaaaacat

SEQ ID NO: 17360 - DNA, 23 bp, synthetic construct
  source 1..23: mol_type = other DNA
atgggtatggcctctaaaaacat

SEQ ID NO: 17361 - DNA, 20 bp, synthetic construct
  source 1..20: mol_type = other DNA
ggtatggcctctaaaaacat

SEQ ID NO: 17362 - DNA, 20 bp, synthetic construct
  source 1..20: mol_type = other DNA
cttctctcccctccaggccg

SEQ ID NO: 17363 - DNA, 24 bp, synthetic construct
  source 1..24: mol_type = other DNA
acatgggtatggcctctaaaaaca

SEQ ID NO: 17364 - DNA, 20 bp, synthetic construct
  source 1..20: mol_type = other DNA
gggtatggcctctaaaaaca

SEQ ID NO: 17365 - DNA, 20 bp, synthetic construct
  source 1..20: mol_type = other DNA
gggtatggcctctaaaaaca

SEQ ID NO: 17366 - DNA, 20 bp, synthetic construct
  source 1..20: mol_type = other DNA
gggtatggcctctaaaaaca

SEQ ID NO: 17367 - DNA, 20 bp, synthetic construct
  source 1..20: mol_type = other DNA
gggtatggcctctaaaaaca

SEQ ID NO: 17368 - DNA, 20 bp, synthetic construct
  source 1..20: mol_type = other DNA
gggtatggcctctaaaaaca

SEQ ID NO: 17369 - DNA, 20 bp, synthetic construct
  source 1..20: mol_type = other DNA
gggtatggcctctaaaaaca

SEQ ID NO: 17370 - DNA, 20 bp, synthetic construct
  source 1..20: mol_type = other DNA
gggtatggcctctaaaaaca

SEQ ID NO: 17371 - DNA, 20 bp, synthetic construct
  source 1..20: mol_type = other DNA
gcttctctcccctccaggcc

SEQ ID NO: 17372 - DNA, 20 bp, synthetic construct
  source 1..20: mol_type = other DNA
gcttctctcccctccaggcc

SEQ ID NO: 17373 - DNA, 20 bp, synthetic construct
  source 1..20: mol_type = other DNA
gcttctctcccctccaggcc

SEQ ID NO: 17374 - DNA, 20 bp, synthetic construct
  source 1..20: mol_type = other DNA
gcttctctcccctccaggcc

SEQ ID NO: 17375 - DNA, 20 bp, synthetic construct
  source 1..20: mol_type = other DNA
gggtatggcctctaaaaaca

SEQ ID NO: 17376 - DNA, 20 bp, synthetic construct
  source 1..20: mol_type = other DNA
gggtatggcctctaaaaaca

SEQ ID NO: 17377 - DNA, 20 bp, synthetic construct
  source 1..20: mol_type = other DNA
gggtatggcctctaaaaaca

SEQ ID NO: 17378 - DNA, 23 bp, synthetic construct
  source 1..23: mol_type = other DNA
catgggtatggcctctaaaaaca

SEQ ID NO: 17379 - DNA, 22 bp, synthetic construct
  source 1..22: mol_type = other DNA
atgggtatggcctctaaaaaca

SEQ ID NO: 17380 - DNA, 20 bp, synthetic construct
  source 1..20: mol_type = other DNA
gggtatggcctctaaaaaca

SEQ ID NO: 17381 - DNA, 24 bp, synthetic construct
  source 1..24: mol_type = other DNA
gacatgggtatggcctctaaaaac

SEQ ID NO: 17382 - DNA, 21 bp, synthetic construct
  source 1..21: mol_type = other DNA
atgggtatggcctctaaaaac

SEQ ID NO: 17383 - DNA, 21 bp, synthetic construct
  source 1..21: mol_type = other DNA
atgggtatggcctctaaaaac

SEQ ID NO: 17384 - DNA, 20 bp, synthetic construct
  source 1..20: mol_type = other DNA
tgggtatggcctctaaaaac

SEQ ID NO: 17385 - DNA, 20 bp, synthetic construct
  source 1..20: mol_type = other DNA
tgggtatggcctctaaaaac

SEQ ID NO: 17386 - DNA, 20 bp, synthetic construct
  source 1..20: mol_type = other DNA
tgggtatggcctctaaaaac

SEQ ID NO: 17387 - DNA, 20 bp, synthetic construct
  source 1..20: mol_type = other DNA
tgggtatggcctctaaaaac

SEQ ID NO: 17388 - DNA, 20 bp, synthetic construct
  source 1..20: mol_type = other DNA
tgcttctctcccctccaggc

SEQ ID NO: 17389 - DNA, 20 bp, synthetic construct
  source 1..20: mol_type = other DNA
tgcttctctcccctccaggc

SEQ ID NO: 17390 - DNA, 20 bp, synthetic construct
  source 1..20: mol_type = other DNA
tgcttctctcccctccaggc

SEQ ID NO: 17391 - DNA, 20 bp, synthetic construct
  source 1..20: mol_type = other DNA
tgcttctctcccctccaggc

SEQ ID NO: 17392 - DNA, 20 bp, synthetic construct
  source 1..20: mol_type = other DNA
tgcttctctcccctccaggc

SEQ ID NO: 17393 - DNA, 23 bp, synthetic construct
  source 1..23: mol_type = other DNA
ctctgcttctctcccctccaggc

SEQ ID NO: 17394 - DNA, 23 bp, synthetic construct
  source 1..23: mol_type = other DNA
acatgggtatggcctctaaaaac

SEQ ID NO: 17395 - DNA, 23 bp, synthetic construct
  source 1..23: mol_type = other DNA
ctctgcttctctcccctccaggc

SEQ ID NO: 17396 - DNA, 21 bp, synthetic construct
  source 1..21: mol_type = other DNA
catgggtatggcctctaaaaa

SEQ ID NO: 17397 - DNA, 20 bp, synthetic construct
  source 1..20: mol_type = other DNA
ctgcttctctcccctccagg

SEQ ID NO: 17398 - DNA, 20 bp, synthetic construct
  source 1..20: mol_type = other DNA
ctgcttctctcccctccagg

SEQ ID NO: 17399 - DNA, 20 bp, synthetic construct
  source 1..20: mol_type = other DNA
ctgcttctctcccctccagg

SEQ ID NO: 17400 - DNA, 20 bp, synthetic construct
  source 1..20: mol_type = other DNA
ctgcttctctcccctccagg

SEQ ID NO: 17401 - DNA, 20 bp, synthetic construct
  source 1..20: mol_type = other DNA
atgggtatggcctctaaaaa

SEQ ID NO: 17402 - DNA, 20 bp, synthetic construct
  source 1..20: mol_type = other DNA
catgggtatggcctctaaaa

SEQ ID NO: 17403 - DNA, 20 bp, synthetic construct
  source 1..20: mol_type = other DNA
tctgcttctctcccctccag

SEQ ID NO: 17404 - DNA, 21 bp, synthetic construct
  source 1..21: mol_type = other DNA
ctctgcttctctcccctccag

SEQ ID NO: 17405 - DNA, 21 bp, synthetic construct
  source 1..21: mol_type = other DNA
ctctgcttctctcccctccag

SEQ ID NO: 17406 - DNA, 20 bp, synthetic construct
  source 1..20: mol_type = other DNA
ctctgcttctctcccctcca

SEQ ID NO: 17407 - DNA, 20 bp, synthetic construct
  source 1..20: mol_type = other DNA
ctctgcttctctcccctcca

SEQ ID NO: 17408 - DNA, 20 bp, synthetic construct
  source 1..20: mol_type = other DNA
ctctgcttctctcccctcca

SEQ ID NO: 17409 - DNA, 20 bp, synthetic construct
  source 1..20: mol_type = other DNA
acatgggtatggcctctaaa

SEQ ID NO: 17410 - DNA, 20 bp, synthetic construct
  source 1..20: mol_type = other DNA
ctctgcttctctcccctcca

SEQ ID NO: 17411 - DNA, 20 bp, synthetic construct
  source 1..20: mol_type = other DNA
ctctgcttctctcccctcca

SEQ ID NO: 17412 - DNA, 20 bp, synthetic construct
  source 1..20: mol_type = other DNA
acatgggtatggcctctaaa

SEQ ID NO: 17413 - DNA, 20 bp, synthetic construct
  source 1..20: mol_type = other DNA
ctctgcttctctcccctcca

SEQ ID NO: 17414 - DNA, 20 bp, synthetic construct
  source 1..20: mol_type = other DNA
tctctgcttctctcccctcc

SEQ ID NO: 17415 - DNA, 20 bp, synthetic construct
  source 1..20: mol_type = other DNA
tctctgcttctctcccctcc

SEQ ID NO: 17416 - DNA, 20 bp, synthetic construct
  source 1..20: mol_type = other DNA
tctctgcttctctcccctcc

SEQ ID NO: 17417 - DNA, 20 bp, synthetic construct
  source 1..20: mol_type = other DNA
tctctgcttctctcccctcc

SEQ ID NO: 17418 - DNA, 20 bp, synthetic construct
  source 1..20: mol_type = other DNA
tctctgcttctctcccctcc

SEQ ID NO: 17419 - DNA, 20 bp, synthetic construct
  source 1..20: mol_type = other DNA
tctctgcttctctcccctcc

SEQ ID NO: 17420 - DNA, 20 bp, synthetic construct
  source 1..20: mol_type = other DNA
tctctgcttctctcccctcc

SEQ ID NO: 17421 - DNA, 20 bp, synthetic construct
  source 1..20: mol_type = other DNA
tctctgcttctctcccctcc

SEQ ID NO: 17422 - DNA, 20 bp, synthetic construct
  source 1..20: mol_type = other DNA
tctctgcttctctcccctcc

SEQ ID NO: 17423 - DNA, 20 bp, synthetic construct
  source 1..20: mol_type = other DNA
tctctgcttctctcccctcc

SEQ ID NO: 17424 - DNA, 20 bp, synthetic construct
  source 1..20: mol_type = other DNA
gacatgggtatggcctctaa

SEQ ID NO: 17425 - DNA, 23 bp, synthetic construct
  source 1..23: mol_type = other DNA
gtgtctctgcttctctcccctcc

SEQ ID NO: 17426 - DNA, 23 bp, synthetic construct
  source 1..23: mol_type = other DNA
gtgtctctgcttctctcccctcc

SEQ ID NO: 17427 - DNA, 20 bp, synthetic construct
  source 1..20: mol_type = other DNA
gacatgggtatggcctctaa

SEQ ID NO: 17428 - DNA, 21 bp, synthetic construct
  source 1..21: mol_type = other DNA
agacatgggtatggcctctaa

SEQ ID NO: 17429 - DNA, 20 bp, synthetic construct
  source 1..20: mol_type = other DNA
tctctgcttctctcccctcc

SEQ ID NO: 17430 - DNA, 24 bp, synthetic construct
  source 1..24: mol_type = other DNA
acgtgtctctgcttctctcccctc

SEQ ID NO: 17431 - DNA, 21 bp, synthetic construct
  source 1..21: mol_type = other DNA
tgtctctgcttctctcccctc

SEQ ID NO: 17432 - DNA, 21 bp, synthetic construct
  source 1..21: mol_type = other DNA
tgtctctgcttctctcccctc

SEQ ID NO: 17433 - DNA, 20 bp, synthetic construct
  source 1..20: mol_type = other DNA
gtctctgcttctctcccctc

SEQ ID NO: 17434 - DNA, 20 bp, synthetic construct
  source 1..20: mol_type = other DNA
gtctctgcttctctcccctc

SEQ ID NO: 17435 - DNA, 20 bp, synthetic construct
  source 1..20: mol_type = other DNA
gtctctgcttctctcccctc

SEQ ID NO: 17436 - DNA, 20 bp, synthetic construct
  source 1..20: mol_type = other DNA
gtctctgcttctctcccctc

SEQ ID NO: 17437 - DNA, 20 bp, synthetic construct
  source 1..20: mol_type = other DNA
agacatgggtatggcctcta

SEQ ID NO: 17438 - DNA, 23 bp, synthetic construct
  source 1..23: mol_type = other DNA
gatagacatgggtatggcctcta

SEQ ID NO: 17439 - DNA, 23 bp, synthetic construct
  source 1..23: mol_type = other DNA
cgtgtctctgcttctctcccctc

SEQ ID NO: 17440 - DNA, 23 bp, synthetic construct
  source 1..23: mol_type = other DNA
gatagacatgggtatggcctcta

SEQ ID NO: 17441 - DNA, 23 bp, synthetic construct
  source 1..23: mol_type = other DNA
cgtgtctctgcttctctcccctc

SEQ ID NO: 17442 - DNA, 22 bp, synthetic construct
  source 1..22: mol_type = other DNA
atagacatgggtatggcctcta

SEQ ID NO: 17443 - DNA, 20 bp, synthetic construct
  source 1..20: mol_type = other DNA
agacatgggtatggcctcta

SEQ ID NO: 17444 - DNA, 21 bp, synthetic construct
  source 1..21: mol_type = other DNA
tagacatgggtatggcctcta

SEQ ID NO: 17445 - DNA, 21 bp, synthetic construct
  source 1..21: mol_type = other DNA
atagacatgggtatggcctct

SEQ ID NO: 17446 - DNA, 21 bp, synthetic construct
  source 1..21: mol_type = other DNA
gtgtctctgcttctctcccct

SEQ ID NO: 17447 - DNA, 21 bp, synthetic construct
  source 1..21: mol_type = other DNA
gtgtctctgcttctctcccct

SEQ ID NO: 17448 - DNA, 20 bp, synthetic construct
  source 1..20: mol_type = other DNA
tagacatgggtatggcctct

SEQ ID NO: 17449 - DNA, 20 bp, synthetic construct
  source 1..20: mol_type = other DNA
tgtctctgcttctctcccct

SEQ ID NO: 17450 - DNA, 21 bp, synthetic construct
  source 1..21: mol_type = other DNA
atagacatgggtatggcctct

SEQ ID NO: 17451 - DNA, 21 bp, synthetic construct
  source 1..21: mol_type = other DNA
atagacatgggtatggcctct

SEQ ID NO: 17452 - DNA, 21 bp, synthetic construct
  source 1..21: mol_type = other DNA
gtgtctctgcttctctcccct

SEQ ID NO: 17453 - DNA, 21 bp, synthetic construct
  source 1..21: mol_type = other DNA
gtgtctctgcttctctcccct

SEQ ID NO: 17454 - DNA, 20 bp, synthetic construct
  source 1..20: mol_type = other DNA
tagacatgggtatggcctct

SEQ ID NO: 17455 - DNA, 21 bp, synthetic construct
  source 1..21: mol_type = other DNA
atagacatgggtatggcctct

SEQ ID NO: 17456 - DNA, 21 bp, synthetic construct
  source 1..21: mol_type = other DNA
gatagacatgggtatggcctc

SEQ ID NO: 17457 - DNA, 21 bp, synthetic construct
  source 1..21: mol_type = other DNA
cgtgtctctgcttctctcccc

SEQ ID NO: 17458 - DNA, 20 bp, synthetic construct
  source 1..20: mol_type = other DNA
atagacatgggtatggcctc

SEQ ID NO: 17459 - DNA, 20 bp, synthetic construct
  source 1..20: mol_type = other DNA
gtgtctctgcttctctcccc

SEQ ID NO: 17460 - DNA, 20 bp, synthetic construct
  source 1..20: mol_type = other DNA
atagacatgggtatggcctc

SEQ ID NO: 17461 - DNA, 21 bp, synthetic construct
  source 1..21: mol_type = other DNA
gatagacatgggtatggcctc

SEQ ID NO: 17462 - DNA, 21 bp, synthetic construct
  source 1..21: mol_type = other DNA
gatagacatgggtatggcctc

SEQ ID NO: 17463 - DNA, 21 bp, synthetic construct
  source 1..21: mol_type = other DNA
cgtgtctctgcttctctcccc

SEQ ID NO: 17464 - DNA, 21 bp, synthetic construct
  source 1..21: mol_type = other DNA
cgtgtctctgcttctctcccc

SEQ ID NO: 17465 - DNA, 22 bp, synthetic construct
  source 1..22: mol_type = other DNA
ggatagacatgggtatggcctc

SEQ ID NO: 17466 - DNA, 22 bp, synthetic construct
  source 1..22: mol_type = other DNA
ggatagacatgggtatggcctc

SEQ ID NO: 17467 - DNA, 20 bp, synthetic construct
  source 1..20: mol_type = other DNA
atagacatgggtatggcctc

SEQ ID NO: 17468 - DNA, 21 bp, synthetic construct
  source 1..21: mol_type = other DNA
gatagacatgggtatggcctc

SEQ ID NO: 17469 - DNA, 21 bp, synthetic construct
  source 1..21: mol_type = other DNA
ggatagacatgggtatggcct

SEQ ID NO: 17470 - DNA, 20 bp, synthetic construct
  source 1..20: mol_type = other DNA
gatagacatgggtatggcct

SEQ ID NO: 17471 - DNA, 20 bp, synthetic construct
  source 1..20: mol_type = other DNA
cgtgtctctgcttctctccc

SEQ ID NO: 17472 - DNA, 20 bp, synthetic construct
  source 1..20: mol_type = other DNA
gatagacatgggtatggcct

SEQ ID NO: 17473 - DNA, 21 bp, synthetic construct
  source 1..21: mol_type = other DNA
ggatagacatgggtatggcct

SEQ ID NO: 17474 - DNA, 21 bp, synthetic construct
  source 1..21: mol_type = other DNA
ggatagacatgggtatggcct

SEQ ID NO: 17475 - DNA, 21 bp, synthetic construct
  source 1..21: mol_type = other DNA
gggatagacatgggtatggcc

SEQ ID NO: 17476 - DNA, 20 bp, synthetic construct
  source 1..20: mol_type = other DNA
ggatagacatgggtatggcc

SEQ ID NO: 17477 - DNA, 20 bp, synthetic construct
  source 1..20: mol_type = other DNA
acgtgtctctgcttctctcc

SEQ ID NO: 17478 - DNA, 23 bp, synthetic construct
  source 1..23: mol_type = other DNA
acaacgtgtctctgcttctctcc

SEQ ID NO: 17479 - DNA, 23 bp, synthetic construct
  source 1..23: mol_type = other DNA
acaacgtgtctctgcttctctcc

SEQ ID NO: 17480 - DNA, 24 bp, synthetic construct
  source 1..24: mol_type = other DNA
ttacaacgtgtctctgcttctctc

SEQ ID NO: 17481 - DNA, 20 bp, synthetic construct
  source 1..20: mol_type = other DNA
gggatagacatgggtatggc

SEQ ID NO: 17482 - DNA, 20 bp, synthetic construct
  source 1..20: mol_type = other DNA
aacgtgtctctgcttctctc

SEQ ID NO: 17483 - DNA, 23 bp, synthetic construct
  source 1..23: mol_type = other DNA
tacaacgtgtctctgcttctctc

SEQ ID NO: 17484 - DNA, 23 bp, synthetic construct
  source 1..23: mol_type = other DNA
tacaacgtgtctctgcttctctc

SEQ ID NO: 17485 - DNA, 20 bp, synthetic construct
  source 1..20: mol_type = other DNA
ggggatagacatgggtatgg

SEQ ID NO: 17486 - DNA, 20 bp, synthetic construct
  source 1..20: mol_type = other DNA
caacgtgtctctgcttctct

SEQ ID NO: 17487 - DNA, 20 bp, synthetic construct
  source 1..20: mol_type = other DNA
gggggatagacatgggtatg

SEQ ID NO: 17488 - DNA, 20 bp, synthetic construct
  source 1..20: mol_type = other DNA
acaacgtgtctctgcttctc

SEQ ID NO: 17489 - DNA, 23 bp, synthetic construct
  source 1..23: mol_type = other DNA
cgggggggatagacatgggtatg

SEQ ID NO: 17490 - DNA, 23 bp, synthetic construct
  source 1..23: mol_type = other DNA
cgggggggatagacatgggtatg

SEQ ID NO: 17491 - DNA, 23 bp, synthetic construct
  source 1..23: mol_type = other DNA
cgggggggatagacatgggtatg

SEQ ID NO: 17492 - DNA, 23 bp, synthetic construct
  source 1..23: mol_type = other DNA
cttacaacgtgtctctgcttctc

SEQ ID NO: 17493 - DNA, 24 bp, synthetic construct
  source 1..24: mol_type = other DNA
gccttacaacgtgtctctgcttct

SEQ ID NO: 17494 - DNA, 20 bp, synthetic construct
  source 1..20: mol_type = other DNA
ggggggatagacatgggtat

SEQ ID NO: 17495 - DNA, 20 bp, synthetic construct
  source 1..20: mol_type = other DNA
ggggggatagacatgggtat

SEQ ID NO: 17496 - DNA, 20 bp, synthetic construct
  source 1..20: mol_type = other DNA
ggggggatagacatgggtat

SEQ ID NO: 17497 - DNA, 20 bp, synthetic construct
  source 1..20: mol_type = other DNA
ggggggatagacatgggtat

SEQ ID NO: 17498 - DNA, 20 bp, synthetic construct
  source 1..20: mol_type = other DNA
ggggggatagacatgggtat

SEQ ID NO: 17499 - DNA, 20 bp, synthetic construct
  source 1..20: mol_type = other DNA
tacaacgtgtctctgcttct

SEQ ID NO: 17500 - DNA, 23 bp, synthetic construct
  source 1..23: mol_type = other DNA
ccttacaacgtgtctctgcttct

SEQ ID NO: 17501 - DNA, 20 bp, synthetic construct
  source 1..20: mol_type = other DNA
ggggggatagacatgggtat

SEQ ID NO: 17502 - DNA, 24 bp, synthetic construct
  source 1..24: mol_type = other DNA
agccttacaacgtgtctctgcttc

SEQ ID NO: 17503 - DNA, 20 bp, synthetic construct
  source 1..20: mol_type = other DNA
gggggggatagacatgggta

SEQ ID NO: 17504 - DNA, 20 bp, synthetic construct
  source 1..20: mol_type = other DNA
gggggggatagacatgggta

SEQ ID NO: 17505 - DNA, 20 bp, synthetic construct
  source 1..20: mol_type = other DNA
gggggggatagacatgggta

SEQ ID NO: 17506 - DNA, 20 bp, synthetic construct
  source 1..20: mol_type = other DNA
gggggggatagacatgggta

SEQ ID NO: 17507 - DNA, 20 bp, synthetic construct
  source 1..20: mol_type = other DNA
gggggggatagacatgggta

SEQ ID NO: 17508 - DNA, 20 bp, synthetic construct
  source 1..20: mol_type = other DNA
gggggggatagacatgggta

SEQ ID NO: 17509 - DNA, 20 bp, synthetic construct
  source 1..20: mol_type = other DNA
gggggggatagacatgggta

SEQ ID NO: 17510 - DNA, 20 bp, synthetic construct
  source 1..20: mol_type = other DNA
gggggggatagacatgggta

SEQ ID NO: 17511 - DNA, 20 bp, synthetic construct
  source 1..20: mol_type = other DNA
gggggggatagacatgggta

SEQ ID NO: 17512 - DNA, 20 bp, synthetic construct
  source 1..20: mol_type = other DNA
gggggggatagacatgggta

SEQ ID NO: 17513 - DNA, 20 bp, synthetic construct
  source 1..20: mol_type = other DNA
ttacaacgtgtctctgcttc

SEQ ID NO: 17514 - DNA, 23 bp, synthetic construct
  source 1..23: mol_type = other DNA
ctcgggggggatagacatgggta

SEQ ID NO: 17515 - DNA, 23 bp, synthetic construct
  source 1..23: mol_type = other DNA
gccttacaacgtgtctctgcttc

SEQ ID NO: 17516 - DNA, 22 bp, synthetic construct
  source 1..22: mol_type = other DNA
tcgggggggatagacatgggta

SEQ ID NO: 17517 - DNA, 20 bp, synthetic construct
  source 1..20: mol_type = other DNA
gggggggatagacatgggta

SEQ ID NO: 17518 - DNA, 24 bp, synthetic construct
  source 1..24: mol_type = other DNA
acctcgggggggatagacatgggt

SEQ ID NO: 17519 - DNA, 24 bp, synthetic construct
  source 1..24: mol_type = other DNA
cagccttacaacgtgtctctgctt

SEQ ID NO: 17520 - DNA, 21 bp, synthetic construct
  source 1..21: mol_type = other DNA
tcgggggggatagacatgggt

SEQ ID NO: 17521 - DNA, 21 bp, synthetic construct
  source 1..21: mol_type = other DNA
tcgggggggatagacatgggt

SEQ ID NO: 17522 - DNA, 20 bp, synthetic construct
  source 1..20: mol_type = other DNA
cgggggggatagacatgggt

SEQ ID NO: 17523 - DNA, 20 bp, synthetic construct
  source 1..20: mol_type = other DNA
cgggggggatagacatgggt

SEQ ID NO: 17524 - DNA, 20 bp, synthetic construct
  source 1..20: mol_type = other DNA
cgggggggatagacatgggt

SEQ ID NO: 17525 - DNA, 20 bp, synthetic construct
  source 1..20: mol_type = other DNA
cgggggggatagacatgggt

SEQ ID NO: 17526 - DNA, 20 bp, synthetic construct
  source 1..20: mol_type = other DNA
cttacaacgtgtctctgctt

SEQ ID NO: 17527 - DNA, 23 bp, synthetic construct
  source 1..23: mol_type = other DNA
cctcgggggggatagacatgggt

SEQ ID NO: 17528 - DNA, 23 bp, synthetic construct
  source 1..23: mol_type = other DNA
agccttacaacgtgtctctgctt

SEQ ID NO: 17529 - DNA, 21 bp, synthetic construct
  source 1..21: mol_type = other DNA
ctcgggggggatagacatggg

SEQ ID NO: 17530 - DNA, 20 bp, synthetic construct
  source 1..20: mol_type = other DNA
tcgggggggatagacatggg

SEQ ID NO: 17531 - DNA, 20 bp, synthetic construct
  source 1..20: mol_type = other DNA
ccttacaacgtgtctctgct

SEQ ID NO: 17532 - DNA, 20 bp, synthetic construct
  source 1..20: mol_type = other DNA
ctcgggggggatagacatgg

SEQ ID NO: 17533 - DNA, 20 bp, synthetic construct
  source 1..20: mol_type = other DNA
gccttacaacgtgtctctgc

SEQ ID NO: 17534 - DNA, 23 bp, synthetic construct
  source 1..23: mol_type = other DNA
tcagccttacaacgtgtctctgc

SEQ ID NO: 17535 - DNA, 20 bp, synthetic construct
  source 1..20: mol_type = other DNA
cctcgggggggatagacatg

SEQ ID NO: 17536 - DNA, 20 bp, synthetic construct
  source 1..20: mol_type = other DNA
cctcgggggggatagacatg

SEQ ID NO: 17537 - DNA, 20 bp, synthetic construct
  source 1..20: mol_type = other DNA
cctcgggggggatagacatg

SEQ ID NO: 17538 - DNA, 20 bp, synthetic construct
  source 1..20: mol_type = other DNA
cctcgggggggatagacatg

SEQ ID NO: 17539 - DNA, 20 bp, synthetic construct
  source 1..20: mol_type = other DNA
cctcgggggggatagacatg

SEQ ID NO: 17540 - DNA, 20 bp, synthetic construct
  source 1..20: mol_type = other DNA
agccttacaacgtgtctctg

SEQ ID NO: 17541 - DNA, 20 bp, synthetic construct
  source 1..20: mol_type = other DNA
cctcgggggggatagacatg

SEQ ID NO: 17542 - DNA, 20 bp, synthetic construct
  source 1..20: mol_type = other DNA
acctcgggggggatagacat

SEQ ID NO: 17543 - DNA, 20 bp, synthetic construct
  source 1..20: mol_type = other DNA
acctcgggggggatagacat

SEQ ID NO: 17544 - DNA, 20 bp, synthetic construct
  source 1..20: mol_type = other DNA
acctcgggggggatagacat

SEQ ID NO: 17545 - DNA, 20 bp, synthetic construct
  source 1..20: mol_type = other DNA
acctcgggggggatagacat

SEQ ID NO: 17546 - DNA, 20 bp, synthetic construct
  source 1..20: mol_type = other DNA
acctcgggggggatagacat

SEQ ID NO: 17547 - DNA, 20 bp, synthetic construct
  source 1..20: mol_type = other DNA
acctcgggggggatagacat

SEQ ID NO: 17548 - DNA, 20 bp, synthetic construct
  source 1..20: mol_type = other DNA
acctcgggggggatagacat

SEQ ID NO: 17549 - DNA, 20 bp, synthetic construct
  source 1..20: mol_type = other DNA
acctcgggggggatagacat

SEQ ID NO: 17550 - DNA, 20 bp, synthetic construct
  source 1..20: mol_type = other DNA
acctcgggggggatagacat

SEQ ID NO: 17551 - DNA, 20 bp, synthetic construct
  source 1..20: mol_type = other DNA
acctcgggggggatagacat

SEQ ID NO: 17552 - DNA, 20 bp, synthetic construct
  source 1..20: mol_type = other DNA
cagccttacaacgtgtctct

SEQ ID NO: 17553 - DNA, 23 bp, synthetic construct
  source 1..23: mol_type = other DNA
gatcagccttacaacgtgtctct

SEQ ID NO: 17554 - DNA, 20 bp, synthetic construct
  source 1..20: mol_type = other DNA
acctcgggggggatagacat

SEQ ID NO: 17555 - DNA, 21 bp, synthetic construct
  source 1..21: mol_type = other DNA
tgacctcgggggggatagaca

SEQ ID NO: 17556 - DNA, 21 bp, synthetic construct
  source 1..21: mol_type = other DNA
tgacctcgggggggatagaca

SEQ ID NO: 17557 - DNA, 20 bp, synthetic construct
  source 1..20: mol_type = other DNA
gacctcgggggggatagaca

SEQ ID NO: 17558 - DNA, 20 bp, synthetic construct
  source 1..20: mol_type = other DNA
gacctcgggggggatagaca

SEQ ID NO: 17559 - DNA, 20 bp, synthetic construct
  source 1..20: mol_type = other DNA
gacctcgggggggatagaca

SEQ ID NO: 17560 - DNA, 20 bp, synthetic construct
  source 1..20: mol_type = other DNA
gacctcgggggggatagaca

SEQ ID NO: 17561 - DNA, 20 bp, synthetic construct
  source 1..20: mol_type = other DNA
gacctcgggggggatagaca

SEQ ID NO: 17562 - DNA, 20 bp, synthetic construct
  source 1..20: mol_type = other DNA
gacctcgggggggatagaca

SEQ ID NO: 17563 - DNA, 20 bp, synthetic construct
  source 1..20: mol_type = other DNA
gacctcgggggggatagaca

SEQ ID NO: 17564 - DNA, 20 bp, synthetic construct
  source 1..20: mol_type = other DNA
gacctcgggggggatagaca

SEQ ID NO: 17565 - DNA, 20 bp, synthetic construct
  source 1..20: mol_type = other DNA
gacctcgggggggatagaca

SEQ ID NO: 17566 - DNA, 20 bp, synthetic construct
  source 1..20: mol_type = other DNA
gacctcgggggggatagaca

SEQ ID NO: 17567 - DNA, 20 bp, synthetic construct
  source 1..20: mol_type = other DNA
tcagccttacaacgtgtctc

SEQ ID NO: 17568 - DNA, 20 bp, synthetic construct
  source 1..20: mol_type = other DNA
tcagccttacaacgtgtctc

SEQ ID NO: 17569 - DNA, 20 bp, synthetic construct
  source 1..20: mol_type = other DNA
tcagccttacaacgtgtctc

SEQ ID NO: 17570 - DNA, 20 bp, synthetic construct
  source 1..20: mol_type = other DNA
tcagccttacaacgtgtctc

SEQ ID NO: 17571 - DNA, 20 bp, synthetic construct
  source 1..20: mol_type = other DNA
tcagccttacaacgtgtctc

SEQ ID NO: 17572 - DNA, 20 bp, synthetic construct
  source 1..20: mol_type = other DNA
tcagccttacaacgtgtctc

SEQ ID NO: 17573 - DNA, 23 bp, synthetic construct
  source 1..23: mol_type = other DNA
acttgacctcgggggggatagac

SEQ ID NO: 17574 - DNA, 21 bp, synthetic construct
  source 1..21: mol_type = other DNA
ttgacctcgggggggatagac

SEQ ID NO: 17575 - DNA, 23 bp, synthetic construct
  source 1..23: mol_type = other DNA
acttgacctcgggggggatagac

SEQ ID NO: 17576 - DNA, 21 bp, synthetic construct
  source 1..21: mol_type = other DNA
ttgacctcgggggggatagac

SEQ ID NO: 17577 - DNA, 21 bp, synthetic construct
  source 1..21: mol_type = other DNA
ttgacctcgggggggatagac

SEQ ID NO: 17578 - DNA, 21 bp, synthetic construct
  source 1..21: mol_type = other DNA
ttgacctcgggggggatagac

SEQ ID NO: 17579 - DNA, 21 bp, synthetic construct
  source 1..21: mol_type = other DNA
ttgacctcgggggggatagac

SEQ ID NO: 17580 - DNA, 21 bp, synthetic construct
  source 1..21: mol_type = other DNA
ttgacctcgggggggatagac

SEQ ID NO: 17581 - DNA, 20 bp, synthetic construct
  source 1..20: mol_type = other DNA
tgacctcgggggggatagac

SEQ ID NO: 17582 - DNA, 20 bp, synthetic construct
  source 1..20: mol_type = other DNA
tgacctcgggggggatagac

SEQ ID NO: 17583 - DNA, 20 bp, synthetic construct
  source 1..20: mol_type = other DNA
tgacctcgggggggatagac

SEQ ID NO: 17584 - DNA, 20 bp, synthetic construct
  source 1..20: mol_type = other DNA
tgacctcgggggggatagac

SEQ ID NO: 17585 - DNA, 20 bp, synthetic construct
  source 1..20: mol_type = other DNA
atcagccttacaacgtgtct

SEQ ID NO: 17586 - DNA, 20 bp, synthetic construct
  source 1..20: mol_type = other DNA
atcagccttacaacgtgtct

SEQ ID NO: 17587 - DNA, 20 bp, synthetic construct
  source 1..20: mol_type = other DNA
atcagccttacaacgtgtct

SEQ ID NO: 17588 - DNA, 20 bp, synthetic construct
  source 1..20: mol_type = other DNA
atcagccttacaacgtgtct

SEQ ID NO: 17589 - DNA, 22 bp, synthetic construct
  source 1..22: mol_type = other DNA
ggatcagccttacaacgtgtct

SEQ ID NO: 17590 - DNA, 21 bp, synthetic construct
  source 1..21: mol_type = other DNA
cttgacctcgggggggataga

SEQ ID NO: 17591 - DNA, 20 bp, synthetic construct
  source 1..20: mol_type = other DNA
ttgacctcgggggggataga

SEQ ID NO: 17592 - DNA, 20 bp, synthetic construct
  source 1..20: mol_type = other DNA
gatcagccttacaacgtgtc

SEQ ID NO: 17593 - DNA, 23 bp, synthetic construct
  source 1..23: mol_type = other DNA
tgggatcagccttacaacgtgtc

SEQ ID NO: 17594 - DNA, 20 bp, synthetic construct
  source 1..20: mol_type = other DNA
cttgacctcgggggggatag

SEQ ID NO: 17595 - DNA, 20 bp, synthetic construct
  source 1..20: mol_type = other DNA
ggatcagccttacaacgtgt

SEQ ID NO: 17596 - DNA, 24 bp, synthetic construct
  source 1..24: mol_type = other DNA
cctgggatcagccttacaacgtgt

SEQ ID NO: 17597 - DNA, 20 bp, synthetic construct
  source 1..20: mol_type = other DNA
acttgacctcgggggggata

SEQ ID NO: 17598 - DNA, 20 bp, synthetic construct
  source 1..20: mol_type = other DNA
gggatcagccttacaacgtg

SEQ ID NO: 17599 - DNA, 20 bp, synthetic construct
  source 1..20: mol_type = other DNA
acttgacctcgggggggata

SEQ ID NO: 17600 - DNA, 20 bp, synthetic construct
  source 1..20: mol_type = other DNA
aacttgacctcgggggggat

SEQ ID NO: 17601 - DNA, 20 bp, synthetic construct
  source 1..20: mol_type = other DNA
aacttgacctcgggggggat

SEQ ID NO: 17602 - DNA, 20 bp, synthetic construct
  source 1..20: mol_type = other DNA
aacttgacctcgggggggat

SEQ ID NO: 17603 - DNA, 20 bp, synthetic construct
  source 1..20: mol_type = other DNA
aacttgacctcgggggggat

SEQ ID NO: 17604 - DNA, 20 bp, synthetic construct
  source 1..20: mol_type = other DNA
aacttgacctcgggggggat

SEQ ID NO: 17605 - DNA, 20 bp, synthetic construct
  source 1..20: mol_type = other DNA
tgggatcagccttacaacgt

SEQ ID NO: 17606 - DNA, 23 bp, synthetic construct
  source 1..23: mol_type = other DNA
gcctgggatcagccttacaacgt

SEQ ID NO: 17607 - DNA, 20 bp, synthetic construct
  source 1..20: mol_type = other DNA
aacttgacctcgggggggat

SEQ ID NO: 17608 - DNA, 20 bp, synthetic construct
  source 1..20: mol_type = other DNA
aacttgacctcgggggggat

SEQ ID NO: 17609 - DNA, 20 bp, synthetic construct
  source 1..20: mol_type = other DNA
gaacttgacctcggggggga

SEQ ID NO: 17610 - DNA, 20 bp, synthetic construct
  source 1..20: mol_type = other DNA
gaacttgacctcggggggga

SEQ ID NO: 17611 - DNA, 20 bp, synthetic construct
  source 1..20: mol_type = other DNA
gaacttgacctcggggggga

SEQ ID NO: 17612 - DNA, 20 bp, synthetic construct
  source 1..20: mol_type = other DNA
gaacttgacctcggggggga

SEQ ID NO: 17613 - DNA, 20 bp, synthetic construct
  source 1..20: mol_type = other DNA
ctgggatcagccttacaacg

SEQ ID NO: 17614 - DNA, 20 bp, synthetic construct
  source 1..20: mol_type = other DNA
ctgggatcagccttacaacg

SEQ ID NO: 17615 - DNA, 20 bp, synthetic construct
  source 1..20: mol_type = other DNA
ctgggatcagccttacaacg

SEQ ID NO: 17616 - DNA, 20 bp, synthetic construct
  source 1..20: mol_type = other DNA
ctgggatcagccttacaacg

SEQ ID NO: 17617 - DNA, 20 bp, synthetic construct
  source 1..20: mol_type = other DNA
ctgggatcagccttacaacg

SEQ ID NO: 17618 - DNA, 23 bp, synthetic construct
  source 1..23: mol_type = other DNA
gttgaacttgacctcggggggga

SEQ ID NO: 17619 - DNA, 23 bp, synthetic construct
  source 1..23: mol_type = other DNA
gttgaacttgacctcggggggga

SEQ ID NO: 17620 - DNA, 22 bp, synthetic construct
  source 1..22: mol_type = other DNA
ttgaacttgacctcggggggga

SEQ ID NO: 17621 - DNA, 20 bp, synthetic construct
  source 1..20: mol_type = other DNA
gaacttgacctcggggggga

SEQ ID NO: 17622 - DNA, 20 bp, synthetic construct
  source 1..20: mol_type = other DNA
ctgggatcagccttacaacg

SEQ ID NO: 17623 - DNA, 21 bp, synthetic construct
  source 1..21: mol_type = other DNA
ttgaacttgacctcggggggg

SEQ ID NO: 17624 - DNA, 21 bp, synthetic construct
  source 1..21: mol_type = other DNA
ttgaacttgacctcggggggg

SEQ ID NO: 17625 - DNA, 20 bp, synthetic construct
  source 1..20: mol_type = other DNA
cctgggatcagccttacaac

SEQ ID NO: 17626 - DNA, 20 bp, synthetic construct
  source 1..20: mol_type = other DNA
cctgggatcagccttacaac

SEQ ID NO: 17627 - DNA, 20 bp, synthetic construct
  source 1..20: mol_type = other DNA
cctgggatcagccttacaac

SEQ ID NO: 17628 - DNA, 20 bp, synthetic construct
  source 1..20: mol_type = other DNA
cctgggatcagccttacaac

SEQ ID NO: 17629 - DNA, 20 bp, synthetic construct
  source 1..20: mol_type = other DNA
tgaacttgacctcggggggg

SEQ ID NO: 17630 - DNA, 23 bp, synthetic construct
  source 1..23: mol_type = other DNA
aggcctgggatcagccttacaac

SEQ ID NO: 17631 - DNA, 21 bp, synthetic construct
  source 1..21: mol_type = other DNA
ttgaacttgacctcggggggg

SEQ ID NO: 17632 - DNA, 21 bp, synthetic construct
  source 1..21: mol_type = other DNA
ttgaacttgacctcggggggg

SEQ ID NO: 17633 - DNA, 22 bp, synthetic construct
  source 1..22: mol_type = other DNA
ggcctgggatcagccttacaac

SEQ ID NO: 17634 - DNA, 21 bp, synthetic construct
  source 1..21: mol_type = other DNA
gttgaacttgacctcgggggg

SEQ ID NO: 17635 - DNA, 20 bp, synthetic construct
  source 1..20: mol_type = other DNA
gcctgggatcagccttacaa

SEQ ID NO: 17636 - DNA, 20 bp, synthetic construct
  source 1..20: mol_type = other DNA
gcctgggatcagccttacaa

SEQ ID NO: 17637 - DNA, 20 bp, synthetic construct
  source 1..20: mol_type = other DNA
gcctgggatcagccttacaa

SEQ ID NO: 17638 - DNA, 20 bp, synthetic construct
  source 1..20: mol_type = other DNA
ttgaacttgacctcgggggg

SEQ ID NO: 17639 - DNA, 20 bp, synthetic construct
  source 1..20: mol_type = other DNA
ttgaacttgacctcgggggg

SEQ ID NO: 17640 - DNA, 20 bp, synthetic construct
  source 1..20: mol_type = other DNA
gcctgggatcagccttacaa

SEQ ID NO: 17641 - DNA, 20 bp, synthetic construct
  source 1..20: mol_type = other DNA
gcctgggatcagccttacaa

SEQ ID NO: 17642 - DNA, 24 bp, synthetic construct
  source 1..24: mol_type = other DNA
tttgttgaacttgacctcgggggg

SEQ ID NO: 17643 - DNA, 20 bp, synthetic construct
  source 1..20: mol_type = other DNA
ttgaacttgacctcgggggg

SEQ ID NO: 17644 - DNA, 20 bp, synthetic construct
  source 1..20: mol_type = other DNA
ggcctgggatcagccttaca

SEQ ID NO: 17645 - DNA, 20 bp, synthetic construct
  source 1..20: mol_type = other DNA
ggcctgggatcagccttaca

SEQ ID NO: 17646 - DNA, 20 bp, synthetic construct
  source 1..20: mol_type = other DNA
ggcctgggatcagccttaca

SEQ ID NO: 17647 - DNA, 20 bp, synthetic construct
  source 1..20: mol_type = other DNA
ggcctgggatcagccttaca

SEQ ID NO: 17648 - DNA, 20 bp, synthetic construct
  source 1..20: mol_type = other DNA
gttgaacttgacctcggggg

SEQ ID NO: 17649 - DNA, 20 bp, synthetic construct
  source 1..20: mol_type = other DNA
gttgaacttgacctcggggg

SEQ ID NO: 17650 - DNA, 20 bp, synthetic construct
  source 1..20: mol_type = other DNA
gttgaacttgacctcggggg

SEQ ID NO: 17651 - DNA, 20 bp, synthetic construct
  source 1..20: mol_type = other DNA
gttgaacttgacctcggggg

SEQ ID NO: 17652 - DNA, 20 bp, synthetic construct
  source 1..20: mol_type = other DNA
gttgaacttgacctcggggg

SEQ ID NO: 17653 - DNA, 24 bp, synthetic construct
  source 1..24: mol_type = other DNA
tcgaggcctgggatcagccttaca

SEQ ID NO: 17654 - DNA, 20 bp, synthetic construct
  source 1..20: mol_type = other DNA
gttgaacttgacctcggggg

SEQ ID NO: 17655 - DNA, 20 bp, synthetic construct
  source 1..20: mol_type = other DNA
gttgaacttgacctcggggg

SEQ ID NO: 17656 - DNA, 20 bp, synthetic construct
  source 1..20: mol_type = other DNA
tgttgaacttgacctcgggg

SEQ ID NO: 17657 - DNA, 20 bp, synthetic construct
  source 1..20: mol_type = other DNA
tgttgaacttgacctcgggg

SEQ ID NO: 17658 - DNA, 20 bp, synthetic construct
  source 1..20: mol_type = other DNA
tgttgaacttgacctcgggg

SEQ ID NO: 17659 - DNA, 20 bp, synthetic construct
  source 1..20: mol_type = other DNA
tgttgaacttgacctcgggg

SEQ ID NO: 17660 - DNA, 20 bp, synthetic construct
  source 1..20: mol_type = other DNA
tgttgaacttgacctcgggg

SEQ ID NO: 17661 - DNA, 20 bp, synthetic construct
  source 1..20: mol_type = other DNA
tgttgaacttgacctcgggg

SEQ ID NO: 17662 - DNA, 20 bp, synthetic construct
  source 1..20: mol_type = other DNA
tgttgaacttgacctcgggg

SEQ ID NO: 17663 - DNA, 20 bp, synthetic construct
  source 1..20: mol_type = other DNA
tgttgaacttgacctcgggg

SEQ ID NO: 17664 - DNA, 20 bp, synthetic construct
  source 1..20: mol_type = other DNA
tgttgaacttgacctcgggg

SEQ ID NO: 17665 - DNA, 20 bp, synthetic construct
  source 1..20: mol_type = other DNA
tgttgaacttgacctcgggg

SEQ ID NO: 17666 - DNA, 20 bp, synthetic construct
  source 1..20: mol_type = other DNA
aggcctgggatcagccttac

SEQ ID NO: 17667 - DNA, 21 bp, synthetic construct
  source 1..21: mol_type = other DNA
gaggcctgggatcagccttac

SEQ ID NO: 17668 - DNA, 21 bp, synthetic construct
  source 1..21: mol_type = other DNA
gaggcctgggatcagccttac

SEQ ID NO: 17669 - DNA, 20 bp, synthetic construct
  source 1..20: mol_type = other DNA
tgttgaacttgacctcgggg

SEQ ID NO: 17670 - DNA, 23 bp, synthetic construct
  source 1..23: mol_type = other DNA
ggtttgttgaacttgacctcggg

SEQ ID NO: 17671 - DNA, 21 bp, synthetic construct
  source 1..21: mol_type = other DNA
tttgttgaacttgacctcggg

SEQ ID NO: 17672 - DNA, 23 bp, synthetic construct
  source 1..23: mol_type = other DNA
ggtttgttgaacttgacctcggg

SEQ ID NO: 17673 - DNA, 21 bp, synthetic construct
  source 1..21: mol_type = other DNA
tttgttgaacttgacctcggg

SEQ ID NO: 17674 - DNA, 21 bp, synthetic construct
  source 1..21: mol_type = other DNA
tttgttgaacttgacctcggg

SEQ ID NO: 17675 - DNA, 21 bp, synthetic construct
  source 1..21: mol_type = other DNA
tttgttgaacttgacctcggg

SEQ ID NO: 17676 - DNA, 21 bp, synthetic construct
  source 1..21: mol_type = other DNA
tttgttgaacttgacctcggg

SEQ ID NO: 17677 - DNA, 21 bp, synthetic construct
  source 1..21: mol_type = other DNA
tttgttgaacttgacctcggg

SEQ ID NO: 17678 - DNA, 20 bp, synthetic construct
  source 1..20: mol_type = other DNA
ttgttgaacttgacctcggg

SEQ ID NO: 17679 - DNA, 20 bp, synthetic construct
  source 1..20: mol_type = other DNA
ttgttgaacttgacctcggg

SEQ ID NO: 17680 - DNA, 20 bp, synthetic construct
  source 1..20: mol_type = other DNA
ttgttgaacttgacctcggg

SEQ ID NO: 17681 - DNA, 20 bp, synthetic construct
  source 1..20: mol_type = other DNA
ttgttgaacttgacctcggg

SEQ ID NO: 17682 - DNA, 20 bp, synthetic construct
  source 1..20: mol_type = other DNA
ttgttgaacttgacctcggg

SEQ ID NO: 17683 - DNA, 20 bp, synthetic construct
  source 1..20: mol_type = other DNA
ttgttgaacttgacctcggg

SEQ ID NO: 17684 - DNA, 20 bp, synthetic construct
  source 1..20: mol_type = other DNA
ttgttgaacttgacctcggg

SEQ ID NO: 17685 - DNA, 20 bp, synthetic construct
  source 1..20: mol_type = other DNA
ttgttgaacttgacctcggg

SEQ ID NO: 17686 - DNA, 20 bp, synthetic construct
  source 1..20: mol_type = other DNA
ttgttgaacttgacctcggg

SEQ ID NO: 17687 - DNA, 20 bp, synthetic construct
  source 1..20: mol_type = other DNA
ttgttgaacttgacctcggg

SEQ ID NO: 17688 - DNA, 20 bp, synthetic construct
  source 1..20: mol_type = other DNA
gaggcctgggatcagcctta

SEQ ID NO: 17689 - DNA, 20 bp, synthetic construct
  source 1..20: mol_type = other DNA
gaggcctgggatcagcctta

SEQ ID NO: 17690 - DNA, 21 bp, synthetic construct
  source 1..21: mol_type = other DNA
cgaggcctgggatcagcctta

SEQ ID NO: 17691 - DNA, 23 bp, synthetic construct
  source 1..23: mol_type = other DNA
gggtttgttgaacttgacctcgg

SEQ ID NO: 17692 - DNA, 21 bp, synthetic construct
  source 1..21: mol_type = other DNA
gtttgttgaacttgacctcgg

SEQ ID NO: 17693 - DNA, 21 bp, synthetic construct
  source 1..21: mol_type = other DNA
gtttgttgaacttgacctcgg

SEQ ID NO: 17694 - DNA, 21 bp, synthetic construct
  source 1..21: mol_type = other DNA
gtttgttgaacttgacctcgg

SEQ ID NO: 17695 - DNA, 20 bp, synthetic construct
  source 1..20: mol_type = other DNA
tttgttgaacttgacctcgg

SEQ ID NO: 17696 - DNA, 20 bp, synthetic construct
  source 1..20: mol_type = other DNA
tttgttgaacttgacctcgg

SEQ ID NO: 17697 - DNA, 20 bp, synthetic construct
  source 1..20: mol_type = other DNA
tttgttgaacttgacctcgg

SEQ ID NO: 17698 - DNA, 20 bp, synthetic construct
  source 1..20: mol_type = other DNA
tttgttgaacttgacctcgg

SEQ ID NO: 17699 - DNA, 20 bp, synthetic construct
  source 1..20: mol_type = other DNA
tttgttgaacttgacctcgg

SEQ ID NO: 17700 - DNA, 20 bp, synthetic construct
  source 1..20: mol_type = other DNA
tttgttgaacttgacctcgg

SEQ ID NO: 17701 - DNA, 20 bp, synthetic construct
  source 1..20: mol_type = other DNA
tttgttgaacttgacctcgg

SEQ ID NO: 17702 - DNA, 20 bp, synthetic construct
  source 1..20: mol_type = other DNA
tttgttgaacttgacctcgg

SEQ ID NO: 17703 - DNA, 20 bp, synthetic construct
  source 1..20: mol_type = other DNA
tttgttgaacttgacctcgg

SEQ ID NO: 17704 - DNA, 20 bp, synthetic construct
  source 1..20: mol_type = other DNA
tttgttgaacttgacctcgg

SEQ ID NO: 17705 - DNA, 20 bp, synthetic construct
  source 1..20: mol_type = other DNA
cgaggcctgggatcagcctt

SEQ ID NO: 17706 - DNA, 23 bp, synthetic construct
  source 1..23: mol_type = other DNA
gctcgaggcctgggatcagcctt

SEQ ID NO: 17707 - DNA, 23 bp, synthetic construct
  source 1..23: mol_type = other DNA
gctcgaggcctgggatcagcctt

SEQ ID NO: 17708 - DNA, 21 bp, synthetic construct
  source 1..21: mol_type = other DNA
gtttgttgaacttgacctcgg

SEQ ID NO: 17709 - DNA, 21 bp, synthetic construct
  source 1..21: mol_type = other DNA
gtttgttgaacttgacctcgg

SEQ ID NO: 17710 - DNA, 24 bp, synthetic construct
  source 1..24: mol_type = other DNA
agggtttgttgaacttgacctcgg

SEQ ID NO: 17711 - DNA, 23 bp, synthetic construct
  source 1..23: mol_type = other DNA
agggtttgttgaacttgacctcg

SEQ ID NO: 17712 - DNA, 21 bp, synthetic construct
  source 1..21: mol_type = other DNA
ggtttgttgaacttgacctcg

SEQ ID NO: 17713 - DNA, 21 bp, synthetic construct
  source 1..21: mol_type = other DNA
ctcgaggcctgggatcagcct

SEQ ID NO: 17714 - DNA, 21 bp, synthetic construct
  source 1..21: mol_type = other DNA
ggtttgttgaacttgacctcg

SEQ ID NO: 17715 - DNA, 21 bp, synthetic construct
  source 1..21: mol_type = other DNA
ggtttgttgaacttgacctcg

SEQ ID NO: 17716 - DNA, 20 bp, synthetic construct
  source 1..20: mol_type = other DNA
gtttgttgaacttgacctcg

SEQ ID NO: 17717 - DNA, 20 bp, synthetic construct
  source 1..20: mol_type = other DNA
gtttgttgaacttgacctcg

SEQ ID NO: 17718 - DNA, 20 bp, synthetic construct
  source 1..20: mol_type = other DNA
gtttgttgaacttgacctcg

SEQ ID NO: 17719 - DNA, 20 bp, synthetic construct
  source 1..20: mol_type = other DNA
gtttgttgaacttgacctcg

SEQ ID NO: 17720 - DNA, 20 bp, synthetic construct
  source 1..20: mol_type = other DNA
gtttgttgaacttgacctcg

SEQ ID NO: 17721 - DNA, 20 bp, synthetic construct
  source 1..20: mol_type = other DNA
gtttgttgaacttgacctcg

SEQ ID NO: 17722 - DNA, 20 bp, synthetic construct
  source 1..20: mol_type = other DNA
gtttgttgaacttgacctcg

SEQ ID NO: 17723 - DNA, 20 bp, synthetic construct
  source 1..20: mol_type = other DNA
gtttgttgaacttgacctcg

SEQ ID NO: 17724 - DNA, 20 bp, synthetic construct
  source 1..20: mol_type = other DNA
gtttgttgaacttgacctcg

SEQ ID NO: 17725 - DNA, 20 bp, synthetic construct
  source 1..20: mol_type = other DNA
gtttgttgaacttgacctcg

SEQ ID NO: 17726 - DNA, 20 bp, synthetic construct
  source 1..20: mol_type = other DNA
tcgaggcctgggatcagcct

SEQ ID NO: 17727 - DNA, 21 bp, synthetic construct
  source 1..21: mol_type = other DNA
ggtttgttgaacttgacctcg

SEQ ID NO: 17728 - DNA, 21 bp, synthetic construct
  source 1..21: mol_type = other DNA
ggtttgttgaacttgacctcg

SEQ ID NO: 17729 - DNA, 21 bp, synthetic construct
  source 1..21: mol_type = other DNA
ctcgaggcctgggatcagcct

SEQ ID NO: 17730 - DNA, 21 bp, synthetic construct
  source 1..21: mol_type = other DNA
ctcgaggcctgggatcagcct

SEQ ID NO: 17731 - DNA, 20 bp, synthetic construct
  source 1..20: mol_type = other DNA
tcgaggcctgggatcagcct

SEQ ID NO: 17732 - DNA, 23 bp, synthetic construct
  source 1..23: mol_type = other DNA
aagggtttgttgaacttgacctc

SEQ ID NO: 17733 - DNA, 21 bp, synthetic construct
  source 1..21: mol_type = other DNA
gggtttgttgaacttgacctc

SEQ ID NO: 17734 - DNA, 21 bp, synthetic construct
  source 1..21: mol_type = other DNA
gggtttgttgaacttgacctc

SEQ ID NO: 17735 - DNA, 21 bp, synthetic construct
  source 1..21: mol_type = other DNA
gggtttgttgaacttgacctc

SEQ ID NO: 17736 - DNA, 20 bp, synthetic construct
  source 1..20: mol_type = other DNA
ggtttgttgaacttgacctc

SEQ ID NO: 17737 - DNA, 20 bp, synthetic construct
  source 1..20: mol_type = other DNA
ggtttgttgaacttgacctc

SEQ ID NO: 17738 - DNA, 20 bp, synthetic construct
  source 1..20: mol_type = other DNA
ggtttgttgaacttgacctc

SEQ ID NO: 17739 - DNA, 20 bp, synthetic construct
  source 1..20: mol_type = other DNA
ggtttgttgaacttgacctc

SEQ ID NO: 17740 - DNA, 20 bp, synthetic construct
  source 1..20: mol_type = other DNA
ggtttgttgaacttgacctc

SEQ ID NO: 17741 - DNA, 20 bp, synthetic construct
  source 1..20: mol_type = other DNA
ggtttgttgaacttgacctc

SEQ ID NO: 17742 - DNA, 20 bp, synthetic construct
  source 1..20: mol_type = other DNA
ggtttgttgaacttgacctc

SEQ ID NO: 17743 - DNA, 20 bp, synthetic construct
  source 1..20: mol_type = other DNA
ggtttgttgaacttgacctc

SEQ ID NO: 17744 - DNA, 20 bp, synthetic construct
  source 1..20: mol_type = other DNA
ggtttgttgaacttgacctc

SEQ ID NO: 17745 - DNA, 20 bp, synthetic construct
  source 1..20: mol_type = other DNA
ggtttgttgaacttgacctc

SEQ ID NO: 17746 - DNA, 20 bp, synthetic construct
  source 1..20: mol_type = other DNA
ctcgaggcctgggatcagcc

SEQ ID NO: 17747 - DNA, 21 bp, synthetic construct
  source 1..21: mol_type = other DNA
gggtttgttgaacttgacctc

SEQ ID NO: 17748 - DNA, 21 bp, synthetic construct
  source 1..21: mol_type = other DNA
gggtttgttgaacttgacctc

SEQ ID NO: 17749 - DNA, 22 bp, synthetic construct
  source 1..22: mol_type = other DNA
tgctcgaggcctgggatcagcc

SEQ ID NO: 17750 - DNA, 20 bp, synthetic construct
  source 1..20: mol_type = other DNA
ctcgaggcctgggatcagcc

SEQ ID NO: 17751 - DNA, 23 bp, synthetic construct
  source 1..23: mol_type = other DNA
aaagggtttgttgaacttgacct

SEQ ID NO: 17752 - DNA, 21 bp, synthetic construct
  source 1..21: mol_type = other DNA
agggtttgttgaacttgacct

SEQ ID NO: 17753 - DNA, 21 bp, synthetic construct
  source 1..21: mol_type = other DNA
agggtttgttgaacttgacct

SEQ ID NO: 17754 - DNA, 21 bp, synthetic construct
  source 1..21: mol_type = other DNA
agggtttgttgaacttgacct

SEQ ID NO: 17755 - DNA, 20 bp, synthetic construct
  source 1..20: mol_type = other DNA
gggtttgttgaacttgacct

SEQ ID NO: 17756 - DNA, 20 bp, synthetic construct
  source 1..20: mol_type = other DNA
gggtttgttgaacttgacct

SEQ ID NO: 17757 - DNA, 20 bp, synthetic construct
  source 1..20: mol_type = other DNA
gggtttgttgaacttgacct

SEQ ID NO: 17758 - DNA, 20 bp, synthetic construct
  source 1..20: mol_type = other DNA
gggtttgttgaacttgacct

SEQ ID NO: 17759 - DNA, 20 bp, synthetic construct
  source 1..20: mol_type = other DNA
gggtttgttgaacttgacct

SEQ ID NO: 17760 - DNA, 20 bp, synthetic construct
  source 1..20: mol_type = other DNA
gggtttgttgaacttgacct

SEQ ID NO: 17761 - DNA, 20 bp, synthetic construct
  source 1..20: mol_type = other DNA
gggtttgttgaacttgacct

SEQ ID NO: 17762 - DNA, 20 bp, synthetic construct
  source 1..20: mol_type = other DNA
gggtttgttgaacttgacct

SEQ ID NO: 17763 - DNA, 20 bp, synthetic construct
  source 1..20: mol_type = other DNA
gggtttgttgaacttgacct

SEQ ID NO: 17764 - DNA, 20 bp, synthetic construct
  source 1..20: mol_type = other DNA
gggtttgttgaacttgacct

SEQ ID NO: 17765 - DNA, 20 bp, synthetic construct
  source 1..20: mol_type = other DNA
gctcgaggcctgggatcagc

SEQ ID NO: 17766 - DNA, 23 bp, synthetic construct
  source 1..23: mol_type = other DNA
cttgctcgaggcctgggatcagc

SEQ ID NO: 17767 - DNA, 21 bp, synthetic construct
  source 1..21: mol_type = other DNA
agggtttgttgaacttgacct

SEQ ID NO: 17768 - DNA, 21 bp, synthetic construct
  source 1..21: mol_type = other DNA
agggtttgttgaacttgacct

SEQ ID NO: 17769 - DNA, 23 bp, synthetic construct
  source 1..23: mol_type = other DNA
caaagggtttgttgaacttgacc

SEQ ID NO: 17770 - DNA, 21 bp, synthetic construct
  source 1..21: mol_type = other DNA
aagggtttgttgaacttgacc

SEQ ID NO: 17771 - DNA, 21 bp, synthetic construct
  source 1..21: mol_type = other DNA
aagggtttgttgaacttgacc

SEQ ID NO: 17772 - DNA, 21 bp, synthetic construct
  source 1..21: mol_type = other DNA
aagggtttgttgaacttgacc

SEQ ID NO: 17773 - DNA, 20 bp, synthetic construct
  source 1..20: mol_type = other DNA
agggtttgttgaacttgacc

SEQ ID NO: 17774 - DNA, 20 bp, synthetic construct
  source 1..20: mol_type = other DNA
agggtttgttgaacttgacc

SEQ ID NO: 17775 - DNA, 20 bp, synthetic construct
  source 1..20: mol_type = other DNA
agggtttgttgaacttgacc

SEQ ID NO: 17776 - DNA, 20 bp, synthetic construct
  source 1..20: mol_type = other DNA
agggtttgttgaacttgacc

SEQ ID NO: 17777 - DNA, 20 bp, synthetic construct
  source 1..20: mol_type = other DNA
tgctcgaggcctgggatcag

SEQ ID NO: 17778 - DNA, 21 bp, synthetic construct
  source 1..21: mol_type = other DNA
aagggtttgttgaacttgacc

SEQ ID NO: 17779 - DNA, 21 bp, synthetic construct
  source 1..21: mol_type = other DNA
aagggtttgttgaacttgacc

SEQ ID NO: 17780 - DNA, 21 bp, synthetic construct
  source 1..21: mol_type = other DNA
aaagggtttgttgaacttgac

SEQ ID NO: 17781 - DNA, 20 bp, synthetic construct
  source 1..20: mol_type = other DNA
aagggtttgttgaacttgac

SEQ ID NO: 17782 - DNA, 20 bp, synthetic construct
  source 1..20: mol_type = other DNA
ttgctcgaggcctgggatca

SEQ ID NO: 17783 - DNA, 21 bp, synthetic construct
  source 1..21: mol_type = other DNA
aaagggtttgttgaacttgac

SEQ ID NO: 17784 - DNA, 21 bp, synthetic construct
  source 1..21: mol_type = other DNA
aaagggtttgttgaacttgac

SEQ ID NO: 17785 - DNA, 20 bp, synthetic construct
  source 1..20: mol_type = other DNA
cttgctcgaggcctgggatc

SEQ ID NO: 17786 - DNA, 20 bp, synthetic construct
  source 1..20: mol_type = other DNA
cttgctcgaggcctgggatc

SEQ ID NO: 17787 - DNA, 20 bp, synthetic construct
  source 1..20: mol_type = other DNA
cttgctcgaggcctgggatc

SEQ ID NO: 17788 - DNA, 20 bp, synthetic construct
  source 1..20: mol_type = other DNA
cttgctcgaggcctgggatc

SEQ ID NO: 17789 - DNA, 20 bp, synthetic construct
  source 1..20: mol_type = other DNA
cttgctcgaggcctgggatc

SEQ ID NO: 17790 - DNA, 20 bp, synthetic construct
  source 1..20: mol_type = other DNA
aaagggtttgttgaacttga

SEQ ID NO: 17791 - DNA, 20 bp, synthetic construct
  source 1..20: mol_type = other DNA
cttgctcgaggcctgggatc

SEQ ID NO: 17792 - DNA, 20 bp, synthetic construct
  source 1..20: mol_type = other DNA
ccttgctcgaggcctgggat

SEQ ID NO: 17793 - DNA, 20 bp, synthetic construct
  source 1..20: mol_type = other DNA
ccttgctcgaggcctgggat

SEQ ID NO: 17794 - DNA, 20 bp, synthetic construct
  source 1..20: mol_type = other DNA
ccttgctcgaggcctgggat

SEQ ID NO: 17795 - DNA, 20 bp, synthetic construct
  source 1..20: mol_type = other DNA
ccttgctcgaggcctgggat

SEQ ID NO: 17796 - DNA, 20 bp, synthetic construct
  source 1..20: mol_type = other DNA
caaagggtttgttgaacttg

SEQ ID NO: 17797 - DNA, 23 bp, synthetic construct
  source 1..23: mol_type = other DNA
agacaaagggtttgttgaacttg

SEQ ID NO: 17798 - DNA, 23 bp, synthetic construct
  source 1..23: mol_type = other DNA
gagccttgctcgaggcctgggat

SEQ ID NO: 17799 - DNA, 23 bp, synthetic construct
  source 1..23: mol_type = other DNA
agacaaagggtttgttgaacttg

SEQ ID NO: 17800 - DNA, 23 bp, synthetic construct
  source 1..23: mol_type = other DNA
gagccttgctcgaggcctgggat

SEQ ID NO: 17801 - DNA, 22 bp, synthetic construct
  source 1..22: mol_type = other DNA
agccttgctcgaggcctgggat

SEQ ID NO: 17802 - DNA, 20 bp, synthetic construct
  source 1..20: mol_type = other DNA
ccttgctcgaggcctgggat

SEQ ID NO: 17803 - DNA, 24 bp, synthetic construct
  source 1..24: mol_type = other DNA
gtgagccttgctcgaggcctggga

SEQ ID NO: 17804 - DNA, 21 bp, synthetic construct
  source 1..21: mol_type = other DNA
agccttgctcgaggcctggga

SEQ ID NO: 17805 - DNA, 20 bp, synthetic construct
  source 1..20: mol_type = other DNA
acaaagggtttgttgaactt

SEQ ID NO: 17806 - DNA, 20 bp, synthetic construct
  source 1..20: mol_type = other DNA
gccttgctcgaggcctggga

SEQ ID NO: 17807 - DNA, 23 bp, synthetic construct
  source 1..23: mol_type = other DNA
tgagccttgctcgaggcctggga

SEQ ID NO: 17808 - DNA, 23 bp, synthetic construct
  source 1..23: mol_type = other DNA
tgagccttgctcgaggcctggga

SEQ ID NO: 17809 - DNA, 20 bp, synthetic construct
  source 1..20: mol_type = other DNA
acaaagggtttgttgaactt

SEQ ID NO: 17810 - DNA, 21 bp, synthetic construct
  source 1..21: mol_type = other DNA
gagccttgctcgaggcctggg

SEQ ID NO: 17811 - DNA, 20 bp, synthetic construct
  source 1..20: mol_type = other DNA
gacaaagggtttgttgaact

SEQ ID NO: 17812 - DNA, 20 bp, synthetic construct
  source 1..20: mol_type = other DNA
gacaaagggtttgttgaact

SEQ ID NO: 17813 - DNA, 20 bp, synthetic construct
  source 1..20: mol_type = other DNA
gacaaagggtttgttgaact

SEQ ID NO: 17814 - DNA, 20 bp, synthetic construct
  source 1..20: mol_type = other DNA
gacaaagggtttgttgaact

SEQ ID NO: 17815 - DNA, 20 bp, synthetic construct
  source 1..20: mol_type = other DNA
gacaaagggtttgttgaact

SEQ ID NO: 17816 - DNA, 20 bp, synthetic construct
  source 1..20: mol_type = other DNA
agccttgctcgaggcctggg

SEQ ID NO: 17817 - DNA, 23 bp, synthetic construct
  source 1..23: mol_type = other DNA
gaagacaaagggtttgttgaact

SEQ ID NO: 17818 - DNA, 21 bp, synthetic construct
  source 1..21: mol_type = other DNA
gagccttgctcgaggcctggg

SEQ ID NO: 17819 - DNA, 21 bp, synthetic construct
  source 1..21: mol_type = other DNA
gagccttgctcgaggcctggg

SEQ ID NO: 17820 - DNA, 22 bp, synthetic construct
  source 1..22: mol_type = other DNA
aagacaaagggtttgttgaact

SEQ ID NO: 17821 - DNA, 20 bp, synthetic construct
  source 1..20: mol_type = other DNA
gacaaagggtttgttgaact

SEQ ID NO: 17822 - DNA, 20 bp, synthetic construct
  source 1..20: mol_type = other DNA
gacaaagggtttgttgaact

SEQ ID NO: 17823 - DNA, 24 bp, synthetic construct
  source 1..24: mol_type = other DNA
aagaagacaaagggtttgttgaac

SEQ ID NO: 17824 - DNA, 20 bp, synthetic construct
  source 1..20: mol_type = other DNA
agacaaagggtttgttgaac

SEQ ID NO: 17825 - DNA, 20 bp, synthetic construct
  source 1..20: mol_type = other DNA
agacaaagggtttgttgaac

SEQ ID NO: 17826 - DNA, 20 bp, synthetic construct
  source 1..20: mol_type = other DNA
agacaaagggtttgttgaac

SEQ ID NO: 17827 - DNA, 20 bp, synthetic construct
  source 1..20: mol_type = other DNA
agacaaagggtttgttgaac

SEQ ID NO: 17828 - DNA, 20 bp, synthetic construct
  source 1..20: mol_type = other DNA
gagccttgctcgaggcctgg

SEQ ID NO: 17829 - DNA, 20 bp, synthetic construct
  source 1..20: mol_type = other DNA
gagccttgctcgaggcctgg

SEQ ID NO: 17830 - DNA, 23 bp, synthetic construct
  source 1..23: mol_type = other DNA
agaagacaaagggtttgttgaac

SEQ ID NO: 17831 - DNA, 22 bp, synthetic construct
  source 1..22: mol_type = other DNA
gaagacaaagggtttgttgaac

SEQ ID NO: 17832 - DNA, 20 bp, synthetic construct
  source 1..20: mol_type = other DNA
gagccttgctcgaggcctgg

SEQ ID NO: 17833 - DNA, 21 bp, synthetic construct
  source 1..21: mol_type = other DNA
gaagacaaagggtttgttgaa

SEQ ID NO: 17834 - DNA, 20 bp, synthetic construct
  source 1..20: mol_type = other DNA
tgagccttgctcgaggcctg

SEQ ID NO: 17835 - DNA, 20 bp, synthetic construct
  source 1..20: mol_type = other DNA
tgagccttgctcgaggcctg

SEQ ID NO: 17836 - DNA, 20 bp, synthetic construct
  source 1..20: mol_type = other DNA
tgagccttgctcgaggcctg

SEQ ID NO: 17837 - DNA, 20 bp, synthetic construct
  source 1..20: mol_type = other DNA
tgagccttgctcgaggcctg

SEQ ID NO: 17838 - DNA, 20 bp, synthetic construct
  source 1..20: mol_type = other DNA
tgagccttgctcgaggcctg

SEQ ID NO: 17839 - DNA, 20 bp, synthetic construct
  source 1..20: mol_type = other DNA
aagacaaagggtttgttgaa

SEQ ID NO: 17840 - DNA, 23 bp, synthetic construct
  source 1..23: mol_type = other DNA
acgtgagccttgctcgaggcctg

SEQ ID NO: 17841 - DNA, 20 bp, synthetic construct
  source 1..20: mol_type = other DNA
tgagccttgctcgaggcctg

SEQ ID NO: 17842 - DNA, 20 bp, synthetic construct
  source 1..20: mol_type = other DNA
tgagccttgctcgaggcctg

SEQ ID NO: 17843 - DNA, 20 bp, synthetic construct
  source 1..20: mol_type = other DNA
gtgagccttgctcgaggcct

SEQ ID NO: 17844 - DNA, 20 bp, synthetic construct
  source 1..20: mol_type = other DNA
gtgagccttgctcgaggcct

SEQ ID NO: 17845 - DNA, 20 bp, synthetic construct
  source 1..20: mol_type = other DNA
gtgagccttgctcgaggcct

SEQ ID NO: 17846 - DNA, 20 bp, synthetic construct
  source 1..20: mol_type = other DNA
gtgagccttgctcgaggcct

SEQ ID NO: 17847 - DNA, 20 bp, synthetic construct
  source 1..20: mol_type = other DNA
gtgagccttgctcgaggcct

SEQ ID NO: 17848 - DNA, 20 bp, synthetic construct
  source 1..20: mol_type = other DNA
gtgagccttgctcgaggcct

SEQ ID NO: 17849 - DNA, 20 bp, synthetic construct
  source 1..20: mol_type = other DNA
gtgagccttgctcgaggcct

SEQ ID NO: 17850 - DNA, 20 bp, synthetic construct
  source 1..20: mol_type = other DNA
gtgagccttgctcgaggcct

SEQ ID NO: 17851 - DNA, 20 bp, synthetic construct
  source 1..20: mol_type = other DNA
gtgagccttgctcgaggcct

SEQ ID NO: 17852 - DNA, 20 bp, synthetic construct
  source 1..20: mol_type = other DNA
gtgagccttgctcgaggcct

SEQ ID NO: 17853 - DNA, 20 bp, synthetic construct
  source 1..20: mol_type = other DNA
gaagacaaagggtttgttga

SEQ ID NO: 17854 - DNA, 20 bp, synthetic construct
  source 1..20: mol_type = other DNA
gtgagccttgctcgaggcct

SEQ ID NO: 17855 - DNA, 23 bp, synthetic construct
  source 1..23: mol_type = other DNA
ccacgtgagccttgctcgaggcc

SEQ ID NO: 17856 - DNA, 21 bp, synthetic construct
  source 1..21: mol_type = other DNA
acgtgagccttgctcgaggcc

SEQ ID NO: 17857 - DNA, 23 bp, synthetic construct
  source 1..23: mol_type = other DNA
ccacgtgagccttgctcgaggcc

SEQ ID NO: 17858 - DNA, 21 bp, synthetic construct
  source 1..21: mol_type = other DNA
acgtgagccttgctcgaggcc

SEQ ID NO: 17859 - DNA, 21 bp, synthetic construct
  source 1..21: mol_type = other DNA
acgtgagccttgctcgaggcc

SEQ ID NO: 17860 - DNA, 21 bp, synthetic construct
  source 1..21: mol_type = other DNA
acgtgagccttgctcgaggcc

SEQ ID NO: 17861 - DNA, 21 bp, synthetic construct
  source 1..21: mol_type = other DNA
acgtgagccttgctcgaggcc

SEQ ID NO: 17862 - DNA, 21 bp, synthetic construct
  source 1..21: mol_type = other DNA
acgtgagccttgctcgaggcc

SEQ ID NO: 17863 - DNA, 20 bp, synthetic construct
  source 1..20: mol_type = other DNA
cgtgagccttgctcgaggcc

SEQ ID NO: 17864 - DNA, 20 bp, synthetic construct
  source 1..20: mol_type = other DNA
cgtgagccttgctcgaggcc

SEQ ID NO: 17865 - DNA, 20 bp, synthetic construct
  source 1..20: mol_type = other DNA
cgtgagccttgctcgaggcc

SEQ ID NO: 17866 - DNA, 20 bp, synthetic construct
  source 1..20: mol_type = other DNA
cgtgagccttgctcgaggcc

SEQ ID NO: 17867 - DNA, 20 bp, synthetic construct
  source 1..20: mol_type = other DNA
cgtgagccttgctcgaggcc

SEQ ID NO: 17868 - DNA, 20 bp, synthetic construct
  source 1..20: mol_type = other DNA
cgtgagccttgctcgaggcc

SEQ ID NO: 17869 - DNA, 20 bp, synthetic construct
  source 1..20: mol_type = other DNA
cgtgagccttgctcgaggcc

SEQ ID NO: 17870 - DNA, 20 bp, synthetic construct
  source 1..20: mol_type = other DNA
cgtgagccttgctcgaggcc

SEQ ID NO: 17871 - DNA, 20 bp, synthetic construct
  source 1..20: mol_type = other DNA
cgtgagccttgctcgaggcc

SEQ ID NO: 17872 - DNA, 20 bp, synthetic construct
  source 1..20: mol_type = other DNA
cgtgagccttgctcgaggcc

SEQ ID NO: 17873 - DNA, 20 bp, synthetic construct
  source 1..20: mol_type = other DNA
agaagacaaagggtttgttg

SEQ ID NO: 17874 - DNA, 20 bp, synthetic construct
  source 1..20: mol_type = other DNA
agaagacaaagggtttgttg

SEQ ID NO: 17875 - DNA, 23 bp, synthetic construct
  source 1..23: mol_type = other DNA
tccacgtgagccttgctcgaggc

SEQ ID NO: 17876 - DNA, 21 bp, synthetic construct
  source 1..21: mol_type = other DNA
cacgtgagccttgctcgaggc

SEQ ID NO: 17877 - DNA, 21 bp, synthetic construct
  source 1..21: mol_type = other DNA
cacgtgagccttgctcgaggc

SEQ ID NO: 17878 - DNA, 21 bp, synthetic construct
  source 1..21: mol_type = other DNA
cacgtgagccttgctcgaggc

SEQ ID NO: 17879 - DNA, 20 bp, synthetic construct
  source 1..20: mol_type = other DNA
acgtgagccttgctcgaggc

SEQ ID NO: 17880 - DNA, 20 bp, synthetic construct
  source 1..20: mol_type = other DNA
acgtgagccttgctcgaggc

SEQ ID NO: 17881 - DNA, 20 bp, synthetic construct
  source 1..20: mol_type = other DNA
acgtgagccttgctcgaggc

SEQ ID NO: 17882 - DNA, 20 bp, synthetic construct
  source 1..20: mol_type = other DNA
acgtgagccttgctcgaggc

SEQ ID NO: 17883 - DNA, 20 bp, synthetic construct
  source 1..20: mol_type = other DNA
aagaagacaaagggtttgtt

SEQ ID NO: 17884 - DNA, 20 bp, synthetic construct
  source 1..20: mol_type = other DNA
aagaagacaaagggtttgtt

SEQ ID NO: 17885 - DNA, 21 bp, synthetic construct
  source 1..21: mol_type = other DNA
cacgtgagccttgctcgaggc

SEQ ID NO: 17886 - DNA, 21 bp, synthetic construct
  source 1..21: mol_type = other DNA
cacgtgagccttgctcgaggc

SEQ ID NO: 17887 - DNA, 20 bp, synthetic construct
  source 1..20: mol_type = other DNA
aagaagacaaagggtttgtt

SEQ ID NO: 17888 - DNA, 21 bp, synthetic construct
  source 1..21: mol_type = other DNA
taagaagacaaagggtttgtt

SEQ ID NO: 17889 - DNA, 21 bp, synthetic construct
  source 1..21: mol_type = other DNA
ccacgtgagccttgctcgagg

SEQ ID NO: 17890 - DNA, 20 bp, synthetic construct
  source 1..20: mol_type = other DNA
taagaagacaaagggtttgt

SEQ ID NO: 17891 - DNA, 20 bp, synthetic construct
  source 1..20: mol_type = other DNA
taagaagacaaagggtttgt

SEQ ID NO: 17892 - DNA, 20 bp, synthetic construct
  source 1..20: mol_type = other DNA
taagaagacaaagggtttgt

SEQ ID NO: 17893 - DNA, 20 bp, synthetic construct
  source 1..20: mol_type = other DNA
taagaagacaaagggtttgt

SEQ ID NO: 17894 - DNA, 20 bp, synthetic construct
  source 1..20: mol_type = other DNA
taagaagacaaagggtttgt

SEQ ID NO: 17895 - DNA, 20 bp, synthetic construct
  source 1..20: mol_type = other DNA
cacgtgagccttgctcgagg

SEQ ID NO: 17896 - DNA, 23 bp, synthetic construct
  source 1..23: mol_type = other DNA
cattaagaagacaaagggtttgt

SEQ ID NO: 17897 - DNA, 23 bp, synthetic construct
  source 1..23: mol_type = other DNA
cattaagaagacaaagggtttgt

SEQ ID NO: 17898 - DNA, 21 bp, synthetic construct
  source 1..21: mol_type = other DNA
ttaagaagacaaagggtttgt

SEQ ID NO: 17899 - DNA, 21 bp, synthetic construct
  source 1..21: mol_type = other DNA
ttaagaagacaaagggtttgt

SEQ ID NO: 17900 - DNA, 22 bp, synthetic construct
  source 1..22: mol_type = other DNA
attaagaagacaaagggtttgt

SEQ ID NO: 17901 - DNA, 20 bp, synthetic construct
  source 1..20: mol_type = other DNA
taagaagacaaagggtttgt

SEQ ID NO: 17902 - DNA, 20 bp, synthetic construct
  source 1..20: mol_type = other DNA
taagaagacaaagggtttgt

SEQ ID NO: 17903 - DNA, 23 bp, synthetic construct
  source 1..23: mol_type = other DNA
tcattaagaagacaaagggtttg

SEQ ID NO: 17904 - DNA, 21 bp, synthetic construct
  source 1..21: mol_type = other DNA
attaagaagacaaagggtttg

SEQ ID NO: 17905 - DNA, 20 bp, synthetic construct
  source 1..20: mol_type = other DNA
ttaagaagacaaagggtttg

SEQ ID NO: 17906 - DNA, 20 bp, synthetic construct
  source 1..20: mol_type = other DNA
ttaagaagacaaagggtttg

SEQ ID NO: 17907 - DNA, 20 bp, synthetic construct
  source 1..20: mol_type = other DNA
ttaagaagacaaagggtttg

SEQ ID NO: 17908 - DNA, 20 bp, synthetic construct
  source 1..20: mol_type = other DNA
ttaagaagacaaagggtttg

SEQ ID NO: 17909 - DNA, 20 bp, synthetic construct
  source 1..20: mol_type = other DNA
ccacgtgagccttgctcgag

SEQ ID NO: 17910 - DNA, 21 bp, synthetic construct
  source 1..21: mol_type = other DNA
attaagaagacaaagggtttg

SEQ ID NO: 17911 - DNA, 21 bp, synthetic construct
  source 1..21: mol_type = other DNA
attaagaagacaaagggtttg

SEQ ID NO: 17912 - DNA, 22 bp, synthetic construct
  source 1..22: mol_type = other DNA
cattaagaagacaaagggtttg

SEQ ID NO: 17913 - DNA, 21 bp, synthetic construct
  source 1..21: mol_type = other DNA
cattaagaagacaaagggttt

SEQ ID NO: 17914 - DNA, 20 bp, synthetic construct
  source 1..20: mol_type = other DNA
tccacgtgagccttgctcga

SEQ ID NO: 17915 - DNA, 20 bp, synthetic construct
  source 1..20: mol_type = other DNA
tccacgtgagccttgctcga

SEQ ID NO: 17916 - DNA, 20 bp, synthetic construct
  source 1..20: mol_type = other DNA
tccacgtgagccttgctcga

SEQ ID NO: 17917 - DNA, 20 bp, synthetic construct
  source 1..20: mol_type = other DNA
tccacgtgagccttgctcga

SEQ ID NO: 17918 - DNA, 20 bp, synthetic construct
  source 1..20: mol_type = other DNA
tccacgtgagccttgctcga

SEQ ID NO: 17919 - DNA, 20 bp, synthetic construct
  source 1..20: mol_type = other DNA
attaagaagacaaagggttt

SEQ ID NO: 17920 - DNA, 20 bp, synthetic construct
  source 1..20: mol_type = other DNA
tccacgtgagccttgctcga

SEQ ID NO: 17921 - DNA, 20 bp, synthetic construct
  source 1..20: mol_type = other DNA
gtccacgtgagccttgctcg

SEQ ID NO: 17922 - DNA, 20 bp, synthetic construct
  source 1..20: mol_type = other DNA
gtccacgtgagccttgctcg

SEQ ID NO: 17923 - DNA, 20 bp, synthetic construct
  source 1..20: mol_type = other DNA
gtccacgtgagccttgctcg

SEQ ID NO: 17924 - DNA, 20 bp, synthetic construct
  source 1..20: mol_type = other DNA
gtccacgtgagccttgctcg

SEQ ID NO: 17925 - DNA, 20 bp, synthetic construct
  source 1..20: mol_type = other DNA
gtccacgtgagccttgctcg

SEQ ID NO: 17926 - DNA, 20 bp, synthetic construct
  source 1..20: mol_type = other DNA
gtccacgtgagccttgctcg

SEQ ID NO: 17927 - DNA, 20 bp, synthetic construct
  source 1..20: mol_type = other DNA
gtccacgtgagccttgctcg

SEQ ID NO: 17928 - DNA, 20 bp, synthetic construct
  source 1..20: mol_type = other DNA
cattaagaagacaaagggtt

SEQ ID NO: 17929 - DNA, 20 bp, synthetic construct
  source 1..20: mol_type = other DNA
cattaagaagacaaagggtt

SEQ ID NO: 17930 - DNA, 20 bp, synthetic construct
  source 1..20: mol_type = other DNA
cattaagaagacaaagggtt

SEQ ID NO: 17931 - DNA, 20 bp, synthetic construct
  source 1..20: mol_type = other DNA
gtccacgtgagccttgctcg

SEQ ID NO: 17932 - DNA, 20 bp, synthetic construct
  source 1..20: mol_type = other DNA
gtccacgtgagccttgctcg

SEQ ID NO: 17933 - DNA, 20 bp, synthetic construct
  source 1..20: mol_type = other DNA
gtccacgtgagccttgctcg

SEQ ID NO: 17934 - DNA, 20 bp, synthetic construct
  source 1..20: mol_type = other DNA
cattaagaagacaaagggtt

SEQ ID NO: 17935 - DNA, 20 bp, synthetic construct
  source 1..20: mol_type = other DNA
cattaagaagacaaagggtt

SEQ ID NO: 17936 - DNA, 23 bp, synthetic construct
  source 1..23: mol_type = other DNA
ggtgtccacgtgagccttgctcg

SEQ ID NO: 17937 - DNA, 23 bp, synthetic construct
  source 1..23: mol_type = other DNA
ggtgtccacgtgagccttgctcg

SEQ ID NO: 17938 - DNA, 20 bp, synthetic construct
  source 1..20: mol_type = other DNA
gtccacgtgagccttgctcg

SEQ ID NO: 17939 - DNA, 20 bp, synthetic construct
  source 1..20: mol_type = other DNA
cattaagaagacaaagggtt

SEQ ID NO: 17940 - DNA, 24 bp, synthetic construct
  source 1..24: mol_type = other DNA
gaggtgtccacgtgagccttgctc

SEQ ID NO: 17941 - DNA, 21 bp, synthetic construct
  source 1..21: mol_type = other DNA
gtgtccacgtgagccttgctc

SEQ ID NO: 17942 - DNA, 21 bp, synthetic construct
  source 1..21: mol_type = other DNA
gtgtccacgtgagccttgctc

SEQ ID NO: 17943 - DNA, 20 bp, synthetic construct
  source 1..20: mol_type = other DNA
tcattaagaagacaaagggt

SEQ ID NO: 17944 - DNA, 20 bp, synthetic construct
  source 1..20: mol_type = other DNA
tcattaagaagacaaagggt

SEQ ID NO: 17945 - DNA, 20 bp, synthetic construct
  source 1..20: mol_type = other DNA
tcattaagaagacaaagggt

SEQ ID NO: 17946 - DNA, 20 bp, synthetic construct
  source 1..20: mol_type = other DNA
tcattaagaagacaaagggt

SEQ ID NO: 17947 - DNA, 20 bp, synthetic construct
  source 1..20: mol_type = other DNA
tgtccacgtgagccttgctc

SEQ ID NO: 17948 - DNA, 20 bp, synthetic construct
  source 1..20: mol_type = other DNA
tgtccacgtgagccttgctc

SEQ ID NO: 17949 - DNA, 20 bp, synthetic construct
  source 1..20: mol_type = other DNA
tgtccacgtgagccttgctc

SEQ ID NO: 17950 - DNA, 20 bp, synthetic construct
  source 1..20: mol_type = other DNA
tgtccacgtgagccttgctc

SEQ ID NO: 17951 - DNA, 23 bp, synthetic construct
  source 1..23: mol_type = other DNA
aggtgtccacgtgagccttgctc

SEQ ID NO: 17952 - DNA, 23 bp, synthetic construct
  source 1..23: mol_type = other DNA
aggtgtccacgtgagccttgctc

SEQ ID NO: 17953 - DNA, 21 bp, synthetic construct
  source 1..21: mol_type = other DNA
ggtgtccacgtgagccttgct

SEQ ID NO: 17954 - DNA, 21 bp, synthetic construct
  source 1..21: mol_type = other DNA
ggtgtccacgtgagccttgct

SEQ ID NO: 17955 - DNA, 20 bp, synthetic construct
  source 1..20: mol_type = other DNA
gtgtccacgtgagccttgct

SEQ ID NO: 17956 - DNA, 20 bp, synthetic construct
  source 1..20: mol_type = other DNA
gtgtccacgtgagccttgct

SEQ ID NO: 17957 - DNA, 20 bp, synthetic construct
  source 1..20: mol_type = other DNA
gtgtccacgtgagccttgct

SEQ ID NO: 17958 - DNA, 20 bp, synthetic construct
  source 1..20: mol_type = other DNA
gtgtccacgtgagccttgct

SEQ ID NO: 17959 - DNA, 20 bp, synthetic construct
  source 1..20: mol_type = other DNA
gtgtccacgtgagccttgct

SEQ ID NO: 17960 - DNA, 20 bp, synthetic construct
  source 1..20: mol_type = other DNA
gtgtccacgtgagccttgct

SEQ ID NO: 17961 - DNA, 20 bp, synthetic construct
  source 1..20: mol_type = other DNA
atcattaagaagacaaaggg

SEQ ID NO: 17962 - DNA, 21 bp, synthetic construct
  source 1..21: mol_type = other DNA
ggtgtccacgtgagccttgct

SEQ ID NO: 17963 - DNA, 21 bp, synthetic construct
  source 1..21: mol_type = other DNA
ggtgtccacgtgagccttgct

SEQ ID NO: 17964 - DNA, 24 bp, synthetic construct
  source 1..24: mol_type = other DNA
gttcaatcattaagaagacaaagg

SEQ ID NO: 17965 - DNA, 23 bp, synthetic construct
  source 1..23: mol_type = other DNA
ggaggtgtccacgtgagccttgc

SEQ ID NO: 17966 - DNA, 21 bp, synthetic construct
  source 1..21: mol_type = other DNA
aggtgtccacgtgagccttgc

SEQ ID NO: 17967 - DNA, 20 bp, synthetic construct
  source 1..20: mol_type = other DNA
ggtgtccacgtgagccttgc

SEQ ID NO: 17968 - DNA, 20 bp, synthetic construct
  source 1..20: mol_type = other DNA
ggtgtccacgtgagccttgc

SEQ ID NO: 17969 - DNA, 20 bp, synthetic construct
  source 1..20: mol_type = other DNA
ggtgtccacgtgagccttgc

SEQ ID NO: 17970 - DNA, 20 bp, synthetic construct
  source 1..20: mol_type = other DNA
ggtgtccacgtgagccttgc

SEQ ID NO: 17971 - DNA, 20 bp, synthetic construct
  source 1..20: mol_type = other DNA
aatcattaagaagacaaagg

SEQ ID NO: 17972 - DNA, 21 bp, synthetic construct
  source 1..21: mol_type = other DNA
aggtgtccacgtgagccttgc

SEQ ID NO: 17973 - DNA, 21 bp, synthetic construct
  source 1..21: mol_type = other DNA
aggtgtccacgtgagccttgc

SEQ ID NO: 17974 - DNA, 21 bp, synthetic construct
  source 1..21: mol_type = other DNA
gaggtgtccacgtgagccttg

SEQ ID NO: 17975 - DNA, 20 bp, synthetic construct
  source 1..20: mol_type = other DNA
caatcattaagaagacaaag

SEQ ID NO: 17976 - DNA, 20 bp, synthetic construct
  source 1..20: mol_type = other DNA
caatcattaagaagacaaag

SEQ ID NO: 17977 - DNA, 20 bp, synthetic construct
  source 1..20: mol_type = other DNA
caatcattaagaagacaaag

SEQ ID NO: 17978 - DNA, 20 bp, synthetic construct
  source 1..20: mol_type = other DNA
caatcattaagaagacaaag

SEQ ID NO: 17979 - DNA, 20 bp, synthetic construct
  source 1..20: mol_type = other DNA
caatcattaagaagacaaag

SEQ ID NO: 17980 - DNA, 20 bp, synthetic construct
  source 1..20: mol_type = other DNA
aggtgtccacgtgagccttg

SEQ ID NO: 17981 - DNA, 21 bp, synthetic construct
  source 1..21: mol_type = other DNA
gaggtgtccacgtgagccttg

SEQ ID NO: 17982 - DNA, 21 bp, synthetic construct
  source 1..21: mol_type = other DNA
gaggtgtccacgtgagccttg

SEQ ID NO: 17983 - DNA, 20 bp, synthetic construct
  source 1..20: mol_type = other DNA
caatcattaagaagacaaag

SEQ ID NO: 17984 - DNA, 20 bp, synthetic construct
  source 1..20: mol_type = other DNA
tcaatcattaagaagacaaa

SEQ ID NO: 17985 - DNA, 20 bp, synthetic construct
  source 1..20: mol_type = other DNA
tcaatcattaagaagacaaa

SEQ ID NO: 17986 - DNA, 20 bp, synthetic construct
  source 1..20: mol_type = other DNA
tcaatcattaagaagacaaa

SEQ ID NO: 17987 - DNA, 20 bp, synthetic construct
  source 1..20: mol_type = other DNA
tcaatcattaagaagacaaa

SEQ ID NO: 17988 - DNA, 20 bp, synthetic construct
  source 1..20: mol_type = other DNA
tcaatcattaagaagacaaa

SEQ ID NO: 17989 - DNA, 20 bp, synthetic construct
  source 1..20: mol_type = other DNA
tcaatcattaagaagacaaa

SEQ ID NO: 17990 - DNA, 20 bp, synthetic construct
  source 1..20: mol_type = other DNA
tcaatcattaagaagacaaa

SEQ ID NO: 17991 - DNA, 20 bp, synthetic construct
  source 1..20: mol_type = other DNA
tcaatcattaagaagacaaa

SEQ ID NO: 17992 - DNA, 20 bp, synthetic construct
  source 1..20: mol_type = other DNA
tcaatcattaagaagacaaa

SEQ ID NO: 17993 - DNA, 20 bp, synthetic construct
  source 1..20: mol_type = other DNA
tcaatcattaagaagacaaa

SEQ ID NO: 17994 - DNA, 20 bp, synthetic construct
  source 1..20: mol_type = other DNA
gaggtgtccacgtgagcctt

SEQ ID NO: 17995 - DNA, 20 bp, synthetic construct
  source 1..20: mol_type = other DNA
tcaatcattaagaagacaaa

SEQ ID NO: 17996 - DNA, 21 bp, synthetic construct
  source 1..21: mol_type = other DNA
gttcaatcattaagaagacaa

SEQ ID NO: 17997 - DNA, 21 bp, synthetic construct
  source 1..21: mol_type = other DNA
gttcaatcattaagaagacaa

SEQ ID NO: 17998 - DNA, 20 bp, synthetic construct
  source 1..20: mol_type = other DNA
ttcaatcattaagaagacaa

SEQ ID NO: 17999 - DNA, 20 bp, synthetic construct
  source 1..20: mol_type = other DNA
ttcaatcattaagaagacaa

SEQ ID NO: 18000 - DNA, 20 bp, synthetic construct
  source 1..20: mol_type = other DNA
ttcaatcattaagaagacaa

SEQ ID NO: 18001 - DNA, 20 bp, synthetic construct
  source 1..20: mol_type = other DNA
ttcaatcattaagaagacaa

SEQ ID NO: 18002 - DNA, 20 bp, synthetic construct
  source 1..20: mol_type = other DNA
ttcaatcattaagaagacaa

SEQ ID NO: 18003 - DNA, 20 bp, synthetic construct
  source 1..20: mol_type = other DNA
ttcaatcattaagaagacaa

SEQ ID NO: 18004 - DNA, 20 bp, synthetic construct
  source 1..20: mol_type = other DNA
ttcaatcattaagaagacaa

SEQ ID NO: 18005 - DNA, 20 bp, synthetic construct
  source 1..20: mol_type = other DNA
ttcaatcattaagaagacaa

SEQ ID NO: 18006 - DNA, 20 bp, synthetic construct
  source 1..20: mol_type = other DNA
ttcaatcattaagaagacaa

SEQ ID NO: 18007 - DNA, 20 bp, synthetic construct
  source 1..20: mol_type = other DNA
ttcaatcattaagaagacaa

SEQ ID NO: 18008 - DNA, 20 bp, synthetic construct
  source 1..20: mol_type = other DNA
ggaggtgtccacgtgagcct

SEQ ID NO: 18009 - DNA, 20 bp, synthetic construct
  source 1..20: mol_type = other DNA
ggaggtgtccacgtgagcct

SEQ ID NO: 18010 - DNA, 20 bp, synthetic construct
  source 1..20: mol_type = other DNA
ggaggtgtccacgtgagcct

SEQ ID NO: 18011 - DNA, 20 bp, synthetic construct
  source 1..20: mol_type = other DNA
ggaggtgtccacgtgagcct

SEQ ID NO: 18012 - DNA, 20 bp, synthetic construct
  source 1..20: mol_type = other DNA
ggaggtgtccacgtgagcct

SEQ ID NO: 18013 - DNA, 23 bp, synthetic construct
  source 1..23: mol_type = other DNA
ctgggaggtgtccacgtgagcct

SEQ ID NO: 18014 - DNA, 23 bp, synthetic construct
  source 1..23: mol_type = other DNA
ctgggaggtgtccacgtgagcct

SEQ ID NO: 18015 - DNA, 21 bp, synthetic construct
  source 1..21: mol_type = other DNA
gttcaatcattaagaagacaa

SEQ ID NO: 18016 - DNA, 21 bp, synthetic construct
  source 1..21: mol_type = other DNA
gttcaatcattaagaagacaa

SEQ ID NO: 18017 - DNA, 20 bp, synthetic construct
  source 1..20: mol_type = other DNA
ggaggtgtccacgtgagcct

SEQ ID NO: 18018 - DNA, 24 bp, synthetic construct
  source 1..24: mol_type = other DNA
ttttgttcaatcattaagaagaca

SEQ ID NO: 18019 - DNA, 23 bp, synthetic construct
  source 1..23: mol_type = other DNA
tttgttcaatcattaagaagaca

SEQ ID NO: 18020 - DNA, 21 bp, synthetic construct
  source 1..21: mol_type = other DNA
tgttcaatcattaagaagaca

SEQ ID NO: 18021 - DNA, 23 bp, synthetic construct
  source 1..23: mol_type = other DNA
tttgttcaatcattaagaagaca

SEQ ID NO: 18022 - DNA, 21 bp, synthetic construct
  source 1..21: mol_type = other DNA
tgttcaatcattaagaagaca

SEQ ID NO: 18023 - DNA, 21 bp, synthetic construct
  source 1..21: mol_type = other DNA
tgttcaatcattaagaagaca

SEQ ID NO: 18024 - DNA, 21 bp, synthetic construct
  source 1..21: mol_type = other DNA
tgttcaatcattaagaagaca

SEQ ID NO: 18025 - DNA, 21 bp, synthetic construct
  source 1..21: mol_type = other DNA
tgttcaatcattaagaagaca

SEQ ID NO: 18026 - DNA, 21 bp, synthetic construct
  source 1..21: mol_type = other DNA
tgttcaatcattaagaagaca

SEQ ID NO: 18027 - DNA, 20 bp, synthetic construct
  source 1..20: mol_type = other DNA
gttcaatcattaagaagaca

SEQ ID NO: 18028 - DNA, 20 bp, synthetic construct
  source 1..20: mol_type = other DNA
gttcaatcattaagaagaca

SEQ ID NO: 18029 - DNA, 20 bp, synthetic construct
  source 1..20: mol_type = other DNA
gttcaatcattaagaagaca

SEQ ID NO: 18030 - DNA, 20 bp, synthetic construct
  source 1..20: mol_type = other DNA
gttcaatcattaagaagaca

SEQ ID NO: 18031 - DNA, 20 bp, synthetic construct
  source 1..20: mol_type = other DNA
gggaggtgtccacgtgagcc

SEQ ID NO: 18032 - DNA, 20 bp, synthetic construct
  source 1..20: mol_type = other DNA
gggaggtgtccacgtgagcc

SEQ ID NO: 18033 - DNA, 20 bp, synthetic construct
  source 1..20: mol_type = other DNA
gggaggtgtccacgtgagcc

SEQ ID NO: 18034 - DNA, 20 bp, synthetic construct
  source 1..20: mol_type = other DNA
gggaggtgtccacgtgagcc

SEQ ID NO: 18035 - DNA, 24 bp, synthetic construct
  source 1..24: mol_type = other DNA
ttttgttcaatcattaagaagaca

SEQ ID NO: 18036 - DNA, 21 bp, synthetic construct
  source 1..21: mol_type = other DNA
ttgttcaatcattaagaagac

SEQ ID NO: 18037 - DNA, 21 bp, synthetic construct
  source 1..21: mol_type = other DNA
ttgttcaatcattaagaagac

SEQ ID NO: 18038 - DNA, 20 bp, synthetic construct
  source 1..20: mol_type = other DNA
tgttcaatcattaagaagac

SEQ ID NO: 18039 - DNA, 21 bp, synthetic construct
  source 1..21: mol_type = other DNA
ttgttcaatcattaagaagac

SEQ ID NO: 18040 - DNA, 20 bp, synthetic construct
  source 1..20: mol_type = other DNA
tgttcaatcattaagaagac

SEQ ID NO: 18041 - DNA, 20 bp, synthetic construct
  source 1..20: mol_type = other DNA
tgggaggtgtccacgtgagc

SEQ ID NO: 18042 - DNA, 23 bp, synthetic construct
  source 1..23: mol_type = other DNA
tcctgggaggtgtccacgtgagc

SEQ ID NO: 18043 - DNA, 21 bp, synthetic construct
  source 1..21: mol_type = other DNA
ttgttcaatcattaagaagac

SEQ ID NO: 18044 - DNA, 21 bp, synthetic construct
  source 1..21: mol_type = other DNA
ttgttcaatcattaagaagac

SEQ ID NO: 18045 - DNA, 21 bp, synthetic construct
  source 1..21: mol_type = other DNA
tttgttcaatcattaagaaga

SEQ ID NO: 18046 - DNA, 20 bp, synthetic construct
  source 1..20: mol_type = other DNA
ttgttcaatcattaagaaga

SEQ ID NO: 18047 - DNA, 20 bp, synthetic construct
  source 1..20: mol_type = other DNA
ctgggaggtgtccacgtgag

SEQ ID NO: 18048 - DNA, 21 bp, synthetic construct
  source 1..21: mol_type = other DNA
tttgttcaatcattaagaaga

SEQ ID NO: 18049 - DNA, 21 bp, synthetic construct
  source 1..21: mol_type = other DNA
tttgttcaatcattaagaaga

SEQ ID NO: 18050 - DNA, 20 bp, synthetic construct
  source 1..20: mol_type = other DNA
ttgttcaatcattaagaaga

SEQ ID NO: 18051 - DNA, 21 bp, synthetic construct
  source 1..21: mol_type = other DNA
tttgttcaatcattaagaaga

SEQ ID NO: 18052 - DNA, 21 bp, synthetic construct
  source 1..21: mol_type = other DNA
ttttgttcaatcattaagaag

SEQ ID NO: 18053 - DNA, 20 bp, synthetic construct
  source 1..20: mol_type = other DNA
tttgttcaatcattaagaag

SEQ ID NO: 18054 - DNA, 20 bp, synthetic construct
  source 1..20: mol_type = other DNA
cctgggaggtgtccacgtga

SEQ ID NO: 18055 - DNA, 21 bp, synthetic construct
  source 1..21: mol_type = other DNA
ttttgttcaatcattaagaag

SEQ ID NO: 18056 - DNA, 21 bp, synthetic construct
  source 1..21: mol_type = other DNA
ttttgttcaatcattaagaag

SEQ ID NO: 18057 - DNA, 21 bp, synthetic construct
  source 1..21: mol_type = other DNA
attttgttcaatcattaagaa

SEQ ID NO: 18058 - DNA, 20 bp, synthetic construct
  source 1..20: mol_type = other DNA
tcctgggaggtgtccacgtg

SEQ ID NO: 18059 - DNA, 20 bp, synthetic construct
  source 1..20: mol_type = other DNA
tcctgggaggtgtccacgtg

SEQ ID NO: 18060 - DNA, 20 bp, synthetic construct
  source 1..20: mol_type = other DNA
tcctgggaggtgtccacgtg

SEQ ID NO: 18061 - DNA, 20 bp, synthetic construct
  source 1..20: mol_type = other DNA
ttttgttcaatcattaagaa

SEQ ID NO: 18062 - DNA, 20 bp, synthetic construct
  source 1..20: mol_type = other DNA
tcctgggaggtgtccacgtg

SEQ ID NO: 18063 - DNA, 20 bp, synthetic construct
  source 1..20: mol_type = other DNA
tcctgggaggtgtccacgtg

SEQ ID NO: 18064 - DNA, 21 bp, synthetic construct
  source 1..21: mol_type = other DNA
attttgttcaatcattaagaa

SEQ ID NO: 18065 - DNA, 21 bp, synthetic construct
  source 1..21: mol_type = other DNA
attttgttcaatcattaagaa

SEQ ID NO: 18066 - DNA, 20 bp, synthetic construct
  source 1..20: mol_type = other DNA
ttttgttcaatcattaagaa

SEQ ID NO: 18067 - DNA, 20 bp, synthetic construct
  source 1..20: mol_type = other DNA
tcctgggaggtgtccacgtg

SEQ ID NO: 18068 - DNA, 20 bp, synthetic construct
  source 1..20: mol_type = other DNA
ttcctgggaggtgtccacgt

SEQ ID NO: 18069 - DNA, 20 bp, synthetic construct
  source 1..20: mol_type = other DNA
ttcctgggaggtgtccacgt

SEQ ID NO: 18070 - DNA, 20 bp, synthetic construct
  source 1..20: mol_type = other DNA
ttcctgggaggtgtccacgt

SEQ ID NO: 18071 - DNA, 20 bp, synthetic construct
  source 1..20: mol_type = other DNA
ttcctgggaggtgtccacgt

SEQ ID NO: 18072 - DNA, 20 bp, synthetic construct
  source 1..20: mol_type = other DNA
attttgttcaatcattaaga

SEQ ID NO: 18073 - DNA, 20 bp, synthetic construct
  source 1..20: mol_type = other DNA
attttgttcaatcattaaga

SEQ ID NO: 18074 - DNA, 20 bp, synthetic construct
  source 1..20: mol_type = other DNA
attttgttcaatcattaaga

SEQ ID NO: 18075 - DNA, 20 bp, synthetic construct
  source 1..20: mol_type = other DNA
attttgttcaatcattaaga

SEQ ID NO: 18076 - DNA, 20 bp, synthetic construct
  source 1..20: mol_type = other DNA
attttgttcaatcattaaga

SEQ ID NO: 18077 - DNA, 23 bp, synthetic construct
  source 1..23: mol_type = other DNA
cgcttcctgggaggtgtccacgt

SEQ ID NO: 18078 - DNA, 23 bp, synthetic construct
  source 1..23: mol_type = other DNA
cgcttcctgggaggtgtccacgt

SEQ ID NO: 18079 - DNA, 22 bp, synthetic construct
  source 1..22: mol_type = other DNA
gcttcctgggaggtgtccacgt

SEQ ID NO: 18080 - DNA, 20 bp, synthetic construct
  source 1..20: mol_type = other DNA
attttgttcaatcattaaga

SEQ ID NO: 18081 - DNA, 20 bp, synthetic construct
  source 1..20: mol_type = other DNA
attttgttcaatcattaaga

SEQ ID NO: 18082 - DNA, 20 bp, synthetic construct
  source 1..20: mol_type = other DNA
ttcctgggaggtgtccacgt

SEQ ID NO: 18083 - DNA, 20 bp, synthetic construct
  source 1..20: mol_type = other DNA
attttgttcaatcattaaga

SEQ ID NO: 18084 - DNA, 24 bp, synthetic construct
  source 1..24: mol_type = other DNA
agcgcttcctgggaggtgtccacg

SEQ ID NO: 18085 - DNA, 21 bp, synthetic construct
  source 1..21: mol_type = other DNA
gcttcctgggaggtgtccacg

SEQ ID NO: 18086 - DNA, 20 bp, synthetic construct
  source 1..20: mol_type = other DNA
cttcctgggaggtgtccacg

SEQ ID NO: 18087 - DNA, 20 bp, synthetic construct
  source 1..20: mol_type = other DNA
tattttgttcaatcattaag

SEQ ID NO: 18088 - DNA, 20 bp, synthetic construct
  source 1..20: mol_type = other DNA
tattttgttcaatcattaag

SEQ ID NO: 18089 - DNA, 20 bp, synthetic construct
  source 1..20: mol_type = other DNA
tattttgttcaatcattaag

SEQ ID NO: 18090 - DNA, 20 bp, synthetic construct
  source 1..20: mol_type = other DNA
tattttgttcaatcattaag

SEQ ID NO: 18091 - DNA, 20 bp, synthetic construct
  source 1..20: mol_type = other DNA
cttcctgggaggtgtccacg

SEQ ID NO: 18092 - DNA, 20 bp, synthetic construct
  source 1..20: mol_type = other DNA
cttcctgggaggtgtccacg

SEQ ID NO: 18093 - DNA, 20 bp, synthetic construct
  source 1..20: mol_type = other DNA
cttcctgggaggtgtccacg

SEQ ID NO: 18094 - DNA, 20 bp, synthetic construct
  source 1..20: mol_type = other DNA
cttcctgggaggtgtccacg

SEQ ID NO: 18095 - DNA, 20 bp, synthetic construct
  source 1..20: mol_type = other DNA
cttcctgggaggtgtccacg

SEQ ID NO: 18096 - DNA, 23 bp, synthetic construct
  source 1..23: mol_type = other DNA
tggtattttgttcaatcattaag

SEQ ID NO: 18097 - DNA, 23 bp, synthetic construct
  source 1..23: mol_type = other DNA
tggtattttgttcaatcattaag

SEQ ID NO: 18098 - DNA, 23 bp, synthetic construct
  source 1..23: mol_type = other DNA
tggtattttgttcaatcattaag

SEQ ID NO: 18099 - DNA, 23 bp, synthetic construct
  source 1..23: mol_type = other DNA
gcgcttcctgggaggtgtccacg

SEQ ID NO: 18100 - DNA, 23 bp, synthetic construct
  source 1..23: mol_type = other DNA
tggtattttgttcaatcattaag

SEQ ID NO: 18101 - DNA, 23 bp, synthetic construct
  source 1..23: mol_type = other DNA
gcgcttcctgggaggtgtccacg

SEQ ID NO: 18102 - DNA, 20 bp, synthetic construct
  source 1..20: mol_type = other DNA
tattttgttcaatcattaag

SEQ ID NO: 18103 - DNA, 23 bp, synthetic construct
  source 1..23: mol_type = other DNA
agcgcttcctgggaggtgtccac

SEQ ID NO: 18104 - DNA, 21 bp, synthetic construct
  source 1..21: mol_type = other DNA
cgcttcctgggaggtgtccac

SEQ ID NO: 18105 - DNA, 21 bp, synthetic construct
  source 1..21: mol_type = other DNA
ggtattttgttcaatcattaa

SEQ ID NO: 18106 - DNA, 21 bp, synthetic construct
  source 1..21: mol_type = other DNA
ggtattttgttcaatcattaa

SEQ ID NO: 18107 - DNA, 20 bp, synthetic construct
  source 1..20: mol_type = other DNA
gtattttgttcaatcattaa

SEQ ID NO: 18108 - DNA, 21 bp, synthetic construct
  source 1..21: mol_type = other DNA
ggtattttgttcaatcattaa

SEQ ID NO: 18109 - DNA, 20 bp, synthetic construct
  source 1..20: mol_type = other DNA
gcttcctgggaggtgtccac

SEQ ID NO: 18110 - DNA, 20 bp, synthetic construct
  source 1..20: mol_type = other DNA
gcttcctgggaggtgtccac

SEQ ID NO: 18111 - DNA, 20 bp, synthetic construct
  source 1..20: mol_type = other DNA
gcttcctgggaggtgtccac

SEQ ID NO: 18112 - DNA, 20 bp, synthetic construct
  source 1..20: mol_type = other DNA
gcttcctgggaggtgtccac

SEQ ID NO: 18113 - DNA, 20 bp, synthetic construct
  source 1..20: mol_type = other DNA
gtattttgttcaatcattaa

SEQ ID NO: 18114 - DNA, 20 bp, synthetic construct
  source 1..20: mol_type = other DNA
gtattttgttcaatcattaa

SEQ ID NO: 18115 - DNA, 21 bp, synthetic construct
  source 1..21: mol_type = other DNA
ggtattttgttcaatcattaa

SEQ ID NO: 18116 - DNA, 21 bp, synthetic construct
  source 1..21: mol_type = other DNA
ggtattttgttcaatcattaa

SEQ ID NO: 18117 - DNA, 21 bp, synthetic construct
  source 1..21: mol_type = other DNA
cgcttcctgggaggtgtccac

SEQ ID NO: 18118 - DNA, 21 bp, synthetic construct
  source 1..21: mol_type = other DNA
cgcttcctgggaggtgtccac

SEQ ID NO: 18119 - DNA, 21 bp, synthetic construct
  source 1..21: mol_type = other DNA
tggtattttgttcaatcatta

SEQ ID NO: 18120 - DNA, 21 bp, synthetic construct
  source 1..21: mol_type = other DNA
gcgcttcctgggaggtgtcca

SEQ ID NO: 18121 - DNA, 20 bp, synthetic construct
  source 1..20: mol_type = other DNA
ggtattttgttcaatcatta

SEQ ID NO: 18122 - DNA, 20 bp, synthetic construct
  source 1..20: mol_type = other DNA
ggtattttgttcaatcatta

SEQ ID NO: 18123 - DNA, 20 bp, synthetic construct
  source 1..20: mol_type = other DNA
ggtattttgttcaatcatta

SEQ ID NO: 18124 - DNA, 20 bp, synthetic construct
  source 1..20: mol_type = other DNA
cgcttcctgggaggtgtcca

SEQ ID NO: 18125 - DNA, 20 bp, synthetic construct
  source 1..20: mol_type = other DNA
cgcttcctgggaggtgtcca

SEQ ID NO: 18126 - DNA, 20 bp, synthetic construct
  source 1..20: mol_type = other DNA
cgcttcctgggaggtgtcca

SEQ ID NO: 18127 - DNA, 20 bp, synthetic construct
  source 1..20: mol_type = other DNA
ggtattttgttcaatcatta

SEQ ID NO: 18128 - DNA, 20 bp, synthetic construct
  source 1..20: mol_type = other DNA
ggtattttgttcaatcatta

SEQ ID NO: 18129 - DNA, 20 bp, synthetic construct
  source 1..20: mol_type = other DNA
cgcttcctgggaggtgtcca

SEQ ID NO: 18130 - DNA, 20 bp, synthetic construct
  source 1..20: mol_type = other DNA
cgcttcctgggaggtgtcca

SEQ ID NO: 18131 - DNA, 21 bp, synthetic construct
  source 1..21: mol_type = other DNA
tggtattttgttcaatcatta

SEQ ID NO: 18132 - DNA, 21 bp, synthetic construct
  source 1..21: mol_type = other DNA
tggtattttgttcaatcatta

SEQ ID NO: 18133 - DNA, 24 bp, synthetic construct
  source 1..24: mol_type = other DNA
acttggtattttgttcaatcatta

SEQ ID NO: 18134 - DNA, 20 bp, synthetic construct
  source 1..20: mol_type = other DNA
ggtattttgttcaatcatta

SEQ ID NO: 18135 - DNA, 20 bp, synthetic construct
  source 1..20: mol_type = other DNA
ggtattttgttcaatcatta

SEQ ID NO: 18136 - DNA, 23 bp, synthetic construct
  source 1..23: mol_type = other DNA
acttggtattttgttcaatcatt

SEQ ID NO: 18137 - DNA, 21 bp, synthetic construct
  source 1..21: mol_type = other DNA
ttggtattttgttcaatcatt

SEQ ID NO: 18138 - DNA, 20 bp, synthetic construct
  source 1..20: mol_type = other DNA
tggtattttgttcaatcatt

SEQ ID NO: 18139 - DNA, 20 bp, synthetic construct
  source 1..20: mol_type = other DNA
tggtattttgttcaatcatt

SEQ ID NO: 18140 - DNA, 20 bp, synthetic construct
  source 1..20: mol_type = other DNA
tggtattttgttcaatcatt

SEQ ID NO: 18141 - DNA, 20 bp, synthetic construct
  source 1..20: mol_type = other DNA
tggtattttgttcaatcatt

SEQ ID NO: 18142 - DNA, 20 bp, synthetic construct
  source 1..20: mol_type = other DNA
gcgcttcctgggaggtgtcc

SEQ ID NO: 18143 - DNA, 20 bp, synthetic construct
  source 1..20: mol_type = other DNA
gcgcttcctgggaggtgtcc

SEQ ID NO: 18144 - DNA, 20 bp, synthetic construct
  source 1..20: mol_type = other DNA
gcgcttcctgggaggtgtcc

SEQ ID NO: 18145 - DNA, 20 bp, synthetic construct
  source 1..20: mol_type = other DNA
gcgcttcctgggaggtgtcc

SEQ ID NO: 18146 - DNA, 21 bp, synthetic construct
  source 1..21: mol_type = other DNA
ttggtattttgttcaatcatt

SEQ ID NO: 18147 - DNA, 21 bp, synthetic construct
  source 1..21: mol_type = other DNA
ttggtattttgttcaatcatt

SEQ ID NO: 18148 - DNA, 20 bp, synthetic construct
  source 1..20: mol_type = other DNA
tggtattttgttcaatcatt

SEQ ID NO: 18149 - DNA, 21 bp, synthetic construct
  source 1..21: mol_type = other DNA
cttggtattttgttcaatcat

SEQ ID NO: 18150 - DNA, 21 bp, synthetic construct
  source 1..21: mol_type = other DNA
cttggtattttgttcaatcat

SEQ ID NO: 18151 - DNA, 20 bp, synthetic construct
  source 1..20: mol_type = other DNA
ttggtattttgttcaatcat

SEQ ID NO: 18152 - DNA, 21 bp, synthetic construct
  source 1..21: mol_type = other DNA
cttggtattttgttcaatcat

SEQ ID NO: 18153 - DNA, 20 bp, synthetic construct
  source 1..20: mol_type = other DNA
ttggtattttgttcaatcat

SEQ ID NO: 18154 - DNA, 20 bp, synthetic construct
  source 1..20: mol_type = other DNA
agcgcttcctgggaggtgtc

SEQ ID NO: 18155 - DNA, 21 bp, synthetic construct
  source 1..21: mol_type = other DNA
gagcgcttcctgggaggtgtc

SEQ ID NO: 18156 - DNA, 21 bp, synthetic construct
  source 1..21: mol_type = other DNA
gagcgcttcctgggaggtgtc

SEQ ID NO: 18157 - DNA, 21 bp, synthetic construct
  source 1..21: mol_type = other DNA
cttggtattttgttcaatcat

SEQ ID NO: 18158 - DNA, 21 bp, synthetic construct
  source 1..21: mol_type = other DNA
cttggtattttgttcaatcat

SEQ ID NO: 18159 - DNA, 21 bp, synthetic construct
  source 1..21: mol_type = other DNA
acttggtattttgttcaatca

SEQ ID NO: 18160 - DNA, 20 bp, synthetic construct
  source 1..20: mol_type = other DNA
cttggtattttgttcaatca

SEQ ID NO: 18161 - DNA, 20 bp, synthetic construct
  source 1..20: mol_type = other DNA
gagcgcttcctgggaggtgt

SEQ ID NO: 18162 - DNA, 21 bp, synthetic construct
  source 1..21: mol_type = other DNA
acttggtattttgttcaatca

SEQ ID NO: 18163 - DNA, 21 bp, synthetic construct
  source 1..21: mol_type = other DNA
acttggtattttgttcaatca

SEQ ID NO: 18164 - DNA, 21 bp, synthetic construct
  source 1..21: mol_type = other DNA
gacttggtattttgttcaatc

SEQ ID NO: 18165 - DNA, 20 bp, synthetic construct
  source 1..20: mol_type = other DNA
acttggtattttgttcaatc

SEQ ID NO: 18166 - DNA, 20 bp, synthetic construct
  source 1..20: mol_type = other DNA
tgagcgcttcctgggaggtg

SEQ ID NO: 18167 - DNA, 23 bp, synthetic construct
  source 1..23: mol_type = other DNA
gagtgagcgcttcctgggaggtg

SEQ ID NO: 18168 - DNA, 23 bp, synthetic construct
  source 1..23: mol_type = other DNA
gagtgagcgcttcctgggaggtg

SEQ ID NO: 18169 - DNA, 51 bp, synthetic construct
  source 1..51: mol_type = other DNA
catgggtatggcctctaaaaacatggccccagcagcttcagtccctttctc

SEQ ID NO: 18170 - DNA, 51 bp, synthetic construct; identical to SEQ ID NO: 18169
  source 1..51: mol_type = other DNA

SEQ ID NO: 18171 - DNA, 51 bp, synthetic construct; identical to SEQ ID NO: 18169
  source 1..51: mol_type = other DNA

SEQ ID NO: 18172 - DNA, 52 bp, synthetic construct
  source 1..52: mol_type = other DNA
catgggtatggcctctaaaaacatggccccagcagcttcagtccctttctcg

SEQ ID NO: 18173 - DNA, 52 bp, synthetic construct
  source 1..52: mol_type = other DNA
tctgcttctctcccctccaggccgtgcataaggctgtgctgaccatcgacga

SEQ ID NO: 18174 - DNA, 52 bp, synthetic construct; identical to SEQ ID NO: 18173
  source 1..52: mol_type = other DNA

SEQ ID NO: 18175 - DNA, 52 bp, synthetic construct; identical to SEQ ID NO: 18172
  source 1..52: mol_type = other DNA

SEQ ID NO: 18176 - DNA, 53 bp, synthetic construct
  source 1..53: mol_type = other DNA
catgggtatggcctctaaaaacatggccccagcagcttcagtccctttctcgt

SEQ ID NO: 18177 - DNA, 53 bp, synthetic construct
  source 1..53: mol_type = other DNA
tctgcttctctcccctccaggccgtgcataaggctgtgctgaccatcgacgag

SEQ ID NO: 18178 - DNA, 53 bp, synthetic construct; identical to SEQ ID NO: 18177
  source 1..53: mol_type = other DNA

SEQ ID NO: 18179 - DNA, 53 bp, synthetic construct; identical to SEQ ID NO: 18176
  source 1..53: mol_type = other DNA

SEQ ID NO: 18180 - DNA, 53 bp, synthetic construct; identical to SEQ ID NO: 18176
  source 1..53: mol_type = other DNA

SEQ ID NO: 18181 - DNA, 53 bp, synthetic construct; identical to SEQ ID NO: 18177
  source 1..53: mol_type = other DNA

SEQ ID NO: 18182 - DNA, 54 bp, synthetic construct
  source 1..54: mol_type = other DNA
catgggtatggcctctaaaaacatggccccagcagcttcagtccctttctcgtc

SEQ ID NO: 18183 - DNA, 54 bp, synthetic construct; identical to SEQ ID NO: 18182
  source 1..54: mol_type = other DNA

SEQ ID NO: 18184 - DNA, 54 bp, synthetic construct; identical to SEQ ID NO: 18182
  source 1..54: mol_type = other DNA

SEQ ID NO: 18185 - DNA, 54 bp, synthetic construct; identical to SEQ ID NO: 18182
  source 1..54: mol_type = other DNA

SEQ ID NO: 18186 - DNA, 54 bp, synthetic construct
  source 1..54: mol_type = other DNA
tctgcttctctcccctccaggccgtgcataaggctgtgctgaccatcgacgaga

SEQ ID NO: 18187 - DNA, 54 bp, synthetic construct; identical to SEQ ID NO: 18186
  source 1..54: mol_type = other DNA

SEQ ID NO: 18188 - DNA, 55 bp, synthetic construct
  source 1..55: mol_type = other DNA
catgggtatggcctctaaaaacatggccccagcagcttcagtccctttctcgtcg

SEQ ID NO: 18189 - DNA, 55 bp, synthetic construct; identical to SEQ ID NO: 18188
  source 1..55: mol_type = other DNA

SEQ ID NO: 18190 - DNA, 55 bp, synthetic construct
  source 1..55: mol_type = other DNA
tctgcttctctcccctccaggccgtgcataaggctgtgctgaccatcgacgagaa

SEQ ID NO: 18191 - DNA, 55 bp, synthetic construct; identical to SEQ ID NO: 18190
  source 1..55: mol_type = other DNA

SEQ ID NO: 18192 - DNA, 55 bp, synthetic construct; identical to SEQ ID NO: 18188
  source 1..55: mol_type = other DNA

SEQ ID NO: 18193 - DNA, 55 bp, synthetic construct; identical to SEQ ID NO: 18188
  source 1..55: mol_type = other DNA

SEQ ID NO: 18194 - DNA, 55 bp, synthetic construct; identical to SEQ ID NO: 18190
  source 1..55: mol_type = other DNA

SEQ ID NO: 18195 - DNA, 55 bp, synthetic construct; identical to SEQ ID NO: 18190
  source 1..55: mol_type = other DNA

SEQ ID NO: 18196 - DNA, 56 bp, synthetic construct
  source 1..56: mol_type = other DNA
catgggtatggcctctaaaaacatggccccagcagcttcagtccctttctcgtcga

SEQ ID NO: 18197 - DNA, 56 bp, synthetic construct
  source 1..56: mol_type = other DNA
tctgcttctctcccctccaggccgtgcataaggctgtgctgaccatcgacgagaaa

SEQ ID NO: 18198 - DNA, 56 bp, synthetic construct; identical to SEQ ID NO: 18196
  source 1..56: mol_type = other DNA

SEQ ID NO: 18199 - DNA, 57 bp, synthetic construct
  source 1..57: mol_type = other DNA
catgggtatggcctctaaaaacatggccccagcagcttcagtccctttctcgtcgat

SEQ ID NO: 18200 - DNA, 57 bp, synthetic construct; identical to SEQ ID NO: 18199
  source 1..57: mol_type = other DNA

SEQ ID NO: 18201 - DNA, 57 bp, synthetic construct
  source 1..57: mol_type = other DNA
tctgcttctctcccctccaggccgtgcataaggctgtgctgaccatcgacgagaaag

SEQ ID NO: 18202 - DNA, 58 bp, synthetic construct
  source 1..58: mol_type = other DNA
catgggtatggcctctaaaaacatggccccagcagcttcagtccctttctcgtcgatg

SEQ ID NO: 18203 - DNA, 58 bp, synthetic construct; identical to SEQ ID NO: 18202
  source 1..58: mol_type = other DNA

SEQ ID NO: 18204 - DNA, 58 bp, synthetic construct
  source 1..58: mol_type = other DNA
tctgcttctctcccctccaggccgtgcataaggctgtgctgaccatcgacgagaaagg

SEQ ID NO: 18205 - DNA, 59 bp, synthetic construct
  source 1..59: mol_type = other DNA
catgggtatggcctctaaaaacatggccccagcagcttcagtccctttctcgtcgatgg

SEQ ID NO: 18206 - DNA, 59 bp, synthetic construct; identical to SEQ ID NO: 18205
  source 1..59: mol_type = other DNA

SEQ ID NO: 18207 - DNA, 59 bp, synthetic construct
  source 1..59: mol_type = other DNA
tctgcttctctcccctccaggccgtgcataaggctgtgctgaccatcgacgagaaaggg

SEQ ID NO: 18208 - DNA, 59 bp, synthetic construct; identical to SEQ ID NO: 18205
  source 1..59: mol_type = other DNA

SEQ ID NO: 18209 - DNA, 59 bp, synthetic construct; identical to SEQ ID NO: 18205
  source 1..59: mol_type = other DNA

SEQ ID NO: 18210 - DNA, 60 bp, synthetic construct
  source 1..60: mol_type = other DNA
catgggtatggcctctaaaaacatggccccagcagcttcagtccctttctcgtcgatggt

SEQ ID NO: 18211 - DNA, 60 bp, synthetic construct
  source 1..60: mol_type = other DNA
tctgcttctctcccctccaggccgtgcataaggctgtgctgaccatcgacgagaaaggga

SEQ ID NO: 18212 - DNA, 60 bp, synthetic construct; identical to SEQ ID NO: 18210
  source 1..60: mol_type = other DNA

SEQ ID NO: 18213 - DNA, 60 bp, synthetic construct; identical to SEQ ID NO: 18211
  source 1..60: mol_type = other DNA

SEQ ID NO: 18214 - DNA, 60 bp, synthetic construct; identical to SEQ ID NO: 18211
  source 1..60: mol_type = other DNA

SEQ ID NO: 18215 - DNA, 61 bp, synthetic construct
  source 1..61: mol_type = other DNA
catgggtatggcctctaaaaacatggccccagcagcttcagtccctttctcgtcgatggtc

SEQ ID NO: 18216 - DNA, 61 bp, synthetic construct
  source 1..61: mol_type = other DNA
tctgcttctctcccctccaggccgtgcataaggctgtgctgaccatcgacgagaaagggac

SEQ ID NO: 18217 - DNA, 62 bp, synthetic construct
  source 1..62: mol_type = other DNA
tctgcttctctcccctccaggccgtgcataaggctgtgctgaccatcgacgagaaagggact

SEQ ID NO: 18218 - DNA, 62 bp, synthetic construct
  source 1..62: mol_type = other DNA
catgggtatggcctctaaaaacatggccccagcagcttcagtccctttctcgtcgatggtca

SEQ ID NO: 18219 - DNA, 62 bp, synthetic construct; identical to SEQ ID NO: 18218
  source 1..62: mol_type = other DNA

SEQ ID NO: 18220 - DNA, 63 bp, synthetic construct
  source 1..63: mol_type = other DNA
tctgcttctctcccctccaggccgtgcataaggctgtgctgaccatcgacgagaaagggactg

SEQ ID NO: 18221 - DNA, 63 bp, synthetic construct
  source 1..63: mol_type = other DNA
catgggtatggcctctaaaaacatggccccagcagcttcagtccctttctcgtcgatggtcag

SEQ ID NO: 18222 - DNA, 64 bp, synthetic construct
  source 1..64: mol_type = other DNA
catgggtatggcctctaaaaacatggccccagcagcttcagtccctttctcgtcgatggtcagc

SEQ ID NO: 18223 - DNA, 64 bp, synthetic construct
  source 1..64: mol_type = other DNA
tctgcttctctcccctccaggccgtgcataaggctgtgctgaccatcgacgagaaagggactga

SEQ ID NO: 18224 - DNA, 64 bp, synthetic construct; identical to SEQ ID NO: 18223
  source 1..64: mol_type = other DNA

SEQ ID NO: 18225 - DNA, 64 bp, synthetic construct; identical to SEQ ID NO: 18223
  source 1..64: mol_type = other DNA

SEQ ID NO: 18226 - DNA, 65 bp, synthetic construct
  source 1..65: mol_type = other DNA
tctgcttctctcccctccaggccgtgcataaggctgtgctgaccatcgacgagaaagggactgaa

SEQ ID NO: 18227 - DNA, 65 bp, synthetic construct; identical to SEQ ID NO: 18226
  source 1..65: mol_type = other DNA

SEQ ID NO: 18228 - DNA, 65 bp, synthetic construct
  source 1..65: mol_type = other DNA
catgggtatggcctctaaaaacatggccccagcagcttcagtccctttctcgtcgatggtcagca

SEQ ID NO: 18229 - DNA, 65 bp, synthetic construct; identical to SEQ ID NO: 18226
  source 1..65: mol_type = other DNA

SEQ ID NO: 18230 - DNA, 65 bp, synthetic construct; identical to SEQ ID NO: 18228
  source 1..65: mol_type = other DNA

SEQ ID NO: 18231 - DNA, 65 bp, synthetic construct; identical to SEQ ID NO: 18226
  source 1..65: mol_type = other DNA

SEQ ID NO: 18232 - DNA, 65 bp, synthetic construct; identical to SEQ ID NO: 18226
  source 1..65: mol_type = other DNA

SEQ ID NO: 18233 - DNA, 65 bp, synthetic construct; identical to SEQ ID NO: 18228
  source 1..65: mol_type = other DNA

SEQ ID NO: 18234 - DNA, 66 bp, synthetic construct
  source 1..66: mol_type = other DNA
tctgcttctctcccctccaggccgtgcataaggctgtgctgaccatcgacgagaaagggactgaag

SEQ ID NO: 18235 - DNA, 66 bp, synthetic construct
  source 1..66: mol_type = other DNA
catgggtatggcctctaaaaacatggccccagcagcttcagtccctttctcgtcgatggtcagcac

SEQ ID NO: 18236 - DNA, 66 bp, synthetic construct; identical to SEQ ID NO: 18234
  source 1..66: mol_type = other DNA

SEQ ID NO: 18237 - DNA, 66 bp, synthetic construct; identical to SEQ ID NO: 18234
  source 1..66: mol_type = other DNA

SEQ ID NO: 18238 - DNA, 66 bp, synthetic construct; identical to SEQ ID NO: 18235
  source 1..66: mol_type = other DNA

SEQ ID NO: 18239 - DNA, 66 bp, synthetic construct; identical to SEQ ID NO: 18235
  source 1..66: mol_type = other DNA

SEQ ID NO: 18240 - DNA, 66 bp, synthetic construct; identical to SEQ ID NO: 18235
  source 1..66: mol_type = other DNA

SEQ ID NO: 18241 - DNA, 66 bp, synthetic construct; identical to SEQ ID NO: 18234
  source 1..66: mol_type = other DNA

SEQ ID NO: 18242 - DNA, 66 bp, synthetic construct; identical to SEQ ID NO: 18235
  source 1..66: mol_type = other DNA

SEQ ID NO: 18243 - DNA, 67 bp, synthetic construct
  source 1..67: mol_type = other DNA
catgggtatggcctctaaaaacatggccccagcagcttcagtccctttctcgtcgatggtcagcaca

SEQ ID NO: 18244 - DNA, 67 bp, synthetic construct
  source 1..67: mol_type = other DNA
tctgcttctctcccctccaggccgtgcataaggctgtgctgaccatcgacgagaaagggactgaagc

SEQ ID NO: 18245 - DNA, 67 bp, synthetic construct; identical to SEQ ID NO: 18244
  source 1..67: mol_type = other DNA

SEQ ID NO: 18246 - DNA, 67 bp, synthetic construct; identical to SEQ ID NO: 18243
  source 1..67: mol_type = other DNA

SEQ ID NO: 18247 - DNA, 68 bp, synthetic construct
  source 1..68: mol_type = other DNA
tctgcttctctcccctccaggccgtgcataaggctgtgctgaccatcgacgagaaagggactgaagct

SEQ ID NO: 18248 - DNA, 68 bp, synthetic construct; identical to SEQ ID NO: 18247
  source 1..68: mol_type = other DNA

SEQ ID NO: 18249 - DNA, 68 bp, synthetic construct
  source 1..68: mol_type = other DNA
catgggtatggcctctaaaaacatggccccagcagcttcagtccctttctcgtcgatggtcagcacag

SEQ ID NO: 18250 - DNA, 68 bp, synthetic construct; identical to SEQ ID NO: 18249
  source 1..68: mol_type = other DNA

SEQ ID NO: 18251 - DNA, 68 bp, synthetic construct; identical to SEQ ID NO: 18247
  source 1..68: mol_type = other DNA

SEQ ID NO: 18252 - DNA, 69 bp, synthetic construct
  source 1..69: mol_type = other DNA
catgggtatggcctctaaaaacatggccccagcagcttcagtccctttctcgtcgatggtcagcacagc

SEQ ID NO: 18253 - DNA, 69 bp, synthetic construct; identical to SEQ ID NO: 18252
  source 1..69: mol_type = other DNA

SEQ ID NO: 18254 - DNA, 69 bp, synthetic construct
  source 1..69: mol_type = other DNA
tctgcttctctcccctccaggccgtgcataaggctgtgctgaccatcgacgagaaagggactgaagctg

SEQ ID NO: 18255 - DNA, 70 bp, synthetic construct
  source 1..70: mol_type = other DNA
catgggtatggcctctaaaaacatggccccagcagcttcagtccctttctcgtcgatggtcagcacagcc

SEQ ID NO: 18256 - DNA, 70 bp, synthetic construct; identical to SEQ ID NO: 18255
  source 1..70: mol_type = other DNA

SEQ ID NO: 18257 - DNA, 70 bp, synthetic construct
  source 1..70: mol_type = other DNA
tctgcttctctcccctccaggccgtgcataaggctgtgctgaccatcgacgagaaagggactgaagctgc

SEQ ID NO: 18258 - DNA, 70 bp, synthetic construct; identical to SEQ ID NO: 18257
  source 1..70: mol_type = other DNA

SEQ ID NO: 18259 - DNA, 70 bp, synthetic construct; identical to SEQ ID NO: 18255
  source 1..70: mol_type = other DNA

SEQ ID NO: 18260 - DNA, 70 bp, synthetic construct; identical to SEQ ID NO: 18257
  source 1..70: mol_type = other DNA

SEQ ID NO: 18261 - DNA, 70 bp, synthetic construct; identical to SEQ ID NO: 18255
  source 1..70: mol_type = other DNA

SEQ ID NO: 18262 - DNA, 71 bp, synthetic construct
  source 1..71: mol_type = other DNA
catgggtatggcctctaaaaacatggccccagcagcttcagtccctttctcgtcgatggtcagcacagcct

SEQ ID NO: 18263 - DNA, 71 bp, synthetic construct; identical to SEQ ID NO: 18262
  source 1..71: mol_type = other DNA

SEQ ID NO: 18264 - DNA, 71 bp, synthetic construct
  source 1..71: mol_type = other DNA
tctgcttctctcccctccaggccgtgcataaggctgtgctgaccatcgacgagaaagggactgaagctgct

SEQ ID NO: 18265 - DNA, 71 bp, synthetic construct; identical to SEQ ID NO: 18264
  source 1..71: mol_type = other DNA

SEQ ID NO: 18266 - DNA, 72 bp, synthetic construct
  source 1..72: mol_type = other DNA
tctgcttctctcccctccaggccgtgcataaggctgtgctgaccatcgacgagaaagggactgaagctgctg

SEQ ID NO: 18267 - DNA, 72 bp, synthetic construct; identical to SEQ ID NO: 18266
  source 1..72: mol_type = other DNA

SEQ ID NO: 18268 - DNA, 72 bp, synthetic construct
  source 1..72: mol_type = other DNA
catgggtatggcctctaaaaacatggccccagcagcttcagtccctttctcgtcgatggtcagcacagcctt

SEQ ID NO: 18269 - DNA, 73 bp, synthetic construct
  source 1..73: mol_type = other DNA
tctgcttctctcccctccaggccgtgcataaggctgtgctgaccatcgacgagaaagggactgaagctgctgg

SEQ ID NO: 18270 - DNA, 73 bp, synthetic construct
  source 1..73: mol_type = other DNA
catgggtatggcctctaaaaacatggccccagcagcttcagtccctttctcgtcgatggtcagcacagcctta

SEQ ID NO: 18271 - DNA, 73 bp, synthetic construct; identical to SEQ ID NO: 18270
  source 1..73: mol_type = other DNA

SEQ ID NO: 18272 - DNA, 73 bp, synthetic construct; identical to SEQ ID NO: 18269
  source 1..73: mol_type = other DNA

SEQ ID NO: 18273 - DNA, 73 bp, synthetic construct; identical to SEQ ID NO: 18269
  source 1..73: mol_type = other DNA

SEQ ID NO: 18274 - DNA, 74 bp, synthetic construct
  source 1..74: mol_type = other DNA
tctgcttctctcccctccaggccgtgcataaggctgtgctgaccatcgacgagaaagggactgaagctgctggg

SEQ ID NO: 18275 - DNA, 74 bp, synthetic construct
  source 1..74: mol_type = other DNA
catgggtatggcctctaaaaacatggccccagcagcttcagtccctttctcgtcgatggtcagcacagccttat

SEQ ID NO: 18276 - DNA, 74 bp, synthetic construct; identical to SEQ ID NO: 18275
  source 1..74: mol_type = other DNA

SEQ ID NO: 18277 - DNA, 74 bp, synthetic construct; identical to SEQ ID NO: 18275
  source 1..74: mol_type = other DNA

SEQ ID NO: 18278 - DNA, 74 bp, synthetic construct; identical to SEQ ID NO: 18274
  source 1..74: mol_type = other DNA

SEQ ID NO: 18279 - DNA, 74 bp, synthetic construct; identical to SEQ ID NO: 18275
  source 1..74: mol_type = other DNA

SEQ ID NO: 18280 - DNA, 74 bp, synthetic construct; identical to SEQ ID NO: 18274
  source 1..74: mol_type = other DNA

SEQ ID NO: 18281 - DNA, 75 bp, synthetic construct
  source 1..75: mol_type = other DNA
catgggtatggcctctaaaaacatggccccagcagcttcagtccctttctcgtcgatggtcagcacagccttatg

SEQ ID NO: 18282 - DNA, 75 bp, synthetic construct; identical to SEQ ID NO: 18281
  source 1..75: mol_type = other DNA

SEQ ID NO: 18283 - DNA, 75 bp, synthetic construct
  source 1..75: mol_type = other DNA
tctgcttctctcccctccaggccgtgcataaggctgtgctgaccatcgacgagaaagggactgaagctgctgggg

SEQ ID NO: 18284 - DNA, 75 bp, synthetic construct; identical to SEQ ID NO: 18283
  source 1..75: mol_type = other DNA

SEQ ID NO: 18285 - DNA, 75 bp, synthetic construct; identical to SEQ ID NO: 18281
  source 1..75: mol_type = other DNA

SEQ ID NO: 18286 - DNA, 75 bp, synthetic construct; identical to SEQ ID NO: 18281
  source 1..75: mol_type = other DNA

SEQ ID NO: 18287 - DNA, 75 bp, synthetic construct; identical to SEQ ID NO: 18281
  source 1..75: mol_type = other DNA

SEQ ID NO: 18288 - DNA, 75 bp, synthetic construct; identical to SEQ ID NO: 18281
  source 1..75: mol_type = other DNA

SEQ ID NO: 18289 - DNA, 76 bp, synthetic construct
  source 1..76: mol_type = other DNA
catgggtatggcctctaaaaacatggccccagcagcttcagtccctttctcgtcgatggtcagcacagccttatgc

SEQ ID NO: 18290 - DNA, 76 bp, synthetic construct
  source 1..76: mol_type = other DNA
tctgcttctctcccctccaggccgtgcataaggctgtgctgaccatcgacgagaaagggactgaagctgctggggc

SEQ ID NO: 18291 - DNA, 76 bp, synthetic construct; identical to SEQ ID NO: 18289
  source 1..76: mol_type = other DNA

SEQ ID NO: 18292 - DNA, 76 bp, synthetic construct; identical to SEQ ID NO: 18289
  source 1..76: mol_type = other DNA

SEQ ID NO: 18293 - DNA, 76 bp, synthetic construct; identical to SEQ ID NO: 18290
  source 1..76: mol_type = other DNA

SEQ ID NO: 18294 - DNA, 76 bp, synthetic construct; identical to SEQ ID NO: 18290
  source 1..76: mol_type = other DNA

SEQ ID NO: 18295 - DNA, 77 bp, synthetic construct
  source 1..77: mol_type = other DNA
tctgcttctctcccctccaggccgtgcataaggctgtgctgaccatcgacgagaaagggactgaagctgctggggcc

SEQ ID NO: 18296 - DNA, 77 bp, synthetic construct
  source 1..77: mol_type = other DNA
catgggtatggcctctaaaaacatggccccagcagcttcagtccctttctcgtcgatggtcagcacagccttatgca

SEQ ID NO: 18297 - DNA, 77 bp, synthetic construct; identical to SEQ ID NO: 18295
  source 1..77: mol_type = other DNA

SEQ ID NO: 18298 - DNA, 77 bp, synthetic construct; identical to SEQ ID NO: 18296
  source 1..77: mol_type = other DNA

SEQ ID NO: 18299 - DNA, 78 bp, synthetic construct
  source 1..78: mol_type = other DNA
catgggtatggcctctaaaaacatggccccagcagcttcagtccctttctcgtcgatggtcagcacagccttatgcac

SEQ ID NO: 18300 - DNA, 78 bp, synthetic construct; identical to SEQ ID NO: 18299
  source 1..78: mol_type = other DNA

SEQ ID NO: 18301 - DNA, 78 bp, synthetic construct
  source 1..78: mol_type = other DNA
tctgcttctctcccctccaggccgtgcataaggctgtgctgaccatcgacgagaaagggactgaagctgctggggcca

SEQ ID NO: 18302 - DNA, 79 bp, synthetic construct
  source 1..79: mol_type = other DNA
tctgcttctctcccctccaggccgtgcataaggctgtgctgaccatcgacgagaaagggactgaagctgctggggccat

SEQ ID NO: 18303 - DNA, 79 bp, synthetic construct
  source 1..79: mol_type = other DNA
catgggtatggcctctaaaaacatggccccagcagcttcagtccctttctcgtcgatggtcagcacagccttatgcacg

SEQ ID NO: 18304 - DNA, 79 bp, synthetic construct; identical to SEQ ID NO: 18302
  source 1..79: mol_type = other DNA

SEQ ID NO: 18305 - DNA, 80 bp, synthetic construct
  source 1..80: mol_type = other DNA
tctgcttctctcccctccaggccgtgcataaggctgtgctgaccatcgacgagaaagggactgaagctgctggggccatg

SEQ ID NO: 18306 - DNA, 80 bp, synthetic construct; identical to SEQ ID NO: 18305
  source 1..80: mol_type = other DNA

SEQ ID NO: 18307 - DNA, 80 bp, synthetic construct
  source 1..80: mol_type = other DNA
catgggtatggcctctaaaaacatggccccagcagcttcagtccctttctcgtcgatggtcagcacagccttatgcacgg

SEQ ID NO: 18308 - DNA, 80 bp, synthetic construct; identical to SEQ ID NO: 18305
  source 1..80: mol_type = other DNA

SEQ ID NO: 18309 - DNA, 80 bp, synthetic construct; identical to SEQ ID NO: 18307
  source 1..80: mol_type = other DNA

SEQ ID NO: 18310 - DNA, 80 bp, synthetic construct; identical to SEQ ID NO: 18305
  source 1..80: mol_type = other DNA

SEQ ID NO: 18311 - DNA, 80 bp, synthetic construct; identical to SEQ ID NO: 18305
  source 1..80: mol_type = other DNA

SEQ ID NO: 18312 - DNA, 81 bp, synthetic construct
  source 1..81: mol_type = other DNA
tctgcttctctcccctccaggccgtgcataaggctgtgctgaccatcgacgagaaagggactgaagctgctggggccatgt

SEQ ID NO: 18313 - DNA, 81 bp, synthetic construct; identical to SEQ ID NO: 18312
  source 1..81: mol_type = other DNA

SEQ ID NO: 18314 - DNA, 81 bp, synthetic construct; identical to SEQ ID NO: 18312
  source 1..81: mol_type = other DNA

SEQ ID NO: 18315 - DNA, 81 bp, synthetic construct; identical to SEQ ID NO: 18312
  source 1..81: mol_type = other DNA

SEQ ID NO: 18316 - DNA, 81 bp, synthetic construct
  source 1..81: mol_type = other DNA
catgggtatggcctctaaaaacatggccccagcagcttcagtccctttctcgtcgatggtcagcacagccttatgcacggc

SEQ ID NO: 18317 - DNA, 81 bp, synthetic construct; identical to SEQ ID NO: 18316
  source 1..81: mol_type = other DNA

SEQ ID NO: 18318 - DNA, 81 bp, synthetic construct; identical to SEQ ID NO: 18312
  source 1..81: mol_type = other DNA

SEQ ID NO: 18319 - DNA, 81 bp, synthetic construct; identical to SEQ ID NO: 18312
  source 1..81: mol_type = other DNA

SEQ ID NO: 18320 - DNA, 17 bp, synthetic construct
  source 1..17: mol_type = other DNA
gtcgatggtcagcacag

SEQ ID NO: 18321 - DNA, 17 bp, synthetic construct
  source 1..17: mol_type = other DNA
gtcgatggtcagcacag

SEQ ID NO: 18322 - DNA, 17 bp, synthetic construct
  source 1..17: mol_type = other DNA
gtcgatggtcagcacag

SEQ ID NO: 18323 - DNA, 17 bp, synthetic construct
  source 1..17: mol_type = other DNA
tcgatggtcagcacagc

SEQ ID NO: 18324 - DNA, 17 bp, synthetic construct
  source 1..17: mol_type = other DNA
gaaagggactgaagctg

SEQ ID NO: 18325 - DNA, 17 bp, synthetic construct
  source 1..17: mol_type = other DNA
gaaagggactgaagctg

SEQ ID NO: 18326 - DNA, 17 bp, synthetic construct
  source 1..17: mol_type = other DNA
tcgatggtcagcacagc

SEQ ID NO: 18327 - DNA, 17 bp, synthetic construct
  source 1..17: mol_type = other DNA
cgatggtcagcacagcc

SEQ ID NO: 18328 - DNA, 17 bp, synthetic construct
  source 1..17: mol_type = other DNA
aaagggactgaagctgc

SEQ ID NO: 18329 - DNA, 17 bp, synthetic construct
  source 1..17: mol_type = other DNA
aaagggactgaagctgc

SEQ ID NO: 18330 - DNA, 17 bp, synthetic construct
  source 1..17: mol_type = other DNA
cgatggtcagcacagcc

SEQ ID NO: 18331 - DNA, 17 bp, synthetic construct
  source 1..17: mol_type = other DNA
cgatggtcagcacagcc

SEQ ID NO: 18332 - DNA, 17 bp, synthetic construct
  source 1..17: mol_type = other DNA
aaagggactgaagctgc

SEQ ID NO: 18333 - DNA, 17 bp, synthetic construct
  source 1..17: mol_type = other DNA
gatggtcagcacagcct

SEQ ID NO: 18334 - DNA, 17 bp, synthetic construct
  source 1..17: mol_type = other DNA
gatggtcagcacagcct

SEQ ID NO: 18335 - DNA, 17 bp, synthetic construct
  source 1..17: mol_type = other DNA
gatggtcagcacagcct

SEQ ID NO: 18336 - DNA, 17 bp, synthetic construct
  source 1..17: mol_type = other DNA
gatggtcagcacagcct

SEQ ID NO: 18337 - DNA, 17 bp, synthetic construct
  source 1..17: mol_type = other DNA
aagggactgaagctgct

SEQ ID NO: 18338 - DNA, 17 bp, synthetic construct
  source 1..17: mol_type = other DNA
aagggactgaagctgct

SEQ ID NO: 18339 - DNA, 17 bp, synthetic construct
  source 1..17: mol_type = other DNA
atggtcagcacagcctt

SEQ ID NO: 18340 - DNA, 17 bp, synthetic construct
  source 1..17: mol_type = other DNA
atggtcagcacagcctt

SEQ ID NO: 18341 - DNA, 17 bp, synthetic construct
  source 1..17: mol_type = other DNA
agggactgaagctgctg

SEQ ID NO: 18342 - DNA, 17 bp, synthetic construct
  source 1..17: mol_type = other DNA
agggactgaagctgctg

SEQ ID NO: 18343 - DNA, 17 bp, synthetic construct
  source 1..17: mol_type = other DNA
atggtcagcacagcctt

SEQ ID NO: 18344 - DNA, 17 bp, synthetic construct
  source 1..17: mol_type = other DNA
atggtcagcacagcctt

SEQ ID NO: 18345 - DNA, 17 bp, synthetic construct
  source 1..17: mol_type = other DNA
agggactgaagctgctg

SEQ ID NO: 18346 - DNA, 17 bp, synthetic construct
  source 1..17: mol_type = other DNA
agggactgaagctgctg

SEQ ID NO: 18347 - DNA, 17 bp, synthetic construct
  source 1..17: mol_type = other DNA
tggtcagcacagcctta

SEQ ID NO: 18348 - DNA, 17 bp, synthetic construct
  source 1..17: mol_type = other DNA
gggactgaagctgctgg

SEQ ID NO: 18349 - DNA, 17 bp, synthetic construct
  source 1..17: mol_type = other DNA
tggtcagcacagcctta

SEQ ID NO: 18350 - DNA, 17 bp, synthetic construct
  source 1..17: mol_type = other DNA
ggtcagcacagccttat

SEQ ID NO: 18351 - DNA, 17 bp, synthetic construct
  source 1..17: mol_type = other DNA
ggtcagcacagccttat

SEQ ID NO: 18352 - DNA, 17 bp, synthetic construct
  source 1..17: mol_type = other DNA
ggactgaagctgctggg

SEQ ID NO: 18353 - DNA, 17 bp, synthetic construct
  source 1..17: mol_type = other DNA
gtcagcacagccttatg

SEQ ID NO: 18354 - DNA, 17 bp, synthetic construct
  source 1..17: mol_type = other DNA
gtcagcacagccttatg

SEQ ID NO: 18355 - DNA, 17 bp, synthetic construct
  source 1..17: mol_type = other DNA
gactgaagctgctgggg

SEQ ID NO: 18356 - DNA, 17 bp, synthetic construct
  source 1..17: mol_type = other DNA
tcagcacagccttatgc

SEQ ID NO: 18357 - DNA, 17 bp, synthetic construct
  source 1..17: mol_type = other DNA
tcagcacagccttatgc

SEQ ID NO: 18358 - DNA, 17 bp, synthetic construct
  source 1..17: mol_type = other DNA
actgaagctgctggggc

SEQ ID NO: 18359 - DNA, 17 bp, synthetic construct
  source 1..17: mol_type = other DNA
tcagcacagccttatgc

SEQ ID NO: 18360 - DNA, 17 bp, synthetic construct
  source 1..17: mol_type = other DNA
tcagcacagccttatgc

SEQ ID NO: 18361 - DNA, 17 bp, synthetic construct
  source 1..17: mol_type = other DNA
cagcacagccttatgca

SEQ ID NO: 18362 - DNA, 17 bp, synthetic construct
  source 1..17: mol_type = other DNA
ctgaagctgctggggcc

SEQ ID NO: 18363 - DNA, 17 bp, synthetic construct
  source 1..17: mol_type = other DNA
cagcacagccttatgca

SEQ ID NO: 18364 - DNA, 17 bp, synthetic construct
  source 1..17: mol_type = other DNA
ctgaagctgctggggcc

SEQ ID NO: 18365 - DNA, 17 bp, synthetic construct
  source 1..17: mol_type = other DNA
ctgaagctgctggggcc

SEQ ID NO: 18366 - DNA, 17 bp, synthetic construct
  source 1..17: mol_type = other DNA
agcacagccttatgcac

SEQ ID NO: 18367 - DNA, 17 bp, synthetic construct
  source 1..17: mol_type = other DNA
tgaagctgctggggcca

SEQ ID NO: 18368 - DNA, 17 bp, synthetic construct
  source 1..17: mol_type = other DNA
gaagctgctggggccat

SEQ ID NO: 18369 - DNA, 17 bp, synthetic construct
  source 1..17: mol_type = other DNA
gcacagccttatgcacg

SEQ ID NO: 18370 - DNA, 17 bp, synthetic construct
  source 1..17: mol_type = other DNA
gcacagccttatgcacg

SEQ ID NO: 18371 - DNA, 17 bp, synthetic construct
  source 1..17: mol_type = other DNA
aagctgctggggccatg

SEQ ID NO: 18372 - DNA, 17 bp, synthetic construct
  source 1..17: mol_type = other DNA
cacagccttatgcacgg

SEQ ID NO: 18373 - DNA, 17 bp, synthetic construct
  source 1..17: mol_type = other DNA
acagccttatgcacggc

SEQ ID NO: 18374 - DNA, 17 bp, synthetic construct
  source 1..17: mol_type = other DNA
agctgctggggccatgt

SEQ ID NO: 18375 - DNA, 17 bp, synthetic construct
  source 1..17: mol_type = other DNA
agctgctggggccatgt

SEQ ID NO: 18376 - DNA, 17 bp, synthetic construct
  source 1..17: mol_type = other DNA
agctgctggggccatgt

SEQ ID NO: 18377 - DNA, 17 bp, synthetic construct
  source 1..17: mol_type = other DNA
gctgctggggccatgtt

SEQ ID NO: 18378 - DNA, 17 bp, synthetic construct
  source 1..17: mol_type = other DNA
gctgctggggccatgtt

SEQ ID NO: 18379 - DNA, 17 bp, synthetic construct
  source 1..17: mol_type = other DNA
cagccttatgcacggcc

SEQ ID NO: 18380 - DNA, 17 bp, synthetic construct
  source 1..17: mol_type = other DNA
gctgctggggccatgtt

SEQ ID NO: 18381 - DNA, 17 bp, synthetic construct
  source 1..17: mol_type = other DNA
cagccttatgcacggcc

SEQ ID NO: 18382 - DNA, 17 bp, synthetic construct
  source 1..17: mol_type = other DNA
gctgctggggccatgtt

SEQ ID NO: 18383 - DNA, 17 bp, synthetic construct
  source 1..17: mol_type = other DNA
gctgctggggccatgtt

SEQ ID NO: 18384 - DNA, 17 bp, synthetic construct
  source 1..17: mol_type = other DNA
cagccttatgcacggcc

SEQ ID NO: 18385 - DNA, 17 bp, synthetic construct
  source 1..17: mol_type = other DNA
ctgctggggccatgttt

SEQ ID NO: 18386 - DNA, 17 bp, synthetic construct
  source 1..17: mol_type = other DNA
agccttatgcacggcct

SEQ ID NO: 18387 - DNA, 17 bp, synthetic construct
  source 1..17: mol_type = other DNA
ctgctggggccatgttt

SEQ ID NO: 18388 - DNA, 17 bp, synthetic construct
  source 1..17: mol_type = other DNA
ctgctggggccatgttt

SEQ ID NO: 18389 - DNA, 17 bp, synthetic construct
  source 1..17: mol_type = other DNA
agccttatgcacggcct

SEQ ID NO: 18390 - DNA, 17 bp, synthetic construct
  source 1..17: mol_type = other DNA
agccttatgcacggcct

SEQ ID NO: 18391 - DNA, 17 bp, synthetic construct
  source 1..17: mol_type = other DNA
agccttatgcacggcct

SEQ ID NO: 18392 - DNA, 17 bp, synthetic construct
  source 1..17: mol_type = other DNA
ctgctggggccatgttt

SEQ ID NO: 18393 - DNA, 17 bp, synthetic construct
  source 1..17: mol_type = other DNA
agccttatgcacggcct

SEQ ID NO: 18394 - DNA, 17 bp, synthetic construct
  source 1..17: mol_type = other DNA
gccttatgcacggcctg

SEQ ID NO: 18395 - DNA, 17 bp, synthetic construct
  source 1..17: mol_type = other DNA
tgctggggccatgtttt

SEQ ID NO: 18396 - DNA, 17 bp, synthetic construct
  source 1..17: mol_type = other DNA
tgctggggccatgtttt

SEQ ID NO: 18397 - DNA, 17 bp, synthetic construct
  source 1..17: mol_type = other DNA
gccttatgcacggcctg

SEQ ID NO: 18398 - DNA, 17 bp, synthetic construct
  source 1..17: mol_type = other DNA
gctggggccatgttttt

SEQ ID NO: 18399 - DNA, 17 bp, synthetic construct
  source 1..17: mol_type = other DNA
gctggggccatgttttt

SEQ ID NO: 18400 - DNA, 17 bp, synthetic construct
  source 1..17: mol_type = other DNA
ccttatgcacggcctgg

SEQ ID NO: 18401 - DNA, 17 bp, synthetic construct
  source 1..17: mol_type = other DNA
ccttatgcacggcctgg

SEQ ID NO: 18402 - DNA, 17 bp, synthetic construct
  source 1..17: mol_type = other DNA
gctggggccatgttttt

SEQ ID NO: 18403 - DNA, 17 bp, synthetic construct
  source 1..17: mol_type = other DNA
cttatgcacggcctgga

SEQ ID NO: 18404 - DNA, 17 bp, synthetic construct
  source 1..17: mol_type = other DNA
cttatgcacggcctgga

SEQ ID NO: 18405 - DNA, 17 bp, synthetic construct
  source 1..17: mol_type = other DNA
ctggggccatgttttta

SEQ ID NO: 18406 - DNA, 17 bp, synthetic construct
  source 1..17: mol_type = other DNA
ttatgcacggcctggag

SEQ ID NO: 18407 - DNA, 17 bp, synthetic construct
  source 1..17: mol_type = other DNA
ttatgcacggcctggag

SEQ ID NO: 18408 - DNA, 17 bp, synthetic construct
  source 1..17: mol_type = other DNA
tggggccatgtttttag

SEQ ID NO: 18409 - DNA, 17 bp, synthetic construct
  source 1..17: mol_type = other DNA
tggggccatgtttttag

SEQ ID NO: 18410 - DNA, 17 bp, synthetic construct
  source 1..17: mol_type = other DNA
ttatgcacggcctggag

SEQ ID NO: 18411 - DNA, 17 bp, synthetic construct
  source 1..17: mol_type = other DNA
tggggccatgtttttag

SEQ ID NO: 18412 - DNA, 17 bp, synthetic construct
  source 1..17: mol_type = other DNA
ttatgcacggcctggag

SEQ ID NO: 18413 - DNA, 17 bp, synthetic construct
  source 1..17: mol_type = other DNA
tatgcacggcctggagg

SEQ ID NO: 18414 - DNA, 17 bp, synthetic construct
  source 1..17: mol_type = other DNA
tatgcacggcctggagg

SEQ ID NO: 18415 - DNA, 17 bp, synthetic construct
  source 1..17: mol_type = other DNA
ggggccatgtttttaga

SEQ ID NO: 18416 - DNA, 17 bp, synthetic construct
  source 1..17: mol_type = other DNA
ggggccatgtttttaga

SEQ ID NO: 18417 - DNA, 17 bp, synthetic construct
  source 1..17: mol_type = other DNA
gggccatgtttttagag

SEQ ID NO: 18418 - DNA, 17 bp, synthetic construct
  source 1..17: mol_type = other DNA
gggccatgtttttagag

SEQ ID NO: 18419 - DNA, 17 bp, synthetic construct
  source 1..17: mol_type = other DNA
atgcacggcctggaggg

SEQ ID NO: 18420 - DNA, 17 bp, synthetic construct
  source 1..17: mol_type = other DNA
ggccatgtttttagagg

SEQ ID NO: 18421 - DNA, 17 bp, synthetic construct
  source 1..17: mol_type = other DNA
tgcacggcctggagggg

SEQ ID NO: 18422 - DNA, 17 bp, synthetic construct
  source 1..17: mol_type = other DNA
tgcacggcctggagggg

SEQ ID NO: 18423 - DNA, 17 bp, synthetic construct
  source 1..17: mol_type = other DNA
ggccatgtttttagagg

SEQ ID NO: 18424 - DNA, 17 bp, synthetic construct
  source 1..17: mol_type = other DNA
ggccatgtttttagagg

SEQ ID NO: 18425 - DNA, 17 bp, synthetic construct
  source 1..17: mol_type = other DNA
gccatgtttttagaggc

SEQ ID NO: 18426 - DNA, 17 bp, synthetic construct
  source 1..17: mol_type = other DNA
gcacggcctggagggga

SEQ ID NO: 18427 - DNA, 17 bp, synthetic construct
  source 1..17: mol_type = other DNA
gcacggcctggagggga

SEQ ID NO: 18428 - DNA, 17 bp, synthetic construct
  source 1..17: mol_type = other DNA
gcacggcctggagggga

SEQ ID NO: 18429 - DNA, 17 bp, synthetic construct
  source 1..17: mol_type = other DNA
gccatgtttttagaggc

SEQ ID NO: 18430 - DNA, 17 bp, synthetic construct
  source 1..17: mol_type = other DNA
gcacggcctggagggga

SEQ ID NO: 18431 - DNA, 17 bp, synthetic construct
  source 1..17: mol_type = other DNA
gccatgtttttagaggc

SEQ ID NO: 18432 - DNA, 17 bp, synthetic construct
  source 1..17: mol_type = other DNA
cacggcctggaggggag

SEQ ID NO: 18433 - DNA, 17 bp, synthetic construct
  source 1..17: mol_type = other DNA
cacggcctggaggggag

SEQ ID NO: 18434 - DNA, 17 bp, synthetic construct
  source 1..17: mol_type = other DNA
ccatgtttttagaggcc

SEQ ID NO: 18435 - DNA, 17 bp, synthetic construct
  source 1..17: mol_type = other DNA
ccatgtttttagaggcc

SEQ ID NO: 18436 - DNA, 17 bp, synthetic construct
  source 1..17: mol_type = other DNA
cacggcctggaggggag

SEQ ID NO: 18437 - DNA, 17 bp, synthetic construct
  source 1..17: mol_type = other DNA
cacggcctggaggggag

SEQ ID NO: 18438 - DNA, 17 bp, synthetic construct
  source 1..17: mol_type = other DNA
cacggcctggaggggag

SEQ ID NO: 18439 - DNA, 17 bp, synthetic construct
  source 1..17: mol_type = other DNA
cacggcctggaggggag

SEQ ID NO: 18440 - DNA, 17 bp, synthetic construct
  source 1..17: mol_type = other DNA
acggcctggaggggaga

SEQ ID NO: 18441 - DNA, 17 bp, synthetic construct
  source 1..17: mol_type = other DNA
catgtttttagaggcca

SEQ ID NO: 18442 - DNA, 17 bp, synthetic construct
  source 1..17: mol_type = other DNA
acggcctggaggggaga

SEQ ID NO: 18443 - DNA, 17 bp, synthetic construct
  source 1..17: mol_type = other DNA
acggcctggaggggaga

SEQ ID NO: 18444 - DNA, 17 bp, synthetic construct
  source 1..17: mol_type = other DNA
catgtttttagaggcca

SEQ ID NO: 18445 - DNA, 17 bp, synthetic construct
  source 1..17: mol_type = other DNA
catgtttttagaggcca

SEQ ID NO: 18446 - DNA, 17 bp, synthetic construct
  source 1..17: mol_type = other DNA
atgtttttagaggccat

SEQ ID NO: 18447 - DNA, 17 bp, synthetic construct
  source 1..17: mol_type = other DNA
cggcctggaggggagag

SEQ ID NO: 18448 - DNA, 17 bp, synthetic construct
  source 1..17: mol_type = other DNA
atgtttttagaggccat

SEQ ID NO: 18449 - DNA, 17 bp, synthetic construct
  source 1..17: mol_type = other DNA
cggcctggaggggagag

SEQ ID NO: 18450 - DNA, 17 bp, synthetic construct
  source 1..17: mol_type = other DNA
ggcctggaggggagaga

SEQ ID NO: 18451 - DNA, 17 bp, synthetic construct
  source 1..17: mol_type = other DNA
ggcctggaggggagaga

SEQ ID NO: 18452 - DNA, 17 bp, synthetic construct
  source 1..17: mol_type = other DNA
tgtttttagaggccata

SEQ ID NO: 18453 - DNA, 17 bp, synthetic construct
  source 1..17: mol_type = other DNA
gtttttagaggccatac

SEQ ID NO: 18454 - DNA, 17 bp, synthetic construct
  source 1..17: mol_type = other DNA
gcctggaggggagagaa

SEQ ID NO: 18455 - DNA, 17 bp, synthetic construct
  source 1..17: mol_type = other DNA
gtttttagaggccatac

SEQ ID NO: 18456 - DNA, 17 bp, synthetic construct
  source 1..17: mol_type = other DNA
tttttagaggccatacc

SEQ ID NO: 18457 - DNA, 17 bp, synthetic construct
  source 1..17: mol_type = other DNA
tttttagaggccatacc

SEQ ID NO: 18458 - DNA, 17 bp, synthetic construct
  source 1..17: mol_type = other DNA
cctggaggggagagaag

SEQ ID NO: 18459 - DNA, 17 bp, synthetic construct
  source 1..17: mol_type = other DNA
tttttagaggccatacc

SEQ ID NO: 18460 - DNA, 17 bp, synthetic construct
  source 1..17: mol_type = other DNA
cctggaggggagagaag

SEQ ID NO: 18461 - DNA, 17 bp, synthetic construct
  source 1..17: mol_type = other DNA
tttttagaggccatacc

SEQ ID NO: 18462 - DNA, 17 bp, synthetic construct
  source 1..17: mol_type = other DNA
tttttagaggccatacc

SEQ ID NO: 18463 - DNA, 17 bp, synthetic construct
  source 1..17: mol_type = other DNA
ttttagaggccataccc

SEQ ID NO: 18464 - DNA, 17 bp, synthetic construct
  source 1..17: mol_type = other DNA
ttttagaggccataccc

SEQ ID NO: 18465 - DNA, 17 bp, synthetic construct
  source 1..17: mol_type = other DNA
ttttagaggccataccc

SEQ ID NO: 18466 - DNA, 17 bp, synthetic construct
  source 1..17: mol_type = other DNA
ttttagaggccataccc

SEQ ID NO: 18467 - DNA, 17 bp, synthetic construct
  source 1..17: mol_type = other DNA
ctggaggggagagaagc

SEQ ID NO: 18468 - DNA, 17 bp, synthetic construct
  source 1..17: mol_type = other DNA
ctggaggggagagaagc

SEQ ID NO: 18469 - DNA, 17 bp, synthetic construct
  source 1..17: mol_type = other DNA
ttttagaggccataccc

SEQ ID NO: 18470 - DNA, 17 bp, synthetic construct
  source 1..17: mol_type = other DNA
ttttagaggccataccc

SEQ ID NO: 18471 - DNA, 21 bp, synthetic construct
  source 1..21: mol_type = other DNA
acttggtattttgttcaatca

SEQ ID NO: 18472 - DNA, 21 bp, synthetic construct
  source 1..21: mol_type = other DNA
cttggtattttgttcaatcat

SEQ ID NO: 18473 - DNA, 20 bp, synthetic construct
  source 1..20: mol_type = other DNA
cttggtattttgttcaatca

SEQ ID NO: 18474 - DNA, 21 bp, synthetic construct
  source 1..21: mol_type = other DNA
cttggtattttgttcaatcat

SEQ ID NO: 18475 - DNA, 20 bp, synthetic construct
  source 1..20: mol_type = other DNA
accctttgtcttcttaatga

SEQ ID NO: 18476 - DNA, 20 bp, synthetic construct
  source 1..20: mol_type = other DNA
ttgtcttcttaatgattgaa

SEQ ID NO: 18477 - DNA, 20 bp, synthetic construct
  source 1..20: mol_type = other DNA
ttggtattttgttcaatcat

SEQ ID NO: 18478 - DNA, 21 bp, synthetic construct
  source 1..21: mol_type = other DNA
ttggtattttgttcaatcatt

SEQ ID NO: 18479 - DNA, 21 bp, synthetic construct
  source 1..21: mol_type = other DNA
tttgtcttcttaatgattgaa

SEQ ID NO: 18480 - DNA, 21 bp, synthetic construct
  source 1..21: mol_type = other DNA
tttgtcttcttaatgattgaa

SEQ ID NO: 18481 - DNA, 20 bp, synthetic construct
  source 1..20: mol_type = other DNA
ggtattttgttcaatcatta

SEQ ID NO: 18482 - DNA, 20 bp, synthetic construct
  source 1..20: mol_type = other DNA
tggtattttgttcaatcatt

SEQ ID NO: 18483 - DNA, 20 bp, synthetic construct
  source 1..20: mol_type = other DNA
tgtcttcttaatgattgaac

SEQ ID NO: 18484 - DNA, 23 bp, synthetic construct
  source 1..23: mol_type = other DNA
acttggtattttgttcaatcatt

SEQ ID NO: 18485 - DNA, 21 bp, synthetic construct
  source 1..21: mol_type = other DNA
tggtattttgttcaatcatta

SEQ ID NO: 18486 - DNA, 20 bp, synthetic construct
  source 1..20: mol_type = other DNA
tggtattttgttcaatcatt

SEQ ID NO: 18487 - DNA, 20 bp, synthetic construct
  source 1..20: mol_type = other DNA
ggtattttgttcaatcatta

SEQ ID NO: 18488 - DNA, 20 bp, synthetic construct
  source 1..20: mol_type = other DNA
ccctttgtcttcttaatgat

SEQ ID NO: 18489 - DNA, 20 bp, synthetic construct
  source 1..20: mol_type = other DNA
gtcttcttaatgattgaaca

SEQ ID NO: 18490 - DNA, 21 bp, synthetic construct
  source 1..21: mol_type = other DNA
ggtattttgttcaatcattaa

SEQ ID NO: 18491 - DNA, 21 bp, synthetic construct
  source 1..21: mol_type = other DNA
ggtattttgttcaatcattaa

SEQ ID NO: 18492 - DNA, 20 bp, synthetic construct
  source 1..20: mol_type = other DNA
taatgattgaacaaaatacc

SEQ ID NO: 18493 - DNA, 20 bp, synthetic construct
  source 1..20: mol_type = other DNA
tcttcttaatgattgaacaa

SEQ ID NO: 18494 - DNA, 20 bp, synthetic construct
  source 1..20: mol_type = other DNA
gtattttgttcaatcattaa

SEQ ID NO: 18495 - skipped

SEQ ID NO: 18496 - DNA, 23 bp, synthetic construct
  source 1..23: mol_type = other DNA
ttgtcttcttaatgattgaacaa

SEQ ID NO: 18497 - DNA, 23 bp, synthetic construct
  source 1..23: mol_type = other DNA
ttgtcttcttaatgattgaacaa

SEQ ID NO: 18498 - DNA, 21 bp, synthetic construct
  source 1..21: mol_type = other DNA
ggtattttgttcaatcattaa

SEQ ID NO: 18499 - DNA, 20 bp, synthetic construct
  source 1..20: mol_type = other DNA
cttcttaatgattgaacaaa

SEQ ID NO: 18500 - DNA, 20 bp, synthetic construct
  source 1..20: mol_type = other DNA
tattttgttcaatcattaag

SEQ ID NO: 18501 - DNA, 21 bp, synthetic construct
  source 1..21: mol_type = other DNA
attttgttcaatcattaagaa

SEQ ID NO: 18502 - DNA, 20 bp, synthetic construct
  source 1..20: mol_type = other DNA
attttgttcaatcattaaga

SEQ ID NO: 18503 - DNA, 20 bp, synthetic construct
  source 1..20: mol_type = other DNA
ttcttaatgattgaacaaaa

SEQ ID NO: 18504 - DNA, 20 bp, synthetic construct
  source 1..20: mol_type = other DNA
attttgttcaatcattaaga

SEQ ID NO: 18505 - DNA, 20 bp, synthetic construct
  source 1..20: mol_type = other DNA
ttttgttcaatcattaagaa

SEQ ID NO: 18506 - DNA, 20 bp, synthetic construct
  source 1..20: mol_type = other DNA
tcttaatgattgaacaaaat

SEQ ID NO: 18507 - DNA, 20 bp, synthetic construct
  source 1..20: mol_type = other DNA
tattttgttcaatcattaag

SEQ ID NO: 18508 - DNA, 20 bp, synthetic construct
  source 1..20: mol_type = other DNA
tttgttcaatcattaagaag

SEQ ID NO: 18509 - DNA, 20 bp, synthetic construct
  source 1..20: mol_type = other DNA
cttaatgattgaacaaaata

SEQ ID NO: 18510 - DNA, 23 bp, synthetic construct
  source 1..23: mol_type = other DNA
tggtattttgttcaatcattaag

SEQ ID NO: 18511 - DNA, 23 bp, synthetic construct
  source 1..23: mol_type = other DNA
tggtattttgttcaatcattaag

SEQ ID NO: 18512 - DNA, 21 bp, synthetic construct
  source 1..21: mol_type = other DNA
tttgttcaatcattaagaaga

SEQ ID NO: 18513 - DNA, 20 bp, synthetic construct
  source 1..20: mol_type = other DNA
ttaatgattgaacaaaatac

SEQ ID NO: 18514 - DNA, 20 bp, synthetic construct
  source 1..20: mol_type = other DNA
ttgttcaatcattaagaaga

SEQ ID NO: 18515 - DNA, 23 bp, synthetic construct
  source 1..23: mol_type = other DNA
tcttaatgattgaacaaaatacc

SEQ ID NO: 18516 - DNA, 23 bp, synthetic construct
  source 1..23: mol_type = other DNA
tcttaatgattgaacaaaatacc

SEQ ID NO: 18517 - DNA, 20 bp, synthetic construct
  source 1..20: mol_type = other DNA
tgttcaatcattaagaagac

SEQ ID NO: 18518 - DNA, 20 bp, synthetic construct
  source 1..20: mol_type = other DNA
taatgattgaacaaaatacc

SEQ ID NO: 18519 - DNA, 20 bp, synthetic construct
  source 1..20: mol_type = other DNA
aatgattgaacaaaatacca

SEQ ID NO: 18520 - DNA, 20 bp, synthetic construct
  source 1..20: mol_type = other DNA
gttcaatcattaagaagaca

SEQ ID NO: 18521 - DNA, 23 bp, synthetic construct
  source 1..23: mol_type = other DNA
tggtattttgttcaatcattaag

SEQ ID NO: 18522 - DNA, 20 bp, synthetic construct
  source 1..20: mol_type = other DNA
atgattgaacaaaataccaa

SEQ ID NO: 18523 - DNA, 20 bp, synthetic construct
  source 1..20: mol_type = other DNA
ttcaatcattaagaagacaa

SEQ ID NO: 18524 - DNA, 20 bp, synthetic construct
  source 1..20: mol_type = other DNA
tcaatcattaagaagacaaa

SEQ ID NO: 18525 - DNA, 20 bp, synthetic construct
  source 1..20: mol_type = other DNA
tgattgaacaaaataccaag

SEQ ID NO: 18526 - DNA, 23 bp, synthetic construct
  source 1..23: mol_type = other DNA
taatgattgaacaaaataccaag

SEQ ID NO: 18527 - DNA, 23 bp, synthetic construct
  source 1..23: mol_type = other DNA
taatgattgaacaaaataccaag

SEQ ID NO: 18528 - DNA, 24 bp, synthetic construct
  source 1..24: mol_type = other DNA
taatgattgaacaaaataccaagt

SEQ ID NO: 18529 - DNA, 20 bp, synthetic construct
  source 1..20: mol_type = other DNA
aatgattgaacaaaatacca

SEQ ID NO: 18530 - DNA, 20 bp, synthetic construct
  source 1..20: mol_type = other DNA
caatcattaagaagacaaag

SEQ ID NO: 18531 - DNA, 20 bp, synthetic construct
  source 1..20: mol_type = other DNA
gattgaacaaaataccaagt

SEQ ID NO: 18532 - DNA, 20 bp, synthetic construct
  source 1..20: mol_type = other DNA
caatcattaagaagacaaag

SEQ ID NO: 18533 - DNA, 23 bp, synthetic construct
  source 1..23: mol_type = other DNA
aatgattgaacaaaataccaagt

SEQ ID NO: 18534 - DNA, 23 bp, synthetic construct
  source 1..23: mol_type = other DNA
aatgattgaacaaaataccaagt

SEQ ID NO: 18535 - DNA, 23 bp, synthetic construct
  source 1..23: mol_type = other DNA
cattaagaagacaaagggtttgt

SEQ ID NO: 18536 - DNA, 24 bp, synthetic construct
  source 1..24: mol_type = other DNA
taatgattgaacaaaataccaagt

SEQ ID NO: 18537 - DNA, 24 bp, synthetic construct
  source 1..24: mol_type = other DNA
aagaagacaaagggtttgttgaac

SEQ ID NO: 18538 - DNA, 20 bp, synthetic construct
  source 1..20: mol_type = other DNA
taatgattgaacaaaatacc

SEQ ID NO: 18539 - DNA, 20 bp, synthetic construct
  source 1..20: mol_type = other DNA
attgaacaaaataccaagtc

SEQ ID NO: 18540 - DNA, 20 bp, synthetic construct
  source 1..20: mol_type = other DNA
tcattaagaagacaaagggt

SEQ ID NO: 18541 - DNA, 20 bp, synthetic construct
  source 1..20: mol_type = other DNA
aatcattaagaagacaaagg

SEQ ID NO: 18542 - DNA, 23 bp, synthetic construct
  source 1..23: mol_type = other DNA
cattaagaagacaaagggtttgt

SEQ ID NO: 18543 - DNA, 23 bp, synthetic construct
  source 1..23: mol_type = other DNA
atgattgaacaaaataccaagtc

SEQ ID NO: 18544 - DNA, 23 bp, synthetic construct
  source 1..23: mol_type = other DNA
cattaagaagacaaagggtttgt

SEQ ID NO: 18545 - DNA, 21 bp, synthetic construct
  source 1..21: mol_type = other DNA
cattaagaagacaaagggttt

SEQ ID NO: 18546 - DNA, 21 bp, synthetic construct
  source 1..21: mol_type = other DNA
cttaatgattgaacaaaatac

SEQ ID NO: 18547 - DNA, 20 bp, synthetic construct
  source 1..20: mol_type = other DNA
ttgaacaaaataccaagtct

SEQ ID NO: 18548 - DNA, 20 bp, synthetic construct
  source 1..20: mol_type = other DNA
atcattaagaagacaaaggg

SEQ ID NO: 18549 - DNA, 21 bp, synthetic construct
  source 1..21: mol_type = other DNA
aaataccaagtctcccctctt

SEQ ID NO: 18550 - DNA, 21 bp, synthetic construct
  source 1..21: mol_type = other DNA
aaataccaagtctcccctctt

SEQ ID NO: 18551 - DNA, 20 bp, synthetic construct
  source 1..20: mol_type = other DNA
cattaagaagacaaagggtt

SEQ ID NO: 18552 - DNA, 20 bp, synthetic construct
  source 1..20: mol_type = other DNA
tcattaagaagacaaagggt

SEQ ID NO: 18553 - DNA, 20 bp, synthetic construct
  source 1..20: mol_type = other DNA
tgaacaaaataccaagtctc

SEQ ID NO: 18554 - DNA, 20 bp, synthetic construct
  source 1..20: mol_type = other DNA
tcattaagaagacaaagggt

SEQ ID NO: 18555 - DNA, 20 bp, synthetic construct
  source 1..20: mol_type = other DNA
cattaagaagacaaagggtt

SEQ ID NO: 18556 - DNA, 20 bp, synthetic construct
  source 1..20: mol_type = other DNA
gaacaaaataccaagtctcc

SEQ ID NO: 18557 - DNA, 20 bp, synthetic construct
  source 1..20: mol_type = other DNA
cattaagaagacaaagggtt

SEQ ID NO: 18558 - DNA, 20 bp, synthetic construct
  source 1..20: mol_type = other DNA
attaagaagacaaagggttt

SEQ ID NO: 18559 - DNA, 20 bp, synthetic construct
  source 1..20: mol_type = other DNA
aacaaaataccaagtctccc

SEQ ID NO: 18560 - DNA, 23 bp, synthetic construct
  source 1..23: mol_type = other DNA
tgaacaaaataccaagtctcccc

SEQ ID NO: 18561 - DNA, 23 bp, synthetic construct
  source 1..23: mol_type = other DNA
cattaagaagacaaagggtttgt

SEQ ID NO: 18562 - DNA, 23 bp, synthetic construct
  source 1..23: mol_type = other DNA
tgaacaaaataccaagtctcccc

SEQ ID NO: 18563 - DNA, 23 bp, synthetic construct
  source 1..23: mol_type = other DNA
cattaagaagacaaagggtttgt

SEQ ID NO: 18564 - DNA, 20 bp, synthetic construct
  source 1..20: mol_type = other DNA
ttaagaagacaaagggtttg

SEQ ID NO: 18565 - DNA, 20 bp, synthetic construct
  source 1..20: mol_type = other DNA
ttaagaagacaaagggtttg

SEQ ID NO: 18566 - DNA, 20 bp, synthetic construct
  source 1..20: mol_type = other DNA
taccaagtctcccctcttca

SEQ ID NO: 18567 - DNA, 20 bp, synthetic construct
  source 1..20: mol_type = other DNA
acaaaataccaagtctcccc

SEQ ID NO: 18568 - DNA, 20 bp, synthetic construct
  source 1..20: mol_type = other DNA
ataccaagtctcccctcttc

SEQ ID NO: 18569 - DNA, 20 bp, synthetic construct
  source 1..20: mol_type = other DNA
caaaataccaagtctcccct

SEQ ID NO: 18570 - DNA, 20 bp, synthetic construct
  source 1..20: mol_type = other DNA
taagaagacaaagggtttgt

SEQ ID NO: 18571 - DNA, 21 bp, synthetic construct
  source 1..21: mol_type = other DNA
aataccaagtctcccctcttc

SEQ ID NO: 18572 - DNA, 20 bp, synthetic construct
  source 1..20: mol_type = other DNA
taagaagacaaagggtttgt

SEQ ID NO: 18573 - DNA, 20 bp, synthetic construct
  source 1..20: mol_type = other DNA
aagaagacaaagggtttgtt

SEQ ID NO: 18574 - DNA, 20 bp, synthetic construct
  source 1..20: mol_type = other DNA
aaaataccaagtctcccctc

SEQ ID NO: 18575 - DNA, 23 bp, synthetic construct
  source 1..23: mol_type = other DNA
tgaacaaaataccaagtctcccc

SEQ ID NO: 18576 - DNA, 21 bp, synthetic construct
  source 1..21: mol_type = other DNA
aaataccaagtctcccctctt

SEQ ID NO: 18577 - DNA, 20 bp, synthetic construct
  source 1..20: mol_type = other DNA
ttaagaagacaaagggtttg

SEQ ID NO: 18578 - DNA, 20 bp, synthetic construct
  source 1..20: mol_type = other DNA
gggtttgttgaacttgacct

SEQ ID NO: 18579 - DNA, 20 bp, synthetic construct
  source 1..20: mol_type = other DNA
agaagacaaagggtttgttg

SEQ ID NO: 18580 - DNA, 20 bp, synthetic construct
  source 1..20: mol_type = other DNA
taccaagtctcccctcttca

SEQ ID NO: 18581 - DNA, 20 bp, synthetic construct
  source 1..20: mol_type = other DNA
taagaagacaaagggtttgt

SEQ ID NO: 18582 - DNA, 20 bp, synthetic construct
  source 1..20: mol_type = other DNA
aaataccaagtctcccctct

SEQ ID NO: 18583 - DNA, 21 bp, synthetic construct
  source 1..21: mol_type = other DNA
aagggtttgttgaacttgacc

SEQ ID NO: 18584 - DNA, 21 bp, synthetic construct
  source 1..21: mol_type = other DNA
aagggtttgttgaacttgacc

SEQ ID NO: 18585 - DNA, 20 bp, synthetic construct
  source 1..20: mol_type = other DNA
ataccaagtctcccctcttc

SEQ ID NO: 18586 - DNA, 20 bp, synthetic construct
  source 1..20: mol_type = other DNA
aataccaagtctcccctctt

SEQ ID NO: 18587 - DNA, 20 bp, synthetic construct
  source 1..20: mol_type = other DNA
agacaaagggtttgttgaac

SEQ ID NO: 18588 - DNA, 20 bp, synthetic construct
  source 1..20: mol_type = other DNA
gaagacaaagggtttgttga

SEQ ID NO: 18589 - DNA, 23 bp, synthetic construct
  source 1..23: mol_type = other DNA
agaagacaaagggtttgttgaac

SEQ ID NO: 18590 - DNA, 23 bp, synthetic construct
  source 1..23: mol_type = other DNA
agaagacaaagggtttgttgaac

SEQ ID NO: 18591 - DNA, 21 bp, synthetic construct
  source 1..21: mol_type = other DNA
gaagacaaagggtttgttgaa

SEQ ID NO: 18592 - DNA, 21 bp, synthetic construct
  source 1..21: mol_type = other DNA
aataccaagtctcccctcttc

SEQ ID NO: 18593 - DNA, 21 bp, synthetic construct
  source 1..21: mol_type = other DNA
aagggtttgttgaacttgacc

SEQ ID NO: 18594 - DNA, 20 bp, synthetic construct
  source 1..20: mol_type = other DNA
aagacaaagggtttgttgaa

SEQ ID NO: 18595 - DNA, 20 bp, synthetic construct
  source 1..20: mol_type = other DNA
ataccaagtctcccctcttc

SEQ ID NO: 18596 - DNA, 23 bp, synthetic construct
  source 1..23: mol_type = other DNA
tgaacaaaataccaagtctcccc

SEQ ID NO: 18597 - DNA, 21 bp, synthetic construct
  source 1..21: mol_type = other DNA
ataccaagtctcccctcttca

SEQ ID NO: 18598 - DNA, 21 bp, synthetic construct
  source 1..21: mol_type = other DNA
gaagacaaagggtttgttgaa

SEQ ID NO: 18599 - DNA, 20 bp, synthetic construct
  source 1..20: mol_type = other DNA
taccaagtctcccctcttca

SEQ ID NO: 18600 - DNA, 20 bp, synthetic construct
  source 1..20: mol_type = other DNA
agacaaagggtttgttgaac

SEQ ID NO: 18601 - DNA, 21 bp, synthetic construct
  source 1..21: mol_type = other DNA
gaagacaaagggtttgttgaa

SEQ ID NO: 18602 - DNA, 20 bp, synthetic construct
  source 1..20: mol_type = other DNA
gacaaagggtttgttgaact

SEQ ID NO: 18603 - DNA, 20 bp, synthetic construct
  source 1..20: mol_type = other DNA
accaagtctcccctcttcat

SEQ ID NO: 18604 - DNA, 20 bp, synthetic construct
  source 1..20: mol_type = other DNA
ccaagtctcccctcttcatg

SEQ ID NO: 18605 - DNA, 20 bp, synthetic construct
  source 1..20: mol_type = other DNA
acaaagggtttgttgaactt

SEQ ID NO: 18606 - DNA, 23 bp, synthetic construct
  source 1..23: mol_type = other DNA
tgaacaaaataccaagtctcccc

SEQ ID NO: 18607 - DNA, 24 bp, synthetic construct
  source 1..24: mol_type = other DNA
tcccctcttcatgggaaaagtggt

SEQ ID NO: 18608 - DNA, 20 bp, synthetic construct
  source 1..20: mol_type = other DNA
ccaagtctcccctcttcatg

SEQ ID NO: 18609 - DNA, 20 bp, synthetic construct
  source 1..20: mol_type = other DNA
gacaaagggtttgttgaact

SEQ ID NO: 18610 - DNA, 20 bp, synthetic construct
  source 1..20: mol_type = other DNA
caagtctcccctcttcatgg

SEQ ID NO: 18611 - DNA, 20 bp, synthetic construct
  source 1..20: mol_type = other DNA
caaagggtttgttgaacttg

SEQ ID NO: 18612 - DNA, 23 bp, synthetic construct
  source 1..23: mol_type = other DNA
tgaacaaaataccaagtctcccc

SEQ ID NO: 18613 - DNA, 23 bp, synthetic construct
  source 1..23: mol_type = other DNA
tgaacaaaataccaagtctcccc

SEQ ID NO: 18614 - DNA, 24 bp, synthetic construct
  source 1..24: mol_type = other DNA
tcccctcttcatgggaaaagtggt

SEQ ID NO: 18615 - DNA, 20 bp, synthetic construct
  source 1..20: mol_type = other DNA
gtctcccctcttcatgggaa

SEQ ID NO: 18616 - DNA, 20 bp, synthetic construct
  source 1..20: mol_type = other DNA
accaagtctcccctcttcat

SEQ ID NO: 18617 - DNA, 20 bp, synthetic construct
  source 1..20: mol_type = other DNA
aagtctcccctcttcatggg

SEQ ID NO: 18618 - DNA, 20 bp, synthetic construct
  source 1..20: mol_type = other DNA
agggtttgttgaacttgacc

SEQ ID NO: 18619 - DNA, 20 bp, synthetic construct
  source 1..20: mol_type = other DNA
aaagggtttgttgaacttga

SEQ ID NO: 18620 - DNA, 20 bp, synthetic construct
  source 1..20: mol_type = other DNA
ccaagtctcccctcttcatg

SEQ ID NO: 18621 - DNA, 23 bp, synthetic construct
  source 1..23: mol_type = other DNA
cccctcttcatgggaaaagtggt

SEQ ID NO: 18622-18772 - skipped (151 entries)

SEQ ID NO: 18773 - DNA, 21 bp, synthetic construct
  source 1..21: mol_type = other DNA
caaggctcacgtggacacctc

SEQ ID NO: 18774 - DNA, 21 bp, synthetic construct
  source 1..21: mol_type = other DNA
caaggctcacgtggacacctc

SEQ ID NO: 18775 - DNA, 20 bp, synthetic construct
  source 1..20: mol_type = other DNA
aaggctcacgtggacacctc

SEQ ID NO: 18776 - DNA, 21 bp, synthetic construct
  source 1..21: mol_type = other DNA
aaggctcacgtggacacctcc

SEQ ID NO: 18777 - DNA, 20 bp, synthetic construct
  source 1..20: mol_type = other DNA
gcgcttcctgggaggtgtcc

SEQ ID NO: 18778 - DNA, 20 bp, synthetic construct
  source 1..20: mol_type = other DNA
agcgcttcctgggaggtgtc

SEQ ID NO: 18779 - DNA, 20 bp, synthetic construct
  source 1..20: mol_type = other DNA
aggctcacgtggacacctcc

SEQ ID NO: 18780 - DNA, 21 bp, synthetic construct
  source 1..21: mol_type = other DNA
aggctcacgtggacacctccc

SEQ ID NO: 18781 - DNA, 21 bp, synthetic construct
  source 1..21: mol_type = other DNA
gcgcttcctgggaggtgtcca

SEQ ID NO: 18782 - DNA, 21 bp, synthetic construct
  source 1..21: mol_type = other DNA
gcgcttcctgggaggtgtcca

SEQ ID NO: 18783 - DNA, 20 bp, synthetic construct
  source 1..20: mol_type = other DNA
ggctcacgtggacacctccc

SEQ ID NO: 18784 - DNA, 20 bp, synthetic construct
  source 1..20: mol_type = other DNA
ggctcacgtggacacctccc

SEQ ID NO: 18785 - DNA, 20 bp, synthetic construct
  source 1..20: mol_type = other DNA
gcgcttcctgggaggtgtcc

SEQ ID NO: 18786 - DNA, 23 bp, synthetic construct
  source 1..23: mol_type = other DNA
caaggctcacgtggacacctccc

SEQ ID NO: 18787 - DNA, 21 bp, synthetic construct
  source 1..21: mol_type = other DNA
ggctcacgtggacacctccca

SEQ ID NO: 18788 - DNA, 20 bp, synthetic construct
  source 1..20: mol_type = other DNA
ggctcacgtggacacctccc

SEQ ID NO: 18789 - DNA, 20 bp, synthetic construct
  source 1..20: mol_type = other DNA
gctcacgtggacacctccca

SEQ ID NO: 18790 - DNA, 20 bp, synthetic construct
  source 1..20: mol_type = other DNA
cgcttcctgggaggtgtcca

SEQ ID NO: 18791 - DNA, 20 bp, synthetic construct
  source 1..20: mol_type = other DNA
cgcttcctgggaggtgtcca

SEQ ID NO: 18792 - DNA, 21 bp, synthetic construct
  source 1..21: mol_type = other DNA
ggctcacgtggacacctccca

SEQ ID NO: 18793 - DNA, 21 bp, synthetic construct
  source 1..21: mol_type = other DNA
gctcacgtggacacctcccag

SEQ ID NO: 18794 - DNA, 20 bp, synthetic construct
  source 1..20: mol_type = other DNA
gcttcctgggaggtgtccac

SEQ ID NO: 18795 - DNA, 20 bp, synthetic construct
  source 1..20: mol_type = other DNA
gcttcctgggaggtgtccac

SEQ ID NO: 18796 - DNA, 20 bp, synthetic construct
  source 1..20: mol_type = other DNA
ctcacgtggacacctcccag

SEQ ID NO: 18797 - DNA, 20 bp, synthetic construct
  source 1..20: mol_type = other DNA
aaggctcacgtggacacctc

SEQ ID NO: 18798 - DNA, 23 bp, synthetic construct
  source 1..23: mol_type = other DNA
gcgcttcctgggaggtgtccacg

SEQ ID NO: 18799 - DNA, 23 bp, synthetic construct
  source 1..23: mol_type = other DNA
gcgcttcctgggaggtgtccacg

SEQ ID NO: 18800 - DNA, 21 bp, synthetic construct
  source 1..21: mol_type = other DNA
ggctcacgtggacacctccca

SEQ ID NO: 18801 - DNA, 20 bp, synthetic construct
  source 1..20: mol_type = other DNA
cttcctgggaggtgtccacg

SEQ ID NO: 18802 - DNA, 20 bp, synthetic construct
  source 1..20: mol_type = other DNA
tcacgtggacacctcccagg

SEQ ID NO: 18803 - DNA, 21 bp, synthetic construct
  source 1..21: mol_type = other DNA
ggctcacgtggacacctccca

SEQ ID NO: 18804 - DNA, 20 bp, synthetic construct
  source 1..20: mol_type = other DNA
cacgtggacacctcccagga

SEQ ID NO: 18805 - DNA, 20 bp, synthetic construct
  source 1..20: mol_type = other DNA
ttcctgggaggtgtccacgt

SEQ ID NO: 18806 - DNA, 20 bp, synthetic construct
  source 1..20: mol_type = other DNA
cacgtggacacctcccagga

SEQ ID NO: 18807 - DNA, 20 bp, synthetic construct
  source 1..20: mol_type = other DNA
acgtggacacctcccaggaa

SEQ ID NO: 18808 - DNA, 20 bp, synthetic construct
  source 1..20: mol_type = other DNA
tcctgggaggtgtccacgtg

SEQ ID NO: 18809 - DNA, 20 bp, synthetic construct
  source 1..20: mol_type = other DNA
acgtggacacctcccaggaa

SEQ ID NO: 18810 - DNA, 20 bp, synthetic construct
  source 1..20: mol_type = other DNA
cgtggacacctcccaggaag

SEQ ID NO: 18811 - DNA, 20 bp, synthetic construct
  source 1..20: mol_type = other DNA
cctgggaggtgtccacgtga

SEQ ID NO: 18812 - DNA, 23 bp, synthetic construct
  source 1..23: mol_type = other DNA
tcacgtggacacctcccaggaag

SEQ ID NO: 18813 - DNA, 23 bp, synthetic construct
  source 1..23: mol_type = other DNA
tcacgtggacacctcccaggaag

SEQ ID NO: 18814 - DNA, 21 bp, synthetic construct
  source 1..21: mol_type = other DNA
ggctcacgtggacacctccca

SEQ ID NO: 18815 - DNA, 20 bp, synthetic construct
  source 1..20: mol_type = other DNA
ctgggaggtgtccacgtgag

SEQ ID NO: 18816 - DNA, 20 bp, synthetic construct
  source 1..20: mol_type = other DNA
gtggacacctcccaggaagc

SEQ ID NO: 18817 - DNA, 23 bp, synthetic construct
  source 1..23: mol_type = other DNA
tcctgggaggtgtccacgtgagc

SEQ ID NO: 18818 - DNA, 23 bp, synthetic construct
  source 1..23: mol_type = other DNA
tcctgggaggtgtccacgtgagc

SEQ ID NO: 18819 - DNA, 20 bp, synthetic construct
  source 1..20: mol_type = other DNA
tggacacctcccaggaagcg

SEQ ID NO: 18820 - DNA, 20 bp, synthetic construct
  source 1..20: mol_type = other DNA
tgggaggtgtccacgtgagc

SEQ ID NO: 18821 - DNA, 20 bp, synthetic construct
  source 1..20: mol_type = other DNA
gggaggtgtccacgtgagcc

SEQ ID NO: 18822 - DNA, 20 bp, synthetic construct
  source 1..20: mol_type = other DNA
ggacacctcccaggaagcgc

SEQ ID NO: 18823 - DNA, 23 bp, synthetic construct
  source 1..23: mol_type = other DNA
acgtggacacctcccaggaagcg

SEQ ID NO: 18824 - DNA, 20 bp, synthetic construct
  source 1..20: mol_type = other DNA
ggaggtgtccacgtgagcct

SEQ ID NO: 18825 - DNA, 20 bp, synthetic construct
  source 1..20: mol_type = other DNA
gacacctcccaggaagcgct

SEQ ID NO: 18826 - DNA, 20 bp, synthetic construct
  source 1..20: mol_type = other DNA
acacctcccaggaagcgctc

SEQ ID NO: 18827 - DNA, 20 bp, synthetic construct
  source 1..20: mol_type = other DNA
gaggtgtccacgtgagcctt

SEQ ID NO: 18828 - DNA, 23 bp, synthetic construct
  source 1..23: mol_type = other DNA
ctgggaggtgtccacgtgagcct

SEQ ID NO: 18829 - DNA, 23 bp, synthetic construct
  source 1..23: mol_type = other DNA
ctgggaggtgtccacgtgagcct

SEQ ID NO: 18830 - DNA, 24 bp, synthetic construct
  source 1..24: mol_type = other DNA
gaggtgtccacgtgagccttgctc

SEQ ID NO: 18831 - DNA, 20 bp, synthetic construct
  source 1..20: mol_type = other DNA
ggaggtgtccacgtgagcct

SEQ ID NO: 18832 - DNA, 20 bp, synthetic construct
  source 1..20: mol_type = other DNA
cgtggacacctcccaggaag

SEQ ID NO: 18833 - DNA, 20 bp, synthetic construct
  source 1..20: mol_type = other DNA
aggtgtccacgtgagccttg

SEQ ID NO: 18834 - DNA, 20 bp, synthetic construct
  source 1..20: mol_type = other DNA
cacctcccaggaagcgctca

SEQ ID NO: 18835 - DNA, 23 bp, synthetic construct
  source 1..23: mol_type = other DNA
ctgggaggtgtccacgtgagcct

SEQ ID NO: 18836 - DNA, 23 bp, synthetic construct
  source 1..23: mol_type = other DNA
ctgggaggtgtccacgtgagcct

SEQ ID NO: 18837 - DNA, 23 bp, synthetic construct
  source 1..23: mol_type = other DNA
ggacacctcccaggaagcgctca

SEQ ID NO: 18838 - DNA, 24 bp, synthetic construct
  source 1..24: mol_type = other DNA
gaggtgtccacgtgagccttgctc

SEQ ID NO: 18839 - DNA, 24 bp, synthetic construct
  source 1..24: mol_type = other DNA
ggacacctcccaggaagcgctcac

SEQ ID NO: 18840 - DNA, 20 bp, synthetic construct
  source 1..20: mol_type = other DNA
ggtgtccacgtgagccttgc

SEQ ID NO: 18841 - DNA, 20 bp, synthetic construct
  source 1..20: mol_type = other DNA
ggtgtccacgtgagccttgc

SEQ ID NO: 18842 - DNA, 20 bp, synthetic construct
  source 1..20: mol_type = other DNA
ccaggaagcgctcactcccc

SEQ ID NO: 18843 - DNA, 20 bp, synthetic construct
  source 1..20: mol_type = other DNA
acctcccaggaagcgctcac

SEQ ID NO: 18844 - DNA, 23 bp, synthetic construct
  source 1..23: mol_type = other DNA
gacacctcccaggaagcgctcac

SEQ ID NO: 18845 - DNA, 23 bp, synthetic construct
  source 1..23: mol_type = other DNA
aggtgtccacgtgagccttgctc

SEQ ID NO: 18846 - DNA, 23 bp, synthetic construct
  source 1..23: mol_type = other DNA
gacacctcccaggaagcgctcac

SEQ ID NO: 18847 - DNA, 21 bp, synthetic construct
  source 1..21: mol_type = other DNA
tcccaggaagcgctcactccc

SEQ ID NO: 18848 - DNA, 21 bp, synthetic construct
  source 1..21: mol_type = other DNA
ggtgtccacgtgagccttgct

SEQ ID NO: 18849 - DNA, 20 bp, synthetic construct
  source 1..20: mol_type = other DNA
gtgtccacgtgagccttgct

SEQ ID NO: 18850 - DNA, 20 bp, synthetic construct
  source 1..20: mol_type = other DNA
cctcccaggaagcgctcact

SEQ ID NO: 18851 - DNA, 21 bp, synthetic construct
  source 1..21: mol_type = other DNA
ggtgtccacgtgagccttgct

SEQ ID NO: 18852 - DNA, 21 bp, synthetic construct
  source 1..21: mol_type = other DNA
ggtgtccacgtgagccttgct

SEQ ID NO: 18853 - DNA, 20 bp, synthetic construct
  source 1..20: mol_type = other DNA
caggaagcgctcactccccc

SEQ ID NO: 18854 - DNA, 20 bp, synthetic construct
  source 1..20: mol_type = other DNA
ctcccaggaagcgctcactc

SEQ ID NO: 18855 - DNA, 20 bp, synthetic construct
  source 1..20: mol_type = other DNA
tgtccacgtgagccttgctc

SEQ ID NO: 18856 - DNA, 20 bp, synthetic construct
  source 1..20: mol_type = other DNA
ccaggaagcgctcactcccc

SEQ ID NO: 18857 - DNA, 20 bp, synthetic construct
  source 1..20: mol_type = other DNA
tcccaggaagcgctcactcc

SEQ ID NO: 18858 - DNA, 20 bp, synthetic construct
  source 1..20: mol_type = other DNA
gtccacgtgagccttgctcg

SEQ ID NO: 18859 - DNA, 20 bp, synthetic construct
  source 1..20: mol_type = other DNA
caggaagcgctcactccccc

SEQ ID NO: 18860 - DNA, 20 bp, synthetic construct
  source 1..20: mol_type = other DNA
cccaggaagcgctcactccc

SEQ ID NO: 18861 - DNA, 20 bp, synthetic construct
  source 1..20: mol_type = other DNA
tccacgtgagccttgctcga

SEQ ID NO: 18862 - DNA, 23 bp, synthetic construct
  source 1..23: mol_type = other DNA
ggtgtccacgtgagccttgctcg

SEQ ID NO: 18863 - DNA, 23 bp, synthetic construct
  source 1..23: mol_type = other DNA
tcccaggaagcgctcactccccc

SEQ ID NO: 18864 - DNA, 23 bp, synthetic construct
  source 1..23: mol_type = other DNA
ggtgtccacgtgagccttgctcg

SEQ ID NO: 18865 - DNA, 23 bp, synthetic construct
  source 1..23: mol_type = other DNA
tcccaggaagcgctcactccccc

SEQ ID NO: 18866 - DNA, 20 bp, synthetic construct
  source 1..20: mol_type = other DNA
ccaggaagcgctcactcccc

SEQ ID NO: 18867 - DNA, 20 bp, synthetic construct
  source 1..20: mol_type = other DNA
ccaggaagcgctcactcccc

SEQ ID NO: 18868 - DNA, 20 bp, synthetic construct
  source 1..20: mol_type = other DNA
tccacgtgagccttgctcga

SEQ ID NO: 18869 - DNA, 20 bp, synthetic construct
  source 1..20: mol_type = other DNA
ccacgtgagccttgctcgag

SEQ ID NO: 18870 - DNA, 20 bp, synthetic construct
  source 1..20: mol_type = other DNA
acgtgagccttgctcgaggc

SEQ ID NO: 18871 - DNA, 20 bp, synthetic construct
  source 1..20: mol_type = other DNA
cacgtgagccttgctcgagg

SEQ ID NO: 18872 - DNA, 20 bp, synthetic construct
  source 1..20: mol_type = other DNA
caggaagcgctcactccccc

SEQ ID NO: 18873 - DNA, 21 bp, synthetic construct
  source 1..21: mol_type = other DNA
cacgtgagccttgctcgaggc

SEQ ID NO: 18874 - DNA, 20 bp, synthetic construct
  source 1..20: mol_type = other DNA
aggaagcgctcactccccct

SEQ ID NO: 18875 - DNA, 20 bp, synthetic construct
  source 1..20: mol_type = other DNA
aggaagcgctcactccccct

SEQ ID NO: 18876 - DNA, 20 bp, synthetic construct
  source 1..20: mol_type = other DNA
acgtgagccttgctcgaggc

SEQ ID NO: 18877 - DNA, 23 bp, synthetic construct
  source 1..23: mol_type = other DNA
acgtgagccttgctcgaggcctg

SEQ ID NO: 18878 - DNA, 21 bp, synthetic construct
  source 1..21: mol_type = other DNA
acgtgagccttgctcgaggcc

SEQ ID NO: 18879 - DNA, 20 bp, synthetic construct
  source 1..20: mol_type = other DNA
gaagcgctcactccccctgg

SEQ ID NO: 18880 - DNA, 20 bp, synthetic construct
  source 1..20: mol_type = other DNA
caggaagcgctcactccccc

SEQ ID NO: 18881 - DNA, 20 bp, synthetic construct
  source 1..20: mol_type = other DNA
ggaagcgctcactccccctg

SEQ ID NO: 18882 - DNA, 20 bp, synthetic construct
  source 1..20: mol_type = other DNA
cgtgagccttgctcgaggcc

SEQ ID NO: 18883 - DNA, 20 bp, synthetic construct
  source 1..20: mol_type = other DNA
aggaagcgctcactccccct

SEQ ID NO: 18884 - DNA, 20 bp, synthetic construct
  source 1..20: mol_type = other DNA
cgtgagccttgctcgaggcc

SEQ ID NO: 18885 - DNA, 21 bp, synthetic construct
  source 1..21: mol_type = other DNA
ggaagcgctcactccccctgg

SEQ ID NO: 18886 - DNA, 21 bp, synthetic construct
  source 1..21: mol_type = other DNA
ggaagcgctcactccccctgg

SEQ ID NO: 18887 - DNA, 20 bp, synthetic construct
  source 1..20: mol_type = other DNA
gtgagccttgctcgaggcct

SEQ ID NO: 18888 - DNA, 20 bp, synthetic construct
  source 1..20: mol_type = other DNA
gtgagccttgctcgaggcct

SEQ ID NO: 18889 - DNA, 20 bp, synthetic construct
  source 1..20: mol_type = other DNA
gaagcgctcactccccctgg

SEQ ID NO: 18890 - DNA, 20 bp, synthetic construct
  source 1..20: mol_type = other DNA
gaagcgctcactccccctgg

SEQ ID NO: 18891 - DNA, 23 bp, synthetic construct
  source 1..23: mol_type = other DNA
caggaagcgctcactccccctgg

SEQ ID NO: 18892 - DNA, 23 bp, synthetic construct
  source 1..23: mol_type = other DNA
caggaagcgctcactccccctgg

SEQ ID NO: 18893 - DNA, 21 bp, synthetic construct
  source 1..21: mol_type = other DNA
aggaagcgctcactccccctg

SEQ ID NO: 18894 - DNA, 21 bp, synthetic construct
  source 1..21: mol_type = other DNA
acgtgagccttgctcgaggcc

SEQ ID NO: 18895 - DNA, 21 bp, synthetic construct
  source 1..21: mol_type = other DNA
ggaagcgctcactccccctgg

SEQ ID NO: 18896 - DNA, 20 bp, synthetic construct
  source 1..20: mol_type = other DNA
aagcgctcactccccctgga

SEQ ID NO: 18897 - DNA, 20 bp, synthetic construct
  source 1..20: mol_type = other DNA
tgagccttgctcgaggcctg

SEQ ID NO: 18898 - DNA, 23 bp, synthetic construct
  source 1..23: mol_type = other DNA
acgtgagccttgctcgaggcctg

SEQ ID NO: 18899 - DNA, 21 bp, synthetic construct
  source 1..21: mol_type = other DNA
gagccttgctcgaggcctggg

SEQ ID NO: 18900 - DNA, 21 bp, synthetic construct
  source 1..21: mol_type = other DNA
cgctcactccccctggacggc

SEQ ID NO: 18901 - DNA, 20 bp, synthetic construct
  source 1..20: mol_type = other DNA
gagccttgctcgaggcctgg

SEQ ID NO: 18902 - DNA, 20 bp, synthetic construct
  source 1..20: mol_type = other DNA
agcgctcactccccctggac

SEQ ID NO: 18903 - DNA, 21 bp, synthetic construct
  source 1..21: mol_type = other DNA
cgctcactccccctggacggc

SEQ ID NO: 18904 - DNA, 20 bp, synthetic construct
  source 1..20: mol_type = other DNA
gcgctcactccccctggacg

SEQ ID NO: 18905 - DNA, 20 bp, synthetic construct
  source 1..20: mol_type = other DNA
agccttgctcgaggcctggg

SEQ ID NO: 18906 - DNA, 20 bp, synthetic construct
  source 1..20: mol_type = other DNA
gccttgctcgaggcctggga

SEQ ID NO: 18907 - DNA, 20 bp, synthetic construct
  source 1..20: mol_type = other DNA
cgctcactccccctggacgg

SEQ ID NO: 18908 - DNA, 23 bp, synthetic construct
  source 1..23: mol_type = other DNA
tgagccttgctcgaggcctggga

SEQ ID NO: 18909 - DNA, 24 bp, synthetic construct
  source 1..24: mol_type = other DNA
gtgagccttgctcgaggcctggga

SEQ ID NO: 18910 - DNA, 20 bp, synthetic construct
  source 1..20: mol_type = other DNA
cttgctcgaggcctgggatc

SEQ ID NO: 18911 - DNA, 20 bp, synthetic construct
  source 1..20: mol_type = other DNA
tcactccccctggacggccc

SEQ ID NO: 18912 - DNA, 20 bp, synthetic construct
  source 1..20: mol_type = other DNA
ccttgctcgaggcctgggat

SEQ ID NO: 18913 - DNA, 20 bp, synthetic construct
  source 1..20: mol_type = other DNA
gctcactccccctggacggc

SEQ ID NO: 18914 - DNA, 23 bp, synthetic construct
  source 1..23: mol_type = other DNA
gagccttgctcgaggcctgggat

SEQ ID NO: 18915 - DNA, 23 bp, synthetic construct
  source 1..23: mol_type = other DNA
gagccttgctcgaggcctgggat

SEQ ID NO: 18916 - DNA, 24 bp, synthetic construct
  source 1..24: mol_type = other DNA
gtgagccttgctcgaggcctggga

SEQ ID NO: 18917 - DNA, 20 bp, synthetic construct
  source 1..20: mol_type = other DNA
ccttgctcgaggcctgggat

SEQ ID NO: 18918 - DNA, 20 bp, synthetic construct
  source 1..20: mol_type = other DNA
gtgagccttgctcgaggcct

SEQ ID NO: 18919 - DNA, 20 bp, synthetic construct
  source 1..20: mol_type = other DNA
cttgctcgaggcctgggatc

SEQ ID NO: 18920 - DNA, 20 bp, synthetic construct
  source 1..20: mol_type = other DNA
ctcactccccctggacggcc

SEQ ID NO: 18921 - DNA, 20 bp, synthetic construct
  source 1..20: mol_type = other DNA
ctcactccccctggacggcc

SEQ ID NO: 18922 - DNA, 20 bp, synthetic construct
  source 1..20: mol_type = other DNA
cttgctcgaggcctgggatc

SEQ ID NO: 18923 - DNA, 23 bp, synthetic construct
  source 1..23: mol_type = other DNA
gagccttgctcgaggcctgggat

SEQ ID NO: 18924-19074 - skipped (151 entries)

SEQ ID NO: 19075 - DNA, 139 bp, synthetic construct
  source 1..139: mol_type = other DNA
gctgtgctgaccatcgacaaggttttagtactctggaaacagaatctactaaaacaaggcaaaatgccgtgtttatctcgtcaacttgttggcgagacatggccccagcagcttcagtccctttctcgtcgatggtcag

SEQ ID NO: 19076 - DNA, 139 bp, synthetic construct; identical to SEQ ID NO: 19075
  source 1..139: mol_type = other DNA

SEQ ID NO: 19077 - DNA, 138 bp, synthetic construct
  source 1..138: mol_type = other DNA
ctgtgctgaccatcgacaaggttttagagctagaaatagcaagttaaaataaggctagtccgttatcaacttgaaaaagtggcaccgagtcggtgccatggccccagcagcttcagtccctttctcgtcgatggtcag

SEQ ID NO: 19078 - DNA, 139 bp, synthetic construct
  source 1..139: mol_type = other DNA
ggctgtgctgaccatcgacaagttttagtactctggaaacagaatctactaaaacaaggcaaaatgccgtgtttatctcgtcaacttgttggcgagaatggccccagcagcttcagtccctttctcgtcgatggtcagc

SEQ ID NO: 19079 - DNA, 138 bp, synthetic construct
  source 1..138: mol_type = other DNA
cagcttcagtccctttcttggttttagagctagaaatagcaagttaaaataaggctagtccgttatcaacttgaaaaagtggcaccgagtcggtgccgtgcataaggctgtgctgaccatcgacgagaaagggactga

SEQ ID NO: 19080 - DNA, 138 bp, synthetic construct; identical to SEQ ID NO: 19079
  source 1..138: mol_type = other DNA

SEQ ID NO: 19081 - DNA, 138 bp, synthetic construct
  source 1..138: mol_type = other DNA
gctgtgctgaccatcgacaagttttagagctagaaatagcaagttaaaataaggctagtccgttatcaacttgaaaaagtggcaccgagtcggtgcatggccccagcagcttcagtccctttctcgtcgatggtcagc

SEQ ID NO: 19082 - DNA, 139 bp, synthetic construct
  source 1..139: mol_type = other DNA
aggctgtgctgaccatcgacagttttagtactctggaaacagaatctactaaaacaaggcaaaatgccgtgtttatctcgtcaacttgttggcgagatggccccagcagcttcagtccctttctcgtcgatggtcagca

SEQ ID NO: 19083 - DNA, 139 bp, synthetic construct
  source 1..139: mol_type = other DNA
agcagcttcagtccctttcttgttttagtactctggaaacagaatctactaaaacaaggcaaaatgccgtgtttatctcgtcaacttgttggcgagagtgcataaggctgtgctgaccatcgacgagaaagggactgaa

SEQ ID NO: 19084 - DNA, 139 bp, synthetic construct; identical to SEQ ID NO: 19083
  source 1..139: mol_type = other DNA

SEQ ID NO: 19085 - DNA, 138 bp, synthetic construct
  source 1..138: mol_type = other DNA
ggctgtgctgaccatcgacagttttagagctagaaatagcaagttaaaataaggctagtccgttatcaacttgaaaaagtggcaccgagtcggtgctggccccagcagcttcagtccctttctcgtcgatggtcagca

SEQ ID NO: 19086 - DNA, 138 bp, synthetic construct; identical to SEQ ID NO: 19085
  source 1..138: mol_type = other DNA

SEQ ID NO: 19087 - DNA, 138 bp, synthetic construct
  source 1..138: mol_type = other DNA
gcagcttcagtccctttcttgttttagagctagaaatagcaagttaaaataaggctagtccgttatcaacttgaaaaagtggcaccgagtcggtgcgtgcataaggctgtgctgaccatcgacgagaaagggactgaa

SEQ ID NO: 19088 - DNA, 141 bp, synthetic construct
  source 1..141: mol_type = other DNA
ataaggctgtgctgaccatcgacgttttagtactctggaaacagaatctactaaaacaaggcaaaatgccgtgtttatctcgtcaacttgttggcgagaggccccagcagcttcagtccctttctcgtcgatggtcagcac

SEQ ID NO: 19089 - DNA, 139 bp, synthetic construct
  source 1..139: mol_type = other DNA
aaggctgtgctgaccatcgacgttttagtactctggaaacagaatctactaaaacaaggcaaaatgccgtgtttatctcgtcaacttgttggcgagaggccccagcagcttcagtccctttctcgtcgatggtcagcac

SEQ ID NO: 19090 - DNA, 138 bp, synthetic construct
  source 1..138: mol_type = other DNA
aggctgtgctgaccatcgacgttttagagctagaaatagcaagttaaaataaggctagtccgttatcaacttgaaaaagtggcaccgagtcggtgcggccccagcagcttcagtccctttctcgtcgatggtcagcac

SEQ ID NO: 19091 - DNA, 138 bp, synthetic construct; identical to SEQ ID NO: 19090
  source 1..138: mol_type = other DNA

SEQ ID NO: 19092 - DNA, 138 bp, synthetic construct
  source 1..138: mol_type = other DNA
agcagcttcagtccctttctgttttagagctagaaatagcaagttaaaataaggctagtccgttatcaacttgaaaaagtggcaccgagtcggtgctgcataaggctgtgctgaccatcgacgagaaagggactgaag

SEQ ID NO: 19093 - DNA, 138 bp, synthetic construct; identical to SEQ ID NO: 19092
  source 1..138: mol_type = other DNA

SEQ ID NO: 19094 - DNA, 139 bp, synthetic construct
  source 1..139: mol_type = other DNA
taaggctgtgctgaccatcgagttttagtactctggaaacagaatctactaaaacaaggcaaaatgccgtgtttatctcgtcaacttgttggcgagagccccagcagcttcagtccctttctcgtcgatggtcagcaca

SEQ ID NO: 19095 - DNA, 139 bp, synthetic construct; identical to SEQ ID NO: 19094
  source 1..139: mol_type = other DNA

SEQ ID NO: 19096 - DNA, 138 bp, synthetic construct
  source 1..138: mol_type = other DNA
cagcagcttcagtccctttcgttttagagctagaaatagcaagttaaaataaggctagtccgttatcaacttgaaaaagtggcaccgagtcggtgcgcataaggctgtgctgaccatcgacgagaaagggactgaagc

SEQ ID NO: 19097 - DNA, 138 bp, synthetic construct; identical to SEQ ID NO: 19096
  source 1..138: mol_type = other DNA

SEQ ID NO: 19098 - DNA, 138 bp, synthetic construct
  source 1..138: mol_type = other DNA
aaggctgtgctgaccatcgagttttagagctagaaatagcaagttaaaataaggctagtccgttatcaacttgaaaaagtggcaccgagtcggtgcgccccagcagcttcagtccctttctcgtcgatggtcagcaca

SEQ ID NO: 19099 - DNA, 146 bp, synthetic construct
  source 1..146: mol_type = other DNA
aaggctgtgctgaccatcgagtctttgtactctggtaccagaagctacaaagataaggcttcatgccgaaatcaacaccctgtcattttatggcagggtgttttgccccagcagcttcagtccctttctcgtcgatggtcagcaca

SEQ ID NO: 19100 - DNA, 212 bp, synthetic construct
  source 1..212: mol_type = other DNA
ccccagcagcttcagtccctttcgctatagttccttactgaaaggtaagttgctatagtaagggcaacagacccgaggcgttggggatcgcctagcccgtgtttacgggctctccccatattcaaaataatgacagacgagcaccttggagcatttatctccgaggtgctgcataaggctgtgctgaccatcgacgagaaagggactgaagc

SEQ ID NO: 19101 - DNA, 212 bp, synthetic construct; identical to SEQ ID NO: 19100
  source 1..212: mol_type = other DNA

SEQ ID NO: 19102 - DNA, 139 bp, synthetic construct
  source 1..139: mol_type = other DNA
ataaggctgtgctgaccatcggttttagtactctggaaacagaatctactaaaacaaggcaaaatgccgtgtttatctcgtcaacttgttggcgagaccccagcagcttcagtccctttctcgtcgatggtcagcacag

SEQ ID NO: 19103 - DNA, 138 bp, synthetic construct
  source 1..138: mol_type = other DNA
ccagcagcttcagtccctttgttttagagctagaaatagcaagttaaaataaggctagtccgttatcaacttgaaaaagtggcaccgagtcggtgccataaggctgtgctgaccatcgacgagaaagggactgaagct

SEQ ID NO: 19104 - DNA, 138 bp, synthetic construct
  source 1..138: mol_type = other DNA
taaggctgtgctgaccatcggttttagagctagaaatagcaagttaaaataaggctagtccgttatcaacttgaaaaagtggcaccgagtcggtgcccccagcagcttcagtccctttctcgtcgatggtcagcacag

SEQ ID NO: 19105 - DNA, 139 bp, synthetic construct
  source 1..139: mol_type = other DNA
cataaggctgtgctgaccatcgttttagtactctggaaacagaatctactaaaacaaggcaaaatgccgtgtttatctcgtcaacttgttggcgagacccagcagcttcagtccctttctcgtcgatggtcagcacagc

SEQ ID NO: 19106 - DNA, 138 bp, synthetic construct
  source 1..138: mol_type = other DNA
ataaggctgtgctgaccatcgttttagagctagaaatagcaagttaaaataaggctagtccgttatcaacttgaaaaagtggcaccgagtcggtgccccagcagcttcagtccctttctcgtcgatggtcagcacagc

SEQ ID NO: 19107 - DNA, 138 bp, synthetic construct
  source 1..138: mol_type = other DNA
cccagcagcttcagtcccttgttttagagctagaaatagcaagttaaaataaggctagtccgttatcaacttgaaaaagtggcaccgagtcggtgcataaggctgtgctgaccatcgacgagaaagggactgaagctg

SEQ ID NO: 19108 - DNA, 138 bp, synthetic construct
  source 1..138: mol_type = other DNA
cataaggctgtgctgaccatgttttagagctagaaatagcaagttaaaataaggctagtccgttatcaacttgaaaaagtggcaccgagtcggtgcccagcagcttcagtccctttctcgtcgatggtcagcacagcc

SEQ ID NO: 19109 - DNA, 138 bp, synthetic construct; identical to SEQ ID NO: 19108
  source 1..138: mol_type = other DNA

SEQ ID NO: 19110 - DNA, 138 bp, synthetic construct
  source 1..138: mol_type = other DNA
ccccagcagcttcagtccctgttttagagctagaaatagcaagttaaaataaggctagtccgttatcaacttgaaaaagtggcaccgagtcggtgctaaggctgtgctgaccatcgacgagaaagggactgaagctgc

SEQ ID NO: 19111 - DNA, 138 bp, synthetic construct
  source 1..138: mol_type = other DNA
gcataaggctgtgctgaccagttttagagctagaaatagcaagttaaaataaggctagtccgttatcaacttgaaaaagtggcaccgagtcggtgccagcagcttcagtccctttctcgtcgatggtcagcacagcct

SEQ ID NO: 19112 - DNA, 138 bp, synthetic construct; identical to SEQ ID NO: 19111
  source 1..138: mol_type = other DNA

SEQ ID NO: 19113 - DNA, 138 bp, synthetic construct
  source 1..138: mol_type = other DNA
gccccagcagcttcagtcccgttttagagctagaaatagcaagttaaaataaggctagtccgttatcaacttgaaaaagtggcaccgagtcggtgcaaggctgtgctgaccatcgacgagaaagggactgaagctgct

SEQ ID NO: 19114 - DNA, 212 bp, synthetic construct
  source 1..212: mol_type = other DNA
cgtgcataaggctgtgctgaccagctatagttccttactgaaaggtaagttgctatagtaagggcaacagacccgaggcgttggggatcgcctagcccgtgtttacgggctctccccatattcaaaataatgacagacgagcaccttggagcatttatctccgaggtgctcagcagcttcagtccctttctcgtcgatggtcagcacagcct

SEQ ID NO: 19115 - DNA, 212 bp, synthetic construct; identical to SEQ ID NO: 19114
  source 1..212: mol_type = other DNA

SEQ ID NO: 19116 - DNA, 139 bp, synthetic construct
  source 1..139: mol_type = other DNA
gtgcataaggctgtgctgaccgttttagtactctggaaacagaatctactaaaacaaggcaaaatgccgtgtttatctcgtcaacttgttggcgagaagcagcttcagtccctttctcgtcgatggtcagcacagcctt

SEQ ID NO: 19117 - DNA, 138 bp, synthetic construct
  source 1..138: mol_type = other DNA
ggccccagcagcttcagtccgttttagagctagaaatagcaagttaaaataaggctagtccgttatcaacttgaaaaagtggcaccgagtcggtgcaggctgtgctgaccatcgacgagaaagggactgaagctgctg

SEQ ID NO: 19118 - DNA, 138 bp, synthetic construct
  source 1..138: mol_type = other DNA
tgcataaggctgtgctgaccgttttagagctagaaatagcaagttaaaataaggctagtccgttatcaacttgaaaaagtggcaccgagtcggtgcagcagcttcagtccctttctcgtcgatggtcagcacagcctt

SEQ ID NO: 19119 - DNA, 212 bp, synthetic construct
  source 1..212: mol_type = other DNA
catggccccagcagcttcagtccgctatagttccttactgaaaggtaagttgctatagtaagggcaacagacccgaggcgttggggatcgcctagcccgtgtttacgggctctccccatattcaaaataatgacagacgagcaccttggagcatttatctccgaggtgctaggctgtgctgaccatcgacgagaaagggactgaagctgctg

SEQ ID NO: 19120 - DNA, 212 bp, synthetic construct; identical to SEQ ID NO: 19119
  source 1..212: mol_type = other DNA

SEQ ID NO: 19121 - DNA, 138 bp, synthetic construct
  source 1..138: mol_type = other DNA
gtgcataaggctgtgctgacgttttagagctagaaatagcaagttaaaataaggctagtccgttatcaacttgaaaaagtggcaccgagtcggtgcgcagcttcagtccctttctcgtcgatggtcagcacagcctta

SEQ ID NO: 19122 - DNA, 138 bp, synthetic construct
  source 1..138: mol_type = other DNA
tggccccagcagcttcagtcgttttagagctagaaatagcaagttaaaataaggctagtccgttatcaacttgaaaaagtggcaccgagtcggtgcggctgtgctgaccatcgacgagaaagggactgaagctgctgg

SEQ ID NO: 19123 - DNA, 138 bp, synthetic construct
  source 1..138: mol_type = other DNA
atggccccagcagcttcagtgttttagagctagaaatagcaagttaaaataaggctagtccgttatcaacttgaaaaagtggcaccgagtcggtgcgctgtgctgaccatcgacgagaaagggactgaagctgctggg

SEQ ID NO: 19124 - DNA, 138 bp, synthetic construct
  source 1..138: mol_type = other DNA
cgtgcataaggctgtgctgagttttagagctagaaatagcaagttaaaataaggctagtccgttatcaacttgaaaaagtggcaccgagtcggtgccagcttcagtccctttctcgtcgatggtcagcacagccttat

SEQ ID NO: 19125 - DNA, 212 bp, synthetic construct
  source 1..212: mol_type = other DNA
ggccgtgcataaggctgtgctgagctatagttccttactgaaaggtaagttgctatagtaagggcaacagacccgaggcgttggggatcgcctagcccgtgtttacgggctctccccatattcaaaataatgacagacgagcaccttggagcatttatctccgaggtgctcagcttcagtccctttctcgtcgatggtcagcacagccttat

SEQ ID NO: 19126 - DNA, 138 bp, synthetic construct
  source 1..138: mol_type = other DNA
catggccccagcagcttcaggttttagagctagaaatagcaagttaaaataaggctagtccgttatcaacttgaaaaagtggcaccgagtcggtgcctgtgctgaccatcgacgagaaagggactgaagctgctgggg

SEQ ID NO: 19127 - DNA, 138 bp, synthetic construct
  source 1..138: mol_type = other DNA
ccgtgcataaggctgtgctggttttagagctagaaatagcaagttaaaataaggctagtccgttatcaacttgaaaaagtggcaccgagtcggtgcagcttcagtccctttctcgtcgatggtcagcacagccttatg

SEQ ID NO: 19128 - DNA, 138 bp, synthetic construct
  source 1..138: mol_type = other DNA
gccgtgcataaggctgtgctgttttagagctagaaatagcaagttaaaataaggctagtccgttatcaacttgaaaaagtggcaccgagtcggtgcgcttcagtccctttctcgtcgatggtcagcacagccttatgc

SEQ ID NO: 19129 - DNA, 138 bp, synthetic construct
  source 1..138: mol_type = other DNA
acatggccccagcagcttcagttttagagctagaaatagcaagttaaaataaggctagtccgttatcaacttgaaaaagtggcaccgagtcggtgctgtgctgaccatcgacgagaaagggactgaagctgctggggc

SEQ ID NO: 19130 - DNA, 212 bp, synthetic construct
  source 1..212: mol_type = other DNA
aaaacatggccccagcagcttcagctatagttccttactgaaaggtaagttgctatagtaagggcaacagacccgaggcgttggggatcgcctagcccgtgtttacgggctctccccatattcaaaataatgacagacgagcaccttggagcatttatctccgaggtgcttgtgctgaccatcgacgagaaagggactgaagctgctggggc

SEQ ID NO: 19131 - DNA, 212 bp, synthetic construct; identical to SEQ ID NO: 19130
  source 1..212: mol_type = other DNA

SEQ ID NO: 19132 - DNA, 187 bp, synthetic construct
  source 1..187: mol_type = other DNA
taaaaacatggccccagcagcttcgttgtagctccctttctcatttcggaaacgaaatgagaaccgttgctacaataaggccgtctgaaaagatgtgccgcaacgctctgccccttaaagcttctgctttaaggggcatcgtttagtgctgaccatcgacgagaaagggactgaagctgctggggcc

SEQ ID NO: 19133 - DNA, 138 bp, synthetic construct
  source 1..138: mol_type = other DNA
aacatggccccagcagcttcgttttagagctagaaatagcaagttaaaataaggctagtccgttatcaacttgaaaaagtggcaccgagtcggtgcgtgctgaccatcgacgagaaagggactgaagctgctggggcc

SEQ ID NO: 19134 - DNA, 138 bp, synthetic construct
  source 1..138: mol_type = other DNA
ggccgtgcataaggctgtgcgttttagagctagaaatagcaagttaaaataaggctagtccgttatcaacttgaaaaagtggcaccgagtcggtgccttcagtccctttctcgtcgatggtcagcacagccttatgca

SEQ ID NO: 19135 - DNA, 138 bp, synthetic construct; identical to SEQ ID NO: 19133
  source 1..138: mol_type = other DNA

SEQ ID NO: 19136 - DNA, 138 bp, synthetic construct; identical to SEQ ID NO: 19134
  source 1..138: mol_type = other DNA

SEQ ID NO: 19137 - DNA, 212 bp, synthetic construct
  source 1..212: mol_type = other DNA
aaaaacatggccccagcagcttcgctatagttccttactgaaaggtaagttgctatagtaagggcaacagacccgaggcgttggggatcgcctagcccgtgtttacgggctctccccatattcaaaataatgacagacgagcaccttggagcatttatctccgaggtgctgtgctgaccatcgacgagaaagggactgaagctgctggggcc

SEQ ID NO: 19138 - DNA, 212 bp, synthetic construct; identical to SEQ ID NO: 19137
  source 1..212: mol_type = other DNA

SEQ ID NO: 19139 - DNA, 212 bp, synthetic construct
  source 1..212: mol_type = other DNA
ccaggccgtgcataaggctgtgcgctatagttccttactgaaaggtaagttgctatagtaagggcaacagacccgaggcgttggggatcgcctagcccgtgtttacgggctctccccatattcaaaataatgacagacgagcaccttggagcatttatctccgaggtgctcttcagtccctttctcgtcgatggtcagcacagccttatgca

SEQ ID NO: 19140 - DNA, 187 bp, synthetic construct
  source 1..187: mol_type = other DNA
ctaaaaacatggccccagcagcttgttgtagctccctttctcatttcggaaacgaaatgagaaccgttgctacaataaggccgtctgaaaagatgtgccgcaacgctctgccccttaaagcttctgctttaaggggcatcgtttatgctgaccatcgacgagaaagggactgaagctgctggggcca

SEQ ID NO: 19141 - DNA, 187 bp, synthetic construct
  source 1..187: mol_type = other DNA
ctccaggccgtgcataaggctgtggttgtagctccctttctcatttcggaaacgaaatgagaaccgttgctacaataaggccgtctgaaaagatgtgccgcaacgctctgccccttaaagcttctgctttaaggggcatcgtttattcagtccctttctcgtcgatggtcagcacagccttatgcac

SEQ ID NO: 19142 - DNA, 138 bp, synthetic construct
  source 1..138: mol_type = other DNA
aaacatggccccagcagcttgttttagagctagaaatagcaagttaaaataaggctagtccgttatcaacttgaaaaagtggcaccgagtcggtgctgctgaccatcgacgagaaagggactgaagctgctggggcca

SEQ ID NO: 19143 - DNA, 138 bp, synthetic construct; identical to SEQ ID NO: 19142
  source 1..138: mol_type = other DNA

SEQ ID NO: 19144 - DNA, 138 bp, synthetic construct
  source 1..138: mol_type = other DNA
aggccgtgcataaggctgtggttttagagctagaaatagcaagttaaaataaggctagtccgttatcaacttgaaaaagtggcaccgagtcggtgcttcagtccctttctcgtcgatggtcagcacagccttatgcac

SEQ ID NO: 19145 - DNA, 138 bp, synthetic construct; identical to SEQ ID NO: 19144
  source 1..138: mol_type = other DNA

SEQ ID NO: 19146 - DNA, 212 bp, synthetic construct
  source 1..212: mol_type = other DNA
tccaggccgtgcataaggctgtggctatagttccttactgaaaggtaagttgctatagtaagggcaacagacccgaggcgttggggatcgcctagcccgtgtttacgggctctccccatattcaaaataatgacagacgagcaccttggagcatttatctccgaggtgctttcagtccctttctcgtcgatggtcagcacagccttatgcac

SEQ ID NO: 19147 - DNA, 212 bp, synthetic construct
  source 1..212: mol_type = other DNA
taaaaacatggccccagcagcttgctatagttccttactgaaaggtaagttgctatagtaagggcaacagacccgaggcgttggggatcgcctagcccgtgtttacgggctctccccatattcaaaataatgacagacgagcaccttggagcatttatctccgaggtgcttgctgaccatcgacgagaaagggactgaagctgctggggcca

SEQ ID NO: 19148 - DNA, 212 bp, synthetic construct; identical to SEQ ID NO: 19146
  source 1..212: mol_type = other DNA

SEQ ID NO: 19149 - DNA, 139 bp, synthetic construct
  source 1..139: mol_type = other DNA
ccaggccgtgcataaggctgtgttttagtactctggaaacagaatctactaaaacaaggcaaaatgccgtgtttatctcgtcaacttgttggcgagatcagtccctttctcgtcgatggtcagcacagccttatgcacg

SEQ ID NO: 19150 - DNA, 139 bp, synthetic construct
  source 1..139: mol_type = other DNA
aaaaacatggccccagcagctgttttagtactctggaaacagaatctactaaaacaaggcaaaatgccgtgtttatctcgtcaacttgttggcgagagctgaccatcgacgagaaagggactgaagctgctggggccat

SEQ ID NO: 19151 - DNA, 138 bp, synthetic construct
  source 1..138: mol_type = other DNA
aaaacatggccccagcagctgttttagagctagaaatagcaagttaaaataaggctagtccgttatcaacttgaaaaagtggcaccgagtcggtgcgctgaccatcgacgagaaagggactgaagctgctggggccat

SEQ ID NO: 19152 - DNA, 138 bp, synthetic construct
  source 1..138: mol_type = other DNA
caggccgtgcataaggctgtgttttagagctagaaatagcaagttaaaataaggctagtccgttatcaacttgaaaaagtggcaccgagtcggtgctcagtccctttctcgtcgatggtcagcacagccttatgcacg

SEQ ID NO: 19153 - DNA, 139 bp, synthetic construct
  source 1..139: mol_type = other DNA
taaaaacatggccccagcagcgttttagtactctggaaacagaatctactaaaacaaggcaaaatgccgtgtttatctcgtcaacttgttggcgagactgaccatcgacgagaaagggactgaagctgctggggccatg

SEQ ID NO: 19154 - DNA, 139 bp, synthetic construct; identical to SEQ ID NO: 19153
  source 1..139: mol_type = other DNA

SEQ ID NO: 19155 - DNA, 138 bp, synthetic construct
  source 1..138: mol_type = other DNA
ccaggccgtgcataaggctggttttagagctagaaatagcaagttaaaataaggctagtccgttatcaacttgaaaaagtggcaccgagtcggtgccagtccctttctcgtcgatggtcagcacagccttatgcacgg

SEQ ID NO: 19156 - DNA, 138 bp, synthetic construct; identical to SEQ ID NO: 19155
  source 1..138: mol_type = other DNA

SEQ ID NO: 19157 - DNA, 138 bp, synthetic construct
  source 1..138: mol_type = other DNA
aaaaacatggccccagcagcgttttagagctagaaatagcaagttaaaataaggctagtccgttatcaacttgaaaaagtggcaccgagtcggtgcctgaccatcgacgagaaagggactgaagctgctggggccatg

SEQ ID NO: 19158 - DNA, 138 bp, synthetic construct
  source 1..138: mol_type = other DNA
tccaggccgtgcataaggctgttttagagctagaaatagcaagttaaaataaggctagtccgttatcaacttgaaaaagtggcaccgagtcggtgcagtccctttctcgtcgatggtcagcacagccttatgcacggc

SEQ ID NO: 19159 - DNA, 138 bp, synthetic construct; identical to SEQ ID NO: 19158
  source 1..138: mol_type = other DNA

SEQ ID NO: 19160 - DNA, 138 bp, synthetic construct
  source 1..138: mol_type = other DNA
taaaaacatggccccagcaggttttagagctagaaatagcaagttaaaataaggctagtccgttatcaacttgaaaaagtggcaccgagtcggtgctgaccatcgacgagaaagggactgaagctgctggggccatgt

SEQ ID NO: 19161 - DNA, 138 bp, synthetic construct
  source 1..138: mol_type = other DNA
ctccaggccgtgcataaggcgttttagagctagaaatagcaagttaaaataaggctagtccgttatcaacttgaaaaagtggcaccgagtcggtgcgtccctttctcgtcgatggtcagcacagccttatgcacggcc

SEQ ID NO: 19162 - DNA, 138 bp, synthetic construct; identical to SEQ ID NO: 19161
  source 1..138: mol_type = other DNA

SEQ ID NO: 19163 - DNA, 138 bp, synthetic construct
  source 1..138: mol_type = other DNA
ctaaaaacatggccccagcagttttagagctagaaatagcaagttaaaataaggctagtccgttatcaacttgaaaaagtggcaccgagtcggtgcgaccatcgacgagaaagggactgaagctgctggggccatgtt

SEQ ID NO: 19164 - DNA, 212 bp, synthetic construct
  source 1..212: mol_type = other DNA
cctctaaaaacatggccccagcagctatagttccttactgaaaggtaagttgctatagtaagggcaacagacccgaggcgttggggatcgcctagcccgtgtttacgggctctccccatattcaaaataatgacagacgagcaccttggagcatttatctccgaggtgctgaccatcgacgagaaagggactgaagctgctggggccatgtt

SEQ ID NO: 19165 - DNA, 212 bp, synthetic construct
  source 1..212: mol_type = other DNA
cccctccaggccgtgcataaggcgctatagttccttactgaaaggtaagttgctatagtaagggcaacagacccgaggcgttggggatcgcctagcccgtgtttacgggctctccccatattcaaaataatgacagacgagcaccttggagcatttatctccgaggtgctgtccctttctcgtcgatggtcagcacagccttatgcacggcc

SEQ ID NO: 19166 - DNA, 212 bp, synthetic construct; identical to SEQ ID NO: 19164
  source 1..212: mol_type = other DNA

SEQ ID NO: 19167 - DNA, 212 bp, synthetic construct; identical to SEQ ID NO: 19165
  source 1..212: mol_type = other DNA

SEQ ID NO: 19168 - DNA, 138 bp, synthetic construct
  source 1..138: mol_type = other DNA
cctccaggccgtgcataagggttttagagctagaaatagcaagttaaaataaggctagtccgttatcaacttgaaaaagtggcaccgagtcggtgctccctttctcgtcgatggtcagcacagccttatgcacggcct

SEQ ID NO: 19169 - DNA, 138 bp, synthetic construct; identical to SEQ ID NO: 19168
  source 1..138: mol_type = other DNA

SEQ ID NO: 19170 - DNA, 138 bp, synthetic construct
  source 1..138: mol_type = other DNA
tctaaaaacatggccccagcgttttagagctagaaatagcaagttaaaataaggctagtccgttatcaacttgaaaaagtggcaccgagtcggtgcaccatcgacgagaaagggactgaagctgctggggccatgttt

SEQ ID NO: 19171 - DNA, 138 bp, synthetic construct; identical to SEQ ID NO: 19170
  source 1..138: mol_type = other DNA

SEQ ID NO: 19172 - DNA, 138 bp, synthetic construct
  source 1..138: mol_type = other DNA
ctctaaaaacatggccccaggttttagagctagaaatagcaagttaaaataaggctagtccgttatcaacttgaaaaagtggcaccgagtcggtgcccatcgacgagaaagggactgaagctgctggggccatgtttt

SEQ ID NO: 19173 - DNA, 138 bp, synthetic construct; identical to SEQ ID NO: 19172
  source 1..138: mol_type = other DNA

SEQ ID NO: 19174 - DNA, 138 bp, synthetic construct
  source 1..138: mol_type = other DNA
ccctccaggccgtgcataaggttttagagctagaaatagcaagttaaaataaggctagtccgttatcaacttgaaaaagtggcaccgagtcggtgcccctttctcgtcgatggtcagcacagccttatgcacggcctg

SEQ ID NO: 19175 - DNA, 139 bp, synthetic construct
  source 1..139: mol_type = other DNA
gcctctaaaaacatggccccagttttagtactctggaaacagaatctactaaaacaaggcaaaatgccgtgtttatctcgtcaacttgttggcgagacatcgacgagaaagggactgaagctgctggggccatgttttt

SEQ ID NO: 19176 - DNA, 138 bp, synthetic construct
  source 1..138: mol_type = other DNA
cccctccaggccgtgcataagttttagagctagaaatagcaagttaaaataaggctagtccgttatcaacttgaaaaagtggcaccgagtcggtgccctttctcgtcgatggtcagcacagccttatgcacggcctgg

SEQ ID NO: 19177 - DNA, 138 bp, synthetic construct; identical to SEQ ID NO: 19176
  source 1..138: mol_type = other DNA

SEQ ID NO: 19178 - DNA, 138 bp, synthetic construct
  source 1..138: mol_type = other DNA
cctctaaaaacatggccccagttttagagctagaaatagcaagttaaaataaggctagtccgttatcaacttgaaaaagtggcaccgagtcggtgccatcgacgagaaagggactgaagctgctggggccatgttttt

SEQ ID NO: 19179 - DNA, 212 bp, synthetic construct
  source 1..212: mol_type = other DNA
tggcctctaaaaacatggccccagctatagttccttactgaaaggtaagttgctatagtaagggcaacagacccgaggcgttggggatcgcctagcccgtgtttacgggctctccccatattcaaaataatgacagacgagcaccttggagcatttatctccgaggtgctcatcgacgagaaagggactgaagctgctggggccatgttttt

SEQ ID NO: 19180 - DNA, 139 bp, synthetic construct
  source 1..139: mol_type = other DNA
ggcctctaaaaacatggccccgttttagtactctggaaacagaatctactaaaacaaggcaaaatgccgtgtttatctcgtcaacttgttggcgagaatcgacgagaaagggactgaagctgctggggccatgttttta

SEQ ID NO: 19181 - DNA, 138 bp, synthetic construct
  source 1..138: mol_type = other DNA
tcccctccaggccgtgcatagttttagagctagaaatagcaagttaaaataaggctagtccgttatcaacttgaaaaagtggcaccgagtcggtgcctttctcgtcgatggtcagcacagccttatgcacggcctgga

SEQ ID NO: 19182 - DNA, 138 bp, synthetic construct; identical to SEQ ID NO: 19181
  source 1..138: mol_type = other DNA

SEQ ID NO: 19183 - DNA, 138 bp, synthetic construct; identical to SEQ ID NO: 19181
  source 1..138: mol_type = other DNA

SEQ ID NO: 19184 - DNA, 138 bp, synthetic construct
  source 1..138: mol_type = other DNA
gcctctaaaaacatggccccgttttagagctagaaatagcaagttaaaataaggctagtccgttatcaacttgaaaaagtggcaccgagtcggtgcatcgacgagaaagggactgaagctgctggggccatgttttta

SEQ ID NO: 19185 - DNA, 138 bp, synthetic construct; identical to SEQ ID NO: 19181
  source 1..138: mol_type = other DNA

SEQ ID NO: 19186 - DNA, 138 bp, synthetic construct; identical to SEQ ID NO: 19184
  source 1..138: mol_type = other DNA

SEQ ID NO: 19187 - DNA, 139 bp, synthetic construct
  source 1..139: mol_type = other DNA
tctcccctccaggccgtgcatgttttagtactctggaaacagaatctactaaaacaaggcaaaatgccgtgtttatctcgtcaacttgttggcgagatttctcgtcgatggtcagcacagccttatgcacggcctggag

SEQ ID NO: 19188 - DNA, 139 bp, synthetic construct; identical to SEQ ID NO: 19187
  source 1..139: mol_type = other DNA

SEQ ID NO: 19189 - DNA, 138 bp, synthetic construct
  source 1..138: mol_type = other DNA
ggcctctaaaaacatggcccgttttagagctagaaatagcaagttaaaataaggctagtccgttatcaacttgaaaaagtggcaccgagtcggtgctcgacgagaaagggactgaagctgctggggccatgtttttag

SEQ ID NO: 19190 - DNA, 138 bp, synthetic construct; identical to SEQ ID NO: 19189
  source 1..138: mol_type = other DNA

SEQ ID NO: 19191 - DNA, 138 bp, synthetic construct
  source 1..138: mol_type = other DNA
ctcccctccaggccgtgcatgttttagagctagaaatagcaagttaaaataaggctagtccgttatcaacttgaaaaagtggcaccgagtcggtgctttctcgtcgatggtcagcacagccttatgcacggcctggag

SEQ ID NO: 19192 - DNA, 138 bp, synthetic construct; identical to SEQ ID NO: 19191
  source 1..138: mol_type = other DNA

SEQ ID NO: 19193 - DNA, 212 bp, synthetic construct
  source 1..212: mol_type = other DNA
tctctcccctccaggccgtgcatgctatagttccttactgaaaggtaagttgctatagtaagggcaacagacccgaggcgttggggatcgcctagcccgtgtttacgggctctccccatattcaaaataatgacagacgagcaccttggagcatttatctccgaggtgcttttctcgtcgatggtcagcacagccttatgcacggcctggag

SEQ ID NO: 19194 - DNA, 212 bp, synthetic construct; identical to SEQ ID NO: 19193
  source 1..212: mol_type = other DNA

SEQ ID NO: 19195 - DNA, 139 bp, synthetic construct
  source 1..139: mol_type = other DNA
ctctcccctccaggccgtgcagttttagtactctggaaacagaatctactaaaacaaggcaaaatgccgtgtttatctcgtcaacttgttggcgagattctcgtcgatggtcagcacagccttatgcacggcctggagg

SEQ ID NO: 19196 - DNA, 139 bp, synthetic construct
  source 1..139: mol_type = other DNA
atggcctctaaaaacatggccgttttagtactctggaaacagaatctactaaaacaaggcaaaatgccgtgtttatctcgtcaacttgttggcgagacgacgagaaagggactgaagctgctggggccatgtttttaga

SEQ ID NO: 19197 - DNA, 139 bp, synthetic construct; identical to SEQ ID NO: 19195
  source 1..139: mol_type = other DNA

SEQ ID NO: 19198 - DNA, 138 bp, synthetic construct
  source 1..138: mol_type = other DNA
tctcccctccaggccgtgcagttttagagctagaaatagcaagttaaaataaggctagtccgttatcaacttgaaaaagtggcaccgagtcggtgcttctcgtcgatggtcagcacagccttatgcacggcctggagg

SEQ ID NO: 19199 - DNA, 138 bp, synthetic construct
  source 1..138: mol_type = other DNA
tggcctctaaaaacatggccgttttagagctagaaatagcaagttaaaataaggctagtccgttatcaacttgaaaaagtggcaccgagtcggtgccgacgagaaagggactgaagctgctggggccatgtttttaga

SEQ ID NO: 19200 - DNA, 212 bp, synthetic construct
  source 1..212: mol_type = other DNA
gtatggcctctaaaaacatggccgctatagttccttactgaaaggtaagttgctatagtaagggcaacagacccgaggcgttggggatcgcctagcccgtgtttacgggctctccccatattcaaaataatgacagacgagcaccttggagcatttatctccgaggtgctcgacgagaaagggactgaagctgctggggccatgtttttaga

SEQ ID NO: 19201 - DNA, 139 bp, synthetic construct
  source 1..139: mol_type = other DNA
tatggcctctaaaaacatggcgttttagtactctggaaacagaatctactaaaacaaggcaaaatgccgtgtttatctcgtcaacttgttggcgagagacgagaaagggactgaagctgctggggccatgtttttagag

SEQ ID NO: 19202 - DNA, 139 bp, synthetic construct
  source 1..139: mol_type = other DNA
tctctcccctccaggccgtgcgttttagtactctggaaacagaatctactaaaacaaggcaaaatgccgtgtttatctcgtcaacttgttggcgagatctcgtcgatggtcagcacagccttatgcacggcctggaggg

SEQ ID NO: 19203 - DNA, 138 bp, synthetic construct
  source 1..138: mol_type = other DNA
atggcctctaaaaacatggcgttttagagctagaaatagcaagttaaaataaggctagtccgttatcaacttgaaaaagtggcaccgagtcggtgcgacgagaaagggactgaagctgctggggccatgtttttagag

SEQ ID NO: 19204 - DNA, 138 bp, synthetic construct
  source 1..138: mol_type = other DNA
ctctcccctccaggccgtgcgttttagagctagaaatagcaagttaaaataaggctagtccgttatcaacttgaaaaagtggcaccgagtcggtgctctcgtcgatggtcagcacagccttatgcacggcctggaggg

SEQ ID NO: 19205 - DNA, 139 bp, synthetic construct
  source 1..139: mol_type = other DNA
ttctctcccctccaggccgtggttttagtactctggaaacagaatctactaaaacaaggcaaaatgccgtgtttatctcgtcaacttgttggcgagactcgtcgatggtcagcacagccttatgcacggcctggagggg

SEQ ID NO: 19206 - DNA, 138 bp, synthetic construct
  source 1..138: mol_type = other DNA
tctctcccctccaggccgtggttttagagctagaaatagcaagttaaaataaggctagtccgttatcaacttgaaaaagtggcaccgagtcggtgcctcgtcgatggtcagcacagccttatgcacggcctggagggg

SEQ ID NO: 19207 - DNA, 138 bp, synthetic construct
  source 1..138: mol_type = other DNA
tatggcctctaaaaacatgggttttagagctagaaatagcaagttaaaataaggctagtccgttatcaacttgaaaaagtggcaccgagtcggtgcacgagaaagggactgaagctgctggggccatgtttttagagg

SEQ ID NO: 19208 - DNA, 138 bp, synthetic construct
  source 1..138: mol_type = other DNA
gtatggcctctaaaaacatggttttagagctagaaatagcaagttaaaataaggctagtccgttatcaacttgaaaaagtggcaccgagtcggtgccgagaaagggactgaagctgctggggccatgtttttagaggc

SEQ ID NO: 19209 - DNA, 138 bp, synthetic construct
  source 1..138: mol_type = other DNA
ttctctcccctccaggccgtgttttagagctagaaatagcaagttaaaataaggctagtccgttatcaacttgaaaaagtggcaccgagtcggtgctcgtcgatggtcagcacagccttatgcacggcctggagggga

SEQ ID NO: 19210 - DNA, 212 bp, synthetic construct
  source 1..212: mol_type = other DNA
tgggtatggcctctaaaaacatggctatagttccttactgaaaggtaagttgctatagtaagggcaacagacccgaggcgttggggatcgcctagcccgtgtttacgggctctccccatattcaaaataatgacagacgagcaccttggagcatttatctccgaggtgctcgagaaagggactgaagctgctggggccatgtttttagaggc

SEQ ID NO: 19211 - DNA, 187 bp, synthetic construct
  source 1..187: mol_type = other DNA
catgggtatggcctctaaaaacatgttgtagctccctttctcatttcggaaacgaaatgagaaccgttgctacaataaggccgtctgaaaagatgtgccgcaacgctctgccccttaaagcttctgctttaaggggcatcgtttagagaaagggactgaagctgctggggccatgtttttagaggcc

SEQ ID NO: 19212 - DNA, 138 bp, synthetic construct
  source 1..138: mol_type = other DNA
ggtatggcctctaaaaacatgttttagagctagaaatagcaagttaaaataaggctagtccgttatcaacttgaaaaagtggcaccgagtcggtgcgagaaagggactgaagctgctggggccatgtttttagaggcc

SEQ ID NO: 19213 - DNA, 138 bp, synthetic construct
  source 1..138: mol_type = other DNA
cttctctcccctccaggccggttttagagctagaaatagcaagttaaaataaggctagtccgttatcaacttgaaaaagtggcaccgagtcggtgccgtcgatggtcagcacagccttatgcacggcctggaggggag

SEQ ID NO: 19214 - DNA, 138 bp, synthetic construct; identical to SEQ ID NO: 19212
  source 1..138: mol_type = other DNA

SEQ ID NO: 19215 - DNA, 138 bp, synthetic construct; identical to SEQ ID NO: 19213
  source 1..138: mol_type = other DNA

SEQ ID NO: 19216 - DNA, 212 bp, synthetic construct
  source 1..212: mol_type = other DNA
atgggtatggcctctaaaaacatgctatagttccttactgaaaggtaagttgctatagtaagggcaacagacccgaggcgttggggatcgcctagcccgtgtttacgggctctccccatattcaaaataatgacagacgagcaccttggagcatttatctccgaggtgctgagaaagggactgaagctgctggggccatgtttttagaggcc

SEQ ID NO: 19217 - DNA, 212 bp, synthetic construct; identical to SEQ ID NO: 19216
  source 1..212: mol_type = other DNA

SEQ ID NO: 19218 - DNA, 187 bp, synthetic construct
  source 1..187: mol_type = other DNA
acatgggtatggcctctaaaaacagttgtagctccctttctcatttcggaaacgaaatgagaaccgttgctacaataaggccgtctgaaaagatgtgccgcaacgctctgccccttaaagcttctgctttaaggggcatcgtttaagaaagggactgaagctgctggggccatgtttttagaggcca

SEQ ID NO: 19219 - DNA, 138 bp, synthetic construct
  source 1..138: mol_type = other DNA
gggtatggcctctaaaaacagttttagagctagaaatagcaagttaaaataaggctagtccgttatcaacttgaaaaagtggcaccgagtcggtgcagaaagggactgaagctgctggggccatgtttttagaggcca

SEQ ID NO: 19220 - DNA, 138 bp, synthetic construct; identical to SEQ ID NO: 19219
  source 1..138: mol_type = other DNA

SEQ ID NO: 19221 - DNA, 138 bp, synthetic construct; identical to SEQ ID NO: 19219
  source 1..138: mol_type = other DNA

SEQ ID NO: 19222 - DNA, 138 bp, synthetic construct
  source 1..138: mol_type = other DNA
gcttctctcccctccaggccgttttagagctagaaatagcaagttaaaataaggctagtccgttatcaacttgaaaaagtggcaccgagtcggtgcgtcgatggtcagcacagccttatgcacggcctggaggggaga

SEQ ID NO: 19223 - DNA, 138 bp, synthetic construct; identical to SEQ ID NO: 19222
  source 1..138: mol_type = other DNA

SEQ ID NO: 19224 - DNA, 138 bp, synthetic construct; identical to SEQ ID NO: 19219
  source 1..138: mol_type = other DNA

SEQ ID NO: 19225 - DNA, 212 bp, synthetic construct
  source 1..212: mol_type = other DNA
catgggtatggcctctaaaaacagctatagttccttactgaaaggtaagttgctatagtaagggcaacagacccgaggcgttggggatcgcctagcccgtgtttacgggctctccccatattcaaaataatgacagacgagcaccttggagcatttatctccgaggtgctagaaagggactgaagctgctggggccatgtttttagaggcca

SEQ ID NO: 19226 - DNA, 97 bp, synthetic construct
  source 1..97: mol_type = other DNA
acttggtattttgttcaatcagttttagtactctggaaacagaatctactaaaacaaggcaaaatgccgtgtttatctcgtcaacttgttggcgaga

SEQ ID NO: 19227 - DNA, 97 bp, synthetic construct
  source 1..97: mol_type = other DNA
cttggtattttgttcaatcatgttttagtactctggaaacagaatctactaaaacaaggcaaaatgccgtgtttatctcgtcaacttgttggcgaga

SEQ ID NO: 19228 - DNA, 96 bp, synthetic construct
  source 1..96: mol_type = other DNA
cttggtattttgttcaatcagttttagagctagaaatagcaagttaaaataaggctagtccgttatcaacttgaaaaagtggcaccgagtcggtgc

SEQ ID NO: 19229 - DNA, 97 bp, synthetic construct; identical to SEQ ID NO: 19227
  source 1..97: mol_type = other DNA

SEQ ID NO: 19230 - DNA, 96 bp, synthetic construct
  source 1..96: mol_type = other DNA
gcgcttcctgggaggtgtccgttttagagctagaaatagcaagttaaaataaggctagtccgttatcaacttgaaaaagtggcaccgagtcggtgc

SEQ ID NO: 19231 - DNA, 96 bp, synthetic construct
  source 1..96: mol_type = other DNA
agcgcttcctgggaggtgtcgttttagagctagaaatagcaagttaaaataaggctagtccgttatcaacttgaaaaagtggcaccgagtcggtgc

SEQ ID NO: 19232 - DNA, 96 bp, synthetic construct
  source 1..96: mol_type = other DNA
ttggtattttgttcaatcatgttttagagctagaaatagcaagttaaaataaggctagtccgttatcaacttgaaaaagtggcaccgagtcggtgc

SEQ ID NO: 19233 - DNA, 97 bp, synthetic construct
  source 1..97: mol_type = other DNA
ttggtattttgttcaatcattgttttagtactctggaaacagaatctactaaaacaaggcaaaatgccgtgtttatctcgtcaacttgttggcgaga

SEQ ID NO: 19234 - DNA, 97 bp, synthetic construct
  source 1..97: mol_type = other DNA
gcgcttcctgggaggtgtccagttttagtactctggaaacagaatctactaaaacaaggcaaaatgccgtgtttatctcgtcaacttgttggcgaga

SEQ ID NO: 19235 - DNA, 97 bp, synthetic construct; identical to SEQ ID NO: 19234
  source 1..97: mol_type = other DNA

SEQ ID NO: 19236 - DNA, 96 bp, synthetic construct
  source 1..96: mol_type = other DNA
ggtattttgttcaatcattagttttagagctagaaatagcaagttaaaataaggctagtccgttatcaacttgaaaaagtggcaccgagtcggtgc

SEQ ID NO: 19237 - DNA, 96 bp, synthetic construct
  source 1..96: mol_type = other DNA
tggtattttgttcaatcattgttttagagctagaaatagcaagttaaaataaggctagtccgttatcaacttgaaaaagtggcaccgagtcggtgc

SEQ ID NO: 19238 - DNA, 96 bp, synthetic construct; identical to SEQ ID NO: 19230
  source 1..96: mol_type = other DNA

SEQ ID NO: 19239 - DNA, 99 bp, synthetic construct
  source 1..99: mol_type = other DNA
acttggtattttgttcaatcattgttttagtactctggaaacagaatctactaaaacaaggcaaaatgccgtgtttatctcgtcaacttgttggcgaga

SEQ ID NO: 19240 - DNA, 97 bp, synthetic construct
  source 1..97: mol_type = other DNA
tggtattttgttcaatcattagttttagtactctggaaacagaatctactaaaacaaggcaaaatgccgtgtttatctcgtcaacttgttggcgaga

SEQ ID NO: 19241 - DNA, 96 bp, synthetic construct; identical to SEQ ID NO: 19237
  source 1..96: mol_type = other DNA

SEQ ID NO: 19242 - DNA, 96 bp, synthetic construct; identical to SEQ ID NO: 19236
  source 1..96: mol_type = other DNA

SEQ ID NO: 19243 - DNA, 96 bp, synthetic construct
  source 1..96: mol_type = other DNA
cgcttcctgggaggtgtccagttttagagctagaaatagcaagttaaaataaggctagtccgttatcaacttgaaaaagtggcaccgagtcggtgc

SEQ ID NO: 19244 - DNA, 96 bp, synthetic construct; identical to SEQ ID NO: 19243
  source 1..96: mol_type = other DNA

SEQ ID NO: 19245 - DNA, 97 bp, synthetic construct
  source 1..97: mol_type = other DNA
ggtattttgttcaatcattaagttttagtactctggaaacagaatctactaaaacaaggcaaaatgccgtgtttatctcgtcaacttgttggcgaga

SEQ ID NO: 19246 - DNA, 97 bp, synthetic construct; identical to SEQ ID NO: 19245
  source 1..97: mol_type = other DNA

SEQ ID NO: 19247 - DNA, 96 bp, synthetic construct
  source 1..96: mol_type = other DNA
gcttcctgggaggtgtccacgttttagagctagaaatagcaagttaaaataaggctagtccgttatcaacttgaaaaagtggcaccgagtcggtgc

SEQ ID NO: 19248 - DNA, 96 bp, synthetic construct; identical to SEQ ID NO: 19247
  source 1..96: mol_type = other DNA

SEQ ID NO: 19249 - DNA, 96 bp, synthetic construct
  source 1..96: mol_type = other DNA
gtattttgttcaatcattaagttttagagctagaaatagcaagttaaaataaggctagtccgttatcaacttgaaaaagtggcaccgagtcggtgc

SEQ ID NO: 19250 - DNA, 86 bp, synthetic construct
  source 1..86: mol_type = other DNA
  misc_difference 1: note = a, c, t, g, unknown, or other
nagtctttgtactctggtaccagaagctacaaagataaggcttcatgccgaaatcaacaccctgtcattttatggcagggtgtttt

SEQ ID NO: 19251 - DNA, 170 bp, synthetic construct
  source 1..170: mol_type = other DNA
gcgcttcctgggaggtgtccacggctatagttccttactgaaaggtaagttgctatagtaagggcaacagacccgaggcgttggggatcgcctagcccgtgtttacgggctctccccatattcaaaataatgacagacgagcaccttggagcatttatctccgaggtgct

SEQ ID NO: 19252 - DNA, 170 bp, synthetic construct; identical to SEQ ID NO: 19251
  source 1..170: mol_type = other DNA

SEQ ID NO: 19253 - DNA, 97 bp, synthetic construct; identical to SEQ ID NO: 19245
  source 1..97: mol_type = other DNA

SEQ ID NO: 19254 - DNA, 96 bp, synthetic construct
  source 1..96: mol_type = other DNA
cttcctgggaggtgtccacggttttagagctagaaatagcaagttaaaataaggctagtccgttatcaacttgaaaaagtggcaccgagtcggtgc

SEQ ID NO: 19255 - DNA, 96 bp, synthetic construct
  source 1..96: mol_type = other DNA
tattttgttcaatcattaaggttttagagctagaaatagcaagttaaaataaggctagtccgttatcaacttgaaaaagtggcaccgagtcggtgc

SEQ ID NO: 19256 - DNA, 97 bp, synthetic construct
  source 1..97: mol_type = other DNA
attttgttcaatcattaagaagttttagtactctggaaacagaatctactaaaacaaggcaaaatgccgtgtttatctcgtcaacttgttggcgaga

SEQ ID NO: 19257 - DNA, 96 bp, synthetic construct
  source 1..96: mol_type = other DNA
attttgttcaatcattaagagttttagagctagaaatagcaagttaaaataaggctagtccgttatcaacttgaaaaagtggcaccgagtcggtgc

SEQ ID NO: 19258 - DNA, 96 bp, synthetic construct
  source 1..96: mol_type = other DNA
ttcctgggaggtgtccacgtgttttagagctagaaatagcaagttaaaataaggctagtccgttatcaacttgaaaaagtggcaccgagtcggtgc

SEQ ID NO: 19259 - DNA, 96 bp, synthetic construct; identical to SEQ ID NO: 19257
  source 1..96: mol_type = other DNA

SEQ ID NO: 19260 - DNA, 96 bp, synthetic construct
  source 1..96: mol_type = other DNA
ttttgttcaatcattaagaagttttagagctagaaatagcaagttaaaataaggctagtccgttatcaacttgaaaaagtggcaccgagtcggtgc

SEQ ID NO: 19261 - DNA, 96 bp, synthetic construct
  source 1..96: mol_type = other DNA
tcctgggaggtgtccacgtggttttagagctagaaatagcaagttaaaataaggctagtccgttatcaacttgaaaaagtggcaccgagtcggtgc

SEQ ID NO: 19262 - DNA, 96 bp, synthetic construct; identical to SEQ ID NO: 19255
  source 1..96: mol_type = other DNA

SEQ ID NO: 19263 - DNA, 96 bp, synthetic construct
  source 1..96: mol_type = other DNA
tttgttcaatcattaagaaggttttagagctagaaatagcaagttaaaataaggctagtccgttatcaacttgaaaaagtggcaccgagtcggtgc

SEQ ID NO: 19264 - DNA, 96 bp, synthetic construct
  source 1..96: mol_type = other DNA
cctgggaggtgtccacgtgagttttagagctagaaatagcaagttaaaataaggctagtccgttatcaacttgaaaaagtggcaccgagtcggtgc

SEQ ID NO: 19265 - DNA, 170 bp, synthetic construct
  source 1..170: mol_type = other DNA
tggtattttgttcaatcattaaggctatagttccttactgaaaggtaagttgctatagtaagggcaacagacccgaggcgttggggatcgcctagcccgtgtttacgggctctccccatattcaaaataatgacagacgagcaccttggagcatttatctccgaggtgct

SEQ ID NO: 19266 - DNA, 170 bp, synthetic construct; identical to SEQ ID NO: 19265
  source 1..170: mol_type = other DNA

SEQ ID NO: 19267 - DNA, 97 bp, synthetic construct
  source 1..97: mol_type = other DNA
tttgttcaatcattaagaagagttttagtactctggaaacagaatctactaaaacaaggcaaaatgccgtgtttatctcgtcaacttgttggcgaga

SEQ ID NO: 19268 - DNA, 96 bp, synthetic construct
  source 1..96: mol_type = other DNA
ctgggaggtgtccacgtgaggttttagagctagaaatagcaagttaaaataaggctagtccgttatcaacttgaaaaagtggcaccgagtcggtgc

SEQ ID NO: 19269 - DNA, 96 bp, synthetic construct
  source 1..96: mol_type = other DNA
ttgttcaatcattaagaagagttttagagctagaaatagcaagttaaaataaggctagtccgttatcaacttgaaaaagtggcaccgagtcggtgc

SEQ ID NO: 19270 - DNA, 170 bp, synthetic construct
  source 1..170: mol_type = other DNA
tcctgggaggtgtccacgtgagcgctatagttccttactgaaaggtaagttgctatagtaagggcaacagacccgaggcgttggggatcgcctagcccgtgtttacgggctctccccatattcaaaataatgacagacgagcaccttggagcatttatctccgaggtgct

SEQ ID NO: 19271 - DNA, 170 bp, synthetic construct; identical to SEQ ID NO: 19270
  source 1..170: mol_type = other DNA

SEQ ID NO: 19272 - DNA, 96 bp, synthetic construct
  source 1..96: mol_type = other DNA
tgttcaatcattaagaagacgttttagagctagaaatagcaagttaaaataaggctagtccgttatcaacttgaaaaagtggcaccgagtcggtgc

SEQ ID NO: 19273 - DNA, 96 bp, synthetic construct
  source 1..96: mol_type = other DNA
tgggaggtgtccacgtgagcgttttagagctagaaatagcaagttaaaataaggctagtccgttatcaacttgaaaaagtggcaccgagtcggtgc

SEQ ID NO: 19274 - DNA, 96 bp, synthetic construct
  source 1..96: mol_type = other DNA
gggaggtgtccacgtgagccgttttagagctagaaatagcaagttaaaataaggctagtccgttatcaacttgaaaaagtggcaccgagtcggtgc

SEQ ID NO: 19275 - DNA, 96 bp, synthetic construct
  source 1..96: mol_type = other DNA
gttcaatcattaagaagacagttttagagctagaaatagcaagttaaaataaggctagtccgttatcaacttgaaaaagtggcaccgagtcggtgc

SEQ ID NO: 19276 - DNA, 170 bp, synthetic construct; identical to SEQ ID NO: 19265
  source 1..170: mol_type = other DNA

SEQ ID NO: 19277 - DNA, 96 bp, synthetic construct
  source 1..96: mol_type = other DNA
ggaggtgtccacgtgagcctgttttagagctagaaatagcaagttaaaataaggctagtccgttatcaacttgaaaaagtggcaccgagtcggtgc

SEQ ID NO: 19278 - DNA, 96 bp, synthetic construct
  source 1..96: mol_type = other DNA
ttcaatcattaagaagacaagttttagagctagaaatagcaagttaaaataaggctagtccgttatcaacttgaaaaagtggcaccgagtcggtgc

SEQ ID NO: 19279 - DNA, 96 bp, synthetic construct
  source 1..96: mol_type = other DNA
tcaatcattaagaagacaaagttttagagctagaaatagcaagttaaaataaggctagtccgttatcaacttgaaaaagtggcaccgagtcggtgc

SEQ ID NO: 19280 - DNA, 96 bp, synthetic construct
  source 1..96: mol_type = other DNA
gaggtgtccacgtgagccttgttttagagctagaaatagcaagttaaaataaggctagtccgttatcaacttgaaaaagtggcaccgagtcggtgc

SEQ ID NO: 19281 - DNA, 170 bp, synthetic construct
  source 1..170: mol_type = other DNA
ctgggaggtgtccacgtgagcctgctatagttccttactgaaaggtaagttgctatagtaagggcaacagacccgaggcgttggggatcgcctagcccgtgtttacgggctctccccatattcaaaataatgacagacgagcaccttggagcatttatctccgaggtgct

SEQ ID NO: 19282 - DNA, 170 bp, synthetic construct; identical to SEQ ID NO: 19281
  source 1..170: mol_type = other DNA

SEQ ID NO: 19283 - DNA, 145 bp, synthetic construct
  source 1..145: mol_type = other DNA
gaggtgtccacgtgagccttgctcgttgtagctccctttctcatttcggaaacgaaatgagaaccgttgctacaataaggccgtctgaaaagatgtgccgcaacgctctgccccttaaagcttctgctttaaggggcatcgttta

SEQ ID NO: 19284 - DNA, 96 bp, synthetic construct; identical to SEQ ID NO: 19277
  source 1..96: mol_type = other DNA

SEQ ID NO: 19285 - DNA, 96 bp, synthetic construct
  source 1..96: mol_type = other DNA
caatcattaagaagacaaaggttttagagctagaaatagcaagttaaaataaggctagtccgttatcaacttgaaaaagtggcaccgagtcggtgc

SEQ ID NO: 19286 - DNA, 96 bp, synthetic construct
  source 1..96: mol_type = other DNA
aggtgtccacgtgagccttggttttagagctagaaatagcaagttaaaataaggctagtccgttatcaacttgaaaaagtggcaccgagtcggtgc

SEQ ID NO: 19287 - DNA, 96 bp, synthetic construct; identical to SEQ ID NO: 19285
  source 1..96: mol_type = other DNA

SEQ ID NO: 19288 - DNA, 170 bp, synthetic construct; identical to SEQ ID NO: 19281
  source 1..170: mol_type = other DNA

SEQ ID NO: 19289 - DNA, 170 bp, synthetic construct; identical to SEQ ID NO: 19281
  source 1..170: mol_type = other DNA

SEQ ID NO: 19290 - DNA, 170 bp, synthetic construct
  source 1..170: mol_type = other DNA
cattaagaagacaaagggtttgtgctatagttccttactgaaaggtaagttgctatagtaagggcaacagacccgaggcgttggggatcgcctagcccgtgtttacgggctctccccatattcaaaataatgacagacgagcaccttggagcatttatctccgaggtgct

SEQ ID NO: 19291 - DNA, 145 bp, synthetic construct; identical to SEQ ID NO: 19283
  source 1..145: mol_type = other DNA

SEQ ID NO: 19292 - DNA, 145 bp, synthetic construct
  source 1..145: mol_type = other DNA
aagaagacaaagggtttgttgaacgttgtagctccctttctcatttcggaaacgaaatgagaaccgttgctacaataaggccgtctgaaaagatgtgccgcaacgctctgccccttaaagcttctgctttaaggggcatcgttta

SEQ ID NO: 19293 - DNA, 96 bp, synthetic construct
  source 1..96: mol_type = other DNA
ggtgtccacgtgagccttgcgttttagagctagaaatagcaagttaaaataaggctagtccgttatcaacttgaaaaagtggcaccgagtcggtgc

SEQ ID NO: 19294 - DNA, 96 bp, synthetic construct; identical to SEQ ID NO: 19293
  source 1..96: mol_type = other DNA

SEQ ID NO: 19295 - DNA, 96 bp, synthetic construct
  source 1..96: mol_type = other DNA
tcattaagaagacaaagggtgttttagagctagaaatagcaagttaaaataaggctagtccgttatcaacttgaaaaagtggcaccgagtcggtgc

SEQ ID NO: 19296 - DNA, 96 bp, synthetic construct
  source 1..96: mol_type = other DNA
aatcattaagaagacaaagggttttagagctagaaatagcaagttaaaataaggctagtccgttatcaacttgaaaaagtggcaccgagtcggtgc

SEQ ID NO: 19297 - DNA, 170 bp, synthetic construct; identical to SEQ ID NO: 19290
  source 1..170: mol_type = other DNA

SEQ ID NO: 19298 - DNA, 170 bp, synthetic construct
  source 1..170: mol_type = other DNA
aggtgtccacgtgagccttgctcgctatagttccttactgaaaggtaagttgctatagtaagggcaacagacccgaggcgttggggatcgcctagcccgtgtttacgggctctccccatattcaaaataatgacagacgagcaccttggagcatttatctccgaggtgct

SEQ ID NO: 19299 - DNA, 170 bp, synthetic construct; identical to SEQ ID NO: 19290
  source 1..170: mol_type = other DNA

SEQ ID NO: 19300 - DNA, 97 bp, synthetic construct
  source 1..97: mol_type = other DNA
cattaagaagacaaagggtttgttttagtactctggaaacagaatctactaaaacaaggcaaaatgccgtgtttatctcgtcaacttgttggcgaga

SEQ ID NO: 19301 - DNA, 97 bp, synthetic construct
  source 1..97: mol_type = other DNA
ggtgtccacgtgagccttgctgttttagtactctggaaacagaatctactaaaacaaggcaaaatgccgtgtttatctcgtcaacttgttggcgaga

SEQ ID NO: 19302 - DNA, 96 bp, synthetic construct
  source 1..96: mol_type = other DNA
gtgtccacgtgagccttgctgttttagagctagaaatagcaagttaaaataaggctagtccgttatcaacttgaaaaagtggcaccgagtcggtgc

SEQ ID NO: 19303 - DNA, 96 bp, synthetic construct
  source 1..96: mol_type = other DNA
atcattaagaagacaaaggggttttagagctagaaatagcaagttaaaataaggctagtccgttatcaacttgaaaaagtggcaccgagtcggtgc

SEQ ID NO: 19304 - DNA, 97 bp, synthetic construct; identical to SEQ ID NO: 19301
  source 1..97: mol_type = other DNA

SEQ ID NO: 19305 - DNA, 97 bp, synthetic construct; identical to SEQ ID NO: 19301
  source 1..97: mol_type = other DNA

SEQ ID NO: 19306 - DNA, 96 bp, synthetic construct
  source 1..96: mol_type = other DNA
cattaagaagacaaagggttgttttagagctagaaatagcaagttaaaataaggctagtccgttatcaacttgaaaaagtggcaccgagtcggtgc

SEQ ID NO: 19307 - DNA, 96 bp, synthetic construct; identical to SEQ ID NO: 19295
  source 1..96: mol_type = other DNA

SEQ ID NO: 19308 - DNA, 96 bp, synthetic construct
  source 1..96: mol_type = other DNA
tgtccacgtgagccttgctcgttttagagctagaaatagcaagttaaaataaggctagtccgttatcaacttgaaaaagtggcaccgagtcggtgc

SEQ ID NO: 19309 - DNA, 96 bp, synthetic construct; identical to SEQ ID NO: 19295
  source 1..96: mol_type = other DNA

SEQ ID NO: 19310 - DNA, 96 bp, synthetic construct; identical to SEQ ID NO: 19306
  source 1..96: mol_type = other DNA

SEQ ID NO: 19311 - DNA, 96 bp, synthetic construct
  source 1..96: mol_type = other DNA
gtccacgtgagccttgctcggttttagagctagaaatagcaagttaaaataaggctagtccgttatcaacttgaaaaagtggcaccgagtcggtgc

SEQ ID NO: 19312 - DNA, 96 bp, synthetic construct; identical to SEQ ID NO: 19306
  source 1..96: mol_type = other DNA

SEQ ID NO: 19313 - DNA, 96 bp, synthetic construct
  source 1..96: mol_type = other DNA
attaagaagacaaagggtttgttttagagctagaaatagcaagttaaaataaggctagtccgttatcaacttgaaaaagtggcaccgagtcggtgc

SEQ ID NO: 19314 - DNA, 96 bp, synthetic construct
  source 1..96: mol_type = other DNA
tccacgtgagccttgctcgagttttagagctagaaatagcaagttaaaataaggctagtccgttatcaacttgaaaaagtggcaccgagtcggtgc

SEQ ID NO: 19315 - DNA, 170 bp, synthetic construct
  source 1..170: mol_type = other DNA
ggtgtccacgtgagccttgctcggctatagttccttactgaaaggtaagttgctatagtaagggcaacagacccgaggcgttggggatcgcctagcccgtgtttacgggctctccccatattcaaaataatgacagacgagcaccttggagcatttatctccgaggtgct

SEQ ID NO: 19316 - DNA, 170 bp, synthetic construct; identical to SEQ ID NO: 19290
  source 1..170: mol_type = other DNA

SEQ ID NO: 19317 - DNA, 170 bp, synthetic construct; identical to SEQ ID NO: 19315
  source 1..170: mol_type = other DNA

SEQ ID NO: 19318 - DNA, 170 bp, synthetic construct; identical to SEQ ID NO: 19290
  source 1..170: mol_type = other DNA

SEQ ID NO: 19319 - DNA, 96 bp, synthetic construct
  source 1..96: mol_type = other DNA
ttaagaagacaaagggtttggttttagagctagaaatagcaagttaaaataaggctagtccgttatcaacttgaaaaagtggcaccgagtcggtgc

SEQ ID NO: 19320 - DNA, 96 bp, synthetic construct; identical to SEQ ID NO: 19319
  source 1..96: mol_type = other DNA

SEQ ID NO: 19321 - DNA, 96 bp, synthetic construct; identical to SEQ ID NO: 19314
  source 1..96: mol_type = other DNA

SEQ ID NO: 19322 - DNA, 96 bp, synthetic construct
  source 1..96: mol_type = other DNA
ccacgtgagccttgctcgaggttttagagctagaaatagcaagttaaaataaggctagtccgttatcaacttgaaaaagtggcaccgagtcggtgc

SEQ ID NO: 19323 - DNA, 96 bp, synthetic construct
  source 1..96: mol_type = other DNA
acgtgagccttgctcgaggcgttttagagctagaaatagcaagttaaaataaggctagtccgttatcaacttgaaaaagtggcaccgagtcggtgc

SEQ ID NO: 19324 - DNA, 96 bp, synthetic construct
  source 1..96: mol_type = other DNA
cacgtgagccttgctcgagggttttagagctagaaatagcaagttaaaataaggctagtccgttatcaacttgaaaaagtggcaccgagtcggtgc

SEQ ID NO: 19325 - DNA, 96 bp, synthetic construct
  source 1..96: mol_type = other DNA
taagaagacaaagggtttgtgttttagagctagaaatagcaagttaaaataaggctagtccgttatcaacttgaaaaagtggcaccgagtcggtgc

SEQ ID NO: 19326 - DNA, 97 bp, synthetic construct
  source 1..97: mol_type = other DNA
cacgtgagccttgctcgaggcgttttagtactctggaaacagaatctactaaaacaaggcaaaatgccgtgtttatctcgtcaacttgttggcgaga

SEQ ID NO: 19327 - DNA, 96 bp, synthetic construct; identical to SEQ ID NO: 19325
  source 1..96: mol_type = other DNA

SEQ ID NO: 19328 - DNA, 96 bp, synthetic construct
  source 1..96: mol_type = other DNA
aagaagacaaagggtttgttgttttagagctagaaatagcaagttaaaataaggctagtccgttatcaacttgaaaaagtggcaccgagtcggtgc

SEQ ID NO: 19329 - DNA, 96 bp, synthetic construct; identical to SEQ ID NO: 19323
  source 1..96: mol_type = other DNA

SEQ ID NO: 19330 - DNA, 170 bp, synthetic construct
  source 1..170: mol_type = other DNA
acgtgagccttgctcgaggcctggctatagttccttactgaaaggtaagttgctatagtaagggcaacagacccgaggcgttggggatcgcctagcccgtgtttacgggctctccccatattcaaaataatgacagacgagcaccttggagcatttatctccgaggtgct

SEQ ID NO: 19331 - DNA, 97 bp, synthetic construct
  source 1..97: mol_type = other DNA
acgtgagccttgctcgaggccgttttagtactctggaaacagaatctactaaaacaaggcaaaatgccgtgtttatctcgtcaacttgttggcgaga

SEQ ID NO: 19332 - DNA, 96 bp, synthetic construct; identical to SEQ ID NO: 19319
  source 1..96: mol_type = other DNA

SEQ ID NO: 19333 - DNA, 96 bp, synthetic construct
  source 1..96: mol_type = other DNA
gggtttgttgaacttgacctgttttagagctagaaatagcaagttaaaataaggctagtccgttatcaacttgaaaaagtggcaccgagtcggtgc

SEQ ID NO: 19334 - DNA, 96 bp, synthetic construct
  source 1..96: mol_type = other DNA
agaagacaaagggtttgttggttttagagctagaaatagcaagttaaaataaggctagtccgttatcaacttgaaaaagtggcaccgagtcggtgc

SEQ ID NO: 19335 - DNA, 96 bp, synthetic construct
  source 1..96: mol_type = other DNA
cgtgagccttgctcgaggccgttttagagctagaaatagcaagttaaaataaggctagtccgttatcaacttgaaaaagtggcaccgagtcggtgc

SEQ ID NO: 19336 - DNA, 96 bp, synthetic construct; identical to SEQ ID NO: 19325
  source 1..96: mol_type = other DNA

SEQ ID NO: 19337 - DNA, 96 bp, synthetic construct; identical to SEQ ID NO: 19335
  source 1..96: mol_type = other DNA

SEQ ID NO: 19338 - DNA, 97 bp, synthetic construct
  source 1..97: mol_type = other DNA
aagggtttgttgaacttgaccgttttagtactctggaaacagaatctactaaaacaaggcaaaatgccgtgtttatctcgtcaacttgttggcgaga

SEQ ID NO: 19339 - DNA, 97 bp, synthetic construct; identical to SEQ ID NO: 19338
  source 1..97: mol_type = other DNA

SEQ ID NO: 19340 - DNA, 96 bp, synthetic construct
  source 1..96: mol_type = other DNA
gtgagccttgctcgaggcctgttttagagctagaaatagcaagttaaaataaggctagtccgttatcaacttgaaaaagtggcaccgagtcggtgc

SEQ ID NO: 19341 - DNA, 96 bp, synthetic construct; identical to SEQ ID NO: 19340
  source 1..96: mol_type = other DNA

SEQ ID NO: 19342 - DNA, 96 bp, synthetic construct
  source 1..96: mol_type = other DNA
agacaaagggtttgttgaacgttttagagctagaaatagcaagttaaaataaggctagtccgttatcaacttgaaaaagtggcaccgagtcggtgc

SEQ ID NO: 19343 - DNA, 96 bp, synthetic construct
  source 1..96: mol_type = other DNA
gaagacaaagggtttgttgagttttagagctagaaatagcaagttaaaataaggctagtccgttatcaacttgaaaaagtggcaccgagtcggtgc

SEQ ID NO: 19344 - DNA, 170 bp, synthetic construct
  source 1..170: mol_type = other DNA
agaagacaaagggtttgttgaacgctatagttccttactgaaaggtaagttgctatagtaagggcaacagacccgaggcgttggggatcgcctagcccgtgtttacgggctctccccatattcaaaataatgacagacgagcaccttggagcatttatctccgaggtgct

SEQ ID NO: 19345 - DNA, 170 bp, synthetic construct; identical to SEQ ID NO: 19344
  source 1..170: mol_type = other DNA

SEQ ID NO: 19346 - DNA, 97 bp, synthetic construct
  source 1..97: mol_type = other DNA
gaagacaaagggtttgttgaagttttagtactctggaaacagaatctactaaaacaaggcaaaatgccgtgtttatctcgtcaacttgttggcgaga

SEQ ID NO: 19347 - DNA, 97 bp, synthetic construct; identical to SEQ ID NO: 19331
  source 1..97: mol_type = other DNA

SEQ ID NO: 19348 - DNA, 97 bp, synthetic construct; identical to SEQ ID NO: 19338
  source 1..97: mol_type = other DNA

SEQ ID NO: 19349 - DNA, 96 bp, synthetic construct
  source 1..96: mol_type = other DNA
aagacaaagggtttgttgaagttttagagctagaaatagcaagttaaaataaggctagtccgttatcaacttgaaaaagtggcaccgagtcggtgc

SEQ ID NO: 19350 - DNA, 96 bp, synthetic construct
  source 1..96: mol_type = other DNA
tgagccttgctcgaggcctggttttagagctagaaatagcaagttaaaataaggctagtccgttatcaacttgaaaaagtggcaccgagtcggtgc

SEQ ID NO: 19351 - DNA, 170 bp, synthetic construct; identical to SEQ ID NO: 19330
  source 1..170: mol_type = other DNA

SEQ ID NO: 19352 - DNA, 97 bp, synthetic construct
  source 1..97: mol_type = other DNA
gagccttgctcgaggcctggggttttagtactctggaaacagaatctactaaaacaaggcaaaatgccgtgtttatctcgtcaacttgttggcgaga

SEQ ID NO: 19353 - DNA, 97 bp, synthetic construct; identical to SEQ ID NO: 19346
  source 1..97: mol_type = other DNA

SEQ ID NO: 19354 - DNA, 96 bp, synthetic construct
  source 1..96: mol_type = other DNA
gagccttgctcgaggcctgggttttagagctagaaatagcaagttaaaataaggctagtccgttatcaacttgaaaaagtggcaccgagtcggtgc

SEQ ID NO: 19355 - DNA, 96 bp, synthetic construct; identical to SEQ ID NO: 19342
  source 1..96: mol_type = other DNA

SEQ ID NO: 19356 - DNA, 97 bp, synthetic construct; identical to SEQ ID NO: 19346
  source 1..97: mol_type = other DNA

SEQ ID NO: 19357 - DNA, 96 bp, synthetic construct
  source 1..96: mol_type = other DNA
gacaaagggtttgttgaactgttttagagctagaaatagcaagttaaaataaggctagtccgttatcaacttgaaaaagtggcaccgagtcggtgc

SEQ ID NO: 19358 - DNA, 96 bp, synthetic construct
  source 1..96: mol_type = other DNA
agccttgctcgaggcctggggttttagagctagaaatagcaagttaaaataaggctagtccgttatcaacttgaaaaagtggcaccgagtcggtgc

SEQ ID NO: 19359 - DNA, 96 bp, synthetic construct
  source 1..96: mol_type = other DNA
gccttgctcgaggcctgggagttttagagctagaaatagcaagttaaaataaggctagtccgttatcaacttgaaaaagtggcaccgagtcggtgc

SEQ ID NO: 19360 - DNA, 96 bp, synthetic construct
  source 1..96: mol_type = other DNA
acaaagggtttgttgaacttgttttagagctagaaatagcaagttaaaataaggctagtccgttatcaacttgaaaaagtggcaccgagtcggtgc

SEQ ID NO: 19361 - DNA, 170 bp, synthetic construct
  source 1..170: mol_type = other DNA
tgagccttgctcgaggcctgggagctatagttccttactgaaaggtaagttgctatagtaagggcaacagacccgaggcgttggggatcgcctagcccgtgtttacgggctctccccatattcaaaataatgacagacgagcaccttggagcatttatctccgaggtgct

SEQ ID NO: 19362 - DNA, 145 bp, synthetic construct
  source 1..145: mol_type = other DNA
gtgagccttgctcgaggcctgggagttgtagctccctttctcatttcggaaacgaaatgagaaccgttgctacaataaggccgtctgaaaagatgtgccgcaacgctctgccccttaaagcttctgctttaaggggcatcgttta

SEQ ID NO: 19363 - DNA, 96 bp, synthetic construct
  source 1..96: mol_type = other DNA
cttgctcgaggcctgggatcgttttagagctagaaatagcaagttaaaataaggctagtccgttatcaacttgaaaaagtggcaccgagtcggtgc

SEQ ID NO: 19364 - DNA, 96 bp, synthetic construct; identical to SEQ ID NO: 19357
  source 1..96: mol_type = other DNA

SEQ ID NO: 19365 - DNA, 96 bp, synthetic construct
  source 1..96: mol_type = other DNA
ccttgctcgaggcctgggatgttttagagctagaaatagcaagttaaaataaggctagtccgttatcaacttgaaaaagtggcaccgagtcggtgc

SEQ ID NO: 19366 - DNA, 96 bp, synthetic construct
  source 1..96: mol_type = other DNA
caaagggtttgttgaacttggttttagagctagaaatagcaagttaaaataaggctagtccgttatcaacttgaaaaagtggcaccgagtcggtgc

SEQ ID NO: 19367 - DNA, 170 bp, synthetic construct
  source 1..170: mol_type = other DNA
gagccttgctcgaggcctgggatgctatagttccttactgaaaggtaagttgctatagtaagggcaacagacccgaggcgttggggatcgcctagcccgtgtttacgggctctccccatattcaaaataatgacagacgagcaccttggagcatttatctccgaggtgct

SEQ ID NO: 19368 - DNA, 170 bp, synthetic construct; identical to SEQ ID NO: 19367
  source 1..170: mol_type = other DNA

SEQ ID NO: 19369 - DNA, 145 bp, synthetic construct; identical to SEQ ID NO: 19362
  source 1..145: mol_type = other DNA

SEQ ID NO: 19370 - DNA, 96 bp, synthetic construct; identical to SEQ ID NO: 19365
  source 1..96: mol_type = other DNA

SEQ ID NO: 19371 - DNA, 96 bp, synthetic construct; identical to SEQ ID NO: 19340
  source 1..96: mol_type = other DNA

SEQ ID NO: 19372 - DNA, 96 bp, synthetic construct; identical to SEQ ID NO: 19363
  source 1..96: mol_type = other DNA

SEQ ID NO: 19373 - DNA, 96 bp, synthetic construct
  source 1..96: mol_type = other DNA
agggtttgttgaacttgaccgttttagagctagaaatagcaagttaaaataaggctagtccgttatcaacttgaaaaagtggcaccgagtcggtgc

SEQ ID NO: 19374 - DNA, 96 bp, synthetic construct
  source 1..96: mol_type = other DNA
aaagggtttgttgaacttgagttttagagctagaaatagcaagttaaaataaggctagtccgttatcaacttgaaaaagtggcaccgagtcggtgc

SEQ ID NO: 19375 - DNA, 96 bp, synthetic construct; identical to SEQ ID NO: 19363
  source 1..96: mol_type = other DNA

SEQ ID NO: 19376 - DNA, 170 bp, synthetic construct; identical to SEQ ID NO: 19367
  source 1..170: mol_type = other DNA

SEQ ID NO: 19377-19431 - skipped (55 entries)

SEQ ID NO: 19432 - DNA, 17 bp, synthetic construct
  source 1..17: mol_type = other DNA
gtcgatggtcagcacag

SEQ ID NO: 19433 - DNA, 17 bp, synthetic construct
  source 1..17: mol_type = other DNA
gaaagggactgaagctg

SEQ ID NO: 19434 - DNA, 17 bp, synthetic construct
  source 1..17: mol_type = other DNA
gaaagggactgaagctg

SEQ ID NO: 19435 - DNA, 17 bp, synthetic construct
  source 1..17: mol_type = other DNA
tcgatggtcagcacagc

SEQ ID NO: 19436 - DNA, 17 bp, synthetic construct
  source 1..17: mol_type = other DNA
aaagggactgaagctgc

SEQ ID NO: 19437 - DNA, 17 bp, synthetic construct
  source 1..17: mol_type = other DNA
aaagggactgaagctgc

SEQ ID NO: 19438 - DNA, 17 bp, synthetic construct
  source 1..17: mol_type = other DNA
cgatggtcagcacagcc

SEQ ID NO: 19439 - DNA, 17 bp, synthetic construct
  source 1..17: mol_type = other DNA
cgatggtcagcacagcc

SEQ ID NO: 19440 - DNA, 17 bp, synthetic construct
  source 1..17: mol_type = other DNA
aaagggactgaagctgc

SEQ ID NO: 19441 - DNA, 17 bp, synthetic construct
  source 1..17: mol_type = other DNA
gatggtcagcacagcct

SEQ ID NO: 19442 - DNA, 17 bp, synthetic construct
  source 1..17: mol_type = other DNA
gatggtcagcacagcct

SEQ ID NO: 19443 - DNA, 17 bp, synthetic construct
  source 1..17: mol_type = other DNA
gatggtcagcacagcct

SEQ ID NO: 19444 - DNA, 17 bp, synthetic construct
  source 1..17: mol_type = other DNA
aagggactgaagctgct

SEQ ID NO: 19445 - DNA, 17 bp, synthetic construct
  source 1..17: mol_type = other DNA
aagggactgaagctgct

SEQ ID NO: 19446 - DNA, 17 bp, synthetic construct
  source 1..17: mol_type = other DNA
atggtcagcacagcctt

SEQ ID NO: 19447 - DNA, 17 bp, synthetic construct
  source 1..17: mol_type = other DNA
agggactgaagctgctg

SEQ ID NO: 19448 - DNA, 17 bp, synthetic construct
  source 1..17: mol_type = other DNA
atggtcagcacagcctt

SEQ ID NO: 19449 - DNA, 17 bp, synthetic construct
  source 1..17: mol_type = other DNA
tcagcacagccttatgc

SEQ ID NO: 19450 - DNA, 17 bp, synthetic construct
  source 1..17: mol_type = other DNA
tcagcacagccttatgc

SEQ ID NO: 19451 - DNA, 17 bp, synthetic construct
  source 1..17: mol_type = other DNA
ctgaagctgctggggcc

SEQ ID NO: 19452 - DNA, 17 bp, synthetic construct
  source 1..17: mol_type = other DNA
ctgaagctgctggggcc

SEQ ID NO: 19453 - DNA, 17 bp, synthetic construct
  source 1..17: mol_type = other DNA
gcacagccttatgcacg

SEQ ID NO: 19454 - DNA, 17 bp, synthetic construct
  source 1..17: mol_type = other DNA
cagccttatgcacggcc

SEQ ID NO: 19455 - DNA, 17 bp, synthetic construct
  source 1..17: mol_type = other DNA
cagccttatgcacggcc

SEQ ID NO: 19456 - DNA, 17 bp, synthetic construct
  source 1..17: mol_type = other DNA
ctgctggggccatgttt

SEQ ID NO: 19457 - DNA, 17 bp, synthetic construct
  source 1..17: mol_type = other DNA
agccttatgcacggcct

SEQ ID NO: 19458 - DNA, 17 bp, synthetic construct
  source 1..17: mol_type = other DNA
agccttatgcacggcct

SEQ ID NO: 19459 - DNA, 17 bp, synthetic construct
  source 1..17: mol_type = other DNA
ctgctggggccatgttt

SEQ ID NO: 19460 - DNA, 17 bp, synthetic construct
  source 1..17: mol_type = other DNA
gcacggcctggagggga

SEQ ID NO: 19461 - DNA, 17 bp, synthetic construct
  source 1..17: mol_type = other DNA
ttttagaggccataccc

SEQ ID NO: 19462 - DNA, 17 bp, synthetic construct
  source 1..17: mol_type = other DNA
ggggagagaagcagaga

SEQ ID NO: 19463 - DNA, 51 bp, synthetic construct; identical to SEQ ID NO: 18169
  source 1..51: mol_type = other DNA

SEQ ID NO: 19464 - DNA, 52 bp, synthetic construct
  source 1..52: mol_type = other DNA
tctgcttctctcccctccaggccgtgcataaggctgtgctgaccattgacga

SEQ ID NO: 19465 - DNA, 52 bp, synthetic construct; identical to SEQ ID NO: 18173
  source 1..52: mol_type = other DNA

SEQ ID NO: 19466 - DNA, 52 bp, synthetic construct; identical to SEQ ID NO: 18172
  source 1..52: mol_type = other DNA

SEQ ID NO: 19467 - DNA, 53 bp, synthetic construct
  source 1..53: mol_type = other DNA
tctgcttctctcccctccaggccgtgcataaggctgtgctgaccatagacgag

SEQ ID NO: 19468 - DNA, 53 bp, synthetic construct; identical to SEQ ID NO: 19467
  source 1..53: mol_type = other DNA

SEQ ID NO: 19469 - DNA, 53 bp, synthetic construct
  source 1..53: mol_type = other DNA
catgggtatggcctctaaaaacatggccccagcagcttcagtccctttttcgt

SEQ ID NO: 19470 - DNA, 53 bp, synthetic construct; identical to SEQ ID NO: 18176
  source 1..53: mol_type = other DNA

SEQ ID NO: 19471 - DNA, 53 bp, synthetic construct; identical to SEQ ID NO: 18177
  source 1..53: mol_type = other DNA

SEQ ID NO: 19472 - DNA, 54 bp, synthetic construct
  source 1..54: mol_type = other DNA
catgggtatggcctctaaaaacatggccccagcagcttcagtccctttttcgtc

SEQ ID NO: 19473 - DNA, 54 bp, synthetic construct; identical to SEQ ID NO: 19472
  source 1..54: mol_type = other DNA

SEQ ID NO: 19474 - DNA, 54 bp, synthetic construct; identical to SEQ ID NO: 18182
  source 1..54: mol_type = other DNA

SEQ ID NO: 19475 - DNA, 54 bp, synthetic construct
  source 1..54: mol_type = other DNA
tctgcttctctcccctccaggccgtgcataaggctgtgctgaccatcgatgaga

SEQ ID NO: 19476 - DNA, 54 bp, synthetic construct; identical to SEQ ID NO: 18186
  source 1..54: mol_type = other DNA

SEQ ID NO: 19477 - DNA, 55 bp, synthetic construct
  source 1..55: mol_type = other DNA
catgggtatggcctctaaaaacatggccccagcagcttcagtccctttttcgtcg

SEQ ID NO: 19478 - DNA, 55 bp, synthetic construct
  source 1..55: mol_type = other DNA
tctgcttctctcccctccaggccgtgcataaggctgtgctgaccatcgatgagaa

SEQ ID NO: 19479 - DNA, 55 bp, synthetic construct
  source 1..55: mol_type = other DNA
catgggtatggcctctaaaaacatggccccagcagcttcagtccccttttcgtcg

SEQ ID NO: 19480 - DNA, 59 bp, synthetic construct
  source 1..59: mol_type = other DNA
catgggtatggcctctaaaaacatggccccagcagcttcagtccctttctcatcgatgg

SEQ ID NO: 19481 - DNA, 59 bp, synthetic construct; identical to SEQ ID NO: 19480
  source 1..59: mol_type = other DNA

SEQ ID NO: 19482 - DNA, 60 bp, synthetic construct
  source 1..60: mol_type = other DNA
tctgcttctctcccctccaggccgtgcataaggctgtgctgaccatcgacgaaaaaggga

SEQ ID NO: 19483 - DNA, 60 bp, synthetic construct; identical to SEQ ID NO: 19482
  source 1..60: mol_type = other DNA

SEQ ID NO: 19484 - DNA, 62 bp, synthetic construct
  source 1..62: mol_type = other DNA
catgggtatggcctctaaaaacatggccccagcagcttcagtccctttctcgtcaatggtca

SEQ ID NO: 19485 - DNA, 65 bp, synthetic construct
  source 1..65: mol_type = other DNA
catgggtatggcctctaaaaacatggccccagcagcttcagtccctttctcgtcgatggtgagca

SEQ ID NO: 19486 - DNA, 65 bp, synthetic construct
  source 1..65: mol_type = other DNA
catgggtatggcctctaaaaacatggccccagcagcttcagtccctttctcgtcgattgtcagca

SEQ ID NO: 19487 - DNA, 66 bp, synthetic construct
  source 1..66: mol_type = other DNA
tctgcttctctcccctccaggccgtgcataaggctgtgctgaccatcgacgagaaaggcactgaag

SEQ ID NO: 19488 - DNA, 66 bp, synthetic construct
  source 1..66: mol_type = other DNA
catgggtatggcctctaaaaacatggccccagcagcttcagtccctttctcgtcgattgtcagcac

SEQ ID NO: 19489 - DNA, 66 bp, synthetic construct
  source 1..66: mol_type = other DNA
catgggtatggcctctaaaaacatggccccagcagcttcagtccctttctcgtcgatggtgagcac

SEQ ID NO: 19490 - DNA, 66 bp, synthetic construct; identical to SEQ ID NO: 19487
  source 1..66: mol_type = other DNA

SEQ ID NO: 19491 - DNA, 74 bp, synthetic construct
  source 1..74: mol_type = other DNA
catgggtatggcctctaaaaacatggccccagcagcttcagtccctttctcgtcgatggtcagcacagctttat

SEQ ID NO: 19492 - DNA, 81 bp, synthetic construct
  source 1..81: mol_type = other DNA
tctgcttctctcccctccaggccgtgcataaggctgtgctgaccatcgacgagaaagggactgaagctgctggggctatgt

SEQ ID NO: 19493 - DNA, 86 bp, synthetic construct
  source 1..86: mol_type = other DNA
catgggtatggcctctaaaaacatggccccagcagcttcagtccctttctcgtcgatggtcagcacagccttatgcacggcttgga

SEQ ID NO: 19494-19524 - skipped (31 entries)

SEQ ID NO: 19525 - protein, 33 aa, synthetic construct; identical to SEQ ID NO: 5006

SEQ ID NO: 19526 - protein, 2146 aa, synthetic construct
PAAKRVKLDGGKRTADGSEFESPKKKRKVDKKYSIGLDIGTNSVGWAVITDEYKVPSKKFKVLGNTDRHSIKKNLIGALLFDSGETAEATRLKRTARRRYTRRKNRICYLQEIFSNEMAKVDDSFFHRLEESFLVEEDKKHERHPIFGNIVDEVAYHEKYPTIYHLRKKLVDSTDKADLRLIYLALAHMIKFRGHFLIEGDLNPDNSDVDKLFIQLVQTYNQLFEENPINASGVDAKAILSARLSKSRRLENLIAQLPGEKKNGLFGNLIALSLGLTPNFKSNFDLAEDAKLQLSKDTYDDDLDNLLAQIGDQYADLFLAAKNLSDAILLSDILRVNTEITKAPLSASMIKRYDEHHQDLTLLKALVRQQLPEKYKEIFFDQSKNGYAGYIDGGASQEEFYKFIKPILEKMDGTEELLVKLNREDLLRKQRTFDNGSIPHQIHLGELHAILRRQEDFYPFLKDNREKIEKILTFRIPYYVGPLARGNSRFAWMTRKSEETITPWNFEEVVDKGASAQSFIERMTNFDKNLPNEKVLPKHSLLYEYFTVYNELTKVKYVTEGMRKPAFLSGEQKKAIVDLLFKTNRKVTVKQLKEDYFKKIECFDSVEISGVEDRFNASLGTYHDLLKIIKDKDFLDNEENEDILEDIVLTLTLFEDREMIEERLKTYAHLFDDKVMKQLKRRRYTGWGRLSRKLINGIRDKQSGKTILDFLKSDGFANRNFMQLIHDDSLTFKEDIQKAQVSGQGDSLHEHIANLAGSPAIKKGILQTVKVVDELVKVMGRHKPENIVIEMARENQTTQKGQKNSRERMKRIEEGIKELGSQILKEHPVENTQLQNEKLYLYYLQNGRDMYVDQELDINRLSDYDVDAIVPQSFLKDDSIDNKVLTRSDKNRGKSDNVPSEEVVKKMKNYWRQLLNAKLITQRKFDNLTKAERGGLSELDKAGFIKRQLVETRQITKHVAQILDSRMNTKYDENDKLIREVKVITLKSKLVSDFRKDFQFYKVREINNYHHAHDAYLNAVVGTALIKKYPKLESEFVYGDYKVYDVRKMIAKSEQEIGKATAKYFFYSNIMNFFKTEITLANGEIRKRPLIETNGETGEIVWDKGRDFATVRKVLSMPQVNIVKKTEVQTGGFSKESILPKRNSDKLIARKKDWDPKKYGGFDSPTVAYSVLVVAKVEKGKSKKLKSVKELLGITIMERSSFEKNPIDFLEAKGYKEVKKDLIIKLPKYSLFELENGRKRMLASAGELQKGNELALPSKYVNFLYLASHYEKLKGSPEDNEQKQLFVEQHKHYLDEIIEQISEFSKRVILADANLDKVLSAYNKHRDKPIREQAENIIHLFTLTNLGAPAAFKYFDTTIDRKRYTSTKEVLDATLIHQSITGLYETRIDLSQLGGDSGGSSGGSSGSETPGTSESATPESSGGSSGGSSTLNIEDEYRLHETSKEPDVSLGSTWLSDFPQAWAETGGMGLAVRQAPLIIPLKATSTPVSIKQYPMSQEARLGIKPHIQRLLDQGILVPCQSPWNTPLLPVKKPGTNDYRPVQDLREVNKRVEDIHPTVPNPYNLLSGLPPSHQWYTVLDLKDAFFCLRLHPTSQPLFAFEWRDPEMGISGQLTWTRLPQGFKNSPTLFNEALHRDLADFRIQHPDLILLQYVDDLLLAATSELDCQQGTRALLQTLGNLGYRASAKKAQICQKQVKYLGYLLKEGQRWLTEARKETVMGQPTPKTPRQLREFLGKAGFCRLFIPGFAEMAAPLYPLTKPGTLFNWGPDQQKAYQEIKQALLTAPALGLPDLTKPFELFVDEKQGYAKGVLTQKLGPWRRPVAYLSKKLDPVAAGWPPCLRMVAAIAVLTKDAGKLTMGQPLVILAPHAVEALVKQPPDRWLSNARMTHYQALLLDTDRVQFGPVVALNPATLLPLPEEGLQHNCLDILAEAHGTRPDLTDQPLPDADHTWYTDGSSLLQEGQRKAGAAVTTETEVIWAKALPAGTSAQRAELIALTQALKMAEGKKLNVYTDSRYAFATAHIHGEIYRRRGWLTSEGKEIKNKDEILALLKALFLPKRLSIIHCPGHQKGHSAEARGNRMADQAARKAAITETPDTSTLLIENSSPSGGSKRTADGSEKRTADSQHSTPPKTKRKVEFEPKKKRKV

SEQ ID NO: 19527 - RNA, 136 nt, synthetic construct
  source 1..136: mol_type = other RNA
tcccctccaggccgtgcatagttttagagctagaaatagcaagttaaaataaggctagtccgttatcaacttgaaaaagtggcaccgagtcggtcctctcgtcgatggtcagcacagctttatgcacggcctggag

SEQ ID NO: 19528 - RNA, 100 nt, synthetic construct
  source 1..100: mol_type = other RNA
ggtttgttgaacttgacctgttttagagctagaaatagcaagttaaaataaggctagtccgttatcaacttgaaaaagtggcaccgagtcggtgcttttt

SEQ ID NO: 19529 - RNA, 136 nt, synthetic construct; identical to SEQ ID NO: 19527
  source 1..136: mol_type = other RNA

SEQ ID NO: 19530 - RNA, 100 nt, synthetic construct; identical to SEQ ID NO: 19528
  source 1..100: mol_type = other RNA

SEQ ID NO: 19531 - protein, 33 aa, synthetic construct; identical to SEQ ID NO: 5006

SEQ ID NO: 19532 - protein, 2146 aa, synthetic construct; identical to SEQ ID NO: 19526

SEQ ID NO: 19533 - RNA, 136 nt, synthetic construct; identical to SEQ ID NO: 19527
  source 1..136: mol_type = other RNA

SEQ ID NO: 19534 - RNA, 100 nt, synthetic construct; identical to SEQ ID NO: 19528
  source 1..100: mol_type = other RNA

SEQ ID NO: 19535 - RNA, 122 nt, synthetic construct
  source 1..122: mol_type = other RNA
  modified_base 1: mod_base = OTHER; note = 2'O-methyl guanosine phosphorothioate
  modified_base 2: mod_base = OTHER; note = 2'O-methyl guanosine phosphorothioate
  modified_base 3: mod_base = OTHER; note = 2'O-methyl adenosine phosphorothioate
  modified_base 29: mod_base = OTHER; note = 2'O-methyl guanosine
  modified_base 30: mod_base = OTHER; note = 2'O-methyl cytidine
  modified_base 31: mod_base = OTHER; note = 2'O-methyl uridine
  modified_base 32: mod_base = OTHER; note = 2'O-methyl adenosine
  modified_base 33: mod_base = OTHER; note = 2'O-methyl guanosine
  modified_base 34: mod_base = OTHER; note = 2'O-methyl adenosine
  modified_base 35: mod_base = OTHER; note = 2'O-methyl adenosine
  modified_base 36: mod_base = OTHER; note = 2'O-methyl adenosine
  modified_base 37: mod_base = OTHER; note = 2'O-methyl uridine
  modified_base 38: mod_base = OTHER; note = 2'O-methyl adenosine
  modified_base 39: mod_base = OTHER; note = 2'O-methyl guanosine
  modified_base 40: mod_base = OTHER; note = 2'O-methyl cytidine
  modified_base 69: mod_base = OTHER; note = 2'O-methyl adenosine
  modified_base 70: mod_base = OTHER; note = 2'O-methyl cytidine
  modified_base 71: mod_base = OTHER; note = 2'O-methyl uridine
  modified_base 72: mod_base = OTHER; note = 2'O-methyl uridine
  modified_base 73: mod_base = OTHER; note = 2'O-methyl guanosine
  modified_base 74: mod_base = OTHER; note = 2'O-methyl adenosine
  modified_base 75: mod_base = OTHER; note = 2'O-methyl adenosine
  modified_base 76: mod_base = OTHER; note = 2'O-methyl adenosine
  modified_base 77: mod_base = OTHER; note = 2'O-methyl adenosine
  modified_base 78: mod_base = OTHER; note = 2'O-methyl adenosine
  modified_base 79: mod_base = OTHER; note = 2'O-methyl guanosine
  modified_base 80: mod_base = OTHER; note = 2'O-methyl uridine
  modified_base 81: mod_base = OTHER; note = 2'O-methyl guanosine
  modified_base 82: mod_base = OTHER; note = 2'O-methyl guanosine
  modified_base 83: mod_base = OTHER; note = 2'O-methyl cytidine
  modified_base 84: mod_base = OTHER; note = 2'O-methyl adenosine
  modified_base 85: mod_base = OTHER; note = 2'O-methyl cytidine
  modified_base 86: mod_base = OTHER; note = 2'O-methyl cytidine
  modified_base 87: mod_base = OTHER; note = 2'O-methyl guanosine
  modified_base 88: mod_base = OTHER; note = 2'O-methyl adenosine
  modified_base 89: mod_base = OTHER; note = 2'O-methyl guanosine
  modified_base 90: mod_base = OTHER; note = 2'O-methyl uridine
  modified_base 91: mod_base = OTHER; note = 2'O-methyl cytidine
  modified_base 92: mod_base = OTHER; note = 2'O-methyl guanosine
  modified_base 93: mod_base = OTHER; note = 2'O-methyl guanosine
  modified_base 94: mod_base = OTHER; note = 2'O-methyl uridine
  modified_base 95: mod_base = OTHER; note = 2'O-methyl guanosine
  modified_base 96: mod_base = OTHER; note = 2'O-methyl cytidine
  modified_base 119: mod_base = OTHER; note = guanosine phosphorothioate
  modified_base 120: mod_base = OTHER; note = 2'O-methyl guanosine phosphorothioate
  modified_base 121: mod_base = OTHER; note = 2'O-methyl adenosine phosphorothioate
  modified_base 122: mod_base = OTHER; note = 2'O-methyl cytidine
ggatggtcctcatgaacgacgttttagagctagaaatagcaagttaaaataaggctagtccgttatcaacttgaaaaagtggcaccgagtcggtgcttaccgctccagtcgttcatgaggac

SEQ ID NO: 19536 - RNA, 121 nt, synthetic construct
  source 1..121: mol_type = other RNA
  modified_base 1: mod_base = OTHER; note = 2'O-methyl guanosine phosphorothioate
  modified_base 2: mod_base = OTHER; note = 2'O-methyl guanosine phosphorothioate
  modified_base 3: mod_base = OTHER; note = 2'O-methyl adenosine phosphorothioate
  modified_base 29: mod_base = OTHER; note = 2'O-methyl guanosine
  modified_base 30: mod_base = OTHER; note = 2'O-methyl cytidine
  modified_base 31: mod_base = OTHER; note = 2'O-methyl uridine
  modified_base 32: mod_base = OTHER; note = 2'O-methyl adenosine
  modified_base 33: mod_base = OTHER; note = 2'O-methyl guanosine
  modified_base 34: mod_base = OTHER; note = 2'O-methyl adenosine
  modified_base 35: mod_base = OTHER; note = 2'O-methyl adenosine
  modified_base 36: mod_base = OTHER; note = 2'O-methyl adenosine
  modified_base 37: mod_base = OTHER; note = 2'O-methyl uridine
  modified_base 38: mod_base = OTHER; note = 2'O-methyl adenosine
  modified_base 39: mod_base = OTHER; note = 2'O-methyl guanosine
  modified_base 40: mod_base = OTHER; note = 2'O-methyl cytidine
  modified_base 69: mod_base = OTHER; note = 2'O-methyl adenosine
  modified_base 70: mod_base = OTHER; note = 2'O-methyl cytidine
  modified_base 71: mod_base = OTHER; note = 2'O-methyl uridine
  modified_base 72: mod_base = OTHER; note = 2'O-methyl uridine
  modified_base 73: mod_base = OTHER; note = 2'O-methyl guanosine
  modified_base 74: mod_base = OTHER; note = 2'O-methyl adenosine
  modified_base 75: mod_base = OTHER; note = 2'O-methyl adenosine
  modified_base 76: mod_base = OTHER; note = 2'O-methyl adenosine
  modified_base 77: mod_base = OTHER; note = 2'O-methyl adenosine
  modified_base 78: mod_base = OTHER; note = 2'O-methyl adenosine
  modified_base 79: mod_base = OTHER; note = 2'O-methyl guanosine
  modified_base 80: mod_base = OTHER; note = 2'O-methyl uridine
  modified_base 81: mod_base = OTHER; note = 2'O-methyl guanosine
  modified_base 82: mod_base = OTHER; note = 2'O-methyl guanosine
  modified_base 83: mod_base = OTHER; note = 2'O-methyl cytidine
  modified_base 84: mod_base = OTHER; note = 2'O-methyl adenosine
  modified_base 85: mod_base = OTHER; note = 2'O-methyl cytidine
  modified_base 86: mod_base = OTHER; note = 2'O-methyl cytidine
  modified_base 87: mod_base = OTHER; note = 2'O-methyl guanosine
  modified_base 88: mod_base = OTHER; note = 2'O-methyl adenosine
  modified_base 89: mod_base = OTHER; note = 2'O-methyl guanosine
  modified_base 90: mod_base = OTHER; note = 2'O-methyl uridine
  modified_base 91: mod_base = OTHER; note = 2'O-methyl cytidine
  modified_base 92: mod_base = OTHER; note = 2'O-methyl guanosine
  modified_base 93: mod_base = OTHER; note = 2'O-methyl guanosine
  modified_base 94: mod_base = OTHER; note = 2'O-methyl uridine
  modified_base 95: mod_base = OTHER; note = 2'O-methyl guanosine
  modified_base 96: mod_base = OTHER; note = 2'O-methyl cytidine
  modified_base 118: mod_base = OTHER; note = guanosine phosphorothioate
  modified_base 119: mod_base = OTHER; note = 2'O-methyl adenosine phosphorothioate
  modified_base 120: mod_base = OTHER; note = 2'O-methyl guanosine phosphorothioate
  modified_base 121: mod_base = OTHER; note = 2'O-methyl guanosine
ggatggtcctcatgaacgacgttttagagctagaaatagcaagttaaaataaggctagtccgttatcaacttgaaaaagtggcaccgagtcggtgcattaccgctccagtcgttcatgagg

SEQ ID NO: 19537 - RNA, 126 nt, synthetic construct
  source 1..126: mol_type = other RNA
  modified_base 1: mod_base = OTHER; note = 2'O-methyl uridine phosphorothioate
  modified_base 2: mod_base = OTHER; note = 2'O-methyl cytidine phosphorothioate
  modified_base 3: mod_base = OTHER; note = 2'O-methyl adenosine phosphorothioate
  modified_base 29: mod_base = OTHER; note = 2'O-methyl guanosine
  modified_base 30: mod_base = OTHER; note = 2'O-methyl cytidine
  modified_base 31: mod_base = OTHER; note = 2'O-methyl uridine
  modified_base 32: mod_base = OTHER; note = 2'O-methyl adenosine
  modified_base 33: mod_base = OTHER; note = 2'O-methyl guanosine
  modified_base 34: mod_base = OTHER; note = 2'O-methyl adenosine
  modified_base 35: mod_base = OTHER; note = 2'O-methyl adenosine
  modified_base 36: mod_base = OTHER; note = 2'O-methyl adenosine
  modified_base 37: mod_base = OTHER; note = 2'O-methyl uridine
  modified_base 38: mod_base = OTHER; note = 2'O-methyl adenosine
  modified_base 39: mod_base = OTHER; note = 2'O-methyl guanosine
  modified_base 40: mod_base = OTHER; note = 2'O-methyl cytidine
  modified_base 69: mod_base = OTHER; note = 2'O-methyl adenosine
  modified_base 70: mod_base = OTHER; note = 2'O-methyl cytidine
  modified_base 71: mod_base = OTHER; note = 2'O-methyl uridine
  modified_base 72: mod_base = OTHER; note = 2'O-methyl uridine
  modified_base 73: mod_base = OTHER; note = 2'O-methyl guanosine
  modified_base 74: mod_base = OTHER; note = 2'O-methyl adenosine
  modified_base 75: mod_base = OTHER; note = 2'O-methyl adenosine
  modified_base 76: mod_base = OTHER; note = 2'O-methyl adenosine
  modified_base 77: mod_base = OTHER; note = 2'O-methyl adenosine
  modified_base 78: mod_base = OTHER; note = 2'O-methyl adenosine
  modified_base 79: mod_base = OTHER; note = 2'O-methyl guanosine
  modified_base 80: mod_base = OTHER; note = 2'O-methyl uridine
  modified_base 81: mod_base = OTHER; note = 2'O-methyl guanosine
  modified_base 82: mod_base = OTHER; note = 2'O-methyl guanosine
  modified_base 83: mod_base = OTHER; note = 2'O-methyl cytidine
  modified_base 84: mod_base = OTHER; note = 2'O-methyl adenosine
  modified_base 85: mod_base = OTHER; note = 2'O-methyl cytidine
  modified_base 86: mod_base = OTHER; note = 2'O-methyl cytidine
  modified_base 87: mod_base = OTHER; note = 2'O-methyl guanosine
  modified_base 88: mod_base = OTHER; note = 2'O-methyl adenosine
  modified_base 89: mod_base = OTHER; note = 2'O-methyl guanosine
  modified_base 90: mod_base = OTHER; note = 2'O-methyl uridine
  modified_base 91: mod_base = OTHER; note = 2'O-methyl cytidine
  modified_base 92: mod_base = OTHER; note = 2'O-methyl guanosine
  modified_base 93: mod_base = OTHER; note = 2'O-methyl guanosine
  modified_base 94: mod_base = OTHER; note = 2'O-methyl uridine
  modified_base 95: mod_base = OTHER; note = 2'O-methyl guanosine
  modified_base 96: mod_base = OTHER; note = 2'O-methyl cytidine
  modified_base 123: mod_base = OTHER; note = cytidine phosphorothioate
  modified_base 124: mod_base = OTHER; note = 2'O-methyl uridine phosphorothioate
  modified_base 125: mod_base = OTHER; note = 2'O-methyl uridine phosphorothioate
  modified_base 126: mod_base = OTHER; note = 2'O-methyl cytidine
tcagaggaagctgggccaccgttttagagctagaaatagcaagttaaaataaggctagtccgttatcaacttgaaaaagtggcaccgagtcggtgctggagcggtaatggctggtggcccagcttc

SEQ ID NO: 19538 - RNA, 128 nt, synthetic construct
  source 1..128: mol_type = other RNA
  modified_base 1: mod_base = OTHER; note = 2'O-methyl uridine phosphorothioate
  modified_base 2: mod_base = OTHER; note = 2'O-methyl cytidine phosphorothioate
  modified_base 3: mod_base = OTHER; note = 2'O-methyl adenosine phosphorothioate
  modified_base 29: mod_base = OTHER; note = 2'O-methyl guanosine
  modified_base 30: mod_base = OTHER; note = 2'O-methyl cytidine
  modified_base 31: mod_base = OTHER; note = 2'O-methyl uridine
  modified_base 32: mod_base = OTHER; note = 2'O-methyl adenosine
  modified_base 33: mod_base = OTHER; note = 2'O-methyl guanosine
  modified_base 34: mod_base = OTHER; note = 2'O-methyl adenosine
  modified_base 35: mod_base = OTHER; note = 2'O-methyl adenosine
  modified_base 36: mod_base = OTHER; note = 2'O-methyl adenosine
  modified_base 37: mod_base = OTHER; note = 2'O-methyl uridine
  modified_base 38: mod_base = OTHER; note = 2'O-methyl adenosine
  modified_base 39: mod_base = OTHER; note = 2'O-methyl guanosine
  modified_base 40: mod_base = OTHER; note = 2'O-methyl cytidine
  modified_base 69: mod_base = OTHER; note = 2'O-methyl adenosine
  modified_base 70: mod_base = OTHER; note = 2'O-methyl cytidine
  modified_base 71: mod_base = OTHER; note = 2'O-methyl uridine
  modified_base 72: mod_base = OTHER; note = 2'O-methyl uridine
  modified_base 73: mod_base = OTHER; note = 2'O-methyl guanosine
  modified_base 74: mod_base = OTHER; note = 2'O-methyl adenosine
  modified_base 75: mod_base = OTHER; note = 2'O-methyl adenosine
  modified_base 76: mod_base = OTHER; note = 2'O-methyl adenosine
  modified_base 77: mod_base = OTHER; note = 2'O-methyl adenosine
  modified_base 78: mod_base = OTHER; note = 2'O-methyl adenosine
  modified_base 79: mod_base = OTHER; note = 2'O-methyl guanosine
  modified_base 80: mod_base = OTHER; note = 2'O-methyl uridine
  modified_base 81: mod_base = OTHER; note = 2'O-methyl guanosine
  modified_base 82: mod_base = OTHER; note = 2'O-methyl guanosine
  modified_base 83: mod_base = OTHER; note = 2'O-methyl cytidine
  modified_base 84: mod_base = OTHER; note = 2'O-methyl adenosine
  modified_base 85: mod_base = OTHER; note = 2'O-methyl cytidine
  modified_base 86: mod_base = OTHER; note = 2'O-methyl cytidine
  modified_base 87: mod_base = OTHER; note = 2'O-methyl guanosine
  modified_base 88: mod_base = OTHER; note = 2'O-methyl adenosine
  modified_base 89: mod_base = OTHER; note = 2'O-methyl guanosine
  modified_base 90: mod_base = OTHER; note = 2'O-methyl uridine
  modified_base 91: mod_base = OTHER; note = 2'O-methyl cytidine
  modified_base 92: mod_base = OTHER; note = 2'O-methyl guanosine
  modified_base 93: mod_base = OTHER; note = 2'O-methyl guanosine
  modified_base 94: mod_base = OTHER; note = 2'O-methyl uridine
  modified_base 95: mod_base = OTHER; note = 2'O-methyl guanosine
  modified_base 96: mod_base = OTHER; note = 2'O-methyl cytidine
  modified_base 125: mod_base = OTHER; note = uridine phosphorothioate
  modified_base 126: mod_base = OTHER; note = 2'O-methyl cytidine phosphorothioate
  modified_base 127: mod_base = OTHER; note = 2'O-methyl cytidine phosphorothioate
  modified_base 128: mod_base = OTHER; note = 2'O-methyl uridine
tcagaggaagctgggccaccgttttagagctagaaatagcaagttaaaataaggctagtccgttatcaacttgaaaaagtggcaccgagtcggtgctggagcggtaatggctggtggcccagcttcct

SEQ ID NO: 19539 - RNA, 127 nt, synthetic construct
  source 1..127: mol_type = other RNA
  modified_base 1: mod_base = OTHER; note = 2'O-methyl guanosine phosphorothioate
  modified_base 2: mod_base = OTHER; note = 2'O-methyl guanosine phosphorothioate
  modified_base 3: mod_base = OTHER; note = 2'O-methyl adenosine phosphorothioate
  modified_base 29: mod_base = OTHER; note = 2'O-methyl guanosine
  modified_base 30: mod_base = OTHER; note = 2'O-methyl cytidine
  modified_base 31: mod_base = OTHER; note = 2'O-methyl uridine
  modified_base 32: mod_base = OTHER; note = 2'O-methyl adenosine
  modified_base 33: mod_base = OTHER; note = 2'O-methyl guanosine
  modified_base 34: mod_base = OTHER; note = 2'O-methyl adenosine
  modified_base 35: mod_base = OTHER; note = 2'O-methyl adenosine
  modified_base 36: mod_base = OTHER; note = 2'O-methyl adenosine
  modified_base 37: mod_base = OTHER; note = 2'O-methyl uridine
  modified_base 38: mod_base = OTHER; note = 2'O-methyl adenosine
  modified_base 39: mod_base = OTHER; note = 2'O-methyl guanosine
  modified_base 40: mod_base = OTHER; note = 2'O-methyl cytidine
  modified_base 69: mod_base = OTHER; note = 2'O-methyl adenosine
  modified_base 70: mod_base = OTHER; note = 2'O-methyl cytidine
  modified_base 71: mod_base = OTHER; note = 2'O-methyl uridine
  modified_base 72: mod_base = OTHER; note = 2'O-methyl uridine
  modified_base 73: mod_base = OTHER; note = 2'O-methyl guanosine
  modified_base 74: mod_base = OTHER; note = 2'O-methyl adenosine
  modified_base 75: mod_base = OTHER; note = 2'O-methyl adenosine
  modified_base 76: mod_base = OTHER; note = 2'O-methyl adenosine
  modified_base 77: mod_base = OTHER; note = 2'O-methyl adenosine
  modified_base 78: mod_base = OTHER; note = 2'O-methyl adenosine
  modified_base 79: mod_base = OTHER; note = 2'O-methyl guanosine
  modified_base 80: mod_base = OTHER; note = 2'O-methyl uridine
  modified_base 81: mod_base = OTHER; note = 2'O-methyl guanosine
  modified_base 82: mod_base = OTHER; note = 2'O-methyl guanosine
  modified_base 83: mod_base = OTHER; note = 2'O-methyl cytidine
  modified_base 84: mod_base = OTHER; note = 2'O-methyl adenosine
  modified_base 85: mod_base = OTHER; note = 2'O-methyl cytidine
  modified_base 86: mod_base = OTHER; note = 2'O-methyl cytidine
  modified_base 87: mod_base = OTHER; note = 2'O-methyl guanosine
  modified_base 88: mod_base = OTHER; note = 2'O-methyl adenosine
  modified_base 89: mod_base = OTHER; note = 2'O-methyl guanosine
  modified_base 90: mod_base = OTHER; note = 2'O-methyl uridine
  modified_base 91: mod_base = OTHER; note = 2'O-methyl cytidine
  modified_base 92: mod_base = OTHER; note = 2'O-methyl guanosine
  modified_base 93: mod_base = OTHER; note = 2'O-methyl guanosine
  modified_base 94: mod_base = OTHER; note = 2'O-methyl uridine
  modified_base 95: mod_base = OTHER; note = 2'O-methyl guanosine
  modified_base 96: mod_base = OTHER; note = 2'O-methyl cytidine
  modified_base 124: mod_base = OTHER; note = guanosine phosphorothioate
  modified_base 125: mod_base = OTHER; note = 2'O-methyl guanosine phosphorothioate
  modified_base 126: mod_base = OTHER; note = 2'O-methyl adenosine phosphorothioate
  modified_base 127: mod_base = OTHER; note = 2'O-methyl cytidine
ggatggtcctcatgaacgacgttttagagctagaaatagcaagttaaaataaggctagtccgttatcaacttgaaaaagtggcaccgagtcggtgcaggcattaccgctccagtcgttcatgaggac

SEQ ID NO: 19540 - RNA, 125 nt, synthetic construct
  source 1..125: mol_type = other RNA
  modified_base 1: mod_base = OTHER; note = 2'O-methyl guanosine phosphorothioate
  modified_base 2: mod_base = OTHER; note = 2'O-methyl guanosine phosphorothioate
  modified_base 3: mod_base = OTHER; note = 2'O-methyl adenosine phosphorothioate
  modified_base 29: mod_base = OTHER; note = 2'O-methyl guanosine
  modified_base 30: mod_base = OTHER; note = 2'O-methyl cytidine
  modified_base 31: mod_base = OTHER; note = 2'O-methyl uridine
  modified_base 32: mod_base = OTHER; note = 2'O-methyl adenosine
  modified_base 33: mod_base = OTHER; note = 2'O-methyl guanosine
  modified_base 34: mod_base = OTHER; note = 2'O-methyl adenosine
  modified_base 35: mod_base = OTHER; note = 2'O-methyl adenosine
  modified_base 36: mod_base = OTHER; note = 2'O-methyl adenosine
  modified_base 37: mod_base = OTHER; note = 2'O-methyl uridine
  modified_base 38: mod_base = OTHER; note = 2'O-methyl adenosine
  modified_base 39: mod_base = OTHER; note = 2'O-methyl guanosine
  modified_base 40: mod_base = OTHER; note = 2'O-methyl cytidine
  modified_base 69: mod_base = OTHER; note = 2'O-methyl adenosine
  modified_base 70: mod_base = OTHER; note = 2'O-methyl cytidine
  modified_base 71: mod_base = OTHER; note = 2'O-methyl uridine
  modified_base 72: mod_base = OTHER; note = 2'O-methyl uridine
  modified_base 73: mod_base = OTHER; note = 2'O-methyl guanosine
  modified_base 74: mod_base = OTHER; note = 2'O-methyl adenosine
  modified_base 75: mod_base = OTHER; note = 2'O-methyl adenosine
  modified_base 76: mod_base = OTHER; note = 2'O-methyl adenosine
  modified_base 77: mod_base = OTHER; note = 2'O-methyl adenosine
  modified_base 78: mod_base = OTHER; note = 2'O-methyl adenosine
  modified_base 79: mod_base = OTHER; note = 2'O-methyl guanosine
  modified_base 80: mod_base = OTHER; note = 2'O-methyl uridine
  modified_base 81: mod_base = OTHER; note = 2'O-methyl guanosine
  modified_base 82: mod_base = OTHER; note = 2'O-methyl guanosine
  modified_base 83: mod_base = OTHER; note = 2'O-methyl cytidine
  modified_base 84: mod_base = OTHER; note = 2'O-methyl adenosine
  modified_base 85: mod_base = OTHER; note = 2'O-methyl cytidine
  modified_base 86: mod_base = OTHER; note = 2'O-methyl cytidine
  modified_base 87: mod_base = OTHER; note = 2'O-methyl guanosine
  modified_base 88: mod_base = OTHER; note = 2'O-methyl adenosine
  modified_base 89: mod_base = OTHER; note = 2'O-methyl guanosine
  modified_base 90: mod_base = OTHER; note = 2'O-methyl uridine
  modified_base 91: mod_base = OTHER; note = 2'O-methyl cytidine
  modified_base 92: mod_base = OTHER; note = 2'O-methyl guanosine
  modified_base 93: mod_base = OTHER; note = 2'O-methyl guanosine
  modified_base 94: mod_base = OTHER; note = 2'O-methyl uridine
  modified_base 95: mod_base = OTHER; note = 2'O-methyl guanosine
  modified_base 96: mod_base = OTHER; note = 2'O-methyl cytidine
  modified_base 122: mod_base = OTHER; note = guanosine phosphorothioate
  modified_base 123: mod_base = OTHER; note = 2'O-methyl adenosine phosphorothioate
  modified_base 124: mod_base = OTHER; note = 2'O-methyl guanosine phosphorothioate
  modified_base 125: mod_base = OTHER; note = 2'O-methyl guanosine
ggatggtcctcatgaacgacgttttagagctagaaatagcaagttaaaataaggctagtccgttatcaacttgaaaaagtggcaccgagtcggtgcaggcattaccgctccagtcgttcatgagg

SEQ ID NO: 19541 - protein, 2122 aa, synthetic construct
MPAAKRVKLDGGDKKYSIGLDIGTNSVGWAVITDEYKVPSKKFKVLGNTDRHSIKKNLIGALLFDSGETAEATRLKRTARRRYTRRKNRICYLQEIFSNEMAKVDDSFFHRLEESFLVEEDKKHERHPIFGNIVDEVAYHEKYPTIYHLRKKLVDSTDKADLRLIYLALAHMIKFRGHFLIEGDLNPDNSDVDKLFIQLVQTYNQLFEENPINASGVDAKAILSARLSKSRRLENLIAQLPGEKKNGLFGNLIALSLGLTPNFKSNFDLAEDAKLQLSKDTYDDDLDNLLAQIGDQYADLFLAAKNLSDAILLSDILRVNTEITKAPLSASMIKRYDEHHQDLTLLKALVRQQLPEKYKEIFFDQSKNGYAGYIDGGASQEEFYKFIKPILEKMDGTEELLVKLNREDLLRKQRTFDNGSIPHQIHLGELHAILRRQEDFYPFLKDNREKIEKILTFRIPYYVGPLARGNSRFAWMTRKSEETITPWNFEEVVDKGASAQSFIERMTNFDKNLPNEKVLPKHSLLYEYFTVYNELTKVKYVTEGMRKPAFLSGEQKKAIVDLLFKTNRKVTVKQLKEDYFKKIECFDSVEISGVEDRFNASLGTYHDLLKIIKDKDFLDNEENEDILEDIVLTLTLFEDREMIEERLKTYAHLFDDKVMKQLKRRRYTGWGRLSRKLINGIRDKQSGKTILDFLKSDGFANRNFMQLIHDDSLTFKEDIQKAQVSGQGDSLHEHIANLAGSPAIKKGILQTVKVVDELVKVMGRHKPENIVIEMARENQTTQKGQKNSRERMKRIEEGIKELGSQILKEHPVENTQLQNEKLYLYYLQNGRDMYVDQELDINRLSDYDVDHIVPQSFLKDDSIDNKVLTRSDKARGKSDNVPSEEVVKKMKNYWRQLLNAKLITQRKFDNLTKAERGGLSELDKAGFIKRQLVETRQITKHVAQILDSRMNTKYDENDKLIREVKVITLKSKLVSDFRKDFQFYKVREINNYHHAHDAYLNAVVGTALIKKYPKLESEFVYGDYKVYDVRKMIAKSEQEIGKATAKYFFYSNIMNFFKTEITLANGEIRKRPLIETNGETGEIVWDKGRDFATVRKVLSMPQVNIVKKTEVQTGGFSKESILPKRNSDKLIARKKDWDPKKYGGFDSPTVAYSVLVVAKVEKGKSKKLKSVKELLGITIMERSSFEKNPIDFLEAKGYKEVKKDLIIKLPKYSLFELENGRKRMLASAGELQKGNELALPSKYVNFLYLASHYEKLKGSPEDNEQKQLFVEQHKHYLDEIIEQISEFSKRVILADANLDKVLSAYNKHRDKPIREQAENIIHLFTLTNLGAPAAFKYFDTTIDRKRYTSTKEVLDATLIHQSITGLYETRIDLSQLGGDSGGSSGGSSGSETPGTSESATPESSGGSSGGSSTLNIEDEYRLHETSKEPDVSLGSTWLSDFPQAWAETGGMGLAVRQAPLIIPLKATSTPVSIKQYPMSQEARLGIKPHIQRLLDQGILVPCQSPWNTPLLPVKKPGTNDYRPVQDLREVNKRVEDIHPTVPNPYNLLSGLPPSHQWYTVLDLKDAFFCLRLHPTSQPLFAFEWRDPEMGISGQLTWTRLPQGFKNSPTLFNEALHRDLADFRIQHPDLILLQYVDDLLLAATSELDCQQGTRALLQTLGNLGYRASAKKAQICQKQVKYLGYLLKEGQRWLTEARKETVMGQPTPKTPRQLREFLGKAGFCRLFIPGFAEMAAPLYPLTKPGTLFNWGPDQQKAYQEIKQALLTAPALGLPDLTKPFELFVDEKQGYAKGVLTQKLGPWRRPVAYLSKKLDPVAAGWPPCLRMVAAIAVLTKDAGKLTMGQPLVILAPHAVEALVKQPPDRWLSNARMTHYQALLLDTDRVQFGPVVALNPATLLPLPEEGLQHNCLDILAEAHGTRPDLTDQPLPDADHTWYTDGSSLLQEGQRKAGAAVTTETEVIWAKALPAGTSAQRAELIALTQALKMAEGKKLNVYTDSRYAFATAHIHGEIYRRRGWLTSEGKEIKNKDEILALLKALFLPKRLSIIHCPGHQKGHSAEARGNRMADQAARKAAITETPDTSTLLIENSSPSGGSKRTADGSEFEKRTADGSEFESPKKKAKVE

SEQ ID NO: 19542 - protein, 2122 aa, synthetic construct
MPAAKRVKLDGGDKKYSIGLDIGTNSVGWAVITDEYKVPSKKFKVLGNTDRHSIKKNLIGALLFDSGETAEATRLKRTARRRYTRRKNRICYLQEIFSNEMAKVDDSFFHRLEESFLVEEDKKHERHPIFGNIVDEVAYHEKYPTIYHLRKKLVDSTDKADLRLIYLALAHMIKFRGHFLIEGDLNPDNSDVDKLFIQLVQTYNQLFEENPINASGVDAKAILSARLSKSRRLENLIAQLPGEKKNGLFGNLIALSLGLTPNFKSNFDLAEDAKLQLSKDTYDDDLDNLLAQIGDQYADLFLAAKNLSDAILLSDILRVNTEITKAPLSASMIKRYDEHHQDLTLLKALVRQQLPEKYKEIFFDQSKNGYAGYIDGGASQEEFYKFIKPILEKMDGTEELLVKLNREDLLRKQRTFDNGSIPHQIHLGELHAILRRQEDFYPFLKDNREKIEKILTFRIPYYVGPLARGNSRFAWMTRKSEETITPWNFEEVVDKGASAQSFIERMTNFDKNLPNEKVLPKHSLLYEYFTVYNELTKVKYVTEGMRKPAFLSGEQKKAIVDLLFKTNRKVTVKQLKEDYFKKIECFDSVEISGVEDRFNASLGTYHDLLKIIKDKDFLDNEENEDILEDIVLTLTLFEDREMIEERLKTYAHLFDDKVMKQLKRRRYTGWGRLSRKLINGIRDKQSGKTILDFLKSDGFANRNFMQLIHDDSLTFKEDIQKAQVSGQGDSLHEHIANLAGSPAIKKGILQTVKVVDELVKVMGRHKPENIVIEMARENQTTQKGQKNSRERMKRIEEGIKELGSQILKEHPVENTQLQNEKLYLYYLQNGRDMYVDQELDINRLSDYDVDHIVPQSFLKDDSIDNKVLTRSDKNRGKSDNVPSEEVVKKMKNYWRQLLNAKLITQRKFDNLTKAERGGLSELDKAGFIKRQLVETRQITKHVAQILDSRMNTKYDENDKLIREVKVITLKSKLVSDFRKDFQFYKVREINNYHHAHDAYLNAVVGTALIKKYPKLESEFVYGDYKVYDVRKMIAKSEQEIGKATAKYFFYSNIMNFFKTEITLANGEIRKRPLIETNGETGEIVWDKGRDFATVRKVLSMPQVNIVKKTEVQTGGFSKESILPKRNSDKLIARKKDWDPKKYGGFDSPTVAYSVLVVAKVEKGKSKKLKSVKELLGITIMERSSFEKNPIDFLEAKGYKEVKKDLIIKLPKYSLFELENGRKRMLASAGELQKGNELALPSKYVNFLYLASHYEKLKGSPEDNEQKQLFVEQHKHYLDEIIEQISEFSKRVILADANLDKVLSAYNKHRDKPIREQAENIIHLFTLTNLGAPAAFKYFDTTIDRKRYTSTKEVLDATLIHQSITGLYETRIDLSQLGGDSGGSSGGSSGSETPGTSESATPESSGGSSGGSSTLNIEDEYRLHETSKEPDVSLGSTWLSDFPQAWAETGGMGLAVRQAPLIIPLKATSTPVSIKQYPMSQEARLGIKPHIQRLLDQGILVPCQSPWNTPLLPVKKPGTNDYRPVQDLREVNKRVEDIHPTVPNPYNLLSGLPPSHQWYTVLDLKDAFFCLRLHPTSQPLFAFEWRDPEMGISGQLTWTRLPQGFKNSPTLFNEALHRDLADFRIQHPDLILLQYVDDLLLAATSELDCQQGTRALLQTLGNLGYRASAKKAQICQKQVKYLGYLLKEGQRWLTEARKETVMGQPTPKTPRQLREFLGKAGFCRLFIPGFAEMAAPLYPLTKPGTLFNWGPDQQKAYQEIKQALLTAPALGLPDLTKPFELFVDEKQGYAKGVLTQKLGPWRRPVAYLSKKLDPVAAGWPPCLRMVAAIAVLTKDAGKLTMGQPLVILAPHAVEALVKQPPDRWLSNARMTHYQALLLDTDRVQFGPVVALNPATLLPLPEEGLQHNCLDILAEAHGTRPDLTDQPLPDADHTWYTDGSSLLQEGQRKAGAAVTTETEVIWAKALPAGTSAQRAELIALTQALKMAEGKKLNVYTDSRYAFATAHIHGEIYRRRGWLTSEGKEIKNKDEILALLKALFLPKRLSIIHCPGHQKGHSAEARGNRMADQAARKAAITETPDTSTLLIENSSPSGGSKRTADGSEFEKRTADGSEFESPKKKAKVE

SEQ ID NO: 19543 - RNA, 122 nt, synthetic construct; identical to SEQ ID NO: 19535
  source 1..122: mol_type = other RNA
  modified_base 1: mod_base = OTHER; note = 2'O-methyl guanosine phosphorothioate
  modified_base 2: mod_base = OTHER; note = 2'O-methyl guanosine phosphorothioate
  modified_base 3: mod_base = OTHER; note = 2'O-methyl adenosine phosphorothioate
  modified_base 29: mod_base = OTHER; note = 2'O-methyl guanosine
  modified_base 30: mod_base = OTHER; note = 2'O-methyl cytidine
  modified_base 31: mod_base = OTHER; note = 2'O-methyl uridine
  modified_base 32: mod_base = OTHER; note = 2'O-methyl adenosine
  modified_base 33: mod_base = OTHER; note = 2'O-methyl guanosine
  modified_base 34: mod_base = OTHER; note = 2'O-methyl adenosine
  modified_base 35: mod_base = OTHER; note = 2'O-methyl adenosine
  modified_base 36: mod_base = OTHER; note = 2'O-methyl adenosine
  modified_base 37: mod_base = OTHER; note = 2'O-methyl uridine
  modified_base 38: mod_base = OTHER; note = 2'O-methyl adenosine
  modified_base 39: mod_base = OTHER; note = 2'O-methyl guanosine
  modified_base 40: mod_base = OTHER; note = 2'O-methyl cytidine
  modified_base 69: mod_base = OTHER; note = 2'O-methyl adenosine
  modified_base 70: mod_base = OTHER; note = 2'O-methyl cytidine
  modified_base 71: mod_base = OTHER; note = 2'O-methyl uridine
  modified_base 72: mod_base = OTHER; note = 2'O-methyl uridine
  modified_base 73: mod_base = OTHER; note = 2'O-methyl guanosine
  modified_base 74: mod_base = OTHER; note = 2'O-methyl adenosine
  modified_base 75: mod_base = OTHER; note = 2'O-methyl adenosine
  modified_base 76: mod_base = OTHER; note = 2'O-methyl adenosine
  modified_base 77: mod_base = OTHER; note = 2'O-methyl adenosine
  modified_base 78: mod_base = OTHER; note = 2'O-methyl adenosine
  modified_base 79: mod_base = OTHER; note = 2'O-methyl guanosine
  modified_base 80: mod_base = OTHER; note = 2'O-methyl uridine
  modified_base 81: mod_base = OTHER; note = 2'O-methyl guanosine
  modified_base 82: mod_base = OTHER; note = 2'O-methyl guanosine
  modified_base 83: mod_base = OTHER; note = 2'O-methyl cytidine
  modified_base 84: mod_base = OTHER; note = 2'O-methyl adenosine
  modified_base 85: mod_base = OTHER; note = 2'O-methyl cytidine
  modified_base 86: mod_base = OTHER; note = 2'O-methyl cytidine
  modified_base 87: mod_base = OTHER; note = 2'O-methyl guanosine
  modified_base 88: mod_base = OTHER; note = 2'O-methyl adenosine
  modified_base 89: mod_base = OTHER; note = 2'O-methyl guanosine
  modified_base 90: mod_base = OTHER; note = 2'O-methyl uridine
  modified_base 91: mod_base = OTHER; note = 2'O-methyl cytidine
  modified_base 92: mod_base = OTHER; note = 2'O-methyl guanosine
  modified_base 93: mod_base = OTHER; note = 2'O-methyl guanosine
  modified_base 94: mod_base = OTHER; note = 2'O-methyl uridine
  modified_base 95: mod_base = OTHER; note = 2'O-methyl guanosine
  modified_base 96: mod_base = OTHER; note = 2'O-methyl cytidine
  modified_base 119: mod_base = OTHER; note = guanosine phosphorothioate
  modified_base 120: mod_base = OTHER; note = 2'O-methyl guanosine phosphorothioate
  modified_base 121: mod_base = OTHER; note = 2'O-methyl adenosine phosphorothioate
  modified_base 122: mod_base = OTHER; note = 2'O-methyl cytidine

SEQ ID NO: 19544 - RNA, 121 nt, synthetic construct; identical to SEQ ID NO: 19536
  source 1..121: mol_type = other RNA
  modified_base 1: mod_base = OTHER; note = 2'O-methyl guanosine phosphorothioate
  modified_base 2: mod_base = OTHER; note = 2'O-methyl guanosine phosphorothioate
  modified_base 3: mod_base = OTHER; note = 2'O-methyl adenosine phosphorothioate
  modified_base 29: mod_base = OTHER; note = 2'O-methyl guanosine
  modified_base 30: mod_base = OTHER; note = 2'O-methyl cytidine
  modified_base 31: mod_base = OTHER; note = 2'O-methyl uridine
  modified_base 32: mod_base = OTHER; note = 2'O-methyl adenosine
  modified_base 33: mod_base = OTHER; note = 2'O-methyl guanosine
  modified_base 34: mod_base = OTHER; note = 2'O-methyl adenosine
  modified_base 35: mod_base = OTHER; note = 2'O-methyl adenosine
  modified_base 36: mod_base = OTHER; note = 2'O-methyl adenosine
  modified_base 37: mod_base = OTHER; note = 2'O-methyl uridine
  modified_base 38: mod_base = OTHER; note = 2'O-methyl adenosine
  modified_base 39: mod_base = OTHER; note = 2'O-methyl guanosine
  modified_base 40: mod_base = OTHER; note = 2'O-methyl cytidine
  modified_base 69: mod_base = OTHER; note = 2'O-methyl adenosine
  modified_base 70: mod_base = OTHER; note = 2'O-methyl cytidine
  modified_base 71: mod_base = OTHER; note = 2'O-methyl uridine
  modified_base 72: mod_base = OTHER; note = 2'O-methyl uridine
  modified_base 73: mod_base = OTHER; note = 2'O-methyl guanosine
  modified_base 74: mod_base = OTHER; note = 2'O-methyl adenosine
  modified_base 75: mod_base = OTHER; note = 2'O-methyl adenosine
  modified_base 76: mod_base = OTHER; note = 2'O-methyl adenosine
  modified_base 77: mod_base = OTHER; note = 2'O-methyl adenosine
  modified_base 78: mod_base = OTHER; note = 2'O-methyl adenosine
  modified_base 79: mod_base = OTHER; note = 2'O-methyl guanosine
  modified_base 80: mod_base = OTHER; note = 2'O-methyl uridine
  modified_base 81: mod_base = OTHER; note = 2'O-methyl guanosine
  modified_base 82: mod_base = OTHER; note = 2'O-methyl guanosine
  modified_base 83: mod_base = OTHER; note = 2'O-methyl cytidine
  modified_base 84: mod_base = OTHER; note = 2'O-methyl adenosine
  modified_base 85: mod_base = OTHER; note = 2'O-methyl cytidine
  modified_base 86: mod_base = OTHER; note = 2'O-methyl cytidine
  modified_base 87: mod_base = OTHER; note = 2'O-methyl guanosine
  modified_base 88: mod_base = OTHER; note = 2'O-methyl adenosine
  modified_base 89: mod_base = OTHER; note = 2'O-methyl guanosine
  modified_base 90: mod_base = OTHER; note = 2'O-methyl uridine
  modified_base 91: mod_base = OTHER; note = 2'O-methyl cytidine
  modified_base 92: mod_base = OTHER; note = 2'O-methyl guanosine
  modified_base 93: mod_base = OTHER; note = 2'O-methyl guanosine
  modified_base 94: mod_base = OTHER; note = 2'O-methyl uridine
  modified_base 95: mod_base = OTHER; note = 2'O-methyl guanosine
  modified_base 96: mod_base = OTHER; note = 2'O-methyl cytidine
  modified_base 118: mod_base = OTHER; note = guanosine phosphorothioate
  modified_base 119: mod_base = OTHER; note = 2'O-methyl adenosine phosphorothioate
  modified_base 120: mod_base = OTHER; note = 2'O-methyl guanosine phosphorothioate
  modified_base 121: mod_base = OTHER; note = 2'O-methyl guanosine

SEQ ID NO: 19545 - RNA, 126 nt, synthetic construct; identical to SEQ ID NO: 19537
  source 1..126: mol_type = other RNA
  modified_base 1: mod_base = OTHER; note = 2'O-methyl uridine phosphorothioate
  modified_base 2: mod_base = OTHER; note = 2'O-methyl cytidine phosphorothioate
  modified_base 3: mod_base = OTHER; note = 2'O-methyl adenosine phosphorothioate
  modified_base 29: mod_base = OTHER; note = 2'O-methyl guanosine
  modified_base 30: mod_base = OTHER; note = 2'O-methyl cytidine
  modified_base 31: mod_base = OTHER; note = 2'O-methyl uridine
  modified_base 32: mod_base = OTHER; note = 2'O-methyl adenosine
  modified_base 33: mod_base = OTHER; note = 2'O-methyl guanosine
  modified_base 34: mod_base = OTHER; note = 2'O-methyl adenosine
  modified_base 35: mod_base = OTHER; note = 2'O-methyl adenosine
  modified_base 36: mod_base = OTHER; note = 2'O-methyl adenosine
  modified_base 37: mod_base = OTHER; note = 2'O-methyl uridine
  modified_base 38: mod_base = OTHER; note = 2'O-methyl adenosine
  modified_base 39: mod_base = OTHER; note = 2'O-methyl guanosine
  modified_base 40: mod_base = OTHER; note = 2'O-methyl cytidine
  modified_base 69: mod_base = OTHER; note = 2'O-methyl adenosine
  modified_base 70: mod_base = OTHER; note = 2'O-methyl cytidine
  modified_base 71: mod_base = OTHER; note = 2'O-methyl uridine
  modified_base 72: mod_base = OTHER; note = 2'O-methyl uridine
  modified_base 73: mod_base = OTHER; note = 2'O-methyl guanosine
  modified_base 74: mod_base = OTHER; note = 2'O-methyl adenosine
  modified_base 75: mod_base = OTHER; note = 2'O-methyl adenosine
  modified_base 76: mod_base = OTHER; note = 2'O-methyl adenosine
  modified_base 77: mod_base = OTHER; note = 2'O-methyl adenosine
  modified_base 78: mod_base = OTHER; note = 2'O-methyl adenosine
  modified_base 79: mod_base = OTHER; note = 2'O-methyl guanosine
  modified_base 80: mod_base = OTHER; note = 2'O-methyl uridine
  modified_base 81: mod_base = OTHER; note = 2'O-methyl guanosine
  modified_base 82: mod_base = OTHER; note = 2'O-methyl guanosine
  modified_base 83: mod_base = OTHER; note = 2'O-methyl cytidine
  modified_base 84: mod_base = OTHER; note = 2'O-methyl adenosine
  modified_base 85: mod_base = OTHER; note = 2'O-methyl cytidine
  modified_base 86: mod_base = OTHER; note = 2'O-methyl cytidine
  modified_base 87: mod_base = OTHER; note = 2'O-methyl guanosine
  modified_base 88: mod_base = OTHER; note = 2'O-methyl adenosine
  modified_base 89: mod_base = OTHER; note = 2'O-methyl guanosine
  modified_base 90: mod_base = OTHER; note = 2'O-methyl uridine
  modified_base 91: mod_base = OTHER; note = 2'O-methyl cytidine
  modified_base 92: mod_base = OTHER; note = 2'O-methyl guanosine
  modified_base 93: mod_base = OTHER; note = 2'O-methyl guanosine
  modified_base 94: mod_base = OTHER; note = 2'O-methyl uridine
  modified_base 95: mod_base = OTHER; note = 2'O-methyl guanosine
  modified_base 96: mod_base = OTHER; note = 2'O-methyl cytidine
  modified_base 123: mod_base = OTHER; note = cytidine phosphorothioate
  modified_base 124: mod_base = OTHER; note = 2'O-methyl uridine phosphorothioate
  modified_base 125: mod_base = OTHER; note = 2'O-methyl uridine phosphorothioate
  modified_base 126: mod_base = OTHER; note = 2'O-methyl cytidine

SEQ ID NO: 19546 - RNA, 128 nt, synthetic construct; identical to SEQ ID NO: 19538
  source 1..128: mol_type = other RNA
  modified_base 1: mod_base = OTHER; note = 2'O-methyl uridine phosphorothioate
  modified_base 2: mod_base = OTHER; note = 2'O-methyl cytidine phosphorothioate
  modified_base 3: mod_base = OTHER; note = 2'O-methyl adenosine phosphorothioate
  modified_base 29: mod_base = OTHER; note = 2'O-methyl guanosine
  modified_base 30: mod_base = OTHER; note = 2'O-methyl cytidine
  modified_base 31: mod_base = OTHER; note = 2'O-methyl uridine
  modified_base 32: mod_base = OTHER; note = 2'O-methyl adenosine
  modified_base 33: mod_base = OTHER; note = 2'O-methyl guanosine
  modified_base 34: mod_base = OTHER; note = 2'O-methyl adenosine
  modified_base 35: mod_base = OTHER; note = 2'O-methyl adenosine
  modified_base 36: mod_base = OTHER; note = 2'O-methyl adenosine
  modified_base 37: mod_base = OTHER; note = 2'O-methyl uridine
  modified_base 38: mod_base = OTHER; note = 2'O-methyl adenosine
  modified_base 39: mod_base = OTHER; note = 2'O-methyl guanosine
  modified_base 40: mod_base = OTHER; note = 2'O-methyl cytidine
  modified_base 69: mod_base = OTHER; note = 2'O-methyl adenosine
  modified_base 70: mod_base = OTHER; note = 2'O-methyl cytidine
  modified_base 71: mod_base = OTHER; note = 2'O-methyl uridine
  modified_base 72: mod_base = OTHER; note = 2'O-methyl uridine
  modified_base 73: mod_base = OTHER; note = 2'O-methyl guanosine
  modified_base 74: mod_base = OTHER; note = 2'O-methyl adenosine
  modified_base 75: mod_base = OTHER; note = 2'O-methyl adenosine
  modified_base 76: mod_base = OTHER; note = 2'O-methyl adenosine
  modified_base 77: mod_base = OTHER; note = 2'O-methyl adenosine
  modified_base 78: mod_base = OTHER; note = 2'O-methyl adenosine
  modified_base 79: mod_base = OTHER; note = 2'O-methyl guanosine
  modified_base 80: mod_base = OTHER; note = 2'O-methyl uridine
  modified_base 81: mod_base = OTHER; note = 2'O-methyl guanosine
  modified_base 82: mod_base = OTHER; note = 2'O-methyl guanosine
  modified_base 83: mod_base = OTHER; note = 2'O-methyl cytidine
  modified_base 84: mod_base = OTHER; note = 2'O-methyl adenosine
  modified_base 85: mod_base = OTHER; note = 2'O-methyl cytidine
  modified_base 86: mod_base = OTHER; note = 2'O-methyl cytidine
  modified_base 87: mod_base = OTHER; note = 2'O-methyl guanosine
  modified_base 88: mod_base = OTHER; note = 2'O-methyl adenosine
  modified_base 89: mod_base = OTHER; note = 2'O-methyl guanosine
  modified_base 90: mod_base = OTHER; note = 2'O-methyl uridine
  modified_base 91: mod_base = OTHER; note = 2'O-methyl cytidine
  modified_base 92: mod_base = OTHER; note = 2'O-methyl guanosine
  modified_base 93: mod_base = OTHER; note = 2'O-methyl guanosine
  modified_base 94: mod_base = OTHER; note = 2'O-methyl uridine
  modified_base 95: mod_base = OTHER; note = 2'O-methyl guanosine
  modified_base 96: mod_base = OTHER; note = 2'O-methyl cytidine
  modified_base 125: mod_base = OTHER; note = uridine phosphorothioate
  modified_base 126: mod_base = OTHER; note = 2'O-methyl cytidine phosphorothioate
  modified_base 127: mod_base = OTHER; note = 2'O-methyl cytidine phosphorothioate
  modified_base 128: mod_base = OTHER; note = 2'O-methyl uridine

SEQ ID NO: 19547 - RNA, 6369 nt, synthetic construct
  source 1..6369: mol_type = other RNA
atgcctgcggctaagcgggtaaaattggatggtggggacaagaagtacagcatcggcctggacatcggcaccaactctgtgggctgggccgtgatcaccgacgagtacaaggtgcccagcaagaaattcaaggtgctgggcaacaccgaccggcacagcatcaagaagaacctgatcggagccctgctgttcgacagcggcgaaacagccgaggccacccggctgaagagaaccgccagaagaagatacaccagacggaagaaccggatctgctatctgcaagagatcttcagcaacgagatggccaaggtggacgacagcttcttccacagactggaagagtccttcctggtggaagaggataagaagcacgagcggcaccccatcttcggcaacatcgtggacgaggtggcctaccacgagaagtaccccaccatctaccacctgagaaagaaactggtggacagcaccgacaaggccgacctgcggctgatctatctggccctggcccacatgatcaagttccggggccacttcctgatcgagggcgacctgaaccccgacaacagcgacgtggacaagctgttcatccagctggtgcagacctacaaccagctgttcgaggaaaaccccatcaacgccagcggcgtggacgccaaggccatcctgtctgccagactgagcaagagcagacggctggaaaatctgatcgcccagctgcccggcgagaagaagaatggcctgttcggaaacctgattgccctgagcctgggcctgacccccaacttcaagagcaacttcgacctggccgaggatgccaaactgcagctgagcaaggacacctacgacgacgacctggacaacctgctggcccagatcggcgaccagtacgccgacctgtttctggccgccaagaacctgtccgacgccatcctgctgagcgacatcctgagagtgaacaccgagatcaccaaggcccccctgagcgcctctatgatcaagagatacgacgagcaccaccaggacctgaccctgctgaaagctctcgtgcggcagcagctgcctgagaagtacaaagagattttcttcgaccagagcaagaacggctacgccggctacattgacggcggagccagccaggaagagttctacaagttcatcaagcccatcctggaaaagatggacggcaccgaggaactgctcgtgaagctgaacagagaggacctgctgcggaagcagcggaccttcgacaacggcagcatcccccaccagatccacctgggagagctgcacgccattctgcggcggcaggaagatttttacccattcctgaaggacaaccgggaaaagatcgagaagatcctgaccttccgcatcccctactacgtgggccctctggccaggggaaacagcagattcgcctggatgaccagaaagagcgaggaaaccatcaccccctggaacttcgaggaagtggtggacaagggcgcttccgcccagagcttcatcgagcggatgaccaacttcgataagaacctgcccaacgagaaggtgctgcccaagcacagcctgctgtacgagtacttcaccgtgtataacgagctgaccaaagtgaaatacgtgaccgagggaatgagaaagcccgccttcctgagcggcgagcagaaaaaggccatcgtggacctgctgttcaagaccaaccggaaagtgaccgtgaagcagctgaaagaggactacttcaagaaaatcgagtgcttcgactccgtggaaatctccggcgtggaagatcggttcaacgcctccctgggcacataccacgatctgctgaaaattatcaaggacaaggacttcctggacaatgaggaaaacgaggacattctggaagatatcgtgctgaccctgacactgtttgaggacagagagatgatcgaggaacggctgaaaacctatgcccacctgttcgacgacaaagtgatgaagcagctgaagcggcggagatacaccggctggggcaggctgagccggaagctgatcaacggcatccgggacaagcagtccggcaagacaatcctggatttcctgaagtccgacggcttcgccaacagaaacttcatgcagctgatccacgacgacagcctgacctttaaagaggacatccagaaagcccaggtgtccggccagggcgatagcctgcacgagcacattgccaatctggccggcagccccgccattaagaagggcatcctgcagacagtgaaggtggtggacgagctcgtgaaagtgatgggccggcacaagcccgagaacatcgtgatcgaaatggccagagagaaccagaccacccagaagggacagaagaacagccgcgagagaatgaagcggatcgaagagggcatcaaagagctgggcagccagatcctgaaagaacaccccgtggaaaacacccagctgcagaacgagaagctgtacctgtactacctgcagaatgggcgggatatgtacgtggaccaggaactggacatcaaccggctgtccgactacgatgtggaccatatcgtgcctcagagctttctgaaggacgactccatcgacaacaaggtgctgaccagaagcgacaagaatcggggcaagagcgacaacgtgccctccgaagaggtcgtgaagaagatgaagaactactggcggcagctgctgaacgccaagctgattacccagagaaagttcgacaatctgaccaaggccgagagaggcggcctgagcgaactggataaggccggcttcatcaagagacagctggtggaaacccggcagatcacaaagcacgtggcacagatcctggactcccggatgaacactaagtacgacgagaatgacaagctgatccgggaagtgaaagtgatcaccctgaagtccaagctggtgtccgatttccggaaggatttccagttttacaaagtgcgcgagatcaacaactaccaccacgcccacgacgcctacctgaacgccgtcgtgggaaccgccctgatcaaaaagtaccctaagctggaaagcgagttcgtgtacggcgactacaaggtgtacgacgtgcggaagatgatcgccaagagcgagcaggaaatcggcaaggctaccgccaagtacttcttctacagcaacatcatgaactttttcaagaccgagattaccctggccaacggcgagatccggaagcggcctctgatcgagacaaacggcgaaaccggggagatcgtgtgggataagggccgggattttgccaccgtgcggaaagtgctgagcatgccccaagtgaatatcgtgaaaaagaccgaggtgcagacaggcggcttcagcaaagagtctatcctgcccaagaggaacagcgataagctgatcgccagaaagaaggactgggaccctaagaagtacggcggcttcgacagccccaccgtggcctattctgtgctggtggtggccaaagtggaaaagggcaagtccaagaaactgaagagtgtgaaagagctgctggggatcaccatcatggaaagaagcagcttcgagaagaatcccatcgactttctggaagccaagggctacaaagaagtgaaaaaggacctgatcatcaagctgcctaagtactccctgttcgagctggaaaacggccggaagagaatgctggcctctgccggcgaactgcagaagggaaacgaactggccctgccctccaaatatgtgaacttcctgtacctggccagccactatgagaagctgaagggctcccccgaggataatgagcagaaacagctgtttgtggaacagcacaagcactacctggacgagatcatcgagcagatcagcgagttctccaagagagtgatcctggccgacgctaatctggacaaagtgctgtccgcctacaacaagcaccgggataagcccatcagagagcaggccgagaatatcatccacctgtttaccctgaccaatctgggagcccctgccgccttcaagtactttgacaccaccatcgaccggaagaggtacaccagcaccaaagaggtgctggacgccaccctgatccaccagagcatcaccggcctgtacgagacacggatcgacctgtctcagctgggaggtgactctggaggatctagcggaggatcctctggcagcgagacaccaggaacaagcgagtcagcaacaccagagagcagtggcggcagcagcggcggcagcagcaccctaaatatagaagatgagtatcggctacatgagacctcaaaagagccagatgtttctctagggtccacatggctgtctgattttcctcaggcctgggcggaaaccgggggcatgggactggcagttcgccaagctcctctgatcatacctctgaaagcaacctctacccccgtgtccataaaacaataccccatgtcacaagaagccagactggggatcaagccccacatacagagactgttggaccagggaatactggtaccctgccagtccccctggaacacgcccctgctacccgttaagaaaccagggactaatgattataggcctgtccaggatctgagagaagtcaacaagcgggtggaggacatccaccccaccgtgcccaacccttacaacctcttgagcgggctcccaccgtcccaccagtggtacactgtgcttgatttaaaggatgcctttttctgcctgagactccaccccaccagtcagcctctcttcgcctttgagtggagagatccagagatgggaatctcaggacaattgacctggaccagactcccacagggtttcaaaaacagtcccaccctgtttaatgaggcactgcacagagacctagcagacttccggatccagcacccagacttgatcctgctacagtacgtggatgacttactgctggccgccacttctgagctagactgccaacaaggtactcgggccctgttacaaaccctagggaacctcgggtatcgggcctcggccaagaaagcccaaatttgccagaaacaggtcaagtatctggggtatcttctaaaagagggtcagagatggctgactgaggccagaaaagagactgtgatggggcagcctactccgaagacccctcgacaactaagggagttcctagggaaggcaggcttctgtcgcctcttcatccctgggtttgcagaaatggcagcccccctgtaccctctcaccaaaccggggactctgtttaattggggcccagaccaacaaaaggcctatcaagaaatcaagcaagcccttctaactgccccagccctggggttgccagatttgactaagccctttgaactctttgtcgacgagaagcagggctacgccaaaggtgtcctaacgcaaaaactgggaccttggcgtcggccggtggcctacctgtccaaaaagctagacccagtagcagctgggtggcccccttgcctacggatggtagcagccattgccgtactgacaaaggatgcaggcaagctaaccatgggacagccactagtcattctggccccccatgcagtagaggcactagtcaaacaaccccccgaccgctggctttccaacgcccggatgactcactatcaggccttgcttttggacacggaccgggtccagttcggaccggtggtagccctgaacccggctacgctgctcccactgcctgaggaagggctgcaacacaactgccttgatatcctggccgaagcccacggaacccgacccgacctaacggaccagccgctcccagacgccgaccacacctggtacacggatggaagcagtctcttacaagagggacagcgtaaggcgggagctgcggtgaccaccgagaccgaggtaatctgggctaaagccctgccagccgggacatccgctcagcgggctgaactgatagcactcacccaggccctaaagatggcagaaggtaagaagctaaatgtttatactgatagccgttatgcttttgctactgcccatatccatggagaaatatacagaaggcgtgggtggctcacatcagaaggcaaagagatcaaaaataaagacgagatcttggccctactaaaagccctctttctgcccaaaagacttagcataatccattgtccaggacatcaaaagggacacagcgccgaggctagaggcaaccggatggctgaccaagcggcccgaaaggcagccatcacagagactccagacacctctaccctcctcatagaaaattcatcaccctctggcggctcaaaaagaaccgccgacggcagcgaattcgagaaaaggacggcggatggtagcgaattcgagagccctaaaaagaaggccaaggtagagtaa

SEQ ID NO: 19548 - RNA, 100 nt, synthetic construct
  source 1..100: mol_type = other RNA
  modified_base 1: mod_base = OTHER; note = 2'O-methyl adenosine phosphorothioate
  modified_base 2: mod_base = OTHER; note = 2'O-methyl cytidine phosphorothioate
  modified_base 3: mod_base = OTHER; note = 2'O-methyl adenosine phosphorothioate
  modified_base 29: mod_base = OTHER; note = 2'O-methyl guanosine
  modified_base 30: mod_base = OTHER; note = 2'O-methyl cytidine
  modified_base 31: mod_base = OTHER; note = 2'O-methyl uridine
  modified_base 32: mod_base = OTHER; note = 2'O-methyl adenosine
  modified_base 33: mod_base = OTHER; note = 2'O-methyl guanosine
  modified_base 34: mod_base = OTHER; note = 2'O-methyl adenosine
  modified_base 35: mod_base = OTHER; note = 2'O-methyl adenosine
  modified_base 36: mod_base = OTHER; note = 2'O-methyl adenosine
  modified_base 37: mod_base = OTHER; note = 2'O-methyl uridine
  modified_base 38: mod_base = OTHER; note = 2'O-methyl adenosine
  modified_base 39: mod_base = OTHER; note = 2'O-methyl guanosine
  modified_base 40: mod_base = OTHER; note = 2'O-methyl cytidine
  modified_base 69: mod_base = OTHER; note = 2'O-methyl adenosine
  modified_base 70: mod_base = OTHER; note = 2'O-methyl cytidine
  modified_base 71: mod_base = OTHER; note = 2'O-methyl uridine
  modified_base 72: mod_base = OTHER; note = 2'O-methyl uridine
  modified_base 73: mod_base = OTHER; note = 2'O-methyl guanosine
  modified_base 74: mod_base = OTHER; note = 2'O-methyl adenosine
  modified_base 75: mod_base = OTHER; note = 2'O-methyl adenosine
  modified_base 76: mod_base = OTHER; note = 2'O-methyl adenosine
  modified_base 77: mod_base = OTHER; note = 2'O-methyl adenosine
  modified_base 78: mod_base = OTHER; note = 2'O-methyl adenosine
  modified_base 79: mod_base = OTHER; note = 2'O-methyl guanosine
  modified_base 80: mod_base = OTHER; note = 2'O-methyl uridine
  modified_base 81: mod_base = OTHER; note = 2'O-methyl guanosine
  modified_base 82: mod_base = OTHER; note = 2'O-methyl guanosine
  modified_base 83: mod_base = OTHER; note = 2'O-methyl cytidine
  modified_base 84: mod_base = OTHER; note = 2'O-methyl adenosine
  modified_base 85: mod_base = OTHER; note = 2'O-methyl cytidine
  modified_base 86: mod_base = OTHER; note = 2'O-methyl cytidine
  modified_base 87: mod_base = OTHER; note = 2'O-methyl guanosine
  modified_base 88: mod_base = OTHER; note = 2'O-methyl adenosine
  modified_base 89: mod_base = OTHER; note = 2'O-methyl guanosine
  modified_base 90: mod_base = OTHER; note = 2'O-methyl uridine
  modified_base 91: mod_base = OTHER; note = 2'O-methyl cytidine
  modified_base 92: mod_base = OTHER; note = 2'O-methyl guanosine
  modified_base 93: mod_base = OTHER; note = 2'O-methyl guanosine
  modified_base 94: mod_base = OTHER; note = 2'O-methyl uridine
  modified_base 95: mod_base = OTHER; note = 2'O-methyl guanosine
  modified_base 96: mod_base = OTHER; note = 2'O-methyl cytidine
  modified_base 97: mod_base = OTHER; note = 2'O-methyl uridine phosphorothioate
  modified_base 98: mod_base = OTHER; note = 2'O-methyl uridine phosphorothioate
  modified_base 99: mod_base = OTHER; note = 2'O-methyl uridine phosphorothioate
  modified_base 100: mod_base = OTHER; note = 2'O-methyl uridine
acacaaataccagtccagcggttttagagctagaaatagcaagttaaaataaggctagtccgttatcaacttgaaaaagtggcaccgagtcggtgctttt

SEQ ID NO: 19549 - RNA, 6369 nt, synthetic construct; identical to SEQ ID NO: 19547
  source 1..6369: mol_type = other RNA

SEQ ID NO: 19550 - RNA, 100 nt, synthetic construct; identical to SEQ ID NO: 19548
  source 1..100: mol_type = other RNA
  modified_base 1: mod_base = OTHER; note = 2'O-methyl adenosine phosphorothioate
  modified_base 2: mod_base = OTHER; note = 2'O-methyl cytidine phosphorothioate
  modified_base 3: mod_base = OTHER; note = 2'O-methyl adenosine phosphorothioate
  modified_base 29: mod_base = OTHER; note = 2'O-methyl guanosine
  modified_base 30: mod_base = OTHER; note = 2'O-methyl cytidine
  modified_base 31: mod_base = OTHER; note = 2'O-methyl uridine
  modified_base 32: mod_base = OTHER; note = 2'O-methyl adenosine
  modified_base 33: mod_base = OTHER; note = 2'O-methyl guanosine
  modified_base 34: mod_base = OTHER; note = 2'O-methyl adenosine
  modified_base 35: mod_base = OTHER; note = 2'O-methyl adenosine
  modified_base 36: mod_base = OTHER; note = 2'O-methyl adenosine
  modified_base 37: mod_base = OTHER; note = 2'O-methyl uridine
  modified_base 38: mod_base = OTHER; note = 2'O-methyl adenosine
  modified_base 39: mod_base = OTHER; note = 2'O-methyl guanosine
  modified_base 40: mod_base = OTHER; note = 2'O-methyl cytidine
  modified_base 69: mod_base = OTHER; note = 2'O-methyl adenosine
  modified_base 70: mod_base = OTHER; note = 2'O-methyl cytidine
  modified_base 71: mod_base = OTHER; note = 2'O-methyl uridine
  modified_base 72: mod_base = OTHER; note = 2'O-methyl uridine
  modified_base 73: mod_base = OTHER; note = 2'O-methyl guanosine
  modified_base 74: mod_base = OTHER; note = 2'O-methyl adenosine
  modified_base 75: mod_base = OTHER; note = 2'O-methyl adenosine
  modified_base 76: mod_base = OTHER; note = 2'O-methyl adenosine
  modified_base 77: mod_base = OTHER; note = 2'O-methyl adenosine
  modified_base 78: mod_base = OTHER; note = 2'O-methyl adenosine
  modified_base 79: mod_base = OTHER; note = 2'O-methyl guanosine
  modified_base 80: mod_base = OTHER; note = 2'O-methyl uridine
  modified_base 81: mod_base = OTHER; note = 2'O-methyl guanosine
  modified_base 82: mod_base = OTHER; note = 2'O-methyl guanosine
  modified_base 83: mod_base = OTHER; note = 2'O-methyl cytidine
  modified_base 84: mod_base = OTHER; note = 2'O-methyl adenosine
  modified_base 85: mod_base = OTHER; note = 2'O-methyl cytidine
  modified_base 86: mod_base = OTHER; note = 2'O-methyl cytidine
  modified_base 87: mod_base = OTHER; note = 2'O-methyl guanosine
  modified_base 88: mod_base = OTHER; note = 2'O-methyl adenosine
  modified_base 89: mod_base = OTHER; note = 2'O-methyl guanosine
  modified_base 90: mod_base = OTHER; note = 2'O-methyl uridine
  modified_base 91: mod_base = OTHER; note = 2'O-methyl cytidine
  modified_base 92: mod_base = OTHER; note = 2'O-methyl guanosine
  modified_base 93: mod_base = OTHER; note = 2'O-methyl guanosine
  modified_base 94: mod_base = OTHER; note = 2'O-methyl uridine
  modified_base 95: mod_base = OTHER; note = 2'O-methyl guanosine
  modified_base 96: mod_base = OTHER; note = 2'O-methyl cytidine
  modified_base 97: mod_base = OTHER; note = 2'O-methyl uridine phosphorothioate
  modified_base 98: mod_base = OTHER; note = 2'O-methyl uridine phosphorothioate
  modified_base 99: mod_base = OTHER; note = 2'O-methyl uridine phosphorothioate
  modified_base 100: mod_base = OTHER; note = 2'O-methyl uridine

SEQ ID NO: 19551-19950 - skipped (400 entries)

SEQ ID NO: 19951 - DNA, 20 bp, synthetic construct
  source 1..20: mol_type = other DNA
ctgtgctgaccatcgacaag

SEQ ID NO: 19952 - DNA, 21 bp, synthetic construct
  source 1..21: mol_type = other DNA
gctgtgctgaccatcgacaag

SEQ ID NO: 19953 - DNA, 20 bp, synthetic construct
  source 1..20: mol_type = other DNA
cagcttcagtccctttcttg

SEQ ID NO: 19954 - DNA, 21 bp, synthetic construct
  source 1..21: mol_type = other DNA
gcagcttcagtccctttcttg

SEQ ID NO: 19955 - DNA, 20 bp, synthetic construct
  source 1..20: mol_type = other DNA
ggctgtgctgaccatcgaca

SEQ ID NO: 19956 - DNA, 20 bp, synthetic construct
  source 1..20: mol_type = other DNA
aggctgtgctgaccatcgac

SEQ ID NO: 19957 - DNA, 21 bp, synthetic construct
  source 1..21: mol_type = other DNA
gaggctgtgctgaccatcgac

SEQ ID NO: 19958 - DNA, 20 bp, synthetic construct
  source 1..20: mol_type = other DNA
agcagcttcagtccctttct

SEQ ID NO: 19959 - DNA, 21 bp, synthetic construct
  source 1..21: mol_type = other DNA
gagcagcttcagtccctttct

SEQ ID NO: 19960 - DNA, 20 bp, synthetic construct
  source 1..20: mol_type = other DNA
ggccgtgcataaggctgtgc

SEQ ID NO: 19961 - DNA, 20 bp, synthetic construct
  source 1..20: mol_type = other DNA
ccaggccgtgcataaggctg

SEQ ID NO: 19962 - DNA, 21 bp, synthetic construct
  source 1..21: mol_type = other DNA
gccaggccgtgcataaggctg

SEQ ID NO: 19963 - DNA, 20 bp, synthetic construct
  source 1..20: mol_type = other DNA
cagcagcttcagtccctttc

SEQ ID NO: 19964 - DNA, 21 bp, synthetic construct
  source 1..21: mol_type = other DNA
gcagcagcttcagtccctttc

SEQ ID NO: 19965 - DNA, 20 bp, synthetic construct
  source 1..20: mol_type = other DNA
aggccgtgcataaggctgtg

SEQ ID NO: 19966 - DNA, 21 bp, synthetic construct
  source 1..21: mol_type = other DNA
gaggccgtgcataaggctgtg

SEQ ID NO: 19967 - DNA, 20 bp, synthetic construct
  source 1..20: mol_type = other DNA
tccaggccgtgcataaggct

SEQ ID NO: 19968 - DNA, 21 bp, synthetic construct
  source 1..21: mol_type = other DNA
gtccaggccgtgcataaggct

SEQ ID NO: 19969 - DNA, 20 bp, synthetic construct
  source 1..20: mol_type = other DNA
acctcgggggggatagacat

SEQ ID NO: 19970 - DNA, 21 bp, synthetic construct
  source 1..21: mol_type = other DNA
gacctcgggggggatagacat

SEQ ID NO: 19971 - DNA, 20 bp, synthetic construct
  source 1..20: mol_type = other DNA
tgttgaacttgacctcgggg

SEQ ID NO: 19972 - DNA, 21 bp, synthetic construct
  source 1..21: mol_type = other DNA
gtgttgaacttgacctcgggg

SEQ ID NO: 19973 - DNA, 21 bp, synthetic construct
  source 1..21: mol_type = other DNA
aaggctgtgctgaccatcgac

SEQ ID NO: 19974 - DNA, 22 bp, synthetic construct
  source 1..22: mol_type = other DNA
gaaggctgtgctgaccatcgac

SEQ ID NO: 19975 - DNA, 21 bp, synthetic construct
  source 1..21: mol_type = other DNA
agcagcttcagtccctttctt

SEQ ID NO: 19976 - DNA, 22 bp, synthetic construct
  source 1..22: mol_type = other DNA
gagcagcttcagtccctttctt

SEQ ID NO: 19977 - DNA, 21 bp, synthetic construct
  source 1..21: mol_type = other DNA
ccaggccgtgcataaggctgt

SEQ ID NO: 19978 - DNA, 22 bp, synthetic construct
  source 1..22: mol_type = other DNA
gccaggccgtgcataaggctgt

SEQ ID NO: 19979 - DNA, 21 bp, synthetic construct
  source 1..21: mol_type = other DNA
taaaaacatggccccagcagc

SEQ ID NO: 19980 - DNA, 22 bp, synthetic construct
  source 1..22: mol_type = other DNA
gtaaaaacatggccccagcagc

SEQ ID NO: 19981 - DNA, 21 bp, synthetic construct
  source 1..21: mol_type = other DNA
ggcctctaaaaacatggcccc

SEQ ID NO: 19982 - DNA, 21 bp, synthetic construct
  source 1..21: mol_type = other DNA
tatggcctctaaaaacatggc

SEQ ID NO: 19983 - DNA, 22 bp, synthetic construct
  source 1..22: mol_type = other DNA
gtatggcctctaaaaacatggc

SEQ ID NO: 19984 - DNA, 21 bp, synthetic construct
  source 1..21: mol_type = other DNA
ttgacctcgggggggatagac

SEQ ID NO: 19985 - DNA, 22 bp, synthetic construct
  source 1..22: mol_type = other DNA
gttgacctcgggggggatagac

SEQ ID NO: 19986 - DNA, 21 bp, synthetic construct
  source 1..21: mol_type = other DNA
tttgttgaacttgacctcggg

SEQ ID NO: 19987 - DNA, 22 bp, synthetic construct
  source 1..22: mol_type = other DNA
gtttgttgaacttgacctcggg

SEQ ID NO: 19988 - DNA, 21 bp, synthetic construct
  source 1..21: mol_type = other DNA
acgtgagccttgctcgaggcc

SEQ ID NO: 19989 - DNA, 22 bp, synthetic construct
  source 1..22: mol_type = other DNA
gacgtgagccttgctcgaggcc

SEQ ID NO: 19990 - DNA, 21 bp, synthetic construct
  source 1..21: mol_type = other DNA
attaagaagacaaagggtttg

SEQ ID NO: 19991 - DNA, 22 bp, synthetic construct
  source 1..22: mol_type = other DNA
gattaagaagacaaagggtttg

SEQ ID NO: 19992 - DNA, 21 bp, synthetic construct
  source 1..21: mol_type = other DNA
aggtgtccacgtgagccttgc

SEQ ID NO: 19993 - DNA, 22 bp, synthetic construct
  source 1..22: mol_type = other DNA
gaggtgtccacgtgagccttgc

SEQ ID NO: 19994 - DNA, 21 bp, synthetic construct
  source 1..21: mol_type = other DNA
tgttcaatcattaagaagaca

SEQ ID NO: 19995 - DNA, 22 bp, synthetic construct
  source 1..22: mol_type = other DNA
gtgttcaatcattaagaagaca

SEQ ID NO: 19996 - DNA, 21 bp, synthetic construct
  source 1..21: mol_type = other DNA
cgcttcctgggaggtgtccac

SEQ ID NO: 19997 - DNA, 22 bp, synthetic construct
  source 1..22: mol_type = other DNA
gcgcttcctgggaggtgtccac

SEQ ID NO: 19998 - DNA, 21 bp, synthetic construct
  source 1..21: mol_type = other DNA
tctcccctccaggccgtgcat

SEQ ID NO: 19999 - DNA, 22 bp, synthetic construct
  source 1..22: mol_type = other DNA
gtctcccctccaggccgtgcat

SEQ ID NO: 20000 - DNA, 21 bp, synthetic construct
  source 1..21: mol_type = other DNA
atgggtatggcctctaaaaac

SEQ ID NO: 20001 - DNA, 22 bp, synthetic construct
  source 1..22: mol_type = other DNA
gatgggtatggcctctaaaaac

SEQ ID NO: 20002 - DNA, 21 bp, synthetic construct
  source 1..21: mol_type = other DNA
taaggctgtgctgaccatcga

SEQ ID NO: 20003 - DNA, 22 bp, synthetic construct
  source 1..22: mol_type = other DNA
gtaaggctgtgctgaccatcga

SEQ ID NO: 20004 - DNA, 21 bp, synthetic construct
  source 1..21: mol_type = other DNA
aaaaacatggccccagcagct

SEQ ID NO: 20005 - DNA, 22 bp, synthetic construct
  source 1..22: mol_type = other DNA
gaaaaacatggccccagcagct

SEQ ID NO: 20006 - DNA, 21 bp, synthetic construct
  source 1..21: mol_type = other DNA
gcctctaaaaacatggcccca

SEQ ID NO: 20007 - DNA, 21 bp, synthetic construct
  source 1..21: mol_type = other DNA
atggcctctaaaaacatggcc

SEQ ID NO: 20008 - DNA, 22 bp, synthetic construct
  source 1..22: mol_type = other DNA
gatggcctctaaaaacatggcc

SEQ ID NO: 20009 - DNA, 21 bp, synthetic construct
  source 1..21: mol_type = other DNA
ctctcccctccaggccgtgca

SEQ ID NO: 20010 - DNA, 22 bp, synthetic construct
  source 1..22: mol_type = other DNA
gctctcccctccaggccgtgca

SEQ ID NO: 20011 - DNA, 21 bp, synthetic construct
  source 1..21: mol_type = other DNA
tgtctctgcttctctcccctc

SEQ ID NO: 20012 - DNA, 22 bp, synthetic construct
  source 1..22: mol_type = other DNA
gtgtctctgcttctctcccctc

SEQ ID NO: 20013 - DNA, 21 bp, synthetic construct
  source 1..21: mol_type = other DNA
tgacctcgggggggatagaca

SEQ ID NO: 20014 - DNA, 22 bp, synthetic construct
  source 1..22: mol_type = other DNA
gtgacctcgggggggatagaca

SEQ ID NO: 20015 - DNA, 21 bp, synthetic construct
  source 1..21: mol_type = other DNA
aagggtttgttgaacttgacc

SEQ ID NO: 20016 - DNA, 22 bp, synthetic construct
  source 1..22: mol_type = other DNA
gaagggtttgttgaacttgacc

SEQ ID NO: 20017 - DNA, 21 bp, synthetic construct
  source 1..21: mol_type = other DNA
gtgtccacgtgagccttgctc

SEQ ID NO: 20018 - DNA, 21 bp, synthetic construct
  source 1..21: mol_type = other DNA
gttcaatcattaagaagacaa

SEQ ID NO: 20019 - DNA, 24 bp, synthetic construct
  source 1..24: mol_type = other DNA
gtaaaaacatggccccagcagctt

SEQ ID NO: 20020 - DNA, 24 bp, synthetic construct
  source 1..24: mol_type = other DNA
gtccaggccgtgcataaggctgtg

SEQ ID NO: 20021 - DNA, 24 bp, synthetic construct
  source 1..24: mol_type = other DNA
gcatgggtatggcctctaaaaaca

SEQ ID NO: 20022 - DNA, 24 bp, synthetic construct
  source 1..24: mol_type = other DNA
gacatgggtatggcctctaaaaac

SEQ ID NO: 20023 - DNA, 24 bp, synthetic construct
  source 1..24: mol_type = other DNA
gcgtgtctctgcttctctcccctc

SEQ ID NO: 20024 - DNA, 24 bp, synthetic construct
  source 1..24: mol_type = other DNA
gccttacaacgtgtctctgcttct

SEQ ID NO: 20025 - DNA, 24 bp, synthetic construct
  source 1..24: mol_type = other DNA
gcctcgggggggatagacatgggt

SEQ ID NO: 20026 - DNA, 24 bp, synthetic construct
  source 1..24: mol_type = other DNA
gtgagccttgctcgaggcctggga

SEQ ID NO: 20027 - DNA, 24 bp, synthetic construct
  source 1..24: mol_type = other DNA
gagaagacaaagggtttgttgaac

SEQ ID NO: 20028 - DNA, 24 bp, synthetic construct
  source 1..24: mol_type = other DNA
gaggtgtccacgtgagccttgctc

SEQ ID NO: 20029 - DNA, 21 bp, synthetic construct
  source 1..21: mol_type = other DNA
tgcataaggctgtgctgacca

SEQ ID NO: 20030 - DNA, 22 bp, synthetic construct
  source 1..22: mol_type = other DNA
gtgcataaggctgtgctgacca

SEQ ID NO: 20031 - DNA, 21 bp, synthetic construct
  source 1..21: mol_type = other DNA
tggccccagcagcttcagtcc

SEQ ID NO: 20032 - DNA, 22 bp, synthetic construct
  source 1..22: mol_type = other DNA
gtggccccagcagcttcagtcc

SEQ ID NO: 20033 - DNA, 21 bp, synthetic construct
  source 1..21: mol_type = other DNA
ccgtgcataaggctgtgctga

SEQ ID NO: 20034 - DNA, 22 bp, synthetic construct
  source 1..22: mol_type = other DNA
gccgtgcataaggctgtgctga

SEQ ID NO: 20035 - DNA, 21 bp, synthetic construct
  source 1..21: mol_type = other DNA
aggccgtgcataaggctgtgc

SEQ ID NO: 20036 - DNA, 22 bp, synthetic construct
  source 1..22: mol_type = other DNA
gaggccgtgcataaggctgtgc

SEQ ID NO: 20037 - DNA, 21 bp, synthetic construct
  source 1..21: mol_type = other DNA
aaaacatggccccagcagctt

SEQ ID NO: 20038 - DNA, 22 bp, synthetic construct
  source 1..22: mol_type = other DNA
gaaaacatggccccagcagctt

SEQ ID NO: 20039 - DNA, 21 bp, synthetic construct
  source 1..21: mol_type = other DNA
ggggggatagacatgggtatg

SEQ ID NO: 20040 - DNA, 21 bp, synthetic construct
  source 1..21: mol_type = other DNA
tgaacttgacctcggggggga

SEQ ID NO: 20041 - DNA, 22 bp, synthetic construct
  source 1..22: mol_type = other DNA
gtgaacttgacctcggggggga

SEQ ID NO: 20042 - DNA, 21 bp, synthetic construct
  source 1..21: mol_type = other DNA
tcgaggcctgggatcagcctt

SEQ ID NO: 20043 - DNA, 22 bp, synthetic construct
  source 1..22: mol_type = other DNA
gtcgaggcctgggatcagcctt

SEQ ID NO: 20044 - DNA, 21 bp, synthetic construct
  source 1..21: mol_type = other DNA
acaaagggtttgttgaacttg

SEQ ID NO: 20045 - DNA, 22 bp, synthetic construct
  source 1..22: mol_type = other DNA
gacaaagggtttgttgaacttg

SEQ ID NO: 20046 - DNA, 21 bp, synthetic construct
  source 1..21: mol_type = other DNA
gccttgctcgaggcctgggat

SEQ ID NO: 20047 - DNA, 22 bp, synthetic construct
  source 1..22: mol_type = other DNA
aaagggactgaagctgctgggg

SEQ ID NO: 20048 - DNA, 23 bp, synthetic construct
  source 1..23: mol_type = other DNA
gaaagggactgaagctgctgggg

SEQ ID NO: 20049 - DNA, 22 bp, synthetic construct
  source 1..22: mol_type = other DNA
cctggaggggagagaagcagag

SEQ ID NO: 20050 - DNA, 23 bp, synthetic construct
  source 1..23: mol_type = other DNA
gcctggaggggagagaagcagag

SEQ ID NO: 20051 - DNA, 22 bp, synthetic construct
  source 1..22: mol_type = other DNA
cccatgtctatcccccccgagg

SEQ ID NO: 20052 - DNA, 23 bp, synthetic construct
  source 1..23: mol_type = other DNA
gcccatgtctatcccccccgagg

SEQ ID NO: 20053 - DNA, 22 bp, synthetic construct
  source 1..22: mol_type = other DNA
tcaatcattaagaagacaaagg

SEQ ID NO: 20054 - DNA, 23 bp, synthetic construct
  source 1..23: mol_type = other DNA
gtcaatcattaagaagacaaagg

SEQ ID NO: 20055 - DNA, 22 bp, synthetic construct
  source 1..22: mol_type = other DNA
ttgttcaatcattaagaagaca

SEQ ID NO: 20056 - DNA, 23 bp, synthetic construct
  source 1..23: mol_type = other DNA
gttgttcaatcattaagaagaca

SEQ ID NO: 20057 - DNA, 22 bp, synthetic construct
  source 1..22: mol_type = other DNA
tcaacaaaccctttgtcttctt

SEQ ID NO: 20058 - DNA, 23 bp, synthetic construct
  source 1..23: mol_type = other DNA
gtcaacaaaccctttgtcttctt

SEQ ID NO: 20059 - DNA, 22 bp, synthetic construct
  source 1..22: mol_type = other DNA
ggggagacttggtattttgttc

SEQ ID NO: 20060 - DNA, 22 bp, synthetic construct
  source 1..22: mol_type = other DNA
catgaagaggggagacttggta

SEQ ID NO: 20061 - DNA, 23 bp, synthetic construct
  source 1..23: mol_type = other DNA
gcatgaagaggggagacttggta

SEQ ID NO: 20062 - DNA, 22 bp, synthetic construct
  source 1..22: mol_type = other DNA
tttcccatgaagaggggagact

SEQ ID NO: 20063 - DNA, 23 bp, synthetic construct
  source 1..23: mol_type = other DNA
gtttcccatgaagaggggagact

SEQ ID NO: 20064 - DNA, 20 bp, synthetic construct
  source 1..20: mol_type = other DNA
aaggctgtgctgaccatcga

SEQ ID NO: 20065 - DNA, 21 bp, synthetic construct
  source 1..21: mol_type = other DNA
gaaggctgtgctgaccatcga

SEQ ID NO: 20066 - DNA, 20 bp, synthetic construct
  source 1..20: mol_type = other DNA
aaggctcacgtggacacctc

SEQ ID NO: 20067 - DNA, 21 bp, synthetic construct
  source 1..21: mol_type = other DNA
gaaggctcacgtggacacctc

SEQ ID NO: 20068 - DNA, 20 bp, synthetic construct
  source 1..20: mol_type = other DNA
taccaagtctcccctcttca

SEQ ID NO: 20069 - DNA, 21 bp, synthetic construct
  source 1..21: mol_type = other DNA
gtaccaagtctcccctcttca

SEQ ID NO: 20070 - DNA, 12 bp, synthetic construct
  source 1..12: mol_type = other DNA
gttttagagcta

SEQ ID NO: 20071 - DNA, 12 bp, synthetic construct
  source 1..12: mol_type = other DNA
gttttagagcta

SEQ ID NO: 20072 - DNA, 12 bp, synthetic construct
  source 1..12: mol_type = other DNA
gttttagagcta

SEQ ID NO: 20073 - DNA, 12 bp, synthetic construct
  source 1..12: mol_type = other DNA
gttttagagcta

SEQ ID NO: 20074 - DNA, 12 bp, synthetic construct
  source 1..12: mol_type = other DNA
gttttagagcta

SEQ ID NO: 20075 - DNA, 12 bp, synthetic construct
  source 1..12: mol_type = other DNA
gttttagagcta

SEQ ID NO: 20076 - DNA, 12 bp, synthetic construct
  source 1..12: mol_type = other DNA
gttttagagcta

SEQ ID NO: 20077 - DNA, 12 bp, synthetic construct
  source 1..12: mol_type = other DNA
gttttagagcta

SEQ ID NO: 20078 - DNA, 12 bp, synthetic construct
  source 1..12: mol_type = other DNA
gttttagagcta

SEQ ID NO: 20079 - DNA, 12 bp, synthetic construct
  source 1..12: mol_type = other DNA
gttttagagcta

SEQ ID NO: 20080 - DNA, 12 bp, synthetic construct
  source 1..12: mol_type = other DNA
gttttagagcta

SEQ ID NO: 20081 - DNA, 12 bp, synthetic construct
  source 1..12: mol_type = other DNA
gttttagagcta

SEQ ID NO: 20082 - DNA, 12 bp, synthetic construct
  source 1..12: mol_type = other DNA
gttttagagcta

SEQ ID NO: 20083 - DNA, 12 bp, synthetic construct
  source 1..12: mol_type = other DNA
gttttagagcta

SEQ ID NO: 20084 - DNA, 12 bp, synthetic construct
  source 1..12: mol_type = other DNA
gttttagagcta

SEQ ID NO: 20085 - DNA, 12 bp, synthetic construct
  source 1..12: mol_type = other DNA
gttttagagcta

SEQ ID NO: 20086 - DNA, 12 bp, synthetic construct
  source 1..12: mol_type = other DNA
gttttagagcta

SEQ ID NO: 20087 - DNA, 12 bp, synthetic construct
  source 1..12: mol_type = other DNA
gttttagagcta

SEQ ID NO: 20088 - DNA, 12 bp, synthetic construct
  source 1..12: mol_type = other DNA
gttttagagcta

SEQ ID NO: 20089 - DNA, 12 bp, synthetic construct
  source 1..12: mol_type = other DNA
gttttagagcta

SEQ ID NO: 20090 - DNA, 12 bp, synthetic construct
  source 1..12: mol_type = other DNA
gttttagagcta

SEQ ID NO: 20091 - DNA, 12 bp, synthetic construct
  source 1..12: mol_type = other DNA
gttttagagcta

SEQ ID NO: 20092 - DNA, 14 bp, synthetic construct
  source 1..14: mol_type = other DNA
gttttagtactctg

SEQ ID NO: 20093 - DNA, 14 bp, synthetic construct
  source 1..14: mol_type = other DNA
gttttagtactctg

SEQ ID NO: 20094 - DNA, 14 bp, synthetic construct
  source 1..14: mol_type = other DNA
gttttagtactctg

SEQ ID NO: 20095 - DNA, 14 bp, synthetic construct
  source 1..14: mol_type = other DNA
gttttagtactctg

SEQ ID NO: 20096 - DNA, 14 bp, synthetic construct
  source 1..14: mol_type = other DNA
gttttagtactctg

SEQ ID NO: 20097 - DNA, 14 bp, synthetic construct
  source 1..14: mol_type = other DNA
gttttagtactctg

SEQ ID NO: 20098 - DNA, 14 bp, synthetic construct
  source 1..14: mol_type = other DNA
gttttagtactctg

SEQ ID NO: 20099 - DNA, 14 bp, synthetic construct
  source 1..14: mol_type = other DNA
gttttagtactctg

SEQ ID NO: 20100 - DNA, 14 bp, synthetic construct
  source 1..14: mol_type = other DNA
gttttagtactctg

SEQ ID NO: 20101 - DNA, 14 bp, synthetic construct
  source 1..14: mol_type = other DNA
gttttagtactctg

SEQ ID NO: 20102 - DNA, 14 bp, synthetic construct
  source 1..14: mol_type = other DNA
gttttagtactctg

SEQ ID NO: 20103 - DNA, 14 bp, synthetic construct
  source 1..14: mol_type = other DNA
gttttagtactctg

SEQ ID NO: 20104 - DNA, 14 bp, synthetic construct
  source 1..14: mol_type = other DNA
gttttagtactctg

SEQ ID NO: 20105 - DNA, 14 bp, synthetic construct
  source 1..14: mol_type = other DNA
gttttagtactctg

SEQ ID NO: 20106 - DNA, 14 bp, synthetic construct
  source 1..14: mol_type = other DNA
gttttagtactctg

SEQ ID NO: 20107 - DNA, 14 bp, synthetic construct
  source 1..14: mol_type = other DNA
gttttagtactctg

SEQ ID NO: 20108 - DNA, 14 bp, synthetic construct
  source 1..14: mol_type = other DNA
gttttagtactctg

SEQ ID NO: 20109 - DNA, 14 bp, synthetic construct
  source 1..14: mol_type = other DNA
gttttagtactctg

SEQ ID NO: 20110 - DNA, 14 bp, synthetic construct
  source 1..14: mol_type = other DNA
gttttagtactctg

SEQ ID NO: 20111 - DNA, 14 bp, synthetic construct
  source 1..14: mol_type = other DNA
gttttagtactctg

SEQ ID NO: 20112 - DNA, 14 bp, synthetic construct
  source 1..14: mol_type = other DNA
gttttagtactctg

SEQ ID NO: 20113 - DNA, 14 bp, synthetic construct
  source 1..14: mol_type = other DNA
gttttagtactctg

SEQ ID NO: 20114 - DNA, 14 bp, synthetic construct
  source 1..14: mol_type = other DNA
gttttagtactctg

SEQ ID NO: 20115 - DNA, 14 bp, synthetic construct
  source 1..14: mol_type = other DNA
gttttagtactctg

SEQ ID NO: 20116 - DNA, 14 bp, synthetic construct
  source 1..14: mol_type = other DNA
gttttagtactctg

SEQ ID NO: 20117 - DNA, 14 bp, synthetic construct
  source 1..14: mol_type = other DNA
gttttagtactctg

SEQ ID NO: 20118 - DNA, 14 bp, synthetic construct
  source 1..14: mol_type = other DNA
gttttagtactctg

SEQ ID NO: 20119 - DNA, 14 bp, synthetic construct
  source 1..14: mol_type = other DNA
gttttagtactctg

SEQ ID NO: 20120 - DNA, 14 bp, synthetic construct
  source 1..14: mol_type = other DNA
gttttagtactctg

SEQ ID NO: 20121 - DNA, 14 bp, synthetic construct
  source 1..14: mol_type = other DNA
gttttagtactctg

SEQ ID NO: 20122 - DNA, 14 bp, synthetic construct
  source 1..14: mol_type = other DNA
gttttagtactctg

SEQ ID NO: 20123 - DNA, 14 bp, synthetic construct
  source 1..14: mol_type = other DNA
gttttagtactctg

SEQ ID NO: 20124 - DNA, 14 bp, synthetic construct
  source 1..14: mol_type = other DNA
gttttagtactctg

SEQ ID NO: 20125 - DNA, 14 bp, synthetic construct
  source 1..14: mol_type = other DNA
gttttagtactctg

SEQ ID NO: 20126 - DNA, 14 bp, synthetic construct
  source 1..14: mol_type = other DNA
gttttagtactctg

SEQ ID NO: 20127 - DNA, 14 bp, synthetic construct
  source 1..14: mol_type = other DNA
gttttagtactctg

SEQ ID NO: 20128 - DNA, 14 bp, synthetic construct
  source 1..14: mol_type = other DNA
gttttagtactctg

SEQ ID NO: 20129 - DNA, 14 bp, synthetic construct
  source 1..14: mol_type = other DNA
gttttagtactctg

SEQ ID NO: 20130 - DNA, 14 bp, synthetic construct
  source 1..14: mol_type = other DNA
gttttagtactctg

SEQ ID NO: 20131 - DNA, 14 bp, synthetic construct
  source 1..14: mol_type = other DNA
gttttagtactctg

SEQ ID NO: 20132 - DNA, 14 bp, synthetic construct
  source 1..14: mol_type = other DNA
gttttagtactctg

SEQ ID NO: 20133 - DNA, 14 bp, synthetic construct
  source 1..14: mol_type = other DNA
gttttagtactctg

SEQ ID NO: 20134 - DNA, 14 bp, synthetic construct
  source 1..14: mol_type = other DNA
gttttagtactctg

SEQ ID NO: 20135 - DNA, 14 bp, synthetic construct
  source 1..14: mol_type = other DNA
gttttagtactctg

SEQ ID NO: 20136 - DNA, 14 bp, synthetic construct
  source 1..14: mol_type = other DNA
gttttagtactctg

SEQ ID NO: 20137 - DNA, 14 bp, synthetic construct
  source 1..14: mol_type = other DNA
gttttagtactctg

SEQ ID NO: 20138 - DNA, 24 bp, synthetic construct
  source 1..24: mol_type = other DNA
gttgtagctccctttctcatttcg

SEQ ID NO: 20139 - DNA, 24 bp, synthetic construct
  source 1..24: mol_type = other DNA
gttgtagctccctttctcatttcg

SEQ ID NO: 20140 - DNA, 24 bp, synthetic construct
  source 1..24: mol_type = other DNA
gttgtagctccctttctcatttcg

SEQ ID NO: 20141 - DNA, 24 bp, synthetic construct
  source 1..24: mol_type = other DNA
gttgtagctccctttctcatttcg

SEQ ID NO: 20142 - DNA, 24 bp, synthetic construct
  source 1..24: mol_type = other DNA
gttgtagctccctttctcatttcg

SEQ ID NO: 20143 - DNA, 24 bp, synthetic construct
  source 1..24: mol_type = other DNA
gttgtagctccctttctcatttcg

SEQ ID NO: 20144 - DNA, 24 bp, synthetic construct
  source 1..24: mol_type = other DNA
gttgtagctccctttctcatttcg

SEQ ID NO: 20145 - DNA, 24 bp, synthetic construct
  source 1..24: mol_type = other DNA
gttgtagctccctttctcatttcg

SEQ ID NO: 20146 - DNA, 24 bp, synthetic construct
  source 1..24: mol_type = other DNA
gttgtagctccctttctcatttcg

SEQ ID NO: 20147 - DNA, 24 bp, synthetic construct
  source 1..24: mol_type = other DNA
gttgtagctccctttctcatttcg

SEQ ID NO: 20148 - DNA, 16 bp, synthetic construct
  source 1..16: mol_type = other DNA
gctatagttccttact

SEQ ID NO: 20149 - DNA, 16 bp, synthetic construct
  source 1..16: mol_type = other DNA
gctatagttccttact

SEQ ID NO: 20150 - DNA, 16 bp, synthetic construct
  source 1..16: mol_type = other DNA
gctatagttccttact

SEQ ID NO: 20151 - DNA, 16 bp, synthetic construct
  source 1..16: mol_type = other DNA
gctatagttccttact

SEQ ID NO: 20152 - DNA, 16 bp, synthetic construct
  source 1..16: mol_type = other DNA
gctatagttccttact

SEQ ID NO: 20153 - DNA, 16 bp, synthetic construct
  source 1..16: mol_type = other DNA
gctatagttccttact

SEQ ID NO: 20154 - DNA, 16 bp, synthetic construct
  source 1..16: mol_type = other DNA
gctatagttccttact

SEQ ID NO: 20155 - DNA, 16 bp, synthetic construct
  source 1..16: mol_type = other DNA
gctatagttccttact

SEQ ID NO: 20156 - DNA, 16 bp, synthetic construct
  source 1..16: mol_type = other DNA
gctatagttccttact

SEQ ID NO: 20157 - DNA, 16 bp, synthetic construct
  source 1..16: mol_type = other DNA
gctatagttccttact

SEQ ID NO: 20158 - DNA, 16 bp, synthetic construct
  source 1..16: mol_type = other DNA
gctatagttccttact

SEQ ID NO: 20159 - DNA, 16 bp, synthetic construct
  source 1..16: mol_type = other DNA
gctatagttccttact

SEQ ID NO: 20160 - DNA, 16 bp, synthetic construct
  source 1..16: mol_type = other DNA
gctatagttccttact

SEQ ID NO: 20161 - DNA, 16 bp, synthetic construct
  source 1..16: mol_type = other DNA
gctatagttccttact

SEQ ID NO: 20162 - DNA, 16 bp, synthetic construct
  source 1..16: mol_type = other DNA
gctatagttccttact

SEQ ID NO: 20163 - DNA, 16 bp, synthetic construct
  source 1..16: mol_type = other DNA
gctatagttccttact

SEQ ID NO: 20164 - DNA, 16 bp, synthetic construct
  source 1..16: mol_type = other DNA
gctatagttccttact

SEQ ID NO: 20165 - DNA, 16 bp, synthetic construct
  source 1..16: mol_type = other DNA
gctatagttccttact

SEQ ID NO: 20166 - DNA, 25 bp, synthetic construct
  source 1..25: mol_type = other DNA
gttgtagctccctttttcatttcgc

SEQ ID NO: 20167 - DNA, 25 bp, synthetic construct
  source 1..25: mol_type = other DNA
gttgtagctccctttttcatttcgc

SEQ ID NO: 20168 - DNA, 25 bp, synthetic construct
  source 1..25: mol_type = other DNA
gttgtagctccctttttcatttcgc

SEQ ID NO: 20169 - DNA, 25 bp, synthetic construct
  source 1..25: mol_type = other DNA
gttgtagctccctttttcatttcgc

SEQ ID NO: 20170 - DNA, 25 bp, synthetic construct
  source 1..25: mol_type = other DNA
gttgtagctccctttttcatttcgc

SEQ ID NO: 20171 - DNA, 25 bp, synthetic construct
  source 1..25: mol_type = other DNA
gttgtagctccctttttcatttcgc

SEQ ID NO: 20172 - DNA, 25 bp, synthetic construct
  source 1..25: mol_type = other DNA
gttgtagctccctttttcatttcgc

SEQ ID NO: 20173 - DNA, 25 bp, synthetic construct
  source 1..25: mol_type = other DNA
gttgtagctccctttttcatttcgc

SEQ ID NO: 20174 - DNA, 25 bp, synthetic construct
  source 1..25: mol_type = other DNA
gttgtagctccctttttcatttcgc

SEQ ID NO: 20175 - DNA, 25 bp, synthetic construct
  source 1..25: mol_type = other DNA
gttgtagctccctttttcatttcgc

SEQ ID NO: 20176 - DNA, 25 bp, synthetic construct
  source 1..25: mol_type = other DNA
gttgtagctccctttttcatttcgc

SEQ ID NO: 20177 - DNA, 25 bp, synthetic construct
  source 1..25: mol_type = other DNA
gttgtagctccctttttcatttcgc

SEQ ID NO: 20178 - DNA, 25 bp, synthetic construct
  source 1..25: mol_type = other DNA
gttgtagctccctttttcatttcgc

SEQ ID NO: 20179 - DNA, 25 bp, synthetic construct
  source 1..25: mol_type = other DNA
gttgtagctccctttttcatttcgc

SEQ ID NO: 20180 - DNA, 25 bp, synthetic construct
  source 1..25: mol_type = other DNA
gttgtagctccctttttcatttcgc

SEQ ID NO: 20181 - DNA, 25 bp, synthetic construct
  source 1..25: mol_type = other DNA
gttgtagctccctttttcatttcgc

SEQ ID NO: 20182 - DNA, 25 bp, synthetic construct
  source 1..25: mol_type = other DNA
gttgtagctccctttttcatttcgc

SEQ ID NO: 20183 - DNA, 14 bp, synthetic construct
  source 1..14: mol_type = other DNA
gtctttgtactctg

SEQ ID NO: 20184 - DNA, 14 bp, synthetic construct
  source 1..14: mol_type = other DNA
gtctttgtactctg

SEQ ID NO: 20185 - DNA, 14 bp, synthetic construct
  source 1..14: mol_type = other DNA
gtctttgtactctg

SEQ ID NO: 20186 - DNA, 14 bp, synthetic construct
  source 1..14: mol_type = other DNA
gtctttgtactctg

SEQ ID NO: 20187 - DNA, 14 bp, synthetic construct
  source 1..14: mol_type = other DNA
gtctttgtactctg

SEQ ID NO: 20188 - DNA, 14 bp, synthetic construct
  source 1..14: mol_type = other DNA
gtctttgtactctg

SEQ ID NO: 20189-20307 - skipped (119 entries)

SEQ ID NO: 20308 - DNA, 60 bp, synthetic construct; identical to SEQ ID NO: 10157
  source 1..60: mol_type = other DNA

SEQ ID NO: 20309 - DNA, 60 bp, synthetic construct; identical to SEQ ID NO: 10157
  source 1..60: mol_type = other DNA

SEQ ID NO: 20310 - DNA, 60 bp, synthetic construct; identical to SEQ ID NO: 10157
  source 1..60: mol_type = other DNA

SEQ ID NO: 20311 - DNA, 60 bp, synthetic construct; identical to SEQ ID NO: 10157
  source 1..60: mol_type = other DNA

SEQ ID NO: 20312 - DNA, 60 bp, synthetic construct; identical to SEQ ID NO: 10157
  source 1..60: mol_type = other DNA

SEQ ID NO: 20313 - DNA, 60 bp, synthetic construct; identical to SEQ ID NO: 10157
  source 1..60: mol_type = other DNA

SEQ ID NO: 20314 - DNA, 60 bp, synthetic construct; identical to SEQ ID NO: 10157
  source 1..60: mol_type = other DNA

SEQ ID NO: 20315 - DNA, 60 bp, synthetic construct; identical to SEQ ID NO: 10157
  source 1..60: mol_type = other DNA

SEQ ID NO: 20316 - DNA, 60 bp, synthetic construct; identical to SEQ ID NO: 10157
  source 1..60: mol_type = other DNA

SEQ ID NO: 20317 - DNA, 60 bp, synthetic construct; identical to SEQ ID NO: 10157
  source 1..60: mol_type = other DNA

SEQ ID NO: 20318 - DNA, 60 bp, synthetic construct; identical to SEQ ID NO: 10157
  source 1..60: mol_type = other DNA

SEQ ID NO: 20319 - DNA, 60 bp, synthetic construct; identical to SEQ ID NO: 10157
  source 1..60: mol_type = other DNA

SEQ ID NO: 20320 - DNA, 60 bp, synthetic construct; identical to SEQ ID NO: 10157
  source 1..60: mol_type = other DNA

SEQ ID NO: 20321 - DNA, 60 bp, synthetic construct; identical to SEQ ID NO: 10157
  source 1..60: mol_type = other DNA

SEQ ID NO: 20322 - DNA, 60 bp, synthetic construct; identical to SEQ ID NO: 10157
  source 1..60: mol_type = other DNA

SEQ ID NO: 20323 - DNA, 60 bp, synthetic construct; identical to SEQ ID NO: 10157
  source 1..60: mol_type = other DNA

SEQ ID NO: 20324 - DNA, 60 bp, synthetic construct; identical to SEQ ID NO: 10157
  source 1..60: mol_type = other DNA

SEQ ID NO: 20325 - DNA, 60 bp, synthetic construct; identical to SEQ ID NO: 10157
  source 1..60: mol_type = other DNA

SEQ ID NO: 20326 - DNA, 60 bp, synthetic construct; identical to SEQ ID NO: 10157
  source 1..60: mol_type = other DNA

SEQ ID NO: 20327 - DNA, 60 bp, synthetic construct; identical to SEQ ID NO: 10157
  source 1..60: mol_type = other DNA

SEQ ID NO: 20328 - DNA, 60 bp, synthetic construct; identical to SEQ ID NO: 10157
  source 1..60: mol_type = other DNA

SEQ ID NO: 20329 - DNA, 60 bp, synthetic construct; identical to SEQ ID NO: 10157
  source 1..60: mol_type = other DNA

SEQ ID NO: 20330 - DNA, 58 bp, synthetic construct; identical to SEQ ID NO: 10153
  source 1..58: mol_type = other DNA

SEQ ID NO: 20331 - DNA, 58 bp, synthetic construct; identical to SEQ ID NO: 10153
  source 1..58: mol_type = other DNA

SEQ ID NO: 20332 - DNA, 58 bp, synthetic construct; identical to SEQ ID NO: 10153
  source 1..58: mol_type = other DNA

SEQ ID NO: 20333 - DNA, 58 bp, synthetic construct; identical to SEQ ID NO: 10153
  source 1..58: mol_type = other DNA

SEQ ID NO: 20334 - DNA, 58 bp, synthetic construct; identical to SEQ ID NO: 10153
  source 1..58: mol_type = other DNA

SEQ ID NO: 20335 - DNA, 58 bp, synthetic construct; identical to SEQ ID NO: 10153
  source 1..58: mol_type = other DNA

SEQ ID NO: 20336 - DNA, 58 bp, synthetic construct; identical to SEQ ID NO: 10153
  source 1..58: mol_type = other DNA

SEQ ID NO: 20337 - DNA, 58 bp, synthetic construct; identical to SEQ ID NO: 10153
  source 1..58: mol_type = other DNA

SEQ ID NO: 20338 - DNA, 58 bp, synthetic construct; identical to SEQ ID NO: 10153
  source 1..58: mol_type = other DNA

SEQ ID NO: 20339 - DNA, 58 bp, synthetic construct; identical to SEQ ID NO: 10153
  source 1..58: mol_type = other DNA

SEQ ID NO: 20340 - DNA, 58 bp, synthetic construct; identical to SEQ ID NO: 10153
  source 1..58: mol_type = other DNA

SEQ ID NO: 20341 - DNA, 58 bp, synthetic construct; identical to SEQ ID NO: 10153
  source 1..58: mol_type = other DNA

SEQ ID NO: 20342 - DNA, 58 bp, synthetic construct; identical to SEQ ID NO: 10153
  source 1..58: mol_type = other DNA

SEQ ID NO: 20343 - DNA, 58 bp, synthetic construct; identical to SEQ ID NO: 10153
  source 1..58: mol_type = other DNA

SEQ ID NO: 20344 - DNA, 58 bp, synthetic construct; identical to SEQ ID NO: 10153
  source 1..58: mol_type = other DNA

SEQ ID NO: 20345 - DNA, 58 bp, synthetic construct; identical to SEQ ID NO: 10153
  source 1..58: mol_type = other DNA

SEQ ID NO: 20346 - DNA, 58 bp, synthetic construct; identical to SEQ ID NO: 10153
  source 1..58: mol_type = other DNA

SEQ ID NO: 20347 - DNA, 58 bp, synthetic construct; identical to SEQ ID NO: 10153
  source 1..58: mol_type = other DNA

SEQ ID NO: 20348 - DNA, 58 bp, synthetic construct; identical to SEQ ID NO: 10153
  source 1..58: mol_type = other DNA

SEQ ID NO: 20349 - DNA, 58 bp, synthetic construct; identical to SEQ ID NO: 10153
  source 1..58: mol_type = other DNA

SEQ ID NO: 20350 - DNA, 58 bp, synthetic construct; identical to SEQ ID NO: 10153
  source 1..58: mol_type = other DNA

SEQ ID NO: 20351 - DNA, 58 bp, synthetic construct; identical to SEQ ID NO: 10153
  source 1..58: mol_type = other DNA

SEQ ID NO: 20352 - DNA, 58 bp, synthetic construct; identical to SEQ ID NO: 10153
  source 1..58: mol_type = other DNA

SEQ ID NO: 20353 - DNA, 58 bp, synthetic construct; identical to SEQ ID NO: 10153
  source 1..58: mol_type = other DNA

SEQ ID NO: 20354 - DNA, 58 bp, synthetic construct; identical to SEQ ID NO: 10153
  source 1..58: mol_type = other DNA

SEQ ID NO: 20355 - DNA, 58 bp, synthetic construct; identical to SEQ ID NO: 10153
  source 1..58: mol_type = other DNA

SEQ ID NO: 20356 - DNA, 58 bp, synthetic construct; identical to SEQ ID NO: 10153
  source 1..58: mol_type = other DNA

SEQ ID NO: 20357 - DNA, 58 bp, synthetic construct; identical to SEQ ID NO: 10153
  source 1..58: mol_type = other DNA

SEQ ID NO: 20358 - DNA, 58 bp, synthetic construct; identical to SEQ ID NO: 10153
  source 1..58: mol_type = other DNA

SEQ ID NO: 20359 - DNA, 58 bp, synthetic construct; identical to SEQ ID NO: 10153
  source 1..58: mol_type = other DNA

SEQ ID NO: 20360 - DNA, 58 bp, synthetic construct; identical to SEQ ID NO: 10153
  source 1..58: mol_type = other DNA

SEQ ID NO: 20361 - DNA, 58 bp, synthetic construct; identical to SEQ ID NO: 10153
  source 1..58: mol_type = other DNA

SEQ ID NO: 20362 - DNA, 58 bp, synthetic construct; identical to SEQ ID NO: 10153
  source 1..58: mol_type = other DNA

SEQ ID NO: 20363 - DNA, 58 bp, synthetic construct; identical to SEQ ID NO: 10153
  source 1..58: mol_type = other DNA

SEQ ID NO: 20364 - DNA, 58 bp, synthetic construct; identical to SEQ ID NO: 10153
  source 1..58: mol_type = other DNA

SEQ ID NO: 20365 - DNA, 58 bp, synthetic construct; identical to SEQ ID NO: 10153
  source 1..58: mol_type = other DNA

SEQ ID NO: 20366 - DNA, 58 bp, synthetic construct; identical to SEQ ID NO: 10153
  source 1..58: mol_type = other DNA

SEQ ID NO: 20367 - DNA, 58 bp, synthetic construct; identical to SEQ ID NO: 10153
  source 1..58: mol_type = other DNA

SEQ ID NO: 20368 - DNA, 58 bp, synthetic construct; identical to SEQ ID NO: 10153
  source 1..58: mol_type = other DNA

SEQ ID NO: 20369 - DNA, 58 bp, synthetic construct; identical to SEQ ID NO: 10153
  source 1..58: mol_type = other DNA

SEQ ID NO: 20370 - DNA, 58 bp, synthetic construct; identical to SEQ ID NO: 10153
  source 1..58: mol_type = other DNA

SEQ ID NO: 20371 - DNA, 58 bp, synthetic construct; identical to SEQ ID NO: 10153
  source 1..58: mol_type = other DNA

SEQ ID NO: 20372 - DNA, 58 bp, synthetic construct; identical to SEQ ID NO: 10153
  source 1..58: mol_type = other DNA

SEQ ID NO: 20373 - DNA, 58 bp, synthetic construct; identical to SEQ ID NO: 10153
  source 1..58: mol_type = other DNA

SEQ ID NO: 20374 - DNA, 58 bp, synthetic construct; identical to SEQ ID NO: 10153
  source 1..58: mol_type = other DNA

SEQ ID NO: 20375 - DNA, 58 bp, synthetic construct; identical to SEQ ID NO: 10153
  source 1..58: mol_type = other DNA

SEQ ID NO: 20376 - DNA, 93 bp, synthetic construct; identical to SEQ ID NO: 10151
  source 1..93: mol_type = other DNA

SEQ ID NO: 20377 - DNA, 93 bp, synthetic construct; identical to SEQ ID NO: 10151
  source 1..93: mol_type = other DNA

SEQ ID NO: 20378 - DNA, 93 bp, synthetic construct; identical to SEQ ID NO: 10151
  source 1..93: mol_type = other DNA

SEQ ID NO: 20379 - DNA, 93 bp, synthetic construct; identical to SEQ ID NO: 10151
  source 1..93: mol_type = other DNA

SEQ ID NO: 20380 - DNA, 93 bp, synthetic construct; identical to SEQ ID NO: 10151
  source 1..93: mol_type = other DNA

SEQ ID NO: 20381 - DNA, 93 bp, synthetic construct; identical to SEQ ID NO: 10151
  source 1..93: mol_type = other DNA

SEQ ID NO: 20382 - DNA, 93 bp, synthetic construct; identical to SEQ ID NO: 10151
  source 1..93: mol_type = other DNA

SEQ ID NO: 20383 - DNA, 93 bp, synthetic construct; identical to SEQ ID NO: 10151
  source 1..93: mol_type = other DNA

SEQ ID NO: 20384 - DNA, 93 bp, synthetic construct; identical to SEQ ID NO: 10151
  source 1..93: mol_type = other DNA

SEQ ID NO: 20385 - DNA, 93 bp, synthetic construct; identical to SEQ ID NO: 10151
  source 1..93: mol_type = other DNA

SEQ ID NO: 20386 - DNA, 127 bp, synthetic construct; identical to SEQ ID NO: 10162
  source 1..127: mol_type = other DNA

SEQ ID NO: 20387 - DNA, 127 bp, synthetic construct; identical to SEQ ID NO: 10162
  source 1..127: mol_type = other DNA

SEQ ID NO: 20388 - DNA, 127 bp, synthetic construct; identical to SEQ ID NO: 10162
  source 1..127: mol_type = other DNA

SEQ ID NO: 20389 - DNA, 127 bp, synthetic construct; identical to SEQ ID NO: 10162
  source 1..127: mol_type = other DNA

SEQ ID NO: 20390 - DNA, 127 bp, synthetic construct; identical to SEQ ID NO: 10162
  source 1..127: mol_type = other DNA

SEQ ID NO: 20391 - DNA, 127 bp, synthetic construct; identical to SEQ ID NO: 10162
  source 1..127: mol_type = other DNA

SEQ ID NO: 20392 - DNA, 127 bp, synthetic construct; identical to SEQ ID NO: 10162
  source 1..127: mol_type = other DNA

SEQ ID NO: 20393 - DNA, 127 bp, synthetic construct; identical to SEQ ID NO: 10162
  source 1..127: mol_type = other DNA

SEQ ID NO: 20394 - DNA, 127 bp, synthetic construct; identical to SEQ ID NO: 10162
  source 1..127: mol_type = other DNA

SEQ ID NO: 20395 - DNA, 127 bp, synthetic construct; identical to SEQ ID NO: 10162
  source 1..127: mol_type = other DNA

SEQ ID NO: 20396 - DNA, 127 bp, synthetic construct; identical to SEQ ID NO: 10162
  source 1..127: mol_type = other DNA

SEQ ID NO: 20397 - DNA, 127 bp, synthetic construct; identical to SEQ ID NO: 10162
  source 1..127: mol_type = other DNA

SEQ ID NO: 20398 - DNA, 127 bp, synthetic construct; identical to SEQ ID NO: 10162
  source 1..127: mol_type = other DNA

SEQ ID NO: 20399 - DNA, 127 bp, synthetic construct; identical to SEQ ID NO: 10162
  source 1..127: mol_type = other DNA

SEQ ID NO: 20400 - DNA, 127 bp, synthetic construct; identical to SEQ ID NO: 10162
  source 1..127: mol_type = other DNA

SEQ ID NO: 20401 - DNA, 127 bp, synthetic construct; identical to SEQ ID NO: 10162
  source 1..127: mol_type = other DNA

SEQ ID NO: 20402 - DNA, 127 bp, synthetic construct; identical to SEQ ID NO: 10162
  source 1..127: mol_type = other DNA

SEQ ID NO: 20403 - DNA, 127 bp, synthetic construct; identical to SEQ ID NO: 10162
  source 1..127: mol_type = other DNA

SEQ ID NO: 20404 - DNA, 82 bp, synthetic construct; identical to SEQ ID NO: 10152
  source 1..82: mol_type = other DNA

SEQ ID NO: 20405 - DNA, 82 bp, synthetic construct; identical to SEQ ID NO: 10152
  source 1..82: mol_type = other DNA

SEQ ID NO: 20406 - DNA, 82 bp, synthetic construct; identical to SEQ ID NO: 10152
  source 1..82: mol_type = other DNA

SEQ ID NO: 20407 - DNA, 82 bp, synthetic construct; identical to SEQ ID NO: 10152
  source 1..82: mol_type = other DNA

SEQ ID NO: 20408 - DNA, 82 bp, synthetic construct; identical to SEQ ID NO: 10152
  source 1..82: mol_type = other DNA

SEQ ID NO: 20409 - DNA, 82 bp, synthetic construct; identical to SEQ ID NO: 10152
  source 1..82: mol_type = other DNA

SEQ ID NO: 20410 - DNA, 82 bp, synthetic construct; identical to SEQ ID NO: 10152
  source 1..82: mol_type = other DNA

SEQ ID NO: 20411 - DNA, 82 bp, synthetic construct; identical to SEQ ID NO: 10152
  source 1..82: mol_type = other DNA

SEQ ID NO: 20412 - DNA, 82 bp, synthetic construct; identical to SEQ ID NO: 10152
  source 1..82: mol_type = other DNA

SEQ ID NO: 20413 - DNA, 82 bp, synthetic construct; identical to SEQ ID NO: 10152
  source 1..82: mol_type = other DNA

SEQ ID NO: 20414 - DNA, 82 bp, synthetic construct; identical to SEQ ID NO: 10152
  source 1..82: mol_type = other DNA

SEQ ID NO: 20415 - DNA, 82 bp, synthetic construct; identical to SEQ ID NO: 10152
  source 1..82: mol_type = other DNA

SEQ ID NO: 20416 - DNA, 82 bp, synthetic construct; identical to SEQ ID NO: 10152
  source 1..82: mol_type = other DNA

SEQ ID NO: 20417 - DNA, 82 bp, synthetic construct; identical to SEQ ID NO: 10152
  source 1..82: mol_type = other DNA

SEQ ID NO: 20418 - DNA, 82 bp, synthetic construct; identical to SEQ ID NO: 10152
  source 1..82: mol_type = other DNA

SEQ ID NO: 20419 - DNA, 82 bp, synthetic construct; identical to SEQ ID NO: 10152
  source 1..82: mol_type = other DNA

SEQ ID NO: 20420 - DNA, 82 bp, synthetic construct; identical to SEQ ID NO: 10152
  source 1..82: mol_type = other DNA

SEQ ID NO: 20421 - DNA, 66 bp, synthetic construct; identical to SEQ ID NO: 10161
  source 1..66: mol_type = other DNA

SEQ ID NO: 20422 - DNA, 66 bp, synthetic construct; identical to SEQ ID NO: 10161
  source 1..66: mol_type = other DNA

SEQ ID NO: 20423 - DNA, 66 bp, synthetic construct; identical to SEQ ID NO: 10161
  source 1..66: mol_type = other DNA

SEQ ID NO: 20424 - DNA, 66 bp, synthetic construct; identical to SEQ ID NO: 10161
  source 1..66: mol_type = other DNA

SEQ ID NO: 20425 - DNA, 66 bp, synthetic construct; identical to SEQ ID NO: 10161
  source 1..66: mol_type = other DNA

SEQ ID NO: 20426 - DNA, 66 bp, synthetic construct; identical to SEQ ID NO: 10161
  source 1..66: mol_type = other DNA

SEQ ID NO: 20427 - DNA, 76 bp, synthetic construct; identical to SEQ ID NO: 11012
  source 1..76: mol_type = other DNA

SEQ ID NO: 20428 - DNA, 76 bp, synthetic construct; identical to SEQ ID NO: 11012
  source 1..76: mol_type = other DNA

SEQ ID NO: 20429 - DNA, 76 bp, synthetic construct; identical to SEQ ID NO: 11012
  source 1..76: mol_type = other DNA

SEQ ID NO: 20430 - DNA, 76 bp, synthetic construct; identical to SEQ ID NO: 11012
  source 1..76: mol_type = other DNA

SEQ ID NO: 20431 - DNA, 76 bp, synthetic construct; identical to SEQ ID NO: 11012
  source 1..76: mol_type = other DNA

SEQ ID NO: 20432 - DNA, 76 bp, synthetic construct; identical to SEQ ID NO: 11012
  source 1..76: mol_type = other DNA

SEQ ID NO: 20433 - DNA, 76 bp, synthetic construct; identical to SEQ ID NO: 11012
  source 1..76: mol_type = other DNA

SEQ ID NO: 20434 - DNA, 76 bp, synthetic construct; identical to SEQ ID NO: 11012
  source 1..76: mol_type = other DNA

SEQ ID NO: 20435 - DNA, 76 bp, synthetic construct; identical to SEQ ID NO: 11012
  source 1..76: mol_type = other DNA

SEQ ID NO: 20436 - DNA, 76 bp, synthetic construct; identical to SEQ ID NO: 11012
  source 1..76: mol_type = other DNA

SEQ ID NO: 20437 - DNA, 76 bp, synthetic construct; identical to SEQ ID NO: 11012
  source 1..76: mol_type = other DNA

SEQ ID NO: 20438 - DNA, 76 bp, synthetic construct; identical to SEQ ID NO: 11012
  source 1..76: mol_type = other DNA

SEQ ID NO: 20439 - DNA, 76 bp, synthetic construct; identical to SEQ ID NO: 11012
  source 1..76: mol_type = other DNA

SEQ ID NO: 20440 - DNA, 76 bp, synthetic construct; identical to SEQ ID NO: 11012
  source 1..76: mol_type = other DNA

SEQ ID NO: 20441 - DNA, 76 bp, synthetic construct; identical to SEQ ID NO: 11012
  source 1..76: mol_type = other DNA

SEQ ID NO: 20442 - DNA, 76 bp, synthetic construct; identical to SEQ ID NO: 11012
  source 1..76: mol_type = other DNA

SEQ ID NO: 20443 - DNA, 76 bp, synthetic construct; identical to SEQ ID NO: 11012
  source 1..76: mol_type = other DNA

SEQ ID NO: 20444 - DNA, 76 bp, synthetic construct; identical to SEQ ID NO: 11012
  source 1..76: mol_type = other DNA

SEQ ID NO: 20445 - DNA, 76 bp, synthetic construct; identical to SEQ ID NO: 11012
  source 1..76: mol_type = other DNA

SEQ ID NO: 20446 - DNA, 76 bp, synthetic construct; identical to SEQ ID NO: 11012
  source 1..76: mol_type = other DNA

SEQ ID NO: 20447 - DNA, 76 bp, synthetic construct; identical to SEQ ID NO: 11012
  source 1..76: mol_type = other DNA

SEQ ID NO: 20448 - DNA, 76 bp, synthetic construct; identical to SEQ ID NO: 11012
  source 1..76: mol_type = other DNA

SEQ ID NO: 20449 - DNA, 76 bp, synthetic construct
  source 1..76: mol_type = other DNA
gttttagtactctggaaacagaatctactaaaacaaggcaaaatgccgtgtttatctcgtcaacttgttggcgaga

SEQ ID NO: 20450 - DNA, 76 bp, synthetic construct; identical to SEQ ID NO: 20449
  source 1..76: mol_type = other DNA

SEQ ID NO: 20451 - DNA, 76 bp, synthetic construct; identical to SEQ ID NO: 20449
  source 1..76: mol_type = other DNA

SEQ ID NO: 20452 - DNA, 76 bp, synthetic construct; identical to SEQ ID NO: 20449
  source 1..76: mol_type = other DNA

SEQ ID NO: 20453 - DNA, 76 bp, synthetic construct; identical to SEQ ID NO: 20449
  source 1..76: mol_type = other DNA

SEQ ID NO: 20454 - DNA, 76 bp, synthetic construct; identical to SEQ ID NO: 20449
  source 1..76: mol_type = other DNA

SEQ ID NO: 20455 - DNA, 76 bp, synthetic construct; identical to SEQ ID NO: 20449
  source 1..76: mol_type = other DNA

SEQ ID NO: 20456 - DNA, 76 bp, synthetic construct; identical to SEQ ID NO: 20449
  source 1..76: mol_type = other DNA

SEQ ID NO: 20457 - DNA, 76 bp, synthetic construct; identical to SEQ ID NO: 20449
  source 1..76: mol_type = other DNA

SEQ ID NO: 20458 - DNA, 76 bp, synthetic construct; identical to SEQ ID NO: 20449
  source 1..76: mol_type = other DNA

SEQ ID NO: 20459 - DNA, 76 bp, synthetic construct; identical to SEQ ID NO: 20449
  source 1..76: mol_type = other DNA

SEQ ID NO: 20460 - DNA, 76 bp, synthetic construct; identical to SEQ ID NO: 20449
  source 1..76: mol_type = other DNA

SEQ ID NO: 20461 - DNA, 76 bp, synthetic construct; identical to SEQ ID NO: 20449
  source 1..76: mol_type = other DNA

SEQ ID NO: 20462 - DNA, 76 bp, synthetic construct; identical to SEQ ID NO: 20449
  source 1..76: mol_type = other DNA

SEQ ID NO: 20463 - DNA, 76 bp, synthetic construct; identical to SEQ ID NO: 20449
  source 1..76: mol_type = other DNA

SEQ ID NO: 20464 - DNA, 76 bp, synthetic construct; identical to SEQ ID NO: 20449
  source 1..76: mol_type = other DNA

SEQ ID NO: 20465 - DNA, 76 bp, synthetic construct; identical to SEQ ID NO: 20449
  source 1..76: mol_type = other DNA

SEQ ID NO: 20466 - DNA, 76 bp, synthetic construct; identical to SEQ ID NO: 20449
  source 1..76: mol_type = other DNA

SEQ ID NO: 20467 - DNA, 76 bp, synthetic construct; identical to SEQ ID NO: 20449
  source 1..76: mol_type = other DNA

SEQ ID NO: 20468 - DNA, 76 bp, synthetic construct; identical to SEQ ID NO: 20449
  source 1..76: mol_type = other DNA

SEQ ID NO: 20469 - DNA, 76 bp, synthetic construct; identical to SEQ ID NO: 20449
  source 1..76: mol_type = other DNA

SEQ ID NO: 20470 - DNA, 76 bp, synthetic construct; identical to SEQ ID NO: 20449
  source 1..76: mol_type = other DNA

SEQ ID NO: 20471 - DNA, 76 bp, synthetic construct; identical to SEQ ID NO: 20449
  source 1..76: mol_type = other DNA

SEQ ID NO: 20472 - DNA, 76 bp, synthetic construct; identical to SEQ ID NO: 20449
  source 1..76: mol_type = other DNA

SEQ ID NO: 20473 - DNA, 76 bp, synthetic construct; identical to SEQ ID NO: 20449
  source 1..76: mol_type = other DNA

SEQ ID NO: 20474 - DNA, 76 bp, synthetic construct; identical to SEQ ID NO: 20449
  source 1..76: mol_type = other DNA

SEQ ID NO: 20475 - DNA, 76 bp, synthetic construct; identical to SEQ ID NO: 20449
  source 1..76: mol_type = other DNA

SEQ ID NO: 20476 - DNA, 76 bp, synthetic construct; identical to SEQ ID NO: 20449
  source 1..76: mol_type = other DNA

SEQ ID NO: 20477 - DNA, 76 bp, synthetic construct; identical to SEQ ID NO: 20449
  source 1..76: mol_type = other DNA

SEQ ID NO: 20478 - DNA, 76 bp, synthetic construct; identical to SEQ ID NO: 20449
  source 1..76: mol_type = other DNA

SEQ ID NO: 20479 - DNA, 76 bp, synthetic construct; identical to SEQ ID NO: 20449
  source 1..76: mol_type = other DNA

SEQ ID NO: 20480 - DNA, 76 bp, synthetic construct; identical to SEQ ID NO: 20449
  source 1..76: mol_type = other DNA

SEQ ID NO: 20481 - DNA, 76 bp, synthetic construct; identical to SEQ ID NO: 20449
  source 1..76: mol_type = other DNA

SEQ ID NO: 20482 - DNA, 76 bp, synthetic construct; identical to SEQ ID NO: 20449
  source 1..76: mol_type = other DNA

SEQ ID NO: 20483 - DNA, 76 bp, synthetic construct; identical to SEQ ID NO: 20449
  source 1..76: mol_type = other DNA

SEQ ID NO: 20484 - DNA, 76 bp, synthetic construct; identical to SEQ ID NO: 20449
  source 1..76: mol_type = other DNA

SEQ ID NO: 20485 - DNA, 76 bp, synthetic construct; identical to SEQ ID NO: 20449
  source 1..76: mol_type = other DNA

SEQ ID NO: 20486 - DNA, 76 bp, synthetic construct; identical to SEQ ID NO: 20449
  source 1..76: mol_type = other DNA

SEQ ID NO: 20487 - DNA, 76 bp, synthetic construct; identical to SEQ ID NO: 20449
  source 1..76: mol_type = other DNA

SEQ ID NO: 20488 - DNA, 76 bp, synthetic construct; identical to SEQ ID NO: 20449
  source 1..76: mol_type = other DNA

SEQ ID NO: 20489 - DNA, 76 bp, synthetic construct; identical to SEQ ID NO: 20449
  source 1..76: mol_type = other DNA

SEQ ID NO: 20490 - DNA, 76 bp, synthetic construct; identical to SEQ ID NO: 20449
  source 1..76: mol_type = other DNA

SEQ ID NO: 20491 - DNA, 76 bp, synthetic construct; identical to SEQ ID NO: 20449
  source 1..76: mol_type = other DNA

SEQ ID NO: 20492 - DNA, 76 bp, synthetic construct; identical to SEQ ID NO: 20449
  source 1..76: mol_type = other DNA

SEQ ID NO: 20493 - DNA, 76 bp, synthetic construct; identical to SEQ ID NO: 20449
  source 1..76: mol_type = other DNA

SEQ ID NO: 20494 - DNA, 76 bp, synthetic construct; identical to SEQ ID NO: 20449
  source 1..76: mol_type = other DNA

SEQ ID NO: 20495 - DNA, 121 bp, synthetic construct
  source 1..121: mol_type = other DNA
gttgtagctccctttctcatttcggaaacgaaatgagaaccgttgctacaataaggccgtctgaaaagatgtgccgcaacgctctgccccttaaagcttctgctttaaggggcatcgttta

SEQ ID NO: 20496 - DNA, 121 bp, synthetic construct; identical to SEQ ID NO: 20495
  source 1..121: mol_type = other DNA

SEQ ID NO: 20497 - DNA, 121 bp, synthetic construct; identical to SEQ ID NO: 20495
  source 1..121: mol_type = other DNA

SEQ ID NO: 20498 - DNA, 121 bp, synthetic construct; identical to SEQ ID NO: 20495
  source 1..121: mol_type = other DNA

SEQ ID NO: 20499 - DNA, 121 bp, synthetic construct; identical to SEQ ID NO: 20495
  source 1..121: mol_type = other DNA

SEQ ID NO: 20500 - DNA, 121 bp, synthetic construct; identical to SEQ ID NO: 20495
  source 1..121: mol_type = other DNA

SEQ ID NO: 20501 - DNA, 121 bp, synthetic construct; identical to SEQ ID NO: 20495
  source 1..121: mol_type = other DNA

SEQ ID NO: 20502 - DNA, 121 bp, synthetic construct; identical to SEQ ID NO: 20495
  source 1..121: mol_type = other DNA

SEQ ID NO: 20503 - DNA, 121 bp, synthetic construct; identical to SEQ ID NO: 20495
  source 1..121: mol_type = other DNA

SEQ ID NO: 20504 - DNA, 121 bp, synthetic construct; identical to SEQ ID NO: 20495
  source 1..121: mol_type = other DNA

SEQ ID NO: 20505 - DNA, 147 bp, synthetic construct
  source 1..147: mol_type = other DNA
gctatagttccttactgaaaggtaagttgctatagtaagggcaacagacccgaggcgttggggatcgcctagcccgtgtttacgggctctccccatattcaaaataatgacagacgagcaccttggagcatttatctccgaggtgct

SEQ ID NO: 20506 - DNA, 147 bp, synthetic construct; identical to SEQ ID NO: 20505
  source 1..147: mol_type = other DNA

SEQ ID NO: 20507 - DNA, 147 bp, synthetic construct; identical to SEQ ID NO: 20505
  source 1..147: mol_type = other DNA

SEQ ID NO: 20508 - DNA, 147 bp, synthetic construct; identical to SEQ ID NO: 20505
  source 1..147: mol_type = other DNA

SEQ ID NO: 20509 - DNA, 147 bp, synthetic construct; identical to SEQ ID NO: 20505
  source 1..147: mol_type = other DNA

SEQ ID NO: 20510 - DNA, 147 bp, synthetic construct; identical to SEQ ID NO: 20505
  source 1..147: mol_type = other DNA

SEQ ID NO: 20511 - DNA, 147 bp, synthetic construct; identical to SEQ ID NO: 20505
  source 1..147: mol_type = other DNA

SEQ ID NO: 20512 - DNA, 147 bp, synthetic construct; identical to SEQ ID NO: 20505
  source 1..147: mol_type = other DNA

SEQ ID NO: 20513 - DNA, 147 bp, synthetic construct; identical to SEQ ID NO: 20505
  source 1..147: mol_type = other DNA

SEQ ID NO: 20514 - DNA, 147 bp, synthetic construct; identical to SEQ ID NO: 20505
  source 1..147: mol_type = other DNA

SEQ ID NO: 20515 - DNA, 147 bp, synthetic construct; identical to SEQ ID NO: 20505
  source 1..147: mol_type = other DNA

SEQ ID NO: 20516 - DNA, 147 bp, synthetic construct; identical to SEQ ID NO: 20505
  source 1..147: mol_type = other DNA

SEQ ID NO: 20517 - DNA, 147 bp, synthetic construct; identical to SEQ ID NO: 20505
  source 1..147: mol_type = other DNA

SEQ ID NO: 20518 - DNA, 147 bp, synthetic construct; identical to SEQ ID NO: 20505
  source 1..147: mol_type = other DNA

SEQ ID NO: 20519 - DNA, 147 bp, synthetic construct; identical to SEQ ID NO: 20505
  source 1..147: mol_type = other DNA

SEQ ID NO: 20520 - DNA, 147 bp, synthetic construct; identical to SEQ ID NO: 20505
  source 1..147: mol_type = other DNA

SEQ ID NO: 20521 - DNA, 147 bp, synthetic construct; identical to SEQ ID NO: 20505
  source 1..147: mol_type = other DNA

SEQ ID NO: 20522 - DNA, 147 bp, synthetic construct; identical to SEQ ID NO: 20505
  source 1..147: mol_type = other DNA

SEQ ID NO: 20523 - DNA, 111 bp, synthetic construct
  source 1..111: mol_type = other DNA
gttgtagctccctttttcatttcgcgaaagcgaaatgaaaaacgttgttacaataagagatgaatttctcgcaaagctctgcctcttgaaatttcggtttcaagaggcatc

SEQ ID NO: 20524 - DNA, 111 bp, synthetic construct; identical to SEQ ID NO: 20523
  source 1..111: mol_type = other DNA

SEQ ID NO: 20525 - DNA, 111 bp, synthetic construct; identical to SEQ ID NO: 20523
  source 1..111: mol_type = other DNA

SEQ ID NO: 20526 - DNA, 111 bp, synthetic construct; identical to SEQ ID NO: 20523
  source 1..111: mol_type = other DNA

SEQ ID NO: 20527 - DNA, 111 bp, synthetic construct; identical to SEQ ID NO: 20523
  source 1..111: mol_type = other DNA

SEQ ID NO: 20528 - DNA, 111 bp, synthetic construct; identical to SEQ ID NO: 20523
  source 1..111: mol_type = other DNA

SEQ ID NO: 20529 - DNA, 111 bp, synthetic construct; identical to SEQ ID NO: 20523
  source 1..111: mol_type = other DNA

SEQ ID NO: 20530 - DNA, 111 bp, synthetic construct; identical to SEQ ID NO: 20523
  source 1..111: mol_type = other DNA

SEQ ID NO: 20531 - DNA, 111 bp, synthetic construct; identical to SEQ ID NO: 20523
  source 1..111: mol_type = other DNA

SEQ ID NO: 20532 - DNA, 111 bp, synthetic construct; identical to SEQ ID NO: 20523
  source 1..111: mol_type = other DNA

SEQ ID NO: 20533 - DNA, 111 bp, synthetic construct; identical to SEQ ID NO: 20523
  source 1..111: mol_type = other DNA

SEQ ID NO: 20534 - DNA, 111 bp, synthetic construct; identical to SEQ ID NO: 20523
  source 1..111: mol_type = other DNA

SEQ ID NO: 20535 - DNA, 111 bp, synthetic construct; identical to SEQ ID NO: 20523
  source 1..111: mol_type = other DNA

SEQ ID NO: 20536 - DNA, 111 bp, synthetic construct; identical to SEQ ID NO: 20523
  source 1..111: mol_type = other DNA

SEQ ID NO: 20537 - DNA, 111 bp, synthetic construct; identical to SEQ ID NO: 20523
  source 1..111: mol_type = other DNA

SEQ ID NO: 20538 - DNA, 111 bp, synthetic construct; identical to SEQ ID NO: 20523
  source 1..111: mol_type = other DNA

SEQ ID NO: 20539 - DNA, 111 bp, synthetic construct; identical to SEQ ID NO: 20523
  source 1..111: mol_type = other DNA

SEQ ID NO: 20540 - DNA, 84 bp, synthetic construct
  source 1..84: mol_type = other DNA
gtctttgtactctggtaccagaagctacaaagataaggcttcatgccgaaatcaacaccctgtcattttatggcagggtgtttt

SEQ ID NO: 20541 - DNA, 84 bp, synthetic construct; identical to SEQ ID NO: 20540
  source 1..84: mol_type = other DNA

SEQ ID NO: 20542 - DNA, 84 bp, synthetic construct; identical to SEQ ID NO: 20540
  source 1..84: mol_type = other DNA

SEQ ID NO: 20543 - DNA, 84 bp, synthetic construct; identical to SEQ ID NO: 20540
  source 1..84: mol_type = other DNA

SEQ ID NO: 20544 - DNA, 84 bp, synthetic construct; identical to SEQ ID NO: 20540
  source 1..84: mol_type = other DNA

SEQ ID NO: 20545 - DNA, 84 bp, synthetic construct; identical to SEQ ID NO: 20540
  source 1..84: mol_type = other DNA

SEQ ID NO: 20546 - DNA, 20 bp, synthetic construct
  source 1..20: mol_type = other DNA
ctgtgctgaccatcgacaag

SEQ ID NO: 20547 - DNA, 20 bp, synthetic construct
  source 1..20: mol_type = other DNA
ctgtgctgaccatcgacaag

SEQ ID NO: 20548 - DNA, 20 bp, synthetic construct
  source 1..20: mol_type = other DNA
ctgtgctgaccatcgacaag

SEQ ID NO: 20549 - DNA, 20 bp, synthetic construct
  source 1..20: mol_type = other DNA
ctgtgctgaccatcgacaag

SEQ ID NO: 20550 - DNA, 20 bp, synthetic construct
  source 1..20: mol_type = other DNA
ctgtgctgaccatcgacaag

SEQ ID NO: 20551 - DNA, 20 bp, synthetic construct
  source 1..20: mol_type = other DNA
ctgtgctgaccatcgacaag

SEQ ID NO: 20552 - DNA, 20 bp, synthetic construct
  source 1..20: mol_type = other DNA
ctgtgctgaccatcgacaag

SEQ ID NO: 20553 - DNA, 20 bp, synthetic construct
  source 1..20: mol_type = other DNA
ctgtgctgaccatcgacaag

SEQ ID NO: 20554 - DNA, 20 bp, synthetic construct
  source 1..20: mol_type = other DNA
ctgtgctgaccatcgacaag

SEQ ID NO: 20555 - DNA, 20 bp, synthetic construct
  source 1..20: mol_type = other DNA
ctgtgctgaccatcgacaag

SEQ ID NO: 20556 - DNA, 20 bp, synthetic construct
  source 1..20: mol_type = other DNA
ctgtgctgaccatcgacaag

SEQ ID NO: 20557 - DNA, 20 bp, synthetic construct
  source 1..20: mol_type = other DNA
ctgtgctgaccatcgacaag

SEQ ID NO: 20558 - DNA, 20 bp, synthetic construct
  source 1..20: mol_type = other DNA
ctgtgctgaccatcgacaag

SEQ ID NO: 20559 - DNA, 20 bp, synthetic construct
  source 1..20: mol_type = other DNA
ctgtgctgaccatcgacaag

SEQ ID NO: 20560 - DNA, 20 bp, synthetic construct
  source 1..20: mol_type = other DNA
ctgtgctgaccatcgacaag

SEQ ID NO: 20561 - DNA, 20 bp, synthetic construct
  source 1..20: mol_type = other DNA
ctgtgctgaccatcgacaag

SEQ ID NO: 20562 - DNA, 20 bp, synthetic construct
  source 1..20: mol_type = other DNA
ctgtgctgaccatcgacaag

SEQ ID NO: 20563 - DNA, 20 bp, synthetic construct
  source 1..20: mol_type = other DNA
ctgtgctgaccatcgacaag

SEQ ID NO: 20564 - DNA, 20 bp, synthetic construct
  source 1..20: mol_type = other DNA
ctgtgctgaccatcgacaag

SEQ ID NO: 20565 - DNA, 20 bp, synthetic construct
  source 1..20: mol_type = other DNA
ctgtgctgaccatcgacaag

SEQ ID NO: 20566 - DNA, 20 bp, synthetic construct
  source 1..20: mol_type = other DNA
ctgtgctgaccatcgacaag

SEQ ID NO: 20567 - DNA, 20 bp, synthetic construct
  source 1..20: mol_type = other DNA
ctgtgctgaccatcgacaag

SEQ ID NO: 20568 - DNA, 20 bp, synthetic construct
  source 1..20: mol_type = other DNA
ctgtgctgaccatcgacaag

SEQ ID NO: 20569 - DNA, 20 bp, synthetic construct
  source 1..20: mol_type = other DNA
ctgtgctgaccatcgacaag

SEQ ID NO: 20570 - DNA, 20 bp, synthetic construct
  source 1..20: mol_type = other DNA
ctgtgctgaccatcgacaag

SEQ ID NO: 20571 - DNA, 20 bp, synthetic construct
  source 1..20: mol_type = other DNA
ctgtgctgaccatcgacaag

SEQ ID NO: 20572 - DNA, 20 bp, synthetic construct
  source 1..20: mol_type = other DNA
ctgtgctgaccatcgacaag

SEQ ID NO: 20573 - DNA, 20 bp, synthetic construct
  source 1..20: mol_type = other DNA
ctgtgctgaccatcgacaag

SEQ ID NO: 20574 - DNA, 20 bp, synthetic construct
  source 1..20: mol_type = other DNA
ctgtgctgaccatcgacaag

SEQ ID NO: 20575 - DNA, 20 bp, synthetic construct
  source 1..20: mol_type = other DNA
ctgtgctgaccatcgacaag

SEQ ID NO: 20576 - DNA, 20 bp, synthetic construct
  source 1..20: mol_type = other DNA
ctgtgctgaccatcgacaag

SEQ ID NO: 20577 - DNA, 20 bp, synthetic construct
  source 1..20: mol_type = other DNA
ctgtgctgaccatcgacaag

SEQ ID NO: 20578 - DNA, 20 bp, synthetic construct
  source 1..20: mol_type = other DNA
ctgtgctgaccatcgacaag

SEQ ID NO: 20579 - DNA, 20 bp, synthetic construct
  source 1..20: mol_type = other DNA
ctgtgctgaccatcgacaag

SEQ ID NO: 20580 - DNA, 20 bp, synthetic construct
  source 1..20: mol_type = other DNA
ctgtgctgaccatcgacaag

SEQ ID NO: 20581 - DNA, 20 bp, synthetic construct
  source 1..20: mol_type = other DNA
ctgtgctgaccatcgacaag

SEQ ID NO: 20582 - DNA, 20 bp, synthetic construct
  source 1..20: mol_type = other DNA
ctgtgctgaccatcgacaag

SEQ ID NO: 20583 - DNA, 20 bp, synthetic construct
  source 1..20: mol_type = other DNA
ctgtgctgaccatcgacaag

SEQ ID NO: 20584 - DNA, 20 bp, synthetic construct
  source 1..20: mol_type = other DNA
ctgtgctgaccatcgacaag

SEQ ID NO: 20585 - DNA, 20 bp, synthetic construct
  source 1..20: mol_type = other DNA
ctgtgctgaccatcgacaag

SEQ ID NO: 20586 - DNA, 20 bp, synthetic construct
  source 1..20: mol_type = other DNA
ctgtgctgaccatcgacaag

SEQ ID NO: 20587 - DNA, 20 bp, synthetic construct
  source 1..20: mol_type = other DNA
ctgtgctgaccatcgacaag

SEQ ID NO: 20588 - DNA, 20 bp, synthetic construct
  source 1..20: mol_type = other DNA
ctgtgctgaccatcgacaag

SEQ ID NO: 20589 - DNA, 20 bp, synthetic construct
  source 1..20: mol_type = other DNA
ctgtgctgaccatcgacaag

SEQ ID NO: 20590 - DNA, 20 bp, synthetic construct
  source 1..20: mol_type = other DNA
ctgtgctgaccatcgacaag

SEQ ID NO: 20591 - DNA, 20 bp, synthetic construct
  source 1..20: mol_type = other DNA
ctgtgctgaccatcgacaag

SEQ ID NO: 20592 - DNA, 20 bp, synthetic construct
  source 1..20: mol_type = other DNA
ctgtgctgaccatcgacaag

SEQ ID NO: 20593 - DNA, 20 bp, synthetic construct
  source 1..20: mol_type = other DNA
ctgtgctgaccatcgacaag

SEQ ID NO: 20594 - DNA, 20 bp, synthetic construct
  source 1..20: mol_type = other DNA
ctgtgctgaccatcgacaag

SEQ ID NO: 20595 - DNA, 20 bp, synthetic construct
  source 1..20: mol_type = other DNA
ctgtgctgaccatcgacaag

SEQ ID NO: 20596 - DNA, 20 bp, synthetic construct
  source 1..20: mol_type = other DNA
ctgtgctgaccatcgacaag

SEQ ID NO: 20597 - DNA, 20 bp, synthetic construct
  source 1..20: mol_type = other DNA
ctgtgctgaccatcgacaag

SEQ ID NO: 20598 - DNA, 20 bp, synthetic construct
  source 1..20: mol_type = other DNA
ctgtgctgaccatcgacaag

SEQ ID NO: 20599 - DNA, 20 bp, synthetic construct
  source 1..20: mol_type = other DNA
ctgtgctgaccatcgacaag

SEQ ID NO: 20600 - DNA, 20 bp, synthetic construct
  source 1..20: mol_type = other DNA
ctgtgctgaccatcgacaag

SEQ ID NO: 20601 - DNA, 20 bp, synthetic construct
  source 1..20: mol_type = other DNA
ctgtgctgaccatcgacaag

SEQ ID NO: 20602 - DNA, 20 bp, synthetic construct
  source 1..20: mol_type = other DNA
ctgtgctgaccatcgacaag

SEQ ID NO: 20603 - DNA, 20 bp, synthetic construct
  source 1..20: mol_type = other DNA
ctgtgctgaccatcgacaag

SEQ ID NO: 20604 - DNA, 20 bp, synthetic construct
  source 1..20: mol_type = other DNA
ctgtgctgaccatcgacaag

SEQ ID NO: 20605 - DNA, 20 bp, synthetic construct
  source 1..20: mol_type = other DNA
ctgtgctgaccatcgacaag

SEQ ID NO: 20606 - DNA, 20 bp, synthetic construct
  source 1..20: mol_type = other DNA
ctgtgctgaccatcgacaag

SEQ ID NO: 20607 - DNA, 20 bp, synthetic construct
  source 1..20: mol_type = other DNA
ctgtgctgaccatcgacaag

SEQ ID NO: 20608 - DNA, 20 bp, synthetic construct
  source 1..20: mol_type = other DNA
ctgtgctgaccatcgacaag

SEQ ID NO: 20609 - DNA, 20 bp, synthetic construct
  source 1..20: mol_type = other DNA
ctgtgctgaccatcgacaag

SEQ ID NO: 20610 - DNA, 20 bp, synthetic construct
  source 1..20: mol_type = other DNA
ctgtgctgaccatcgacaag

SEQ ID NO: 20611 - DNA, 20 bp, synthetic construct
  source 1..20: mol_type = other DNA
ctgtgctgaccatcgacaag

SEQ ID NO: 20612 - DNA, 20 bp, synthetic construct
  source 1..20: mol_type = other DNA
ctgtgctgaccatcgacaag

SEQ ID NO: 20613 - DNA, 20 bp, synthetic construct
  source 1..20: mol_type = other DNA
ctgtgctgaccatcgacaag

SEQ ID NO: 20614 - DNA, 20 bp, synthetic construct
  source 1..20: mol_type = other DNA
ctgtgctgaccatcgacaag

SEQ ID NO: 20615 - DNA, 20 bp, synthetic construct
  source 1..20: mol_type = other DNA
ctgtgctgaccatcgacaag

SEQ ID NO: 20616 - DNA, 20 bp, synthetic construct
  source 1..20: mol_type = other DNA
ctgtgctgaccatcgacaag

SEQ ID NO: 20617 - DNA, 20 bp, synthetic construct
  source 1..20: mol_type = other DNA
ctgtgctgaccatcgacaag

SEQ ID NO: 20618 - DNA, 20 bp, synthetic construct
  source 1..20: mol_type = other DNA
ctgtgctgaccatcgacaag

SEQ ID NO: 20619 - DNA, 20 bp, synthetic construct
  source 1..20: mol_type = other DNA
ctgtgctgaccatcgacaag

SEQ ID NO: 20620 - DNA, 20 bp, synthetic construct
  source 1..20: mol_type = other DNA
ctgtgctgaccatcgacaag

SEQ ID NO: 20621 - DNA, 20 bp, synthetic construct
  source 1..20: mol_type = other DNA
ctgtgctgaccatcgacaag

SEQ ID NO: 20622 - DNA, 20 bp, synthetic construct
  source 1..20: mol_type = other DNA
ctgtgctgaccatcgacaag

SEQ ID NO: 20623 - DNA, 20 bp, synthetic construct
  source 1..20: mol_type = other DNA
ctgtgctgaccatcgacaag

SEQ ID NO: 20624 - DNA, 20 bp, synthetic construct
  source 1..20: mol_type = other DNA
ctgtgctgaccatcgacaag

SEQ ID NO: 20625 - DNA, 20 bp, synthetic construct
  source 1..20: mol_type = other DNA
ctgtgctgaccatcgacaag

SEQ ID NO: 20626 - DNA, 20 bp, synthetic construct
  source 1..20: mol_type = other DNA
ctgtgctgaccatcgacaag

SEQ ID NO: 20627 - DNA, 20 bp, synthetic construct
  source 1..20: mol_type = other DNA
ctgtgctgaccatcgacaag

SEQ ID NO: 20628 - DNA, 20 bp, synthetic construct
  source 1..20: mol_type = other DNA
ctgtgctgaccatcgacaag

SEQ ID NO: 20629 - DNA, 20 bp, synthetic construct
  source 1..20: mol_type = other DNA
ctgtgctgaccatcgacaag

SEQ ID NO: 20630 - DNA, 20 bp, synthetic construct
  source 1..20: mol_type = other DNA
ctgtgctgaccatcgacaag

SEQ ID NO: 20631 - DNA, 20 bp, synthetic construct
  source 1..20: mol_type = other DNA
ctgtgctgaccatcgacaag

SEQ ID NO: 20632 - DNA, 20 bp, synthetic construct
  source 1..20: mol_type = other DNA
ctgtgctgaccatcgacaag

SEQ ID NO: 20633 - DNA, 20 bp, synthetic construct
  source 1..20: mol_type = other DNA
ctgtgctgaccatcgacaag

SEQ ID NO: 20634 - DNA, 20 bp, synthetic construct
  source 1..20: mol_type = other DNA
ctgtgctgaccatcgacaag

SEQ ID NO: 20635 - DNA, 20 bp, synthetic construct
  source 1..20: mol_type = other DNA
ctgtgctgaccatcgacaag

SEQ ID NO: 20636 - DNA, 20 bp, synthetic construct
  source 1..20: mol_type = other DNA
ggctgtgctgaccatcgaca

SEQ ID NO: 20637 - DNA, 20 bp, synthetic construct
  source 1..20: mol_type = other DNA
ggctgtgctgaccatcgaca

SEQ ID NO: 20638 - DNA, 20 bp, synthetic construct
  source 1..20: mol_type = other DNA
ggctgtgctgaccatcgaca

SEQ ID NO: 20639 - DNA, 20 bp, synthetic construct
  source 1..20: mol_type = other DNA
ggctgtgctgaccatcgaca

SEQ ID NO: 20640 - DNA, 20 bp, synthetic construct
  source 1..20: mol_type = other DNA
ggctgtgctgaccatcgaca

SEQ ID NO: 20641 - DNA, 20 bp, synthetic construct
  source 1..20: mol_type = other DNA
ggctgtgctgaccatcgaca

SEQ ID NO: 20642 - DNA, 20 bp, synthetic construct
  source 1..20: mol_type = other DNA
ggctgtgctgaccatcgaca

SEQ ID NO: 20643 - DNA, 20 bp, synthetic construct
  source 1..20: mol_type = other DNA
ggctgtgctgaccatcgaca

SEQ ID NO: 20644 - DNA, 20 bp, synthetic construct
  source 1..20: mol_type = other DNA
ggctgtgctgaccatcgaca

SEQ ID NO: 20645 - DNA, 20 bp, synthetic construct
  source 1..20: mol_type = other DNA
ggctgtgctgaccatcgaca

SEQ ID NO: 20646 - DNA, 20 bp, synthetic construct
  source 1..20: mol_type = other DNA
ggctgtgctgaccatcgaca

SEQ ID NO: 20647 - DNA, 20 bp, synthetic construct
  source 1..20: mol_type = other DNA
ggctgtgctgaccatcgaca

SEQ ID NO: 20648 - DNA, 20 bp, synthetic construct
  source 1..20: mol_type = other DNA
ggctgtgctgaccatcgaca

SEQ ID NO: 20649 - DNA, 20 bp, synthetic construct
  source 1..20: mol_type = other DNA
ggctgtgctgaccatcgaca

SEQ ID NO: 20650 - DNA, 20 bp, synthetic construct
  source 1..20: mol_type = other DNA
ggctgtgctgaccatcgaca

SEQ ID NO: 20651 - DNA, 20 bp, synthetic construct
  source 1..20: mol_type = other DNA
ggctgtgctgaccatcgaca

SEQ ID NO: 20652 - DNA, 20 bp, synthetic construct
  source 1..20: mol_type = other DNA
ggctgtgctgaccatcgaca

SEQ ID NO: 20653 - DNA, 20 bp, synthetic construct
  source 1..20: mol_type = other DNA
ggctgtgctgaccatcgaca

SEQ ID NO: 20654 - DNA, 20 bp, synthetic construct
  source 1..20: mol_type = other DNA
ggctgtgctgaccatcgaca

SEQ ID NO: 20655 - DNA, 20 bp, synthetic construct
  source 1..20: mol_type = other DNA
ggctgtgctgaccatcgaca

SEQ ID NO: 20656 - DNA, 20 bp, synthetic construct
  source 1..20: mol_type = other DNA
ggctgtgctgaccatcgaca

SEQ ID NO: 20657 - DNA, 20 bp, synthetic construct
  source 1..20: mol_type = other DNA
ggctgtgctgaccatcgaca

SEQ ID NO: 20658 - DNA, 20 bp, synthetic construct
  source 1..20: mol_type = other DNA
ggctgtgctgaccatcgaca

SEQ ID NO: 20659 - DNA, 20 bp, synthetic construct
  source 1..20: mol_type = other DNA
ggctgtgctgaccatcgaca

SEQ ID NO: 20660 - DNA, 20 bp, synthetic construct
  source 1..20: mol_type = other DNA
ggctgtgctgaccatcgaca

SEQ ID NO: 20661 - DNA, 20 bp, synthetic construct
  source 1..20: mol_type = other DNA
ggctgtgctgaccatcgaca

SEQ ID NO: 20662 - DNA, 20 bp, synthetic construct
  source 1..20: mol_type = other DNA
ggctgtgctgaccatcgaca

SEQ ID NO: 20663 - DNA, 20 bp, synthetic construct
  source 1..20: mol_type = other DNA
ggctgtgctgaccatcgaca

SEQ ID NO: 20664 - DNA, 20 bp, synthetic construct
  source 1..20: mol_type = other DNA
ggctgtgctgaccatcgaca

SEQ ID NO: 20665 - DNA, 20 bp, synthetic construct
  source 1..20: mol_type = other DNA
ggctgtgctgaccatcgaca

SEQ ID NO: 20666 - DNA, 20 bp, synthetic construct
  source 1..20: mol_type = other DNA
ggctgtgctgaccatcgaca

SEQ ID NO: 20667 - DNA, 20 bp, synthetic construct
  source 1..20: mol_type = other DNA
ggctgtgctgaccatcgaca

SEQ ID NO: 20668 - DNA, 20 bp, synthetic construct
  source 1..20: mol_type = other DNA
ggctgtgctgaccatcgaca

SEQ ID NO: 20669 - DNA, 20 bp, synthetic construct
  source 1..20: mol_type = other DNA
ggctgtgctgaccatcgaca

SEQ ID NO: 20670 - DNA, 20 bp, synthetic construct
  source 1..20: mol_type = other DNA
ggctgtgctgaccatcgaca

SEQ ID NO: 20671 - DNA, 20 bp, synthetic construct
  source 1..20: mol_type = other DNA
ggctgtgctgaccatcgaca

SEQ ID NO: 20672 - DNA, 20 bp, synthetic construct
  source 1..20: mol_type = other DNA
ggctgtgctgaccatcgaca

SEQ ID NO: 20673 - DNA, 20 bp, synthetic construct
  source 1..20: mol_type = other DNA
ggctgtgctgaccatcgaca

SEQ ID NO: 20674 - DNA, 20 bp, synthetic construct
  source 1..20: mol_type = other DNA
ggctgtgctgaccatcgaca

SEQ ID NO: 20675 - DNA, 20 bp, synthetic construct
  source 1..20: mol_type = other DNA
ggctgtgctgaccatcgaca

SEQ ID NO: 20676 - DNA, 20 bp, synthetic construct
  source 1..20: mol_type = other DNA
ggctgtgctgaccatcgaca

SEQ ID NO: 20677 - DNA, 20 bp, synthetic construct
  source 1..20: mol_type = other DNA
ggctgtgctgaccatcgaca

SEQ ID NO: 20678 - DNA, 20 bp, synthetic construct
  source 1..20: mol_type = other DNA
ggctgtgctgaccatcgaca

SEQ ID NO: 20679 - DNA, 20 bp, synthetic construct
  source 1..20: mol_type = other DNA
ggctgtgctgaccatcgaca

SEQ ID NO: 20680 - DNA, 20 bp, synthetic construct
  source 1..20: mol_type = other DNA
ggctgtgctgaccatcgaca

SEQ ID NO: 20681 - DNA, 20 bp, synthetic construct
  source 1..20: mol_type = other DNA
ggctgtgctgaccatcgaca

SEQ ID NO: 20682 - DNA, 20 bp, synthetic construct
  source 1..20: mol_type = other DNA
ggctgtgctgaccatcgaca

SEQ ID NO: 20683 - DNA, 20 bp, synthetic construct
  source 1..20: mol_type = other DNA
ggctgtgctgaccatcgaca

SEQ ID NO: 20684 - DNA, 20 bp, synthetic construct
  source 1..20: mol_type = other DNA
ggctgtgctgaccatcgaca

SEQ ID NO: 20685 - DNA, 20 bp, synthetic construct
  source 1..20: mol_type = other DNA
ggctgtgctgaccatcgaca

SEQ ID NO: 20686 - DNA, 20 bp, synthetic construct
  source 1..20: mol_type = other DNA
ggctgtgctgaccatcgaca

SEQ ID NO: 20687 - DNA, 20 bp, synthetic construct
  source 1..20: mol_type = other DNA
ggctgtgctgaccatcgaca

SEQ ID NO: 20688 - DNA, 20 bp, synthetic construct
  source 1..20: mol_type = other DNA
ggctgtgctgaccatcgaca

SEQ ID NO: 20689 - DNA, 20 bp, synthetic construct
  source 1..20: mol_type = other DNA
ggctgtgctgaccatcgaca

SEQ ID NO: 20690 - DNA, 20 bp, synthetic construct
  source 1..20: mol_type = other DNA
ggctgtgctgaccatcgaca

SEQ ID NO: 20691 - DNA, 20 bp, synthetic construct
  source 1..20: mol_type = other DNA
ggctgtgctgaccatcgaca

SEQ ID NO: 20692 - DNA, 20 bp, synthetic construct
  source 1..20: mol_type = other DNA
ggctgtgctgaccatcgaca

SEQ ID NO: 20693 - DNA, 20 bp, synthetic construct
  source 1..20: mol_type = other DNA
ggctgtgctgaccatcgaca

SEQ ID NO: 20694 - DNA, 20 bp, synthetic construct
  source 1..20: mol_type = other DNA
ggctgtgctgaccatcgaca

SEQ ID NO: 20695 - DNA, 20 bp, synthetic construct
  source 1..20: mol_type = other DNA
ggctgtgctgaccatcgaca

SEQ ID NO: 20696 - DNA, 20 bp, synthetic construct
  source 1..20: mol_type = other DNA
ggctgtgctgaccatcgaca

SEQ ID NO: 20697 - DNA, 20 bp, synthetic construct
  source 1..20: mol_type = other DNA
ggctgtgctgaccatcgaca

SEQ ID NO: 20698 - DNA, 20 bp, synthetic construct
  source 1..20: mol_type = other DNA
ggctgtgctgaccatcgaca

SEQ ID NO: 20699 - DNA, 20 bp, synthetic construct
  source 1..20: mol_type = other DNA
ggctgtgctgaccatcgaca

SEQ ID NO: 20700 - DNA, 20 bp, synthetic construct
  source 1..20: mol_type = other DNA
ggctgtgctgaccatcgaca

SEQ ID NO: 20701 - DNA, 20 bp, synthetic construct
  source 1..20: mol_type = other DNA
ggctgtgctgaccatcgaca

SEQ ID NO: 20702 - DNA, 20 bp, synthetic construct
  source 1..20: mol_type = other DNA
ggctgtgctgaccatcgaca

SEQ ID NO: 20703 - DNA, 20 bp, synthetic construct
  source 1..20: mol_type = other DNA
ggctgtgctgaccatcgaca

SEQ ID NO: 20704 - DNA, 20 bp, synthetic construct
  source 1..20: mol_type = other DNA
ggctgtgctgaccatcgaca

SEQ ID NO: 20705 - DNA, 20 bp, synthetic construct
  source 1..20: mol_type = other DNA
ggctgtgctgaccatcgaca

SEQ ID NO: 20706 - DNA, 20 bp, synthetic construct
  source 1..20: mol_type = other DNA
ggctgtgctgaccatcgaca

SEQ ID NO: 20707 - DNA, 20 bp, synthetic construct
  source 1..20: mol_type = other DNA
ggctgtgctgaccatcgaca

SEQ ID NO: 20708 - DNA, 20 bp, synthetic construct
  source 1..20: mol_type = other DNA
ggctgtgctgaccatcgaca

SEQ ID NO: 20709 - DNA, 20 bp, synthetic construct
  source 1..20: mol_type = other DNA
ggctgtgctgaccatcgaca

SEQ ID NO: 20710 - DNA, 20 bp, synthetic construct
  source 1..20: mol_type = other DNA
ggctgtgctgaccatcgaca

SEQ ID NO: 20711 - DNA, 20 bp, synthetic construct
  source 1..20: mol_type = other DNA
ggctgtgctgaccatcgaca

SEQ ID NO: 20712 - DNA, 20 bp, synthetic construct
  source 1..20: mol_type = other DNA
ggctgtgctgaccatcgaca

SEQ ID NO: 20713 - DNA, 20 bp, synthetic construct
  source 1..20: mol_type = other DNA
ggctgtgctgaccatcgaca

SEQ ID NO: 20714 - DNA, 20 bp, synthetic construct
  source 1..20: mol_type = other DNA
ggctgtgctgaccatcgaca

SEQ ID NO: 20715 - DNA, 20 bp, synthetic construct
  source 1..20: mol_type = other DNA
ggctgtgctgaccatcgaca

SEQ ID NO: 20716 - DNA, 20 bp, synthetic construct
  source 1..20: mol_type = other DNA
ggctgtgctgaccatcgaca

SEQ ID NO: 20717 - DNA, 20 bp, synthetic construct
  source 1..20: mol_type = other DNA
ggctgtgctgaccatcgaca

SEQ ID NO: 20718 - DNA, 20 bp, synthetic construct
  source 1..20: mol_type = other DNA
ggctgtgctgaccatcgaca

SEQ ID NO: 20719 - DNA, 20 bp, synthetic construct
  source 1..20: mol_type = other DNA
ggctgtgctgaccatcgaca

SEQ ID NO: 20720 - DNA, 20 bp, synthetic construct
  source 1..20: mol_type = other DNA
ggctgtgctgaccatcgaca

SEQ ID NO: 20721 - DNA, 20 bp, synthetic construct
  source 1..20: mol_type = other DNA
ggctgtgctgaccatcgaca

SEQ ID NO: 20722 - DNA, 20 bp, synthetic construct
  source 1..20: mol_type = other DNA
ggctgtgctgaccatcgaca

SEQ ID NO: 20723 - DNA, 20 bp, synthetic construct
  source 1..20: mol_type = other DNA
ggctgtgctgaccatcgaca

SEQ ID NO: 20724 - DNA, 20 bp, synthetic construct
  source 1..20: mol_type = other DNA
ggctgtgctgaccatcgaca

SEQ ID NO: 20725 - DNA, 20 bp, synthetic construct
  source 1..20: mol_type = other DNA
ggctgtgctgaccatcgaca

SEQ ID NO: 20726 - DNA, 20 bp, synthetic construct
  source 1..20: mol_type = other DNA
aggctgtgctgaccatcgac

SEQ ID NO: 20727 - DNA, 20 bp, synthetic construct
  source 1..20: mol_type = other DNA
aggctgtgctgaccatcgac

SEQ ID NO: 20728 - DNA, 20 bp, synthetic construct
  source 1..20: mol_type = other DNA
aggctgtgctgaccatcgac

SEQ ID NO: 20729 - DNA, 20 bp, synthetic construct
  source 1..20: mol_type = other DNA
aggctgtgctgaccatcgac

SEQ ID NO: 20730 - DNA, 20 bp, synthetic construct
  source 1..20: mol_type = other DNA
aggctgtgctgaccatcgac

SEQ ID NO: 20731 - DNA, 20 bp, synthetic construct
  source 1..20: mol_type = other DNA
aggctgtgctgaccatcgac

SEQ ID NO: 20732 - DNA, 20 bp, synthetic construct
  source 1..20: mol_type = other DNA
aggctgtgctgaccatcgac

SEQ ID NO: 20733 - DNA, 20 bp, synthetic construct
  source 1..20: mol_type = other DNA
aggctgtgctgaccatcgac

SEQ ID NO: 20734 - DNA, 20 bp, synthetic construct
  source 1..20: mol_type = other DNA
aggctgtgctgaccatcgac

SEQ ID NO: 20735 - DNA, 20 bp, synthetic construct
  source 1..20: mol_type = other DNA
aggctgtgctgaccatcgac

SEQ ID NO: 20736 - DNA, 20 bp, synthetic construct
  source 1..20: mol_type = other DNA
aggctgtgctgaccatcgac

SEQ ID NO: 20737 - DNA, 20 bp, synthetic construct
  source 1..20: mol_type = other DNA
aggctgtgctgaccatcgac

SEQ ID NO: 20738 - DNA, 20 bp, synthetic construct
  source 1..20: mol_type = other DNA
aggctgtgctgaccatcgac

SEQ ID NO: 20739 - DNA, 20 bp, synthetic construct
  source 1..20: mol_type = other DNA
aggctgtgctgaccatcgac

SEQ ID NO: 20740 - DNA, 20 bp, synthetic construct
  source 1..20: mol_type = other DNA
aggctgtgctgaccatcgac

SEQ ID NO: 20741 - DNA, 20 bp, synthetic construct
  source 1..20: mol_type = other DNA
aggctgtgctgaccatcgac

SEQ ID NO: 20742 - DNA, 20 bp, synthetic construct
  source 1..20: mol_type = other DNA
aggctgtgctgaccatcgac

SEQ ID NO: 20743 - DNA, 20 bp, synthetic construct
  source 1..20: mol_type = other DNA
aggctgtgctgaccatcgac

SEQ ID NO: 20744 - DNA, 20 bp, synthetic construct
  source 1..20: mol_type = other DNA
aggctgtgctgaccatcgac

SEQ ID NO: 20745 - DNA, 20 bp, synthetic construct
  source 1..20: mol_type = other DNA
aggctgtgctgaccatcgac

SEQ ID NO: 20746 - DNA, 20 bp, synthetic construct
  source 1..20: mol_type = other DNA
aggctgtgctgaccatcgac

SEQ ID NO: 20747 - DNA, 20 bp, synthetic construct
  source 1..20: mol_type = other DNA
aggctgtgctgaccatcgac

SEQ ID NO: 20748 - DNA, 20 bp, synthetic construct
  source 1..20: mol_type = other DNA
aggctgtgctgaccatcgac

SEQ ID NO: 20749 - DNA, 20 bp, synthetic construct
  source 1..20: mol_type = other DNA
aggctgtgctgaccatcgac

SEQ ID NO: 20750 - DNA, 20 bp, synthetic construct
  source 1..20: mol_type = other DNA
aggctgtgctgaccatcgac

SEQ ID NO: 20751 - DNA, 20 bp, synthetic construct
  source 1..20: mol_type = other DNA
aggctgtgctgaccatcgac

SEQ ID NO: 20752 - DNA, 20 bp, synthetic construct
  source 1..20: mol_type = other DNA
aggctgtgctgaccatcgac

SEQ ID NO: 20753 - DNA, 20 bp, synthetic construct
  source 1..20: mol_type = other DNA
aggctgtgctgaccatcgac

SEQ ID NO: 20754 - DNA, 20 bp, synthetic construct
  source 1..20: mol_type = other DNA
aggctgtgctgaccatcgac

SEQ ID NO: 20755 - DNA, 20 bp, synthetic construct
  source 1..20: mol_type = other DNA
aggctgtgctgaccatcgac

SEQ ID NO: 20756 - DNA, 20 bp, synthetic construct
  source 1..20: mol_type = other DNA
aggctgtgctgaccatcgac

SEQ ID NO: 20757 - DNA, 20 bp, synthetic construct
  source 1..20: mol_type = other DNA
aggctgtgctgaccatcgac

SEQ ID NO: 20758 - DNA, 20 bp, synthetic construct
  source 1..20: mol_type = other DNA
aggctgtgctgaccatcgac

SEQ ID NO: 20759 - DNA, 20 bp, synthetic construct
  source 1..20: mol_type = other DNA
aggctgtgctgaccatcgac

SEQ ID NO: 20760 - DNA, 20 bp, synthetic construct
  source 1..20: mol_type = other DNA
aggctgtgctgaccatcgac

SEQ ID NO: 20761 - DNA, 20 bp, synthetic construct
  source 1..20: mol_type = other DNA
aggctgtgctgaccatcgac

SEQ ID NO: 20762 - DNA, 20 bp, synthetic construct
  source 1..20: mol_type = other DNA
aggctgtgctgaccatcgac

SEQ ID NO: 20763 - DNA, 20 bp, synthetic construct
  source 1..20: mol_type = other DNA
aggctgtgctgaccatcgac

SEQ ID NO: 20764 - DNA, 20 bp, synthetic construct
  source 1..20: mol_type = other DNA
aggctgtgctgaccatcgac

SEQ ID NO: 20765 - DNA, 20 bp, synthetic construct
  source 1..20: mol_type = other DNA
aggctgtgctgaccatcgac

SEQ ID NO: 20766 - DNA, 20 bp, synthetic construct
  source 1..20: mol_type = other DNA
aggctgtgctgaccatcgac

SEQ ID NO: 20767 - DNA, 20 bp, synthetic construct
  source 1..20: mol_type = other DNA
aggctgtgctgaccatcgac

SEQ ID NO: 20768 - DNA, 20 bp, synthetic construct
  source 1..20: mol_type = other DNA
aggctgtgctgaccatcgac

SEQ ID NO: 20769 - DNA, 20 bp, synthetic construct
  source 1..20: mol_type = other DNA
aggctgtgctgaccatcgac

SEQ ID NO: 20770 - DNA, 20 bp, synthetic construct
  source 1..20: mol_type = other DNA
aggctgtgctgaccatcgac

SEQ ID NO: 20771 - DNA, 20 bp, synthetic construct
  source 1..20: mol_type = other DNA
aggctgtgctgaccatcgac

SEQ ID NO: 20772 - DNA, 20 bp, synthetic construct
  source 1..20: mol_type = other DNA
aggctgtgctgaccatcgac

SEQ ID NO: 20773 - DNA, 20 bp, synthetic construct
  source 1..20: mol_type = other DNA
aggctgtgctgaccatcgac

SEQ ID NO: 20774 - DNA, 20 bp, synthetic construct
  source 1..20: mol_type = other DNA
aggctgtgctgaccatcgac

SEQ ID NO: 20775 - DNA, 20 bp, synthetic construct
  source 1..20: mol_type = other DNA
aggctgtgctgaccatcgac

SEQ ID NO: 20776 - DNA, 20 bp, synthetic construct
  source 1..20: mol_type = other DNA
aggctgtgctgaccatcgac

SEQ ID NO: 20777 - DNA, 20 bp, synthetic construct
  source 1..20: mol_type = other DNA
aggctgtgctgaccatcgac

SEQ ID NO: 20778 - DNA, 20 bp, synthetic construct
  source 1..20: mol_type = other DNA
aggctgtgctgaccatcgac

SEQ ID NO: 20779 - DNA, 20 bp, synthetic construct
  source 1..20: mol_type = other DNA
aggctgtgctgaccatcgac

SEQ ID NO: 20780 - DNA, 20 bp, synthetic construct
  source 1..20: mol_type = other DNA
aggctgtgctgaccatcgac

SEQ ID NO: 20781 - DNA, 20 bp, synthetic construct
  source 1..20: mol_type = other DNA
aggctgtgctgaccatcgac

SEQ ID NO: 20782 - DNA, 20 bp, synthetic construct
  source 1..20: mol_type = other DNA
aggctgtgctgaccatcgac

SEQ ID NO: 20783 - DNA, 20 bp, synthetic construct
  source 1..20: mol_type = other DNA
aggctgtgctgaccatcgac

SEQ ID NO: 20784 - DNA, 20 bp, synthetic construct
  source 1..20: mol_type = other DNA
aggctgtgctgaccatcgac

SEQ ID NO: 20785 - DNA, 20 bp, synthetic construct
  source 1..20: mol_type = other DNA
aggctgtgctgaccatcgac

SEQ ID NO: 20786 - DNA, 20 bp, synthetic construct
  source 1..20: mol_type = other DNA
aggctgtgctgaccatcgac

SEQ ID NO: 20787 - DNA, 20 bp, synthetic construct
  source 1..20: mol_type = other DNA
aggctgtgctgaccatcgac

SEQ ID NO: 20788 - DNA, 20 bp, synthetic construct
  source 1..20: mol_type = other DNA
aggctgtgctgaccatcgac

SEQ ID NO: 20789 - DNA, 20 bp, synthetic construct
  source 1..20: mol_type = other DNA
aggctgtgctgaccatcgac

SEQ ID NO: 20790 - DNA, 20 bp, synthetic construct
  source 1..20: mol_type = other DNA
aggctgtgctgaccatcgac

SEQ ID NO: 20791 - DNA, 20 bp, synthetic construct
  source 1..20: mol_type = other DNA
aggctgtgctgaccatcgac

SEQ ID NO: 20792 - DNA, 20 bp, synthetic construct
  source 1..20: mol_type = other DNA
aggctgtgctgaccatcgac

SEQ ID NO: 20793 - DNA, 20 bp, synthetic construct
  source 1..20: mol_type = other DNA
aggctgtgctgaccatcgac

SEQ ID NO: 20794 - DNA, 20 bp, synthetic construct
  source 1..20: mol_type = other DNA
aggctgtgctgaccatcgac

SEQ ID NO: 20795 - DNA, 20 bp, synthetic construct
  source 1..20: mol_type = other DNA
aggctgtgctgaccatcgac

SEQ ID NO: 20796 - DNA, 20 bp, synthetic construct
  source 1..20: mol_type = other DNA
aggctgtgctgaccatcgac

SEQ ID NO: 20797 - DNA, 20 bp, synthetic construct
  source 1..20: mol_type = other DNA
aggctgtgctgaccatcgac

SEQ ID NO: 20798 - DNA, 20 bp, synthetic construct
  source 1..20: mol_type = other DNA
aggctgtgctgaccatcgac

SEQ ID NO: 20799 - DNA, 20 bp, synthetic construct
  source 1..20: mol_type = other DNA
aggctgtgctgaccatcgac

SEQ ID NO: 20800 - DNA, 20 bp, synthetic construct
  source 1..20: mol_type = other DNA
aggctgtgctgaccatcgac

SEQ ID NO: 20801 - DNA, 20 bp, synthetic construct
  source 1..20: mol_type = other DNA
aggctgtgctgaccatcgac

SEQ ID NO: 20802 - DNA, 20 bp, synthetic construct
  source 1..20: mol_type = other DNA
aggctgtgctgaccatcgac

SEQ ID NO: 20803 - DNA, 20 bp, synthetic construct
  source 1..20: mol_type = other DNA
aggctgtgctgaccatcgac

SEQ ID NO: 20804 - DNA, 20 bp, synthetic construct
  source 1..20: mol_type = other DNA
aggctgtgctgaccatcgac

SEQ ID NO: 20805 - DNA, 20 bp, synthetic construct
  source 1..20: mol_type = other DNA
aggctgtgctgaccatcgac

SEQ ID NO: 20806 - DNA, 20 bp, synthetic construct
  source 1..20: mol_type = other DNA
aggctgtgctgaccatcgac

SEQ ID NO: 20807 - DNA, 20 bp, synthetic construct
  source 1..20: mol_type = other DNA
aggctgtgctgaccatcgac

SEQ ID NO: 20808 - DNA, 20 bp, synthetic construct
  source 1..20: mol_type = other DNA
aggctgtgctgaccatcgac

SEQ ID NO: 20809 - DNA, 20 bp, synthetic construct
  source 1..20: mol_type = other DNA
aggctgtgctgaccatcgac

SEQ ID NO: 20810 - DNA, 20 bp, synthetic construct
  source 1..20: mol_type = other DNA
aggctgtgctgaccatcgac

SEQ ID NO: 20811 - DNA, 20 bp, synthetic construct
  source 1..20: mol_type = other DNA
aggctgtgctgaccatcgac

SEQ ID NO: 20812 - DNA, 20 bp, synthetic construct
  source 1..20: mol_type = other DNA
aggctgtgctgaccatcgac

SEQ ID NO: 20813 - DNA, 20 bp, synthetic construct
  source 1..20: mol_type = other DNA
aggctgtgctgaccatcgac

SEQ ID NO: 20814 - DNA, 20 bp, synthetic construct
  source 1..20: mol_type = other DNA
aggctgtgctgaccatcgac

SEQ ID NO: 20815 - DNA, 20 bp, synthetic construct
  source 1..20: mol_type = other DNA
aggctgtgctgaccatcgac

SEQ ID NO: 20816 - DNA, 20 bp, synthetic construct
  source 1..20: mol_type = other DNA
aaggctgtgctgaccatcga

SEQ ID NO: 20817 - DNA, 20 bp, synthetic construct
  source 1..20: mol_type = other DNA
aaggctgtgctgaccatcga

SEQ ID NO: 20818 - DNA, 20 bp, synthetic construct
  source 1..20: mol_type = other DNA
aaggctgtgctgaccatcga

SEQ ID NO: 20819 - DNA, 20 bp, synthetic construct
  source 1..20: mol_type = other DNA
aaggctgtgctgaccatcga

SEQ ID NO: 20820 - DNA, 20 bp, synthetic construct
  source 1..20: mol_type = other DNA
aaggctgtgctgaccatcga

SEQ ID NO: 20821 - DNA, 20 bp, synthetic construct
  source 1..20: mol_type = other DNA
aaggctgtgctgaccatcga

SEQ ID NO: 20822 - DNA, 20 bp, synthetic construct
  source 1..20: mol_type = other DNA
aaggctgtgctgaccatcga

SEQ ID NO: 20823 - DNA, 20 bp, synthetic construct
  source 1..20: mol_type = other DNA
aaggctgtgctgaccatcga

SEQ ID NO: 20824 - DNA, 20 bp, synthetic construct
  source 1..20: mol_type = other DNA
aaggctgtgctgaccatcga

SEQ ID NO: 20825 - DNA, 20 bp, synthetic construct
  source 1..20: mol_type = other DNA
aaggctgtgctgaccatcga

SEQ ID NO: 20826 - DNA, 20 bp, synthetic construct
  source 1..20: mol_type = other DNA
aaggctgtgctgaccatcga

SEQ ID NO: 20827 - DNA, 20 bp, synthetic construct
  source 1..20: mol_type = other DNA
aaggctgtgctgaccatcga

SEQ ID NO: 20828 - DNA, 20 bp, synthetic construct
  source 1..20: mol_type = other DNA
aaggctgtgctgaccatcga

SEQ ID NO: 20829 - DNA, 20 bp, synthetic construct
  source 1..20: mol_type = other DNA
aaggctgtgctgaccatcga

SEQ ID NO: 20830 - DNA, 20 bp, synthetic construct
  source 1..20: mol_type = other DNA
aaggctgtgctgaccatcga

SEQ ID NO: 20831 - DNA, 20 bp, synthetic construct
  source 1..20: mol_type = other DNA
aaggctgtgctgaccatcga

SEQ ID NO: 20832 - DNA, 20 bp, synthetic construct
  source 1..20: mol_type = other DNA
aaggctgtgctgaccatcga

SEQ ID NO: 20833 - DNA, 20 bp, synthetic construct
  source 1..20: mol_type = other DNA
aaggctgtgctgaccatcga

SEQ ID NO: 20834 - DNA, 20 bp, synthetic construct
  source 1..20: mol_type = other DNA
aaggctgtgctgaccatcga

SEQ ID NO: 20835 - DNA, 20 bp, synthetic construct
  source 1..20: mol_type = other DNA
aaggctgtgctgaccatcga

SEQ ID NO: 20836 - DNA, 20 bp, synthetic construct
  source 1..20: mol_type = other DNA
aaggctgtgctgaccatcga

SEQ ID NO: 20837 - DNA, 20 bp, synthetic construct
  source 1..20: mol_type = other DNA
aaggctgtgctgaccatcga

SEQ ID NO: 20838 - DNA, 20 bp, synthetic construct
  source 1..20: mol_type = other DNA
aaggctgtgctgaccatcga

SEQ ID NO: 20839 - DNA, 20 bp, synthetic construct
  source 1..20: mol_type = other DNA
aaggctgtgctgaccatcga

SEQ ID NO: 20840 - DNA, 20 bp, synthetic construct
  source 1..20: mol_type = other DNA
aaggctgtgctgaccatcga

SEQ ID NO: 20841 - DNA, 20 bp, synthetic construct
  source 1..20: mol_type = other DNA
aaggctgtgctgaccatcga

SEQ ID NO: 20842 - DNA, 20 bp, synthetic construct
  source 1..20: mol_type = other DNA
aaggctgtgctgaccatcga

SEQ ID NO: 20843 - DNA, 20 bp, synthetic construct
  source 1..20: mol_type = other DNA
aaggctgtgctgaccatcga

SEQ ID NO: 20844 - DNA, 20 bp, synthetic construct
  source 1..20: mol_type = other DNA
aaggctgtgctgaccatcga

SEQ ID NO: 20845 - DNA, 20 bp, synthetic construct
  source 1..20: mol_type = other DNA
aaggctgtgctgaccatcga

SEQ ID NO: 20846 - DNA, 20 bp, synthetic construct
  source 1..20: mol_type = other DNA
aaggctgtgctgaccatcga

SEQ ID NO: 20847 - DNA, 20 bp, synthetic construct
  source 1..20: mol_type = other DNA
aaggctgtgctgaccatcga

SEQ ID NO: 20848 - DNA, 20 bp, synthetic construct
  source 1..20: mol_type = other DNA
aaggctgtgctgaccatcga

SEQ ID NO: 20849 - DNA, 20 bp, synthetic construct
  source 1..20: mol_type = other DNA
aaggctgtgctgaccatcga

SEQ ID NO: 20850 - DNA, 20 bp, synthetic construct
  source 1..20: mol_type = other DNA
aaggctgtgctgaccatcga

SEQ ID NO: 20851 - DNA, 20 bp, synthetic construct
  source 1..20: mol_type = other DNA
aaggctgtgctgaccatcga

SEQ ID NO: 20852 - DNA, 20 bp, synthetic construct
  source 1..20: mol_type = other DNA
aaggctgtgctgaccatcga

SEQ ID NO: 20853 - DNA, 20 bp, synthetic construct
  source 1..20: mol_type = other DNA
aaggctgtgctgaccatcga

SEQ ID NO: 20854 - DNA, 20 bp, synthetic construct
  source 1..20: mol_type = other DNA
aaggctgtgctgaccatcga

SEQ ID NO: 20855 - DNA, 20 bp, synthetic construct
  source 1..20: mol_type = other DNA
aaggctgtgctgaccatcga

SEQ ID NO: 20856 - DNA, 20 bp, synthetic construct
  source 1..20: mol_type = other DNA
aaggctgtgctgaccatcga

SEQ ID NO: 20857 - DNA, 20 bp, synthetic construct
  source 1..20: mol_type = other DNA
aaggctgtgctgaccatcga

SEQ ID NO: 20858 - DNA, 20 bp, synthetic construct
  source 1..20: mol_type = other DNA
aaggctgtgctgaccatcga

SEQ ID NO: 20859 - DNA, 20 bp, synthetic construct
  source 1..20: mol_type = other DNA
aaggctgtgctgaccatcga

SEQ ID NO: 20860 - DNA, 20 bp, synthetic construct
  source 1..20: mol_type = other DNA
aaggctgtgctgaccatcga

SEQ ID NO: 20861 - DNA, 20 bp, synthetic construct
  source 1..20: mol_type = other DNA
aaggctgtgctgaccatcga

SEQ ID NO: 20862 - DNA, 20 bp, synthetic construct
  source 1..20: mol_type = other DNA
aaggctgtgctgaccatcga

SEQ ID NO: 20863 - DNA, 20 bp, synthetic construct
  source 1..20: mol_type = other DNA
aaggctgtgctgaccatcga

SEQ ID NO: 20864 - DNA, 20 bp, synthetic construct
  source 1..20: mol_type = other DNA
aaggctgtgctgaccatcga

SEQ ID NO: 20865 - DNA, 20 bp, synthetic construct
  source 1..20: mol_type = other DNA
aaggctgtgctgaccatcga

SEQ ID NO: 20866 - DNA, 20 bp, synthetic construct
  source 1..20: mol_type = other DNA
aaggctgtgctgaccatcga

SEQ ID NO: 20867 - DNA, 20 bp, synthetic construct
  source 1..20: mol_type = other DNA
aaggctgtgctgaccatcga

SEQ ID NO: 20868 - DNA, 20 bp, synthetic construct
  source 1..20: mol_type = other DNA
aaggctgtgctgaccatcga

SEQ ID NO: 20869 - DNA, 20 bp, synthetic construct
  source 1..20: mol_type = other DNA
aaggctgtgctgaccatcga

SEQ ID NO: 20870 - DNA, 20 bp, synthetic construct
  source 1..20: mol_type = other DNA
aaggctgtgctgaccatcga

SEQ ID NO: 20871 - DNA, 20 bp, synthetic construct
  source 1..20: mol_type = other DNA
aaggctgtgctgaccatcga

SEQ ID NO: 20872 - DNA, 20 bp, synthetic construct
  source 1..20: mol_type = other DNA
aaggctgtgctgaccatcga

SEQ ID NO: 20873 - DNA, 20 bp, synthetic construct
  source 1..20: mol_type = other DNA
aaggctgtgctgaccatcga

SEQ ID NO: 20874 - DNA, 20 bp, synthetic construct
  source 1..20: mol_type = other DNA
aaggctgtgctgaccatcga

SEQ ID NO: 20875 - DNA, 20 bp, synthetic construct
  source 1..20: mol_type = other DNA
aaggctgtgctgaccatcga

SEQ ID NO: 20876 - DNA, 20 bp, synthetic construct
  source 1..20: mol_type = other DNA
aaggctgtgctgaccatcga

SEQ ID NO: 20877 - DNA, 20 bp, synthetic construct
  source 1..20: mol_type = other DNA
aaggctgtgctgaccatcga

SEQ ID NO: 20878 - DNA, 20 bp, synthetic construct
  source 1..20: mol_type = other DNA
aaggctgtgctgaccatcga

SEQ ID NO: 20879 - DNA, 20 bp, synthetic construct
  source 1..20: mol_type = other DNA
aaggctgtgctgaccatcga

SEQ ID NO: 20880 - DNA, 20 bp, synthetic construct
  source 1..20: mol_type = other DNA
aaggctgtgctgaccatcga

SEQ ID NO: 20881 - DNA, 20 bp, synthetic construct
  source 1..20: mol_type = other DNA
aaggctgtgctgaccatcga

SEQ ID NO: 20882 - DNA, 20 bp, synthetic construct
  source 1..20: mol_type = other DNA
aaggctgtgctgaccatcga

SEQ ID NO: 20883 - DNA, 20 bp, synthetic construct
  source 1..20: mol_type = other DNA
aaggctgtgctgaccatcga

SEQ ID NO: 20884 - DNA, 20 bp, synthetic construct
  source 1..20: mol_type = other DNA
aaggctgtgctgaccatcga

SEQ ID NO: 20885 - DNA, 20 bp, synthetic construct
  source 1..20: mol_type = other DNA
aaggctgtgctgaccatcga

SEQ ID NO: 20886 - DNA, 20 bp, synthetic construct
  source 1..20: mol_type = other DNA
aaggctgtgctgaccatcga

SEQ ID NO: 20887 - DNA, 20 bp, synthetic construct
  source 1..20: mol_type = other DNA
aaggctgtgctgaccatcga

SEQ ID NO: 20888 - DNA, 20 bp, synthetic construct
  source 1..20: mol_type = other DNA
aaggctgtgctgaccatcga

SEQ ID NO: 20889 - DNA, 20 bp, synthetic construct
  source 1..20: mol_type = other DNA
aaggctgtgctgaccatcga

SEQ ID NO: 20890 - DNA, 20 bp, synthetic construct
  source 1..20: mol_type = other DNA
aaggctgtgctgaccatcga

SEQ ID NO: 20891 - DNA, 20 bp, synthetic construct
  source 1..20: mol_type = other DNA
aaggctgtgctgaccatcga

SEQ ID NO: 20892 - DNA, 20 bp, synthetic construct
  source 1..20: mol_type = other DNA
aaggctgtgctgaccatcga

SEQ ID NO: 20893 - DNA, 20 bp, synthetic construct
  source 1..20: mol_type = other DNA
aaggctgtgctgaccatcga

SEQ ID NO: 20894 - DNA, 20 bp, synthetic construct
  source 1..20: mol_type = other DNA
aaggctgtgctgaccatcga

SEQ ID NO: 20895 - DNA, 20 bp, synthetic construct
  source 1..20: mol_type = other DNA
aaggctgtgctgaccatcga

SEQ ID NO: 20896 - DNA, 20 bp, synthetic construct
  source 1..20: mol_type = other DNA
aaggctgtgctgaccatcga

SEQ ID NO: 20897 - DNA, 20 bp, synthetic construct
  source 1..20: mol_type = other DNA
aaggctgtgctgaccatcga

SEQ ID NO: 20898 - DNA, 20 bp, synthetic construct
  source 1..20: mol_type = other DNA
aaggctgtgctgaccatcga

SEQ ID NO: 20899 - DNA, 20 bp, synthetic construct
  source 1..20: mol_type = other DNA
aaggctgtgctgaccatcga

SEQ ID NO: 20900 - DNA, 20 bp, synthetic construct
  source 1..20: mol_type = other DNA
aaggctgtgctgaccatcga

SEQ ID NO: 20901 - DNA, 20 bp, synthetic construct
  source 1..20: mol_type = other DNA
aaggctgtgctgaccatcga

SEQ ID NO: 20902 - DNA, 20 bp, synthetic construct
  source 1..20: mol_type = other DNA
aaggctgtgctgaccatcga

SEQ ID NO: 20903 - DNA, 20 bp, synthetic construct
  source 1..20: mol_type = other DNA
aaggctgtgctgaccatcga

SEQ ID NO: 20904 - DNA, 20 bp, synthetic construct
  source 1..20: mol_type = other DNA
aaggctgtgctgaccatcga

SEQ ID NO: 20905 - DNA, 20 bp, synthetic construct
  source 1..20: mol_type = other DNA
aaggctgtgctgaccatcga

SEQ ID NO: 20906 - DNA, 23 bp, synthetic construct
  source 1..23: mol_type = other DNA
taaaaacatggccccagcagctt

SEQ ID NO: 20907 - DNA, 23 bp, synthetic construct
  source 1..23: mol_type = other DNA
taaaaacatggccccagcagctt

SEQ ID NO: 20908 - DNA, 23 bp, synthetic construct
  source 1..23: mol_type = other DNA
taaaaacatggccccagcagctt

SEQ ID NO: 20909 - DNA, 23 bp, synthetic construct
  source 1..23: mol_type = other DNA
taaaaacatggccccagcagctt

SEQ ID NO: 20910 - DNA, 23 bp, synthetic construct
  source 1..23: mol_type = other DNA
taaaaacatggccccagcagctt

SEQ ID NO: 20911 - DNA, 23 bp, synthetic construct
  source 1..23: mol_type = other DNA
taaaaacatggccccagcagctt

SEQ ID NO: 20912 - DNA, 23 bp, synthetic construct
  source 1..23: mol_type = other DNA
taaaaacatggccccagcagctt

SEQ ID NO: 20913 - DNA, 23 bp, synthetic construct
  source 1..23: mol_type = other DNA
taaaaacatggccccagcagctt

SEQ ID NO: 20914 - DNA, 23 bp, synthetic construct
  source 1..23: mol_type = other DNA
taaaaacatggccccagcagctt

SEQ ID NO: 20915 - DNA, 23 bp, synthetic construct
  source 1..23: mol_type = other DNA
taaaaacatggccccagcagctt

SEQ ID NO: 20916 - DNA, 23 bp, synthetic construct
  source 1..23: mol_type = other DNA
taaaaacatggccccagcagctt

SEQ ID NO: 20917 - DNA, 23 bp, synthetic construct
  source 1..23: mol_type = other DNA
taaaaacatggccccagcagctt

SEQ ID NO: 20918 - DNA, 23 bp, synthetic construct
  source 1..23: mol_type = other DNA
taaaaacatggccccagcagctt

SEQ ID NO: 20919 - DNA, 23 bp, synthetic construct
  source 1..23: mol_type = other DNA
taaaaacatggccccagcagctt

SEQ ID NO: 20920 - DNA, 23 bp, synthetic construct
  source 1..23: mol_type = other DNA
taaaaacatggccccagcagctt

SEQ ID NO: 20921 - DNA, 23 bp, synthetic construct
  source 1..23: mol_type = other DNA
taaaaacatggccccagcagctt

SEQ ID NO: 20922 - DNA, 23 bp, synthetic construct
  source 1..23: mol_type = other DNA
taaaaacatggccccagcagctt

SEQ ID NO: 20923 - DNA, 23 bp, synthetic construct
  source 1..23: mol_type = other DNA
taaaaacatggccccagcagctt

SEQ ID NO: 20924 - DNA, 23 bp, synthetic construct
  source 1..23: mol_type = other DNA
taaaaacatggccccagcagctt

SEQ ID NO: 20925 - DNA, 23 bp, synthetic construct
  source 1..23: mol_type = other DNA
taaaaacatggccccagcagctt

SEQ ID NO: 20926 - DNA, 23 bp, synthetic construct
  source 1..23: mol_type = other DNA
taaaaacatggccccagcagctt

SEQ ID NO: 20927 - DNA, 23 bp, synthetic construct
  source 1..23: mol_type = other DNA
taaaaacatggccccagcagctt

SEQ ID NO: 20928 - DNA, 23 bp, synthetic construct
  source 1..23: mol_type = other DNA
taaaaacatggccccagcagctt

SEQ ID NO: 20929 - DNA, 23 bp, synthetic construct
  source 1..23: mol_type = other DNA
taaaaacatggccccagcagctt

SEQ ID NO: 20930 - DNA, 23 bp, synthetic construct
  source 1..23: mol_type = other DNA
taaaaacatggccccagcagctt

SEQ ID NO: 20931 - DNA, 23 bp, synthetic construct
  source 1..23: mol_type = other DNA
taaaaacatggccccagcagctt

SEQ ID NO: 20932 - DNA, 23 bp, synthetic construct
  source 1..23: mol_type = other DNA
taaaaacatggccccagcagctt

SEQ ID NO: 20933 - DNA, 23 bp, synthetic construct
  source 1..23: mol_type = other DNA
taaaaacatggccccagcagctt

SEQ ID NO: 20934 - DNA, 23 bp, synthetic construct
  source 1..23: mol_type = other DNA
taaaaacatggccccagcagctt

SEQ ID NO: 20935 - DNA, 23 bp, synthetic construct
  source 1..23: mol_type = other DNA
taaaaacatggccccagcagctt

SEQ ID NO: 20936 - DNA, 23 bp, synthetic construct
  source 1..23: mol_type = other DNA
taaaaacatggccccagcagctt

SEQ ID NO: 20937 - DNA, 23 bp, synthetic construct
  source 1..23: mol_type = other DNA
taaaaacatggccccagcagctt

SEQ ID NO: 20938 - DNA, 23 bp, synthetic construct
  source 1..23: mol_type = other DNA
taaaaacatggccccagcagctt

SEQ ID NO: 20939 - DNA, 23 bp, synthetic construct
  source 1..23: mol_type = other DNA
taaaaacatggccccagcagctt

SEQ ID NO: 20940 - DNA, 23 bp, synthetic construct
  source 1..23: mol_type = other DNA
taaaaacatggccccagcagctt

SEQ ID NO: 20941 - DNA, 23 bp, synthetic construct
  source 1..23: mol_type = other DNA
taaaaacatggccccagcagctt

SEQ ID NO: 20942 - DNA, 23 bp, synthetic construct
  source 1..23: mol_type = other DNA
taaaaacatggccccagcagctt

SEQ ID NO: 20943 - DNA, 23 bp, synthetic construct
  source 1..23: mol_type = other DNA
taaaaacatggccccagcagctt

SEQ ID NO: 20944 - DNA, 23 bp, synthetic construct
  source 1..23: mol_type = other DNA
taaaaacatggccccagcagctt

SEQ ID NO: 20945 - DNA, 23 bp, synthetic construct
  source 1..23: mol_type = other DNA
taaaaacatggccccagcagctt

SEQ ID NO: 20946 - DNA, 23 bp, synthetic construct
  source 1..23: mol_type = other DNA
taaaaacatggccccagcagctt

SEQ ID NO: 20947 - DNA, 23 bp, synthetic construct
  source 1..23: mol_type = other DNA
taaaaacatggccccagcagctt

SEQ ID NO: 20948 - DNA, 23 bp, synthetic construct
  source 1..23: mol_type = other DNA
taaaaacatggccccagcagctt

SEQ ID NO: 20949 - DNA, 23 bp, synthetic construct
  source 1..23: mol_type = other DNA
taaaaacatggccccagcagctt

SEQ ID NO: 20950 - DNA, 23 bp, synthetic construct
  source 1..23: mol_type = other DNA
taaaaacatggccccagcagctt

SEQ ID NO: 20951 - DNA, 23 bp, synthetic construct
  source 1..23: mol_type = other DNA
taaaaacatggccccagcagctt

SEQ ID NO: 20952 - DNA, 23 bp, synthetic construct
  source 1..23: mol_type = other DNA
taaaaacatggccccagcagctt

SEQ ID NO: 20953 - DNA, 23 bp, synthetic construct
  source 1..23: mol_type = other DNA
taaaaacatggccccagcagctt

SEQ ID NO: 20954 - DNA, 23 bp, synthetic construct
  source 1..23: mol_type = other DNA
taaaaacatggccccagcagctt

SEQ ID NO: 20955 - DNA, 23 bp, synthetic construct
  source 1..23: mol_type = other DNA
taaaaacatggccccagcagctt

SEQ ID NO: 20956 - DNA, 23 bp, synthetic construct
  source 1..23: mol_type = other DNA
taaaaacatggccccagcagctt

SEQ ID NO: 20957 - DNA, 23 bp, synthetic construct
  source 1..23: mol_type = other DNA
taaaaacatggccccagcagctt

SEQ ID NO: 20958 - DNA, 23 bp, synthetic construct
  source 1..23: mol_type = other DNA
taaaaacatggccccagcagctt

SEQ ID NO: 20959 - DNA, 23 bp, synthetic construct
  source 1..23: mol_type = other DNA
taaaaacatggccccagcagctt

SEQ ID NO: 20960 - DNA, 23 bp, synthetic construct
  source 1..23: mol_type = other DNA
taaaaacatggccccagcagctt

SEQ ID NO: 20961 - DNA, 23 bp, synthetic construct
  source 1..23: mol_type = other DNA
taaaaacatggccccagcagctt

SEQ ID NO: 20962 - DNA, 23 bp, synthetic construct
  source 1..23: mol_type = other DNA
taaaaacatggccccagcagctt

SEQ ID NO: 20963 - DNA, 23 bp, synthetic construct
  source 1..23: mol_type = other DNA
taaaaacatggccccagcagctt

SEQ ID NO: 20964 - DNA, 23 bp, synthetic construct
  source 1..23: mol_type = other DNA
taaaaacatggccccagcagctt

SEQ ID NO: 20965 - DNA, 23 bp, synthetic construct
  source 1..23: mol_type = other DNA
taaaaacatggccccagcagctt

SEQ ID NO: 20966 - DNA, 23 bp, synthetic construct
  source 1..23: mol_type = other DNA
taaaaacatggccccagcagctt

SEQ ID NO: 20967 - DNA, 23 bp, synthetic construct
  source 1..23: mol_type = other DNA
taaaaacatggccccagcagctt

SEQ ID NO: 20968 - DNA, 23 bp, synthetic construct
  source 1..23: mol_type = other DNA
taaaaacatggccccagcagctt

SEQ ID NO: 20969 - DNA, 23 bp, synthetic construct
  source 1..23: mol_type = other DNA
taaaaacatggccccagcagctt

SEQ ID NO: 20970 - DNA, 23 bp, synthetic construct
  source 1..23: mol_type = other DNA
taaaaacatggccccagcagctt

SEQ ID NO: 20971 - DNA, 23 bp, synthetic construct
  source 1..23: mol_type = other DNA
taaaaacatggccccagcagctt

SEQ ID NO: 20972 - DNA, 23 bp, synthetic construct
  source 1..23: mol_type = other DNA
taaaaacatggccccagcagctt

SEQ ID NO: 20973 - DNA, 23 bp, synthetic construct
  source 1..23: mol_type = other DNA
taaaaacatggccccagcagctt

SEQ ID NO: 20974 - DNA, 23 bp, synthetic construct
  source 1..23: mol_type = other DNA
taaaaacatggccccagcagctt

SEQ ID NO: 20975 - DNA, 23 bp, synthetic construct
  source 1..23: mol_type = other DNA
taaaaacatggccccagcagctt

SEQ ID NO: 20976 - DNA, 23 bp, synthetic construct
  source 1..23: mol_type = other DNA
taaaaacatggccccagcagctt

SEQ ID NO: 20977 - DNA, 23 bp, synthetic construct
  source 1..23: mol_type = other DNA
taaaaacatggccccagcagctt

SEQ ID NO: 20978 - DNA, 23 bp, synthetic construct
  source 1..23: mol_type = other DNA
taaaaacatggccccagcagctt

SEQ ID NO: 20979 - DNA, 23 bp, synthetic construct
  source 1..23: mol_type = other DNA
taaaaacatggccccagcagctt

SEQ ID NO: 20980 - DNA, 23 bp, synthetic construct
  source 1..23: mol_type = other DNA
taaaaacatggccccagcagctt

SEQ ID NO: 20981 - DNA, 23 bp, synthetic construct
  source 1..23: mol_type = other DNA
taaaaacatggccccagcagctt

SEQ ID NO: 20982 - DNA, 23 bp, synthetic construct
  source 1..23: mol_type = other DNA
taaaaacatggccccagcagctt

SEQ ID NO: 20983 - DNA, 23 bp, synthetic construct
  source 1..23: mol_type = other DNA
taaaaacatggccccagcagctt

SEQ ID NO: 20984 - DNA, 23 bp, synthetic construct
  source 1..23: mol_type = other DNA
taaaaacatggccccagcagctt

SEQ ID NO: 20985 - DNA, 23 bp, synthetic construct
  source 1..23: mol_type = other DNA
taaaaacatggccccagcagctt

SEQ ID NO: 20986 - DNA, 23 bp, synthetic construct
  source 1..23: mol_type = other DNA
taaaaacatggccccagcagctt

SEQ ID NO: 20987 - DNA, 23 bp, synthetic construct
  source 1..23: mol_type = other DNA
taaaaacatggccccagcagctt

SEQ ID NO: 20988 - DNA, 23 bp, synthetic construct
  source 1..23: mol_type = other DNA
taaaaacatggccccagcagctt

SEQ ID NO: 20989 - DNA, 23 bp, synthetic construct
  source 1..23: mol_type = other DNA
taaaaacatggccccagcagctt

SEQ ID NO: 20990 - DNA, 23 bp, synthetic construct
  source 1..23: mol_type = other DNA
taaaaacatggccccagcagctt

SEQ ID NO: 20991 - DNA, 23 bp, synthetic construct
  source 1..23: mol_type = other DNA
taaaaacatggccccagcagctt

SEQ ID NO: 20992 - DNA, 23 bp, synthetic construct
  source 1..23: mol_type = other DNA
taaaaacatggccccagcagctt

SEQ ID NO: 20993 - DNA, 23 bp, synthetic construct
  source 1..23: mol_type = other DNA
taaaaacatggccccagcagctt

SEQ ID NO: 20994 - DNA, 23 bp, synthetic construct
  source 1..23: mol_type = other DNA
taaaaacatggccccagcagctt

SEQ ID NO: 20995 - DNA, 23 bp, synthetic construct
  source 1..23: mol_type = other DNA
taaaaacatggccccagcagctt

SEQ ID NO: 20996 - DNA, 20 bp, synthetic construct
  source 1..20: mol_type = other DNA
aggccgtgcataaggctgtg

SEQ ID NO: 20997 - DNA, 20 bp, synthetic construct
  source 1..20: mol_type = other DNA
aggccgtgcataaggctgtg

SEQ ID NO: 20998 - DNA, 20 bp, synthetic construct
  source 1..20: mol_type = other DNA
aggccgtgcataaggctgtg

SEQ ID NO: 20999 - DNA, 20 bp, synthetic construct
  source 1..20: mol_type = other DNA
aggccgtgcataaggctgtg

SEQ ID NO: 21000 - DNA, 20 bp, synthetic construct
  source 1..20: mol_type = other DNA
aggccgtgcataaggctgtg

SEQ ID NO: 21001 - DNA, 20 bp, synthetic construct
  source 1..20: mol_type = other DNA
aggccgtgcataaggctgtg

SEQ ID NO: 21002 - DNA, 20 bp, synthetic construct
  source 1..20: mol_type = other DNA
aggccgtgcataaggctgtg

SEQ ID NO: 21003 - DNA, 20 bp, synthetic construct
  source 1..20: mol_type = other DNA
aggccgtgcataaggctgtg

SEQ ID NO: 21004 - DNA, 20 bp, synthetic construct
  source 1..20: mol_type = other DNA
aggccgtgcataaggctgtg

SEQ ID NO: 21005 - DNA, 20 bp, synthetic construct
  source 1..20: mol_type = other DNA
aggccgtgcataaggctgtg

SEQ ID NO: 21006 - DNA, 20 bp, synthetic construct
  source 1..20: mol_type = other DNA
aggccgtgcataaggctgtg

SEQ ID NO: 21007 - DNA, 20 bp, synthetic construct
  source 1..20: mol_type = other DNA
aggccgtgcataaggctgtg

SEQ ID NO: 21008 - DNA, 20 bp, synthetic construct
  source 1..20: mol_type = other DNA
aggccgtgcataaggctgtg

SEQ ID NO: 21009 - DNA, 20 bp, synthetic construct
  source 1..20: mol_type = other DNA
aggccgtgcataaggctgtg

SEQ ID NO: 21010 - DNA, 20 bp, synthetic construct
  source 1..20: mol_type = other DNA
aggccgtgcataaggctgtg

SEQ ID NO: 21011 - DNA, 20 bp, synthetic construct
  source 1..20: mol_type = other DNA
aggccgtgcataaggctgtg

SEQ ID NO: 21012 - DNA, 20 bp, synthetic construct
  source 1..20: mol_type = other DNA
aggccgtgcataaggctgtg

SEQ ID NO: 21013 - DNA, 20 bp, synthetic construct
  source 1..20: mol_type = other DNA
aggccgtgcataaggctgtg

SEQ ID NO: 21014 - DNA, 20 bp, synthetic construct
  source 1..20: mol_type = other DNA
aggccgtgcataaggctgtg

SEQ ID NO: 21015 - DNA, 20 bp, synthetic construct
  source 1..20: mol_type = other DNA
aggccgtgcataaggctgtg

SEQ ID NO: 21016 - DNA, 20 bp, synthetic construct
  source 1..20: mol_type = other DNA
aggccgtgcataaggctgtg

SEQ ID NO: 21017 - DNA, 20 bp, synthetic construct
  source 1..20: mol_type = other DNA
aggccgtgcataaggctgtg

SEQ ID NO: 21018 - DNA, 20 bp, synthetic construct
  source 1..20: mol_type = other DNA
aggccgtgcataaggctgtg

SEQ ID NO: 21019 - DNA, 20 bp, synthetic construct
  source 1..20: mol_type = other DNA
aggccgtgcataaggctgtg

SEQ ID NO: 21020 - DNA, 20 bp, synthetic construct
  source 1..20: mol_type = other DNA
aggccgtgcataaggctgtg

SEQ ID NO: 21021 - DNA, 20 bp, synthetic construct
  source 1..20: mol_type = other DNA
aggccgtgcataaggctgtg

SEQ ID NO: 21022 - DNA, 20 bp, synthetic construct
  source 1..20: mol_type = other DNA
aggccgtgcataaggctgtg

SEQ ID NO: 21023 - DNA, 20 bp, synthetic construct
  source 1..20: mol_type = other DNA
aggccgtgcataaggctgtg

SEQ ID NO: 21024 - DNA, 20 bp, synthetic construct
  source 1..20: mol_type = other DNA
aggccgtgcataaggctgtg

SEQ ID NO: 21025 - DNA, 20 bp, synthetic construct
  source 1..20: mol_type = other DNA
aggccgtgcataaggctgtg

SEQ ID NO: 21026 - DNA, 20 bp, synthetic construct
  source 1..20: mol_type = other DNA
aggccgtgcataaggctgtg

SEQ ID NO: 21027 - DNA, 20 bp, synthetic construct
  source 1..20: mol_type = other DNA
aggccgtgcataaggctgtg

SEQ ID NO: 21028 - DNA, 20 bp, synthetic construct
  source 1..20: mol_type = other DNA
aggccgtgcataaggctgtg

SEQ ID NO: 21029 - DNA, 20 bp, synthetic construct
  source 1..20: mol_type = other DNA
aggccgtgcataaggctgtg

SEQ ID NO: 21030 - DNA, 20 bp, synthetic construct
  source 1..20: mol_type = other DNA
aggccgtgcataaggctgtg

SEQ ID NO: 21031 - DNA, 20 bp, synthetic construct
  source 1..20: mol_type = other DNA
aggccgtgcataaggctgtg

SEQ ID NO: 21032 - DNA, 20 bp, synthetic construct
  source 1..20: mol_type = other DNA
aggccgtgcataaggctgtg

SEQ ID NO: 21033 - DNA, 20 bp, synthetic construct
  source 1..20: mol_type = other DNA
aggccgtgcataaggctgtg

SEQ ID NO: 21034 - DNA, 20 bp, synthetic construct
  source 1..20: mol_type = other DNA
aggccgtgcataaggctgtg

SEQ ID NO: 21035 - DNA, 20 bp, synthetic construct
  source 1..20: mol_type = other DNA
aggccgtgcataaggctgtg

SEQ ID NO: 21036 - DNA, 20 bp, synthetic construct
  source 1..20: mol_type = other DNA
aggccgtgcataaggctgtg

SEQ ID NO: 21037 - DNA, 20 bp, synthetic construct
  source 1..20: mol_type = other DNA
aggccgtgcataaggctgtg

SEQ ID NO: 21038 - DNA, 20 bp, synthetic construct
  source 1..20: mol_type = other DNA
aggccgtgcataaggctgtg

SEQ ID NO: 21039 - DNA, 20 bp, synthetic construct
  source 1..20: mol_type = other DNA
aggccgtgcataaggctgtg

SEQ ID NO: 21040 - DNA, 20 bp, synthetic construct
  source 1..20: mol_type = other DNA
aggccgtgcataaggctgtg

SEQ ID NO: 21041 - DNA, 20 bp, synthetic construct
  source 1..20: mol_type = other DNA
aggccgtgcataaggctgtg

SEQ ID NO: 21042 - DNA, 20 bp, synthetic construct
  source 1..20: mol_type = other DNA
aggccgtgcataaggctgtg

SEQ ID NO: 21043 - DNA, 20 bp, synthetic construct
  source 1..20: mol_type = other DNA
aggccgtgcataaggctgtg

SEQ ID NO: 21044 - DNA, 20 bp, synthetic construct
  source 1..20: mol_type = other DNA
aggccgtgcataaggctgtg

SEQ ID NO: 21045 - DNA, 20 bp, synthetic construct
  source 1..20: mol_type = other DNA
aggccgtgcataaggctgtg

SEQ ID NO: 21046 - DNA, 20 bp, synthetic construct
  source 1..20: mol_type = other DNA
aggccgtgcataaggctgtg

SEQ ID NO: 21047 - DNA, 20 bp, synthetic construct
  source 1..20: mol_type = other DNA
aggccgtgcataaggctgtg

SEQ ID NO: 21048 - DNA, 20 bp, synthetic construct
  source 1..20: mol_type = other DNA
aggccgtgcataaggctgtg

SEQ ID NO: 21049 - DNA, 20 bp, synthetic construct
  source 1..20: mol_type = other DNA
aggccgtgcataaggctgtg

SEQ ID NO: 21050 - DNA, 20 bp, synthetic construct
  source 1..20: mol_type = other DNA
aggccgtgcataaggctgtg

SEQ ID NO: 21051 - DNA, 20 bp, synthetic construct
  source 1..20: mol_type = other DNA
aggccgtgcataaggctgtg

SEQ ID NO: 21052 - DNA, 20 bp, synthetic construct
  source 1..20: mol_type = other DNA
aggccgtgcataaggctgtg

SEQ ID NO: 21053 - DNA, 20 bp, synthetic construct
  source 1..20: mol_type = other DNA
aggccgtgcataaggctgtg

SEQ ID NO: 21054 - DNA, 20 bp, synthetic construct
  source 1..20: mol_type = other DNA
aggccgtgcataaggctgtg

SEQ ID NO: 21055 - DNA, 20 bp, synthetic construct
  source 1..20: mol_type = other DNA
aggccgtgcataaggctgtg

SEQ ID NO: 21056 - DNA, 20 bp, synthetic construct
  source 1..20: mol_type = other DNA
aggccgtgcataaggctgtg

SEQ ID NO: 21057 - DNA, 20 bp, synthetic construct
  source 1..20: mol_type = other DNA
aggccgtgcataaggctgtg

SEQ ID NO: 21058 - DNA, 20 bp, synthetic construct
  source 1..20: mol_type = other DNA
aggccgtgcataaggctgtg

SEQ ID NO: 21059 - DNA, 20 bp, synthetic construct
  source 1..20: mol_type = other DNA
aggccgtgcataaggctgtg

SEQ ID NO: 21060 - DNA, 20 bp, synthetic construct
  source 1..20: mol_type = other DNA
aggccgtgcataaggctgtg

SEQ ID NO: 21061 - DNA, 20 bp, synthetic construct
  source 1..20: mol_type = other DNA
aggccgtgcataaggctgtg

SEQ ID NO: 21062 - DNA, 20 bp, synthetic construct
  source 1..20: mol_type = other DNA
aggccgtgcataaggctgtg

SEQ ID NO: 21063 - DNA, 20 bp, synthetic construct
  source 1..20: mol_type = other DNA
aggccgtgcataaggctgtg

SEQ ID NO: 21064 - DNA, 20 bp, synthetic construct
  source 1..20: mol_type = other DNA
aggccgtgcataaggctgtg

SEQ ID NO: 21065 - DNA, 20 bp, synthetic construct
  source 1..20: mol_type = other DNA
aggccgtgcataaggctgtg

SEQ ID NO: 21066 - DNA, 20 bp, synthetic construct
  source 1..20: mol_type = other DNA
aggccgtgcataaggctgtg

SEQ ID NO: 21067 - DNA, 20 bp, synthetic construct
  source 1..20: mol_type = other DNA
aggccgtgcataaggctgtg

SEQ ID NO: 21068 - DNA, 20 bp, synthetic construct
  source 1..20: mol_type = other DNA
aggccgtgcataaggctgtg

SEQ ID NO: 21069 - DNA, 20 bp, synthetic construct
  source 1..20: mol_type = other DNA
aggccgtgcataaggctgtg

SEQ ID NO: 21070 - DNA, 20 bp, synthetic construct
  source 1..20: mol_type = other DNA
aggccgtgcataaggctgtg

SEQ ID NO: 21071 - DNA, 20 bp, synthetic construct
  source 1..20: mol_type = other DNA
aggccgtgcataaggctgtg

SEQ ID NO: 21072 - DNA, 20 bp, synthetic construct
  source 1..20: mol_type = other DNA
aggccgtgcataaggctgtg

SEQ ID NO: 21073 - DNA, 20 bp, synthetic construct
  source 1..20: mol_type = other DNA
aggccgtgcataaggctgtg

SEQ ID NO: 21074 - DNA, 20 bp, synthetic construct
  source 1..20: mol_type = other DNA
aggccgtgcataaggctgtg

SEQ ID NO: 21075 - DNA, 20 bp, synthetic construct
  source 1..20: mol_type = other DNA
aggccgtgcataaggctgtg

SEQ ID NO: 21076 - DNA, 20 bp, synthetic construct
  source 1..20: mol_type = other DNA
aggccgtgcataaggctgtg

SEQ ID NO: 21077 - DNA, 20 bp, synthetic construct
  source 1..20: mol_type = other DNA
aggccgtgcataaggctgtg

SEQ ID NO: 21078 - DNA, 20 bp, synthetic construct
  source 1..20: mol_type = other DNA
aggccgtgcataaggctgtg

SEQ ID NO: 21079 - DNA, 20 bp, synthetic construct
  source 1..20: mol_type = other DNA
aggccgtgcataaggctgtg

SEQ ID NO: 21080 - DNA, 20 bp, synthetic construct
  source 1..20: mol_type = other DNA
aggccgtgcataaggctgtg

SEQ ID NO: 21081 - DNA, 20 bp, synthetic construct
  source 1..20: mol_type = other DNA
aggccgtgcataaggctgtg

SEQ ID NO: 21082 - DNA, 20 bp, synthetic construct
  source 1..20: mol_type = other DNA
aggccgtgcataaggctgtg

SEQ ID NO: 21083 - DNA, 20 bp, synthetic construct
  source 1..20: mol_type = other DNA
aggccgtgcataaggctgtg

SEQ ID NO: 21084 - DNA, 20 bp, synthetic construct
  source 1..20: mol_type = other DNA
aggccgtgcataaggctgtg

SEQ ID NO: 21085 - DNA, 20 bp, synthetic construct
  source 1..20: mol_type = other DNA
aggccgtgcataaggctgtg

SEQ ID NO: 21086 - DNA, 23 bp, synthetic construct
  source 1..23: mol_type = other DNA
tccaggccgtgcataaggctgtg

SEQ ID NO: 21087 - DNA, 23 bp, synthetic construct
  source 1..23: mol_type = other DNA
tccaggccgtgcataaggctgtg

SEQ ID NO: 21088 - DNA, 23 bp, synthetic construct
  source 1..23: mol_type = other DNA
tccaggccgtgcataaggctgtg

SEQ ID NO: 21089 - DNA, 23 bp, synthetic construct
  source 1..23: mol_type = other DNA
tccaggccgtgcataaggctgtg

SEQ ID NO: 21090 - DNA, 23 bp, synthetic construct
  source 1..23: mol_type = other DNA
tccaggccgtgcataaggctgtg

SEQ ID NO: 21091 - DNA, 23 bp, synthetic construct
  source 1..23: mol_type = other DNA
tccaggccgtgcataaggctgtg

SEQ ID NO: 21092 - DNA, 23 bp, synthetic construct
  source 1..23: mol_type = other DNA
tccaggccgtgcataaggctgtg

SEQ ID NO: 21093 - DNA, 23 bp, synthetic construct
  source 1..23: mol_type = other DNA
tccaggccgtgcataaggctgtg

SEQ ID NO: 21094 - DNA, 23 bp, synthetic construct
  source 1..23: mol_type = other DNA
tccaggccgtgcataaggctgtg

SEQ ID NO: 21095 - DNA, 23 bp, synthetic construct
  source 1..23: mol_type = other DNA
tccaggccgtgcataaggctgtg

SEQ ID NO: 21096 - DNA, 23 bp, synthetic construct
  source 1..23: mol_type = other DNA
tccaggccgtgcataaggctgtg

SEQ ID NO: 21097 - DNA, 23 bp, synthetic construct
  source 1..23: mol_type = other DNA
tccaggccgtgcataaggctgtg

SEQ ID NO: 21098 - DNA, 23 bp, synthetic construct
  source 1..23: mol_type = other DNA
tccaggccgtgcataaggctgtg

SEQ ID NO: 21099 - DNA, 23 bp, synthetic construct
  source 1..23: mol_type = other DNA
tccaggccgtgcataaggctgtg

SEQ ID NO: 21100 - DNA, 23 bp, synthetic construct
  source 1..23: mol_type = other DNA
tccaggccgtgcataaggctgtg

SEQ ID NO: 21101 - DNA, 23 bp, synthetic construct
  source 1..23: mol_type = other DNA
tccaggccgtgcataaggctgtg

SEQ ID NO: 21102 - DNA, 23 bp, synthetic construct
  source 1..23: mol_type = other DNA
tccaggccgtgcataaggctgtg

SEQ ID NO: 21103 - DNA, 23 bp, synthetic construct
  source 1..23: mol_type = other DNA
tccaggccgtgcataaggctgtg

SEQ ID NO: 21104 - DNA, 23 bp, synthetic construct
  source 1..23: mol_type = other DNA
tccaggccgtgcataaggctgtg

SEQ ID NO: 21105 - DNA, 23 bp, synthetic construct
  source 1..23: mol_type = other DNA
tccaggccgtgcataaggctgtg

SEQ ID NO: 21106 - DNA, 23 bp, synthetic construct
  source 1..23: mol_type = other DNA
tccaggccgtgcataaggctgtg

SEQ ID NO: 21107 - DNA, 23 bp, synthetic construct
  source 1..23: mol_type = other DNA
tccaggccgtgcataaggctgtg

SEQ ID NO: 21108 - DNA, 23 bp, synthetic construct
  source 1..23: mol_type = other DNA
tccaggccgtgcataaggctgtg

SEQ ID NO: 21109 - DNA, 23 bp, synthetic construct
  source 1..23: mol_type = other DNA
tccaggccgtgcataaggctgtg

SEQ ID NO: 21110 - DNA, 23 bp, synthetic construct
  source 1..23: mol_type = other DNA
tccaggccgtgcataaggctgtg

SEQ ID NO: 21111 - DNA, 23 bp, synthetic construct
  source 1..23: mol_type = other DNA
tccaggccgtgcataaggctgtg

SEQ ID NO: 21112 - DNA, 23 bp, synthetic construct
  source 1..23: mol_type = other DNA
tccaggccgtgcataaggctgtg

SEQ ID NO: 21113 - DNA, 23 bp, synthetic construct
  source 1..23: mol_type = other DNA
tccaggccgtgcataaggctgtg

SEQ ID NO: 21114 - DNA, 23 bp, synthetic construct
  source 1..23: mol_type = other DNA
tccaggccgtgcataaggctgtg

SEQ ID NO: 21115 - DNA, 23 bp, synthetic construct
  source 1..23: mol_type = other DNA
tccaggccgtgcataaggctgtg

SEQ ID NO: 21116 - DNA, 23 bp, synthetic construct
  source 1..23: mol_type = other DNA
tccaggccgtgcataaggctgtg

SEQ ID NO: 21117 - DNA, 23 bp, synthetic construct
  source 1..23: mol_type = other DNA
tccaggccgtgcataaggctgtg

SEQ ID NO: 21118 - DNA, 23 bp, synthetic construct
  source 1..23: mol_type = other DNA
tccaggccgtgcataaggctgtg

SEQ ID NO: 21119 - DNA, 23 bp, synthetic construct
  source 1..23: mol_type = other DNA
tccaggccgtgcataaggctgtg

SEQ ID NO: 21120 - DNA, 23 bp, synthetic construct
  source 1..23: mol_type = other DNA
tccaggccgtgcataaggctgtg

SEQ ID NO: 21121 - DNA, 23 bp, synthetic construct
  source 1..23: mol_type = other DNA
tccaggccgtgcataaggctgtg

SEQ ID NO: 21122 - DNA, 23 bp, synthetic construct
  source 1..23: mol_type = other DNA
tccaggccgtgcataaggctgtg

SEQ ID NO: 21123 - DNA, 23 bp, synthetic construct
  source 1..23: mol_type = other DNA
tccaggccgtgcataaggctgtg

SEQ ID NO: 21124 - DNA, 23 bp, synthetic construct
  source 1..23: mol_type = other DNA
tccaggccgtgcataaggctgtg

SEQ ID NO: 21125 - DNA, 23 bp, synthetic construct
  source 1..23: mol_type = other DNA
tccaggccgtgcataaggctgtg

SEQ ID NO: 21126 - DNA, 23 bp, synthetic construct
  source 1..23: mol_type = other DNA
tccaggccgtgcataaggctgtg

SEQ ID NO: 21127 - DNA, 23 bp, synthetic construct
  source 1..23: mol_type = other DNA
tccaggccgtgcataaggctgtg

SEQ ID NO: 21128 - DNA, 23 bp, synthetic construct
  source 1..23: mol_type = other DNA
tccaggccgtgcataaggctgtg

SEQ ID NO: 21129 - DNA, 23 bp, synthetic construct
  source 1..23: mol_type = other DNA
tccaggccgtgcataaggctgtg

SEQ ID NO: 21130 - DNA, 23 bp, synthetic construct
  source 1..23: mol_type = other DNA
tccaggccgtgcataaggctgtg

SEQ ID NO: 21131 - DNA, 23 bp, synthetic construct
  source 1..23: mol_type = other DNA
tccaggccgtgcataaggctgtg

SEQ ID NO: 21132 - DNA, 23 bp, synthetic construct
  source 1..23: mol_type = other DNA
tccaggccgtgcataaggctgtg

SEQ ID NO: 21133 - DNA, 23 bp, synthetic construct
  source 1..23: mol_type = other DNA
tccaggccgtgcataaggctgtg

SEQ ID NO: 21134 - DNA, 23 bp, synthetic construct
  source 1..23: mol_type = other DNA
tccaggccgtgcataaggctgtg

SEQ ID NO: 21135 - DNA, 23 bp, synthetic construct
  source 1..23: mol_type = other DNA
tccaggccgtgcataaggctgtg

SEQ ID NO: 21136 - DNA, 23 bp, synthetic construct
  source 1..23: mol_type = other DNA
tccaggccgtgcataaggctgtg

SEQ ID NO: 21137 - DNA, 23 bp, synthetic construct
  source 1..23: mol_type = other DNA
tccaggccgtgcataaggctgtg

SEQ ID NO: 21138 - DNA, 23 bp, synthetic construct
  source 1..23: mol_type = other DNA
tccaggccgtgcataaggctgtg

SEQ ID NO: 21139 - DNA, 23 bp, synthetic construct
  source 1..23: mol_type = other DNA
tccaggccgtgcataaggctgtg

SEQ ID NO: 21140 - DNA, 23 bp, synthetic construct
  source 1..23: mol_type = other DNA
tccaggccgtgcataaggctgtg

SEQ ID NO: 21141 - DNA, 23 bp, synthetic construct
  source 1..23: mol_type = other DNA
tccaggccgtgcataaggctgtg

SEQ ID NO: 21142 - DNA, 23 bp, synthetic construct
  source 1..23: mol_type = other DNA
tccaggccgtgcataaggctgtg

SEQ ID NO: 21143 - DNA, 23 bp, synthetic construct
  source 1..23: mol_type = other DNA
tccaggccgtgcataaggctgtg

SEQ ID NO: 21144 - DNA, 23 bp, synthetic construct
  source 1..23: mol_type = other DNA
tccaggccgtgcataaggctgtg

SEQ ID NO: 21145 - DNA, 23 bp, synthetic construct
  source 1..23: mol_type = other DNA
tccaggccgtgcataaggctgtg

SEQ ID NO: 21146 - DNA, 23 bp, synthetic construct
  source 1..23: mol_type = other DNA
tccaggccgtgcataaggctgtg

SEQ ID NO: 21147 - DNA, 23 bp, synthetic construct
  source 1..23: mol_type = other DNA
tccaggccgtgcataaggctgtg

SEQ ID NO: 21148 - DNA, 23 bp, synthetic construct
  source 1..23: mol_type = other DNA
tccaggccgtgcataaggctgtg

SEQ ID NO: 21149 - DNA, 23 bp, synthetic construct
  source 1..23: mol_type = other DNA
tccaggccgtgcataaggctgtg

SEQ ID NO: 21150 - DNA, 23 bp, synthetic construct
  source 1..23: mol_type = other DNA
tccaggccgtgcataaggctgtg

SEQ ID NO: 21151 - DNA, 23 bp, synthetic construct
  source 1..23: mol_type = other DNA
tccaggccgtgcataaggctgtg

SEQ ID NO: 21152 - DNA, 23 bp, synthetic construct
  source 1..23: mol_type = other DNA
tccaggccgtgcataaggctgtg

SEQ ID NO: 21153 - DNA, 23 bp, synthetic construct
  source 1..23: mol_type = other DNA
tccaggccgtgcataaggctgtg

SEQ ID NO: 21154 - DNA, 23 bp, synthetic construct
  source 1..23: mol_type = other DNA
tccaggccgtgcataaggctgtg

SEQ ID NO: 21155 - DNA, 23 bp, synthetic construct
  source 1..23: mol_type = other DNA
tccaggccgtgcataaggctgtg

SEQ ID NO: 21156 - DNA, 23 bp, synthetic construct
  source 1..23: mol_type = other DNA
tccaggccgtgcataaggctgtg

SEQ ID NO: 21157 - DNA, 23 bp, synthetic construct
  source 1..23: mol_type = other DNA
tccaggccgtgcataaggctgtg

SEQ ID NO: 21158 - DNA, 23 bp, synthetic construct
  source 1..23: mol_type = other DNA
tccaggccgtgcataaggctgtg

SEQ ID NO: 21159 - DNA, 23 bp, synthetic construct
  source 1..23: mol_type = other DNA
tccaggccgtgcataaggctgtg

SEQ ID NO: 21160 - DNA, 23 bp, synthetic construct
  source 1..23: mol_type = other DNA
tccaggccgtgcataaggctgtg

SEQ ID NO: 21161 - DNA, 23 bp, synthetic construct
  source 1..23: mol_type = other DNA
tccaggccgtgcataaggctgtg

SEQ ID NO: 21162 - DNA, 23 bp, synthetic construct
  source 1..23: mol_type = other DNA
tccaggccgtgcataaggctgtg

SEQ ID NO: 21163 - DNA, 23 bp, synthetic construct
  source 1..23: mol_type = other DNA
tccaggccgtgcataaggctgtg

SEQ ID NO: 21164 - DNA, 23 bp, synthetic construct
  source 1..23: mol_type = other DNA
tccaggccgtgcataaggctgtg

SEQ ID NO: 21165 - DNA, 23 bp, synthetic construct
  source 1..23: mol_type = other DNA
tccaggccgtgcataaggctgtg

SEQ ID NO: 21166 - DNA, 23 bp, synthetic construct
  source 1..23: mol_type = other DNA
tccaggccgtgcataaggctgtg

SEQ ID NO: 21167 - DNA, 23 bp, synthetic construct
  source 1..23: mol_type = other DNA
tccaggccgtgcataaggctgtg

SEQ ID NO: 21168 - DNA, 23 bp, synthetic construct
  source 1..23: mol_type = other DNA
tccaggccgtgcataaggctgtg

SEQ ID NO: 21169 - DNA, 23 bp, synthetic construct
  source 1..23: mol_type = other DNA
tccaggccgtgcataaggctgtg

SEQ ID NO: 21170 - DNA, 23 bp, synthetic construct
  source 1..23: mol_type = other DNA
tccaggccgtgcataaggctgtg

SEQ ID NO: 21171 - DNA, 23 bp, synthetic construct
  source 1..23: mol_type = other DNA
tccaggccgtgcataaggctgtg

SEQ ID NO: 21172 - DNA, 23 bp, synthetic construct
  source 1..23: mol_type = other DNA
tccaggccgtgcataaggctgtg

SEQ ID NO: 21173 - DNA, 23 bp, synthetic construct
  source 1..23: mol_type = other DNA
tccaggccgtgcataaggctgtg

SEQ ID NO: 21174 - DNA, 23 bp, synthetic construct
  source 1..23: mol_type = other DNA
tccaggccgtgcataaggctgtg

SEQ ID NO: 21175 - DNA, 23 bp, synthetic construct
  source 1..23: mol_type = other DNA
tccaggccgtgcataaggctgtg

SEQ ID NO: 21176 - DNA, 20 bp, synthetic construct
  source 1..20: mol_type = other DNA
ccaggccgtgcataaggctg

SEQ ID NO: 21177 - DNA, 20 bp, synthetic construct
  source 1..20: mol_type = other DNA
ccaggccgtgcataaggctg

SEQ ID NO: 21178 - DNA, 20 bp, synthetic construct
  source 1..20: mol_type = other DNA
ccaggccgtgcataaggctg

SEQ ID NO: 21179 - DNA, 20 bp, synthetic construct
  source 1..20: mol_type = other DNA
ccaggccgtgcataaggctg

SEQ ID NO: 21180 - DNA, 20 bp, synthetic construct
  source 1..20: mol_type = other DNA
ccaggccgtgcataaggctg

SEQ ID NO: 21181 - DNA, 20 bp, synthetic construct
  source 1..20: mol_type = other DNA
ccaggccgtgcataaggctg

SEQ ID NO: 21182 - DNA, 20 bp, synthetic construct
  source 1..20: mol_type = other DNA
ccaggccgtgcataaggctg

SEQ ID NO: 21183 - DNA, 20 bp, synthetic construct
  source 1..20: mol_type = other DNA
ccaggccgtgcataaggctg

SEQ ID NO: 21184 - DNA, 20 bp, synthetic construct
  source 1..20: mol_type = other DNA
ccaggccgtgcataaggctg

SEQ ID NO: 21185 - DNA, 20 bp, synthetic construct
  source 1..20: mol_type = other DNA
ccaggccgtgcataaggctg

SEQ ID NO: 21186 - DNA, 20 bp, synthetic construct
  source 1..20: mol_type = other DNA
ccaggccgtgcataaggctg

SEQ ID NO: 21187 - DNA, 20 bp, synthetic construct
  source 1..20: mol_type = other DNA
ccaggccgtgcataaggctg

SEQ ID NO: 21188 - DNA, 20 bp, synthetic construct
  source 1..20: mol_type = other DNA
ccaggccgtgcataaggctg

SEQ ID NO: 21189 - DNA, 20 bp, synthetic construct
  source 1..20: mol_type = other DNA
ccaggccgtgcataaggctg

SEQ ID NO: 21190 - DNA, 20 bp, synthetic construct
  source 1..20: mol_type = other DNA
ccaggccgtgcataaggctg

SEQ ID NO: 21191 - DNA, 20 bp, synthetic construct
  source 1..20: mol_type = other DNA
ccaggccgtgcataaggctg

SEQ ID NO: 21192 - DNA, 20 bp, synthetic construct
  source 1..20: mol_type = other DNA
ccaggccgtgcataaggctg

SEQ ID NO: 21193 - DNA, 20 bp, synthetic construct
  source 1..20: mol_type = other DNA
ccaggccgtgcataaggctg

SEQ ID NO: 21194 - DNA, 20 bp, synthetic construct
  source 1..20: mol_type = other DNA
ccaggccgtgcataaggctg

SEQ ID NO: 21195 - DNA, 20 bp, synthetic construct
  source 1..20: mol_type = other DNA
ccaggccgtgcataaggctg

SEQ ID NO: 21196 - DNA, 20 bp, synthetic construct
  source 1..20: mol_type = other DNA
ccaggccgtgcataaggctg

SEQ ID NO: 21197 - DNA, 20 bp, synthetic construct
  source 1..20: mol_type = other DNA
ccaggccgtgcataaggctg

SEQ ID NO: 21198 - DNA, 20 bp, synthetic construct
  source 1..20: mol_type = other DNA
ccaggccgtgcataaggctg

SEQ ID NO: 21199 - DNA, 20 bp, synthetic construct
  source 1..20: mol_type = other DNA
ccaggccgtgcataaggctg

SEQ ID NO: 21200 - DNA, 20 bp, synthetic construct
  source 1..20: mol_type = other DNA
ccaggccgtgcataaggctg

SEQ ID NO: 21201 - DNA, 20 bp, synthetic construct
  source 1..20: mol_type = other DNA
ccaggccgtgcataaggctg

SEQ ID NO: 21202 - DNA, 20 bp, synthetic construct
  source 1..20: mol_type = other DNA
ccaggccgtgcataaggctg

SEQ ID NO: 21203 - DNA, 20 bp, synthetic construct
  source 1..20: mol_type = other DNA
ccaggccgtgcataaggctg

SEQ ID NO: 21204 - DNA, 20 bp, synthetic construct
  source 1..20: mol_type = other DNA
ccaggccgtgcataaggctg

SEQ ID NO: 21205 - DNA, 20 bp, synthetic construct
  source 1..20: mol_type = other DNA
ccaggccgtgcataaggctg

SEQ ID NO: 21206 - DNA, 20 bp, synthetic construct
  source 1..20: mol_type = other DNA
ccaggccgtgcataaggctg

SEQ ID NO: 21207 - DNA, 20 bp, synthetic construct
  source 1..20: mol_type = other DNA
ccaggccgtgcataaggctg

SEQ ID NO: 21208 - DNA, 20 bp, synthetic construct
  source 1..20: mol_type = other DNA
ccaggccgtgcataaggctg

SEQ ID NO: 21209 - DNA, 20 bp, synthetic construct
  source 1..20: mol_type = other DNA
ccaggccgtgcataaggctg

SEQ ID NO: 21210 - DNA, 20 bp, synthetic construct
  source 1..20: mol_type = other DNA
ccaggccgtgcataaggctg

SEQ ID NO: 21211 - DNA, 20 bp, synthetic construct
  source 1..20: mol_type = other DNA
ccaggccgtgcataaggctg

SEQ ID NO: 21212 - DNA, 20 bp, synthetic construct
  source 1..20: mol_type = other DNA
ccaggccgtgcataaggctg

SEQ ID NO: 21213 - DNA, 20 bp, synthetic construct
  source 1..20: mol_type = other DNA
ccaggccgtgcataaggctg

SEQ ID NO: 21214 - DNA, 20 bp, synthetic construct
  source 1..20: mol_type = other DNA
ccaggccgtgcataaggctg

SEQ ID NO: 21215 - DNA, 20 bp, synthetic construct
  source 1..20: mol_type = other DNA
ccaggccgtgcataaggctg

SEQ ID NO: 21216 - DNA, 20 bp, synthetic construct
  source 1..20: mol_type = other DNA
ccaggccgtgcataaggctg

SEQ ID NO: 21217 - DNA, 20 bp, synthetic construct
  source 1..20: mol_type = other DNA
ccaggccgtgcataaggctg

SEQ ID NO: 21218 - DNA, 20 bp, synthetic construct
  source 1..20: mol_type = other DNA
ccaggccgtgcataaggctg

SEQ ID NO: 21219 - DNA, 20 bp, synthetic construct
  source 1..20: mol_type = other DNA
ccaggccgtgcataaggctg

SEQ ID NO: 21220 - DNA, 20 bp, synthetic construct
  source 1..20: mol_type = other DNA
ccaggccgtgcataaggctg

SEQ ID NO: 21221 - DNA, 20 bp, synthetic construct
  source 1..20: mol_type = other DNA
ccaggccgtgcataaggctg

SEQ ID NO: 21222 - DNA, 20 bp, synthetic construct
  source 1..20: mol_type = other DNA
ccaggccgtgcataaggctg

SEQ ID NO: 21223 - DNA, 20 bp, synthetic construct
  source 1..20: mol_type = other DNA
ccaggccgtgcataaggctg

SEQ ID NO: 21224 - DNA, 20 bp, synthetic construct
  source 1..20: mol_type = other DNA
ccaggccgtgcataaggctg

SEQ ID NO: 21225 - DNA, 20 bp, synthetic construct
  source 1..20: mol_type = other DNA
ccaggccgtgcataaggctg

SEQ ID NO: 21226 - DNA, 20 bp, synthetic construct
  source 1..20: mol_type = other DNA
ccaggccgtgcataaggctg

SEQ ID NO: 21227 - DNA, 20 bp, synthetic construct
  source 1..20: mol_type = other DNA
ccaggccgtgcataaggctg

SEQ ID NO: 21228 - DNA, 20 bp, synthetic construct
  source 1..20: mol_type = other DNA
ccaggccgtgcataaggctg

SEQ ID NO: 21229 - DNA, 20 bp, synthetic construct
  source 1..20: mol_type = other DNA
ccaggccgtgcataaggctg

SEQ ID NO: 21230 - DNA, 20 bp, synthetic construct
  source 1..20: mol_type = other DNA
ccaggccgtgcataaggctg

SEQ ID NO: 21231 - DNA, 20 bp, synthetic construct
  source 1..20: mol_type = other DNA
ccaggccgtgcataaggctg

SEQ ID NO: 21232 - DNA, 20 bp, synthetic construct
  source 1..20: mol_type = other DNA
ccaggccgtgcataaggctg

SEQ ID NO: 21233 - DNA, 20 bp, synthetic construct
  source 1..20: mol_type = other DNA
ccaggccgtgcataaggctg

SEQ ID NO: 21234 - DNA, 20 bp, synthetic construct
  source 1..20: mol_type = other DNA
ccaggccgtgcataaggctg

SEQ ID NO: 21235 - DNA, 20 bp, synthetic construct
  source 1..20: mol_type = other DNA
ccaggccgtgcataaggctg

SEQ ID NO: 21236 - DNA, 20 bp, synthetic construct
  source 1..20: mol_type = other DNA
ccaggccgtgcataaggctg

SEQ ID NO: 21237 - DNA, 20 bp, synthetic construct
  source 1..20: mol_type = other DNA
ccaggccgtgcataaggctg

SEQ ID NO: 21238 - DNA, 20 bp, synthetic construct
  source 1..20: mol_type = other DNA
ccaggccgtgcataaggctg

SEQ ID NO: 21239 - DNA, 20 bp, synthetic construct
  source 1..20: mol_type = other DNA
ccaggccgtgcataaggctg

SEQ ID NO: 21240 - DNA, 20 bp, synthetic construct
  source 1..20: mol_type = other DNA
ccaggccgtgcataaggctg

SEQ ID NO: 21241 - DNA, 20 bp, synthetic construct
  source 1..20: mol_type = other DNA
ccaggccgtgcataaggctg

SEQ ID NO: 21242 - DNA, 20 bp, synthetic construct
  source 1..20: mol_type = other DNA
ccaggccgtgcataaggctg

SEQ ID NO: 21243 - DNA, 20 bp, synthetic construct
  source 1..20: mol_type = other DNA
ccaggccgtgcataaggctg

SEQ ID NO: 21244 - DNA, 20 bp, synthetic construct
  source 1..20: mol_type = other DNA
ccaggccgtgcataaggctg

SEQ ID NO: 21245 - DNA, 20 bp, synthetic construct
  source 1..20: mol_type = other DNA
ccaggccgtgcataaggctg

SEQ ID NO: 21246 - DNA, 20 bp, synthetic construct
  source 1..20: mol_type = other DNA
ccaggccgtgcataaggctg

SEQ ID NO: 21247 - DNA, 20 bp, synthetic construct
  source 1..20: mol_type = other DNA
ccaggccgtgcataaggctg

SEQ ID NO: 21248 - DNA, 20 bp, synthetic construct
  source 1..20: mol_type = other DNA
ccaggccgtgcataaggctg

SEQ ID NO: 21249 - DNA, 20 bp, synthetic construct
  source 1..20: mol_type = other DNA
ccaggccgtgcataaggctg

SEQ ID NO: 21250 - DNA, 20 bp, synthetic construct
  source 1..20: mol_type = other DNA
ccaggccgtgcataaggctg

SEQ ID NO: 21251 - DNA, 20 bp, synthetic construct
  source 1..20: mol_type = other DNA
ccaggccgtgcataaggctg

SEQ ID NO: 21252 - DNA, 20 bp, synthetic construct
  source 1..20: mol_type = other DNA
ccaggccgtgcataaggctg

SEQ ID NO: 21253 - DNA, 20 bp, synthetic construct
  source 1..20: mol_type = other DNA
ccaggccgtgcataaggctg

SEQ ID NO: 21254 - DNA, 20 bp, synthetic construct
  source 1..20: mol_type = other DNA
ccaggccgtgcataaggctg

SEQ ID NO: 21255 - DNA, 20 bp, synthetic construct
  source 1..20: mol_type = other DNA
ccaggccgtgcataaggctg

SEQ ID NO: 21256 - DNA, 20 bp, synthetic construct
  source 1..20: mol_type = other DNA
ccaggccgtgcataaggctg

SEQ ID NO: 21257 - DNA, 20 bp, synthetic construct
  source 1..20: mol_type = other DNA
ccaggccgtgcataaggctg

SEQ ID NO: 21258 - DNA, 20 bp, synthetic construct
  source 1..20: mol_type = other DNA
ccaggccgtgcataaggctg

SEQ ID NO: 21259 - DNA, 20 bp, synthetic construct
  source 1..20: mol_type = other DNA
ccaggccgtgcataaggctg

SEQ ID NO: 21260 - DNA, 20 bp, synthetic construct
  source 1..20: mol_type = other DNA
ccaggccgtgcataaggctg

SEQ ID NO: 21261 - DNA, 20 bp, synthetic construct
  source 1..20: mol_type = other DNA
ccaggccgtgcataaggctg

SEQ ID NO: 21262 - DNA, 20 bp, synthetic construct
  source 1..20: mol_type = other DNA
ccaggccgtgcataaggctg

SEQ ID NO: 21263 - DNA, 20 bp, synthetic construct
  source 1..20: mol_type = other DNA
ccaggccgtgcataaggctg

SEQ ID NO: 21264 - DNA, 20 bp, synthetic construct
  source 1..20: mol_type = other DNA
ccaggccgtgcataaggctg

SEQ ID NO: 21265 - DNA, 20 bp, synthetic construct
  source 1..20: mol_type = other DNA
ccaggccgtgcataaggctg

SEQ ID NO: 21266 - DNA, 20 bp, synthetic construct
  source 1..20: mol_type = other DNA
tccaggccgtgcataaggct

SEQ ID NO: 21267 - DNA, 20 bp, synthetic construct
  source 1..20: mol_type = other DNA
tccaggccgtgcataaggct

SEQ ID NO: 21268 - DNA, 20 bp, synthetic construct
  source 1..20: mol_type = other DNA
tccaggccgtgcataaggct

SEQ ID NO: 21269 - DNA, 20 bp, synthetic construct
  source 1..20: mol_type = other DNA
tccaggccgtgcataaggct

SEQ ID NO: 21270 - DNA, 20 bp, synthetic construct
  source 1..20: mol_type = other DNA
tccaggccgtgcataaggct

SEQ ID NO: 21271 - DNA, 20 bp, synthetic construct
  source 1..20: mol_type = other DNA
tccaggccgtgcataaggct

SEQ ID NO: 21272 - DNA, 20 bp, synthetic construct
  source 1..20: mol_type = other DNA
tccaggccgtgcataaggct

SEQ ID NO: 21273 - DNA, 20 bp, synthetic construct
  source 1..20: mol_type = other DNA
tccaggccgtgcataaggct

SEQ ID NO: 21274 - DNA, 20 bp, synthetic construct
  source 1..20: mol_type = other DNA
tccaggccgtgcataaggct

SEQ ID NO: 21275 - DNA, 20 bp, synthetic construct
  source 1..20: mol_type = other DNA
tccaggccgtgcataaggct

SEQ ID NO: 21276 - DNA, 20 bp, synthetic construct
  source 1..20: mol_type = other DNA
tccaggccgtgcataaggct

SEQ ID NO: 21277 - DNA, 20 bp, synthetic construct
  source 1..20: mol_type = other DNA
tccaggccgtgcataaggct

SEQ ID NO: 21278 - DNA, 20 bp, synthetic construct
  source 1..20: mol_type = other DNA
tccaggccgtgcataaggct

SEQ ID NO: 21279 - DNA, 20 bp, synthetic construct
  source 1..20: mol_type = other DNA
tccaggccgtgcataaggct

SEQ ID NO: 21280 - DNA, 20 bp, synthetic construct
  source 1..20: mol_type = other DNA
tccaggccgtgcataaggct

SEQ ID NO: 21281 - DNA, 20 bp, synthetic construct
  source 1..20: mol_type = other DNA
tccaggccgtgcataaggct

SEQ ID NO: 21282 - DNA, 20 bp, synthetic construct
  source 1..20: mol_type = other DNA
tccaggccgtgcataaggct

SEQ ID NO: 21283 - DNA, 20 bp, synthetic construct
  source 1..20: mol_type = other DNA
tccaggccgtgcataaggct

SEQ ID NO: 21284 - DNA, 20 bp, synthetic construct
  source 1..20: mol_type = other DNA
tccaggccgtgcataaggct

SEQ ID NO: 21285 - DNA, 20 bp, synthetic construct
  source 1..20: mol_type = other DNA
tccaggccgtgcataaggct

SEQ ID NO: 21286 - DNA, 20 bp, synthetic construct
  source 1..20: mol_type = other DNA
tccaggccgtgcataaggct

SEQ ID NO: 21287 - DNA, 20 bp, synthetic construct
  source 1..20: mol_type = other DNA
tccaggccgtgcataaggct

SEQ ID NO: 21288 - DNA, 20 bp, synthetic construct
  source 1..20: mol_type = other DNA
tccaggccgtgcataaggct

SEQ ID NO: 21289 - DNA, 20 bp, synthetic construct
  source 1..20: mol_type = other DNA
tccaggccgtgcataaggct

SEQ ID NO: 21290 - DNA, 20 bp, synthetic construct
  source 1..20: mol_type = other DNA
tccaggccgtgcataaggct

SEQ ID NO: 21291 - DNA, 20 bp, synthetic construct
  source 1..20: mol_type = other DNA
tccaggccgtgcataaggct

SEQ ID NO: 21292 - DNA, 20 bp, synthetic construct
  source 1..20: mol_type = other DNA
tccaggccgtgcataaggct

SEQ ID NO: 21293 - DNA, 20 bp, synthetic construct
  source 1..20: mol_type = other DNA
tccaggccgtgcataaggct

SEQ ID NO: 21294 - DNA, 20 bp, synthetic construct
  source 1..20: mol_type = other DNA
tccaggccgtgcataaggct

SEQ ID NO: 21295 - DNA, 20 bp, synthetic construct
  source 1..20: mol_type = other DNA
tccaggccgtgcataaggct

SEQ ID NO: 21296 - DNA, 20 bp, synthetic construct
  source 1..20: mol_type = other DNA
tccaggccgtgcataaggct

SEQ ID NO: 21297 - DNA, 20 bp, synthetic construct
  source 1..20: mol_type = other DNA
tccaggccgtgcataaggct

SEQ ID NO: 21298 - DNA, 20 bp, synthetic construct
  source 1..20: mol_type = other DNA
tccaggccgtgcataaggct

SEQ ID NO: 21299 - DNA, 20 bp, synthetic construct
  source 1..20: mol_type = other DNA
tccaggccgtgcataaggct

SEQ ID NO: 21300 - DNA, 20 bp, synthetic construct
  source 1..20: mol_type = other DNA
tccaggccgtgcataaggct

SEQ ID NO: 21301 - DNA, 20 bp, synthetic construct
  source 1..20: mol_type = other DNA
tccaggccgtgcataaggct

SEQ ID NO: 21302 - DNA, 20 bp, synthetic construct
  source 1..20: mol_type = other DNA
tccaggccgtgcataaggct

SEQ ID NO: 21303 - DNA, 20 bp, synthetic construct
  source 1..20: mol_type = other DNA
tccaggccgtgcataaggct

SEQ ID NO: 21304 - DNA, 20 bp, synthetic construct
  source 1..20: mol_type = other DNA
tccaggccgtgcataaggct

SEQ ID NO: 21305 - DNA, 20 bp, synthetic construct
  source 1..20: mol_type = other DNA
tccaggccgtgcataaggct

SEQ ID NO: 21306 - DNA, 20 bp, synthetic construct
  source 1..20: mol_type = other DNA
tccaggccgtgcataaggct

SEQ ID NO: 21307 - DNA, 20 bp, synthetic construct
  source 1..20: mol_type = other DNA
tccaggccgtgcataaggct

SEQ ID NO: 21308 - DNA, 20 bp, synthetic construct
  source 1..20: mol_type = other DNA
tccaggccgtgcataaggct

SEQ ID NO: 21309 - DNA, 20 bp, synthetic construct
  source 1..20: mol_type = other DNA
tccaggccgtgcataaggct

SEQ ID NO: 21310 - DNA, 20 bp, synthetic construct
  source 1..20: mol_type = other DNA
tccaggccgtgcataaggct

SEQ ID NO: 21311 - DNA, 20 bp, synthetic construct
  source 1..20: mol_type = other DNA
tccaggccgtgcataaggct

SEQ ID NO: 21312 - DNA, 20 bp, synthetic construct
  source 1..20: mol_type = other DNA
tccaggccgtgcataaggct

SEQ ID NO: 21313 - DNA, 20 bp, synthetic construct
  source 1..20: mol_type = other DNA
tccaggccgtgcataaggct

SEQ ID NO: 21314 - DNA, 20 bp, synthetic construct
  source 1..20: mol_type = other DNA
tccaggccgtgcataaggct

SEQ ID NO: 21315 - DNA, 20 bp, synthetic construct
  source 1..20: mol_type = other DNA
tccaggccgtgcataaggct

SEQ ID NO: 21316 - DNA, 20 bp, synthetic construct
  source 1..20: mol_type = other DNA
tccaggccgtgcataaggct

SEQ ID NO: 21317 - DNA, 20 bp, synthetic construct
  source 1..20: mol_type = other DNA
tccaggccgtgcataaggct

SEQ ID NO: 21318 - DNA, 20 bp, synthetic construct
  source 1..20: mol_type = other DNA
tccaggccgtgcataaggct

SEQ ID NO: 21319 - DNA, 20 bp, synthetic construct
  source 1..20: mol_type = other DNA
tccaggccgtgcataaggct

SEQ ID NO: 21320 - DNA, 20 bp, synthetic construct
  source 1..20: mol_type = other DNA
tccaggccgtgcataaggct

SEQ ID NO: 21321 - DNA, 20 bp, synthetic construct
  source 1..20: mol_type = other DNA
tccaggccgtgcataaggct

SEQ ID NO: 21322 - DNA, 20 bp, synthetic construct
  source 1..20: mol_type = other DNA
tccaggccgtgcataaggct

SEQ ID NO: 21323 - DNA, 20 bp, synthetic construct
  source 1..20: mol_type = other DNA
tccaggccgtgcataaggct

SEQ ID NO: 21324 - DNA, 20 bp, synthetic construct
  source 1..20: mol_type = other DNA
tccaggccgtgcataaggct

SEQ ID NO: 21325 - DNA, 20 bp, synthetic construct
  source 1..20: mol_type = other DNA
tccaggccgtgcataaggct

SEQ ID NO: 21326 - DNA, 20 bp, synthetic construct
  source 1..20: mol_type = other DNA
tccaggccgtgcataaggct

SEQ ID NO: 21327 - DNA, 20 bp, synthetic construct
  source 1..20: mol_type = other DNA
tccaggccgtgcataaggct

SEQ ID NO: 21328 - DNA, 20 bp, synthetic construct
  source 1..20: mol_type = other DNA
tccaggccgtgcataaggct

SEQ ID NO: 21329 - DNA, 20 bp, synthetic construct
  source 1..20: mol_type = other DNA
tccaggccgtgcataaggct

SEQ ID NO: 21330 - DNA, 20 bp, synthetic construct
  source 1..20: mol_type = other DNA
tccaggccgtgcataaggct

SEQ ID NO: 21331 - DNA, 20 bp, synthetic construct
  source 1..20: mol_type = other DNA
tccaggccgtgcataaggct

SEQ ID NO: 21332 - DNA, 20 bp, synthetic construct
  source 1..20: mol_type = other DNA
tccaggccgtgcataaggct

SEQ ID NO: 21333 - DNA, 20 bp, synthetic construct
  source 1..20: mol_type = other DNA
tccaggccgtgcataaggct

SEQ ID NO: 21334 - DNA, 20 bp, synthetic construct
  source 1..20: mol_type = other DNA
tccaggccgtgcataaggct

SEQ ID NO: 21335 - DNA, 20 bp, synthetic construct
  source 1..20: mol_type = other DNA
tccaggccgtgcataaggct

SEQ ID NO: 21336 - DNA, 20 bp, synthetic construct
  source 1..20: mol_type = other DNA
tccaggccgtgcataaggct

SEQ ID NO: 21337 - DNA, 20 bp, synthetic construct
  source 1..20: mol_type = other DNA
tccaggccgtgcataaggct

SEQ ID NO: 21338 - DNA, 20 bp, synthetic construct
  source 1..20: mol_type = other DNA
tccaggccgtgcataaggct

SEQ ID NO: 21339 - DNA, 20 bp, synthetic construct
  source 1..20: mol_type = other DNA
tccaggccgtgcataaggct

SEQ ID NO: 21340 - DNA, 20 bp, synthetic construct
  source 1..20: mol_type = other DNA
tccaggccgtgcataaggct

SEQ ID NO: 21341 - DNA, 20 bp, synthetic construct
  source 1..20: mol_type = other DNA
tccaggccgtgcataaggct

SEQ ID NO: 21342 - DNA, 20 bp, synthetic construct
  source 1..20: mol_type = other DNA
tccaggccgtgcataaggct

SEQ ID NO: 21343 - DNA, 20 bp, synthetic construct
  source 1..20: mol_type = other DNA
tccaggccgtgcataaggct

SEQ ID NO: 21344 - DNA, 20 bp, synthetic construct
  source 1..20: mol_type = other DNA
tccaggccgtgcataaggct

SEQ ID NO: 21345 - DNA, 20 bp, synthetic construct
  source 1..20: mol_type = other DNA
tccaggccgtgcataaggct

SEQ ID NO: 21346 - DNA, 20 bp, synthetic construct
  source 1..20: mol_type = other DNA
tccaggccgtgcataaggct

SEQ ID NO: 21347 - DNA, 20 bp, synthetic construct
  source 1..20: mol_type = other DNA
tccaggccgtgcataaggct

SEQ ID NO: 21348 - DNA, 20 bp, synthetic construct
  source 1..20: mol_type = other DNA
tccaggccgtgcataaggct

SEQ ID NO: 21349 - DNA, 20 bp, synthetic construct
  source 1..20: mol_type = other DNA
tccaggccgtgcataaggct

SEQ ID NO: 21350 - DNA, 20 bp, synthetic construct
  source 1..20: mol_type = other DNA
tccaggccgtgcataaggct

SEQ ID NO: 21351 - DNA, 20 bp, synthetic construct
  source 1..20: mol_type = other DNA
tccaggccgtgcataaggct

SEQ ID NO: 21352 - DNA, 20 bp, synthetic construct
  source 1..20: mol_type = other DNA
tccaggccgtgcataaggct

SEQ ID NO: 21353 - DNA, 20 bp, synthetic construct
  source 1..20: mol_type = other DNA
tccaggccgtgcataaggct

SEQ ID NO: 21354 - DNA, 20 bp, synthetic construct
  source 1..20: mol_type = other DNA
tccaggccgtgcataaggct

SEQ ID NO: 21355 - DNA, 20 bp, synthetic construct
  source 1..20: mol_type = other DNA
tccaggccgtgcataaggct

SEQ ID NO: 21356 - DNA, 17 bp, synthetic construct
  source 1..17: mol_type = other DNA
gtcgatggtcagcacag

SEQ ID NO: 21357 - DNA, 16 bp, synthetic construct
  source 1..16: mol_type = other DNA
gtcgatggtcagcaca

SEQ ID NO: 21358 - DNA, 15 bp, synthetic construct
  source 1..15: mol_type = other DNA
gtcgatggtcagcac

SEQ ID NO: 21359 - DNA, 14 bp, synthetic construct
  source 1..14: mol_type = other DNA
gtcgatggtcagca

SEQ ID NO: 21360 - DNA, 13 bp, synthetic construct
  source 1..13: mol_type = other DNA
gtcgatggtcagc

SEQ ID NO: 21361 - DNA, 12 bp, synthetic construct
  source 1..12: mol_type = other DNA
gtcgatggtcag

SEQ ID NO: 21362 - DNA, 11 bp, synthetic construct
  source 1..11: mol_type = other DNA
gtcgatggtca

SEQ ID NO: 21363 - DNA, 10 bp, synthetic construct
  source 1..10: mol_type = other DNA
gtcgatggtc

SEQ ID NO: 21364-21365 - skipped (2 entries)

SEQ ID NO: 21366 - DNA, 17 bp, synthetic construct
  source 1..17: mol_type = other DNA
gtcgatggtcagcacag

SEQ ID NO: 21367 - DNA, 16 bp, synthetic construct
  source 1..16: mol_type = other DNA
gtcgatggtcagcaca

SEQ ID NO: 21368 - DNA, 15 bp, synthetic construct
  source 1..15: mol_type = other DNA
gtcgatggtcagcac

SEQ ID NO: 21369 - DNA, 14 bp, synthetic construct
  source 1..14: mol_type = other DNA
gtcgatggtcagca

SEQ ID NO: 21370 - DNA, 13 bp, synthetic construct
  source 1..13: mol_type = other DNA
gtcgatggtcagc

SEQ ID NO: 21371 - DNA, 12 bp, synthetic construct
  source 1..12: mol_type = other DNA
gtcgatggtcag

SEQ ID NO: 21372 - DNA, 11 bp, synthetic construct
  source 1..11: mol_type = other DNA
gtcgatggtca

SEQ ID NO: 21373 - DNA, 10 bp, synthetic construct
  source 1..10: mol_type = other DNA
gtcgatggtc

SEQ ID NO: 21374-21375 - skipped (2 entries)

SEQ ID NO: 21376 - DNA, 17 bp, synthetic construct
  source 1..17: mol_type = other DNA
gtcgatggtcagcacag

SEQ ID NO: 21377 - DNA, 16 bp, synthetic construct
  source 1..16: mol_type = other DNA
gtcgatggtcagcaca

SEQ ID NO: 21378 - DNA, 15 bp, synthetic construct
  source 1..15: mol_type = other DNA
gtcgatggtcagcac

SEQ ID NO: 21379 - DNA, 14 bp, synthetic construct
  source 1..14: mol_type = other DNA
gtcgatggtcagca

SEQ ID NO: 21380 - DNA, 13 bp, synthetic construct
  source 1..13: mol_type = other DNA
gtcgatggtcagc

SEQ ID NO: 21381 - DNA, 12 bp, synthetic construct
  source 1..12: mol_type = other DNA
gtcgatggtcag

SEQ ID NO: 21382 - DNA, 11 bp, synthetic construct
  source 1..11: mol_type = other DNA
gtcgatggtca

SEQ ID NO: 21383 - DNA, 10 bp, synthetic construct
  source 1..10: mol_type = other DNA
gtcgatggtc

SEQ ID NO: 21384-21385 - skipped (2 entries)

SEQ ID NO: 21386 - DNA, 17 bp, synthetic construct
  source 1..17: mol_type = other DNA
gtcgatggtcagcacag

SEQ ID NO: 21387 - DNA, 16 bp, synthetic construct
  source 1..16: mol_type = other DNA
gtcgatggtcagcaca

SEQ ID NO: 21388 - DNA, 15 bp, synthetic construct
  source 1..15: mol_type = other DNA
gtcgatggtcagcac

SEQ ID NO: 21389 - DNA, 14 bp, synthetic construct
  source 1..14: mol_type = other DNA
gtcgatggtcagca

SEQ ID NO: 21390 - DNA, 13 bp, synthetic construct
  source 1..13: mol_type = other DNA
gtcgatggtcagc

SEQ ID NO: 21391 - DNA, 12 bp, synthetic construct
  source 1..12: mol_type = other DNA
gtcgatggtcag

SEQ ID NO: 21392 - DNA, 11 bp, synthetic construct
  source 1..11: mol_type = other DNA
gtcgatggtca

SEQ ID NO: 21393 - DNA, 10 bp, synthetic construct
  source 1..10: mol_type = other DNA
gtcgatggtc

SEQ ID NO: 21394-21395 - skipped (2 entries)

SEQ ID NO: 21396 - DNA, 17 bp, synthetic construct
  source 1..17: mol_type = other DNA
gtcgatggtcagcacag

SEQ ID NO: 21397 - DNA, 16 bp, synthetic construct
  source 1..16: mol_type = other DNA
gtcgatggtcagcaca

SEQ ID NO: 21398 - DNA, 15 bp, synthetic construct
  source 1..15: mol_type = other DNA
gtcgatggtcagcac

SEQ ID NO: 21399 - DNA, 14 bp, synthetic construct
  source 1..14: mol_type = other DNA
gtcgatggtcagca

SEQ ID NO: 21400 - DNA, 13 bp, synthetic construct
  source 1..13: mol_type = other DNA
gtcgatggtcagc

SEQ ID NO: 21401 - DNA, 12 bp, synthetic construct
  source 1..12: mol_type = other DNA
gtcgatggtcag

SEQ ID NO: 21402 - DNA, 11 bp, synthetic construct
  source 1..11: mol_type = other DNA
gtcgatggtca

SEQ ID NO: 21403 - DNA, 10 bp, synthetic construct
  source 1..10: mol_type = other DNA
gtcgatggtc

SEQ ID NO: 21404-21405 - skipped (2 entries)

SEQ ID NO: 21406 - DNA, 17 bp, synthetic construct
  source 1..17: mol_type = other DNA
gtcgatggtcagcacag

SEQ ID NO: 21407 - DNA, 16 bp, synthetic construct
  source 1..16: mol_type = other DNA
gtcgatggtcagcaca

SEQ ID NO: 21408 - DNA, 15 bp, synthetic construct
  source 1..15: mol_type = other DNA
gtcgatggtcagcac

SEQ ID NO: 21409 - DNA, 14 bp, synthetic construct
  source 1..14: mol_type = other DNA
gtcgatggtcagca

SEQ ID NO: 21410 - DNA, 13 bp, synthetic construct
  source 1..13: mol_type = other DNA
gtcgatggtcagc

SEQ ID NO: 21411 - DNA, 12 bp, synthetic construct
  source 1..12: mol_type = other DNA
gtcgatggtcag

SEQ ID NO: 21412 - DNA, 11 bp, synthetic construct
  source 1..11: mol_type = other DNA
gtcgatggtca

SEQ ID NO: 21413 - DNA, 10 bp, synthetic construct
  source 1..10: mol_type = other DNA
gtcgatggtc

SEQ ID NO: 21414-21415 - skipped (2 entries)

SEQ ID NO: 21416 - DNA, 17 bp, synthetic construct
  source 1..17: mol_type = other DNA
gtcgatggtcagcacag

SEQ ID NO: 21417 - DNA, 16 bp, synthetic construct
  source 1..16: mol_type = other DNA
gtcgatggtcagcaca

SEQ ID NO: 21418 - DNA, 15 bp, synthetic construct
  source 1..15: mol_type = other DNA
gtcgatggtcagcac

SEQ ID NO: 21419 - DNA, 14 bp, synthetic construct
  source 1..14: mol_type = other DNA
gtcgatggtcagca

SEQ ID NO: 21420 - DNA, 13 bp, synthetic construct
  source 1..13: mol_type = other DNA
gtcgatggtcagc

SEQ ID NO: 21421 - DNA, 12 bp, synthetic construct
  source 1..12: mol_type = other DNA
gtcgatggtcag

SEQ ID NO: 21422 - DNA, 11 bp, synthetic construct
  source 1..11: mol_type = other DNA
gtcgatggtca

SEQ ID NO: 21423 - DNA, 10 bp, synthetic construct
  source 1..10: mol_type = other DNA
gtcgatggtc

SEQ ID NO: 21424-21425 - skipped (2 entries)

SEQ ID NO: 21426 - DNA, 17 bp, synthetic construct
  source 1..17: mol_type = other DNA
gtcgatggtcagcacag

SEQ ID NO: 21427 - DNA, 16 bp, synthetic construct
  source 1..16: mol_type = other DNA
gtcgatggtcagcaca

SEQ ID NO: 21428 - DNA, 15 bp, synthetic construct
  source 1..15: mol_type = other DNA
gtcgatggtcagcac

SEQ ID NO: 21429 - DNA, 14 bp, synthetic construct
  source 1..14: mol_type = other DNA
gtcgatggtcagca

SEQ ID NO: 21430 - DNA, 13 bp, synthetic construct
  source 1..13: mol_type = other DNA
gtcgatggtcagc

SEQ ID NO: 21431 - DNA, 12 bp, synthetic construct
  source 1..12: mol_type = other DNA
gtcgatggtcag

SEQ ID NO: 21432 - DNA, 11 bp, synthetic construct
  source 1..11: mol_type = other DNA
gtcgatggtca

SEQ ID NO: 21433 - DNA, 10 bp, synthetic construct
  source 1..10: mol_type = other DNA
gtcgatggtc

SEQ ID NO: 21434-21435 - skipped (2 entries)

SEQ ID NO: 21436 - DNA, 17 bp, synthetic construct
  source 1..17: mol_type = other DNA
gtcgatggtcagcacag

SEQ ID NO: 21437 - DNA, 16 bp, synthetic construct
  source 1..16: mol_type = other DNA
gtcgatggtcagcaca

SEQ ID NO: 21438 - DNA, 15 bp, synthetic construct
  source 1..15: mol_type = other DNA
gtcgatggtcagcac

SEQ ID NO: 21439 - DNA, 14 bp, synthetic construct
  source 1..14: mol_type = other DNA
gtcgatggtcagca

SEQ ID NO: 21440 - DNA, 13 bp, synthetic construct
  source 1..13: mol_type = other DNA
gtcgatggtcagc

SEQ ID NO: 21441 - DNA, 12 bp, synthetic construct
  source 1..12: mol_type = other DNA
gtcgatggtcag

SEQ ID NO: 21442 - DNA, 11 bp, synthetic construct
  source 1..11: mol_type = other DNA
gtcgatggtca

SEQ ID NO: 21443 - DNA, 10 bp, synthetic construct
  source 1..10: mol_type = other DNA
gtcgatggtc

SEQ ID NO: 21444-21445 - skipped (2 entries)

SEQ ID NO: 21446 - DNA, 17 bp, synthetic construct
  source 1..17: mol_type = other DNA
cgatggtcagcacagcc

SEQ ID NO: 21447 - DNA, 16 bp, synthetic construct
  source 1..16: mol_type = other DNA
cgatggtcagcacagc

SEQ ID NO: 21448 - DNA, 15 bp, synthetic construct
  source 1..15: mol_type = other DNA
cgatggtcagcacag

SEQ ID NO: 21449 - DNA, 14 bp, synthetic construct
  source 1..14: mol_type = other DNA
cgatggtcagcaca

SEQ ID NO: 21450 - DNA, 13 bp, synthetic construct
  source 1..13: mol_type = other DNA
cgatggtcagcac

SEQ ID NO: 21451 - DNA, 12 bp, synthetic construct
  source 1..12: mol_type = other DNA
cgatggtcagca

SEQ ID NO: 21452 - DNA, 11 bp, synthetic construct
  source 1..11: mol_type = other DNA
cgatggtcagc

SEQ ID NO: 21453 - DNA, 10 bp, synthetic construct
  source 1..10: mol_type = other DNA
cgatggtcag

SEQ ID NO: 21454-21455 - skipped (2 entries)

SEQ ID NO: 21456 - DNA, 17 bp, synthetic construct
  source 1..17: mol_type = other DNA
cgatggtcagcacagcc

SEQ ID NO: 21457 - DNA, 16 bp, synthetic construct
  source 1..16: mol_type = other DNA
cgatggtcagcacagc

SEQ ID NO: 21458 - DNA, 15 bp, synthetic construct
  source 1..15: mol_type = other DNA
cgatggtcagcacag

SEQ ID NO: 21459 - DNA, 14 bp, synthetic construct
  source 1..14: mol_type = other DNA
cgatggtcagcaca

SEQ ID NO: 21460 - DNA, 13 bp, synthetic construct
  source 1..13: mol_type = other DNA
cgatggtcagcac

SEQ ID NO: 21461 - DNA, 12 bp, synthetic construct
  source 1..12: mol_type = other DNA
cgatggtcagca

SEQ ID NO: 21462 - DNA, 11 bp, synthetic construct
  source 1..11: mol_type = other DNA
cgatggtcagc

SEQ ID NO: 21463 - DNA, 10 bp, synthetic construct
  source 1..10: mol_type = other DNA
cgatggtcag

SEQ ID NO: 21464-21465 - skipped (2 entries)

SEQ ID NO: 21466 - DNA, 17 bp, synthetic construct
  source 1..17: mol_type = other DNA
cgatggtcagcacagcc

SEQ ID NO: 21467 - DNA, 16 bp, synthetic construct
  source 1..16: mol_type = other DNA
cgatggtcagcacagc

SEQ ID NO: 21468 - DNA, 15 bp, synthetic construct
  source 1..15: mol_type = other DNA
cgatggtcagcacag

SEQ ID NO: 21469 - DNA, 14 bp, synthetic construct
  source 1..14: mol_type = other DNA
cgatggtcagcaca

SEQ ID NO: 21470 - DNA, 13 bp, synthetic construct
  source 1..13: mol_type = other DNA
cgatggtcagcac

SEQ ID NO: 21471 - DNA, 12 bp, synthetic construct
  source 1..12: mol_type = other DNA
cgatggtcagca

SEQ ID NO: 21472 - DNA, 11 bp, synthetic construct
  source 1..11: mol_type = other DNA
cgatggtcagc

SEQ ID NO: 21473 - DNA, 10 bp, synthetic construct
  source 1..10: mol_type = other DNA
cgatggtcag

SEQ ID NO: 21474-21475 - skipped (2 entries)

SEQ ID NO: 21476 - DNA, 17 bp, synthetic construct
  source 1..17: mol_type = other DNA
cgatggtcagcacagcc

SEQ ID NO: 21477 - DNA, 16 bp, synthetic construct
  source 1..16: mol_type = other DNA
cgatggtcagcacagc

SEQ ID NO: 21478 - DNA, 15 bp, synthetic construct
  source 1..15: mol_type = other DNA
cgatggtcagcacag

SEQ ID NO: 21479 - DNA, 14 bp, synthetic construct
  source 1..14: mol_type = other DNA
cgatggtcagcaca

SEQ ID NO: 21480 - DNA, 13 bp, synthetic construct
  source 1..13: mol_type = other DNA
cgatggtcagcac

SEQ ID NO: 21481 - DNA, 12 bp, synthetic construct
  source 1..12: mol_type = other DNA
cgatggtcagca

SEQ ID NO: 21482 - DNA, 11 bp, synthetic construct
  source 1..11: mol_type = other DNA
cgatggtcagc

SEQ ID NO: 21483 - DNA, 10 bp, synthetic construct
  source 1..10: mol_type = other DNA
cgatggtcag

SEQ ID NO: 21484-21485 - skipped (2 entries)

SEQ ID NO: 21486 - DNA, 17 bp, synthetic construct
  source 1..17: mol_type = other DNA
cgatggtcagcacagcc

SEQ ID NO: 21487 - DNA, 16 bp, synthetic construct
  source 1..16: mol_type = other DNA
cgatggtcagcacagc

SEQ ID NO: 21488 - DNA, 15 bp, synthetic construct
  source 1..15: mol_type = other DNA
cgatggtcagcacag

SEQ ID NO: 21489 - DNA, 14 bp, synthetic construct
  source 1..14: mol_type = other DNA
cgatggtcagcaca

SEQ ID NO: 21490 - DNA, 13 bp, synthetic construct
  source 1..13: mol_type = other DNA
cgatggtcagcac

SEQ ID NO: 21491 - DNA, 12 bp, synthetic construct
  source 1..12: mol_type = other DNA
cgatggtcagca

SEQ ID NO: 21492 - DNA, 11 bp, synthetic construct
  source 1..11: mol_type = other DNA
cgatggtcagc

SEQ ID NO: 21493 - DNA, 10 bp, synthetic construct
  source 1..10: mol_type = other DNA
cgatggtcag

SEQ ID NO: 21494-21495 - skipped (2 entries)

SEQ ID NO: 21496 - DNA, 17 bp, synthetic construct
  source 1..17: mol_type = other DNA
cgatggtcagcacagcc

SEQ ID NO: 21497 - DNA, 16 bp, synthetic construct
  source 1..16: mol_type = other DNA
cgatggtcagcacagc

SEQ ID NO: 21498 - DNA, 15 bp, synthetic construct
  source 1..15: mol_type = other DNA
cgatggtcagcacag

SEQ ID NO: 21499 - DNA, 14 bp, synthetic construct
  source 1..14: mol_type = other DNA
cgatggtcagcaca

SEQ ID NO: 21500 - DNA, 13 bp, synthetic construct
  source 1..13: mol_type = other DNA
cgatggtcagcac

SEQ ID NO: 21501 - DNA, 12 bp, synthetic construct
  source 1..12: mol_type = other DNA
cgatggtcagca

SEQ ID NO: 21502 - DNA, 11 bp, synthetic construct
  source 1..11: mol_type = other DNA
cgatggtcagc

SEQ ID NO: 21503 - DNA, 10 bp, synthetic construct
  source 1..10: mol_type = other DNA
cgatggtcag

SEQ ID NO: 21504-21505 - skipped (2 entries)

SEQ ID NO: 21506 - DNA, 17 bp, synthetic construct
  source 1..17: mol_type = other DNA
cgatggtcagcacagcc

SEQ ID NO: 21507 - DNA, 16 bp, synthetic construct
  source 1..16: mol_type = other DNA
cgatggtcagcacagc

SEQ ID NO: 21508 - DNA, 15 bp, synthetic construct
  source 1..15: mol_type = other DNA
cgatggtcagcacag

SEQ ID NO: 21509 - DNA, 14 bp, synthetic construct
  source 1..14: mol_type = other DNA
cgatggtcagcaca

SEQ ID NO: 21510 - DNA, 13 bp, synthetic construct
  source 1..13: mol_type = other DNA
cgatggtcagcac

SEQ ID NO: 21511 - DNA, 12 bp, synthetic construct
  source 1..12: mol_type = other DNA
cgatggtcagca

SEQ ID NO: 21512 - DNA, 11 bp, synthetic construct
  source 1..11: mol_type = other DNA
cgatggtcagc

SEQ ID NO: 21513 - DNA, 10 bp, synthetic construct
  source 1..10: mol_type = other DNA
cgatggtcag

SEQ ID NO: 21514-21515 - skipped (2 entries)

SEQ ID NO: 21516 - DNA, 17 bp, synthetic construct
  source 1..17: mol_type = other DNA
cgatggtcagcacagcc

SEQ ID NO: 21517 - DNA, 16 bp, synthetic construct
  source 1..16: mol_type = other DNA
cgatggtcagcacagc

SEQ ID NO: 21518 - DNA, 15 bp, synthetic construct
  source 1..15: mol_type = other DNA
cgatggtcagcacag

SEQ ID NO: 21519 - DNA, 14 bp, synthetic construct
  source 1..14: mol_type = other DNA
cgatggtcagcaca

SEQ ID NO: 21520 - DNA, 13 bp, synthetic construct
  source 1..13: mol_type = other DNA
cgatggtcagcac

SEQ ID NO: 21521 - DNA, 12 bp, synthetic construct
  source 1..12: mol_type = other DNA
cgatggtcagca

SEQ ID NO: 21522 - DNA, 11 bp, synthetic construct
  source 1..11: mol_type = other DNA
cgatggtcagc

SEQ ID NO: 21523 - DNA, 10 bp, synthetic construct
  source 1..10: mol_type = other DNA
cgatggtcag

SEQ ID NO: 21524-21525 - skipped (2 entries)

SEQ ID NO: 21526 - DNA, 17 bp, synthetic construct
  source 1..17: mol_type = other DNA
cgatggtcagcacagcc

SEQ ID NO: 21527 - DNA, 16 bp, synthetic construct
  source 1..16: mol_type = other DNA
cgatggtcagcacagc

SEQ ID NO: 21528 - DNA, 15 bp, synthetic construct
  source 1..15: mol_type = other DNA
cgatggtcagcacag

SEQ ID NO: 21529 - DNA, 14 bp, synthetic construct
  source 1..14: mol_type = other DNA
cgatggtcagcaca

SEQ ID NO: 21530 - DNA, 13 bp, synthetic construct
  source 1..13: mol_type = other DNA
cgatggtcagcac

SEQ ID NO: 21531 - DNA, 12 bp, synthetic construct
  source 1..12: mol_type = other DNA
cgatggtcagca

SEQ ID NO: 21532 - DNA, 11 bp, synthetic construct
  source 1..11: mol_type = other DNA
cgatggtcagc

SEQ ID NO: 21533 - DNA, 10 bp, synthetic construct
  source 1..10: mol_type = other DNA
cgatggtcag

SEQ ID NO: 21534-21535 - skipped (2 entries)

SEQ ID NO: 21536 - DNA, 17 bp, synthetic construct
  source 1..17: mol_type = other DNA
gatggtcagcacagcct

SEQ ID NO: 21537 - DNA, 16 bp, synthetic construct
  source 1..16: mol_type = other DNA
gatggtcagcacagcc

SEQ ID NO: 21538 - DNA, 15 bp, synthetic construct
  source 1..15: mol_type = other DNA
gatggtcagcacagc

SEQ ID NO: 21539 - DNA, 14 bp, synthetic construct
  source 1..14: mol_type = other DNA
gatggtcagcacag

SEQ ID NO: 21540 - DNA, 13 bp, synthetic construct
  source 1..13: mol_type = other DNA
gatggtcagcaca

SEQ ID NO: 21541 - DNA, 12 bp, synthetic construct
  source 1..12: mol_type = other DNA
gatggtcagcac

SEQ ID NO: 21542 - DNA, 11 bp, synthetic construct
  source 1..11: mol_type = other DNA
gatggtcagca

SEQ ID NO: 21543 - DNA, 10 bp, synthetic construct
  source 1..10: mol_type = other DNA
gatggtcagc

SEQ ID NO: 21544-21545 - skipped (2 entries)

SEQ ID NO: 21546 - DNA, 17 bp, synthetic construct
  source 1..17: mol_type = other DNA
gatggtcagcacagcct

SEQ ID NO: 21547 - DNA, 16 bp, synthetic construct
  source 1..16: mol_type = other DNA
gatggtcagcacagcc

SEQ ID NO: 21548 - DNA, 15 bp, synthetic construct
  source 1..15: mol_type = other DNA
gatggtcagcacagc

SEQ ID NO: 21549 - DNA, 14 bp, synthetic construct
  source 1..14: mol_type = other DNA
gatggtcagcacag

SEQ ID NO: 21550 - DNA, 13 bp, synthetic construct
  source 1..13: mol_type = other DNA
gatggtcagcaca

SEQ ID NO: 21551 - DNA, 12 bp, synthetic construct
  source 1..12: mol_type = other DNA
gatggtcagcac

SEQ ID NO: 21552 - DNA, 11 bp, synthetic construct
  source 1..11: mol_type = other DNA
gatggtcagca

SEQ ID NO: 21553 - DNA, 10 bp, synthetic construct
  source 1..10: mol_type = other DNA
gatggtcagc

SEQ ID NO: 21554-21555 - skipped (2 entries)

SEQ ID NO: 21556 - DNA, 17 bp, synthetic construct
  source 1..17: mol_type = other DNA
gatggtcagcacagcct

SEQ ID NO: 21557 - DNA, 16 bp, synthetic construct
  source 1..16: mol_type = other DNA
gatggtcagcacagcc

SEQ ID NO: 21558 - DNA, 15 bp, synthetic construct
  source 1..15: mol_type = other DNA
gatggtcagcacagc

SEQ ID NO: 21559 - DNA, 14 bp, synthetic construct
  source 1..14: mol_type = other DNA
gatggtcagcacag

SEQ ID NO: 21560 - DNA, 13 bp, synthetic construct
  source 1..13: mol_type = other DNA
gatggtcagcaca

SEQ ID NO: 21561 - DNA, 12 bp, synthetic construct
  source 1..12: mol_type = other DNA
gatggtcagcac

SEQ ID NO: 21562 - DNA, 11 bp, synthetic construct
  source 1..11: mol_type = other DNA
gatggtcagca

SEQ ID NO: 21563 - DNA, 10 bp, synthetic construct
  source 1..10: mol_type = other DNA
gatggtcagc

SEQ ID NO: 21564-21565 - skipped (2 entries)

SEQ ID NO: 21566 - DNA, 17 bp, synthetic construct
  source 1..17: mol_type = other DNA
gatggtcagcacagcct

SEQ ID NO: 21567 - DNA, 16 bp, synthetic construct
  source 1..16: mol_type = other DNA
gatggtcagcacagcc

SEQ ID NO: 21568 - DNA, 15 bp, synthetic construct
  source 1..15: mol_type = other DNA
gatggtcagcacagc

SEQ ID NO: 21569 - DNA, 14 bp, synthetic construct
  source 1..14: mol_type = other DNA
gatggtcagcacag

SEQ ID NO: 21570 - DNA, 13 bp, synthetic construct
  source 1..13: mol_type = other DNA
gatggtcagcaca

SEQ ID NO: 21571 - DNA, 12 bp, synthetic construct
  source 1..12: mol_type = other DNA
gatggtcagcac

SEQ ID NO: 21572 - DNA, 11 bp, synthetic construct
  source 1..11: mol_type = other DNA
gatggtcagca

SEQ ID NO: 21573 - DNA, 10 bp, synthetic construct
  source 1..10: mol_type = other DNA
gatggtcagc

SEQ ID NO: 21574-21575 - skipped (2 entries)

SEQ ID NO: 21576 - DNA, 17 bp, synthetic construct
  source 1..17: mol_type = other DNA
gatggtcagcacagcct

SEQ ID NO: 21577 - DNA, 16 bp, synthetic construct
  source 1..16: mol_type = other DNA
gatggtcagcacagcc

SEQ ID NO: 21578 - DNA, 15 bp, synthetic construct
  source 1..15: mol_type = other DNA
gatggtcagcacagc

SEQ ID NO: 21579 - DNA, 14 bp, synthetic construct
  source 1..14: mol_type = other DNA
gatggtcagcacag

SEQ ID NO: 21580 - DNA, 13 bp, synthetic construct
  source 1..13: mol_type = other DNA
gatggtcagcaca

SEQ ID NO: 21581 - DNA, 12 bp, synthetic construct
  source 1..12: mol_type = other DNA
gatggtcagcac

SEQ ID NO: 21582 - DNA, 11 bp, synthetic construct
  source 1..11: mol_type = other DNA
gatggtcagca

SEQ ID NO: 21583 - DNA, 10 bp, synthetic construct
  source 1..10: mol_type = other DNA
gatggtcagc

SEQ ID NO: 21584-21585 - skipped (2 entries)

SEQ ID NO: 21586 - DNA, 17 bp, synthetic construct
  source 1..17: mol_type = other DNA
gatggtcagcacagcct

SEQ ID NO: 21587 - DNA, 16 bp, synthetic construct
  source 1..16: mol_type = other DNA
gatggtcagcacagcc

SEQ ID NO: 21588 - DNA, 15 bp, synthetic construct
  source 1..15: mol_type = other DNA
gatggtcagcacagc

SEQ ID NO: 21589 - DNA, 14 bp, synthetic construct
  source 1..14: mol_type = other DNA
gatggtcagcacag

SEQ ID NO: 21590 - DNA, 13 bp, synthetic construct
  source 1..13: mol_type = other DNA
gatggtcagcaca

SEQ ID NO: 21591 - DNA, 12 bp, synthetic construct
  source 1..12: mol_type = other DNA
gatggtcagcac

SEQ ID NO: 21592 - DNA, 11 bp, synthetic construct
  source 1..11: mol_type = other DNA
gatggtcagca

SEQ ID NO: 21593 - DNA, 10 bp, synthetic construct
  source 1..10: mol_type = other DNA
gatggtcagc

SEQ ID NO: 21594-21595 - skipped (2 entries)

SEQ ID NO: 21596 - DNA, 17 bp, synthetic construct
  source 1..17: mol_type = other DNA
gatggtcagcacagcct

SEQ ID NO: 21597 - DNA, 16 bp, synthetic construct
  source 1..16: mol_type = other DNA
gatggtcagcacagcc

SEQ ID NO: 21598 - DNA, 15 bp, synthetic construct
  source 1..15: mol_type = other DNA
gatggtcagcacagc

SEQ ID NO: 21599 - DNA, 14 bp, synthetic construct
  source 1..14: mol_type = other DNA
gatggtcagcacag

SEQ ID NO: 21600 - DNA, 13 bp, synthetic construct
  source 1..13: mol_type = other DNA
gatggtcagcaca

SEQ ID NO: 21601 - DNA, 12 bp, synthetic construct
  source 1..12: mol_type = other DNA
gatggtcagcac

SEQ ID NO: 21602 - DNA, 11 bp, synthetic construct
  source 1..11: mol_type = other DNA
gatggtcagca

SEQ ID NO: 21603 - DNA, 10 bp, synthetic construct
  source 1..10: mol_type = other DNA
gatggtcagc

SEQ ID NO: 21604-21605 - skipped (2 entries)

SEQ ID NO: 21606 - DNA, 17 bp, synthetic construct
  source 1..17: mol_type = other DNA
gatggtcagcacagcct

SEQ ID NO: 21607 - DNA, 16 bp, synthetic construct
  source 1..16: mol_type = other DNA
gatggtcagcacagcc

SEQ ID NO: 21608 - DNA, 15 bp, synthetic construct
  source 1..15: mol_type = other DNA
gatggtcagcacagc

SEQ ID NO: 21609 - DNA, 14 bp, synthetic construct
  source 1..14: mol_type = other DNA
gatggtcagcacag

SEQ ID NO: 21610 - DNA, 13 bp, synthetic construct
  source 1..13: mol_type = other DNA
gatggtcagcaca

SEQ ID NO: 21611 - DNA, 12 bp, synthetic construct
  source 1..12: mol_type = other DNA
gatggtcagcac

SEQ ID NO: 21612 - DNA, 11 bp, synthetic construct
  source 1..11: mol_type = other DNA
gatggtcagca

SEQ ID NO: 21613 - DNA, 10 bp, synthetic construct
  source 1..10: mol_type = other DNA
gatggtcagc

SEQ ID NO: 21614-21615 - skipped (2 entries)

SEQ ID NO: 21616 - DNA, 17 bp, synthetic construct
  source 1..17: mol_type = other DNA
gatggtcagcacagcct

SEQ ID NO: 21617 - DNA, 16 bp, synthetic construct
  source 1..16: mol_type = other DNA
gatggtcagcacagcc

SEQ ID NO: 21618 - DNA, 15 bp, synthetic construct
  source 1..15: mol_type = other DNA
gatggtcagcacagc

SEQ ID NO: 21619 - DNA, 14 bp, synthetic construct
  source 1..14: mol_type = other DNA
gatggtcagcacag

SEQ ID NO: 21620 - DNA, 13 bp, synthetic construct
  source 1..13: mol_type = other DNA
gatggtcagcaca

SEQ ID NO: 21621 - DNA, 12 bp, synthetic construct
  source 1..12: mol_type = other DNA
gatggtcagcac

SEQ ID NO: 21622 - DNA, 11 bp, synthetic construct
  source 1..11: mol_type = other DNA
gatggtcagca

SEQ ID NO: 21623 - DNA, 10 bp, synthetic construct
  source 1..10: mol_type = other DNA
gatggtcagc

SEQ ID NO: 21624-21625 - skipped (2 entries)

SEQ ID NO: 21626 - DNA, 17 bp, synthetic construct
  source 1..17: mol_type = other DNA
atggtcagcacagcctt

SEQ ID NO: 21627 - DNA, 16 bp, synthetic construct
  source 1..16: mol_type = other DNA
atggtcagcacagcct

SEQ ID NO: 21628 - DNA, 15 bp, synthetic construct
  source 1..15: mol_type = other DNA
atggtcagcacagcc

SEQ ID NO: 21629 - DNA, 14 bp, synthetic construct
  source 1..14: mol_type = other DNA
atggtcagcacagc

SEQ ID NO: 21630 - DNA, 13 bp, synthetic construct
  source 1..13: mol_type = other DNA
atggtcagcacag

SEQ ID NO: 21631 - DNA, 12 bp, synthetic construct
  source 1..12: mol_type = other DNA
atggtcagcaca

SEQ ID NO: 21632 - DNA, 11 bp, synthetic construct
  source 1..11: mol_type = other DNA
atggtcagcac

SEQ ID NO: 21633 - DNA, 10 bp, synthetic construct
  source 1..10: mol_type = other DNA
atggtcagca

SEQ ID NO: 21634-21635 - skipped (2 entries)

SEQ ID NO: 21636 - DNA, 17 bp, synthetic construct
  source 1..17: mol_type = other DNA
atggtcagcacagcctt

SEQ ID NO: 21637 - DNA, 16 bp, synthetic construct
  source 1..16: mol_type = other DNA
atggtcagcacagcct

SEQ ID NO: 21638 - DNA, 15 bp, synthetic construct
  source 1..15: mol_type = other DNA
atggtcagcacagcc

SEQ ID NO: 21639 - DNA, 14 bp, synthetic construct
  source 1..14: mol_type = other DNA
atggtcagcacagc

SEQ ID NO: 21640 - DNA, 13 bp, synthetic construct
  source 1..13: mol_type = other DNA
atggtcagcacag

SEQ ID NO: 21641 - DNA, 12 bp, synthetic construct
  source 1..12: mol_type = other DNA
atggtcagcaca

SEQ ID NO: 21642 - DNA, 11 bp, synthetic construct
  source 1..11: mol_type = other DNA
atggtcagcac

SEQ ID NO: 21643 - DNA, 10 bp, synthetic construct
  source 1..10: mol_type = other DNA
atggtcagca

SEQ ID NO: 21644-21645 - skipped (2 entries)

SEQ ID NO: 21646 - DNA, 17 bp, synthetic construct
  source 1..17: mol_type = other DNA
atggtcagcacagcctt

SEQ ID NO: 21647 - DNA, 16 bp, synthetic construct
  source 1..16: mol_type = other DNA
atggtcagcacagcct

SEQ ID NO: 21648 - DNA, 15 bp, synthetic construct
  source 1..15: mol_type = other DNA
atggtcagcacagcc

SEQ ID NO: 21649 - DNA, 14 bp, synthetic construct
  source 1..14: mol_type = other DNA
atggtcagcacagc

SEQ ID NO: 21650 - DNA, 13 bp, synthetic construct
  source 1..13: mol_type = other DNA
atggtcagcacag

SEQ ID NO: 21651 - DNA, 12 bp, synthetic construct
  source 1..12: mol_type = other DNA
atggtcagcaca

SEQ ID NO: 21652 - DNA, 11 bp, synthetic construct
  source 1..11: mol_type = other DNA
atggtcagcac

SEQ ID NO: 21653 - DNA, 10 bp, synthetic construct
  source 1..10: mol_type = other DNA
atggtcagca

SEQ ID NO: 21654-21655 - skipped (2 entries)

SEQ ID NO: 21656 - DNA, 17 bp, synthetic construct
  source 1..17: mol_type = other DNA
atggtcagcacagcctt

SEQ ID NO: 21657 - DNA, 16 bp, synthetic construct
  source 1..16: mol_type = other DNA
atggtcagcacagcct

SEQ ID NO: 21658 - DNA, 15 bp, synthetic construct
  source 1..15: mol_type = other DNA
atggtcagcacagcc

SEQ ID NO: 21659 - DNA, 14 bp, synthetic construct
  source 1..14: mol_type = other DNA
atggtcagcacagc

SEQ ID NO: 21660 - DNA, 13 bp, synthetic construct
  source 1..13: mol_type = other DNA
atggtcagcacag

SEQ ID NO: 21661 - DNA, 12 bp, synthetic construct
  source 1..12: mol_type = other DNA
atggtcagcaca

SEQ ID NO: 21662 - DNA, 11 bp, synthetic construct
  source 1..11: mol_type = other DNA
atggtcagcac

SEQ ID NO: 21663 - DNA, 10 bp, synthetic construct
  source 1..10: mol_type = other DNA
atggtcagca

SEQ ID NO: 21664-21665 - skipped (2 entries)

SEQ ID NO: 21666 - DNA, 17 bp, synthetic construct
  source 1..17: mol_type = other DNA
atggtcagcacagcctt

SEQ ID NO: 21667 - DNA, 16 bp, synthetic construct
  source 1..16: mol_type = other DNA
atggtcagcacagcct

SEQ ID NO: 21668 - DNA, 15 bp, synthetic construct
  source 1..15: mol_type = other DNA
atggtcagcacagcc

SEQ ID NO: 21669 - DNA, 14 bp, synthetic construct
  source 1..14: mol_type = other DNA
atggtcagcacagc

SEQ ID NO: 21670 - DNA, 13 bp, synthetic construct
  source 1..13: mol_type = other DNA
atggtcagcacag

SEQ ID NO: 21671 - DNA, 12 bp, synthetic construct
  source 1..12: mol_type = other DNA
atggtcagcaca

SEQ ID NO: 21672 - DNA, 11 bp, synthetic construct
  source 1..11: mol_type = other DNA
atggtcagcac

SEQ ID NO: 21673 - DNA, 10 bp, synthetic construct
  source 1..10: mol_type = other DNA
atggtcagca

SEQ ID NO: 21674-21675 - skipped (2 entries)

SEQ ID NO: 21676 - DNA, 17 bp, synthetic construct
  source 1..17: mol_type = other DNA
atggtcagcacagcctt

SEQ ID NO: 21677 - DNA, 16 bp, synthetic construct
  source 1..16: mol_type = other DNA
atggtcagcacagcct

SEQ ID NO: 21678 - DNA, 15 bp, synthetic construct
  source 1..15: mol_type = other DNA
atggtcagcacagcc

SEQ ID NO: 21679 - DNA, 14 bp, synthetic construct
  source 1..14: mol_type = other DNA
atggtcagcacagc

SEQ ID NO: 21680 - DNA, 13 bp, synthetic construct
  source 1..13: mol_type = other DNA
atggtcagcacag

SEQ ID NO: 21681 - DNA, 12 bp, synthetic construct
  source 1..12: mol_type = other DNA
atggtcagcaca

SEQ ID NO: 21682 - DNA, 11 bp, synthetic construct
  source 1..11: mol_type = other DNA
atggtcagcac

SEQ ID NO: 21683 - DNA, 10 bp, synthetic construct
  source 1..10: mol_type = other DNA
atggtcagca

SEQ ID NO: 21684-21685 - skipped (2 entries)

SEQ ID NO: 21686 - DNA, 17 bp, synthetic construct
  source 1..17: mol_type = other DNA
atggtcagcacagcctt

SEQ ID NO: 21687 - DNA, 16 bp, synthetic construct
  source 1..16: mol_type = other DNA
atggtcagcacagcct

SEQ ID NO: 21688 - DNA, 15 bp, synthetic construct
  source 1..15: mol_type = other DNA
atggtcagcacagcc

SEQ ID NO: 21689 - DNA, 14 bp, synthetic construct
  source 1..14: mol_type = other DNA
atggtcagcacagc

SEQ ID NO: 21690 - DNA, 13 bp, synthetic construct
  source 1..13: mol_type = other DNA
atggtcagcacag

SEQ ID NO: 21691 - DNA, 12 bp, synthetic construct
  source 1..12: mol_type = other DNA
atggtcagcaca

SEQ ID NO: 21692 - DNA, 11 bp, synthetic construct
  source 1..11: mol_type = other DNA
atggtcagcac

SEQ ID NO: 21693 - DNA, 10 bp, synthetic construct
  source 1..10: mol_type = other DNA
atggtcagca

SEQ ID NO: 21694-21695 - skipped (2 entries)

SEQ ID NO: 21696 - DNA, 17 bp, synthetic construct
  source 1..17: mol_type = other DNA
atggtcagcacagcctt

SEQ ID NO: 21697 - DNA, 16 bp, synthetic construct
  source 1..16: mol_type = other DNA
atggtcagcacagcct

SEQ ID NO: 21698 - DNA, 15 bp, synthetic construct
  source 1..15: mol_type = other DNA
atggtcagcacagcc

SEQ ID NO: 21699 - DNA, 14 bp, synthetic construct
  source 1..14: mol_type = other DNA
atggtcagcacagc

SEQ ID NO: 21700 - DNA, 13 bp, synthetic construct
  source 1..13: mol_type = other DNA
atggtcagcacag

SEQ ID NO: 21701 - DNA, 12 bp, synthetic construct
  source 1..12: mol_type = other DNA
atggtcagcaca

SEQ ID NO: 21702 - DNA, 11 bp, synthetic construct
  source 1..11: mol_type = other DNA
atggtcagcac

SEQ ID NO: 21703 - DNA, 10 bp, synthetic construct
  source 1..10: mol_type = other DNA
atggtcagca

SEQ ID NO: 21704-21705 - skipped (2 entries)

SEQ ID NO: 21706 - DNA, 17 bp, synthetic construct
  source 1..17: mol_type = other DNA
atggtcagcacagcctt

SEQ ID NO: 21707 - DNA, 16 bp, synthetic construct
  source 1..16: mol_type = other DNA
atggtcagcacagcct

SEQ ID NO: 21708 - DNA, 15 bp, synthetic construct
  source 1..15: mol_type = other DNA
atggtcagcacagcc

SEQ ID NO: 21709 - DNA, 14 bp, synthetic construct
  source 1..14: mol_type = other DNA
atggtcagcacagc

SEQ ID NO: 21710 - DNA, 13 bp, synthetic construct
  source 1..13: mol_type = other DNA
atggtcagcacag

SEQ ID NO: 21711 - DNA, 12 bp, synthetic construct
  source 1..12: mol_type = other DNA
atggtcagcaca

SEQ ID NO: 21712 - DNA, 11 bp, synthetic construct
  source 1..11: mol_type = other DNA
atggtcagcac

SEQ ID NO: 21713 - DNA, 10 bp, synthetic construct
  source 1..10: mol_type = other DNA
atggtcagca

SEQ ID NO: 21714-21715 - skipped (2 entries)

SEQ ID NO: 21716 - DNA, 17 bp, synthetic construct
  source 1..17: mol_type = other DNA
ctgctggggccatgttt

SEQ ID NO: 21717 - DNA, 16 bp, synthetic construct
  source 1..16: mol_type = other DNA
ctgctggggccatgtt

SEQ ID NO: 21718 - DNA, 15 bp, synthetic construct
  source 1..15: mol_type = other DNA
ctgctggggccatgt

SEQ ID NO: 21719 - DNA, 14 bp, synthetic construct
  source 1..14: mol_type = other DNA
ctgctggggccatg

SEQ ID NO: 21720 - DNA, 13 bp, synthetic construct
  source 1..13: mol_type = other DNA
ctgctggggccat

SEQ ID NO: 21721 - DNA, 12 bp, synthetic construct
  source 1..12: mol_type = other DNA
ctgctggggcca

SEQ ID NO: 21722 - DNA, 11 bp, synthetic construct
  source 1..11: mol_type = other DNA
ctgctggggcc

SEQ ID NO: 21723 - DNA, 10 bp, synthetic construct
  source 1..10: mol_type = other DNA
ctgctggggc

SEQ ID NO: 21724-21725 - skipped (2 entries)

SEQ ID NO: 21726 - DNA, 17 bp, synthetic construct
  source 1..17: mol_type = other DNA
ctgctggggccatgttt

SEQ ID NO: 21727 - DNA, 16 bp, synthetic construct
  source 1..16: mol_type = other DNA
ctgctggggccatgtt

SEQ ID NO: 21728 - DNA, 15 bp, synthetic construct
  source 1..15: mol_type = other DNA
ctgctggggccatgt

SEQ ID NO: 21729 - DNA, 14 bp, synthetic construct
  source 1..14: mol_type = other DNA
ctgctggggccatg

SEQ ID NO: 21730 - DNA, 13 bp, synthetic construct
  source 1..13: mol_type = other DNA
ctgctggggccat

SEQ ID NO: 21731 - DNA, 12 bp, synthetic construct
  source 1..12: mol_type = other DNA
ctgctggggcca

SEQ ID NO: 21732 - DNA, 11 bp, synthetic construct
  source 1..11: mol_type = other DNA
ctgctggggcc

SEQ ID NO: 21733 - DNA, 10 bp, synthetic construct
  source 1..10: mol_type = other DNA
ctgctggggc

SEQ ID NO: 21734-21735 - skipped (2 entries)

SEQ ID NO: 21736 - DNA, 17 bp, synthetic construct
  source 1..17: mol_type = other DNA
ctgctggggccatgttt

SEQ ID NO: 21737 - DNA, 16 bp, synthetic construct
  source 1..16: mol_type = other DNA
ctgctggggccatgtt

SEQ ID NO: 21738 - DNA, 15 bp, synthetic construct
  source 1..15: mol_type = other DNA
ctgctggggccatgt

SEQ ID NO: 21739 - DNA, 14 bp, synthetic construct
  source 1..14: mol_type = other DNA
ctgctggggccatg

SEQ ID NO: 21740 - DNA, 13 bp, synthetic construct
  source 1..13: mol_type = other DNA
ctgctggggccat

SEQ ID NO: 21741 - DNA, 12 bp, synthetic construct
  source 1..12: mol_type = other DNA
ctgctggggcca

SEQ ID NO: 21742 - DNA, 11 bp, synthetic construct
  source 1..11: mol_type = other DNA
ctgctggggcc

SEQ ID NO: 21743 - DNA, 10 bp, synthetic construct
  source 1..10: mol_type = other DNA
ctgctggggc

SEQ ID NO: 21744-21745 - skipped (2 entries)

SEQ ID NO: 21746 - DNA, 17 bp, synthetic construct
  source 1..17: mol_type = other DNA
ctgctggggccatgttt

SEQ ID NO: 21747 - DNA, 16 bp, synthetic construct
  source 1..16: mol_type = other DNA
ctgctggggccatgtt

SEQ ID NO: 21748 - DNA, 15 bp, synthetic construct
  source 1..15: mol_type = other DNA
ctgctggggccatgt

SEQ ID NO: 21749 - DNA, 14 bp, synthetic construct
  source 1..14: mol_type = other DNA
ctgctggggccatg

SEQ ID NO: 21750 - DNA, 13 bp, synthetic construct
  source 1..13: mol_type = other DNA
ctgctggggccat

SEQ ID NO: 21751 - DNA, 12 bp, synthetic construct
  source 1..12: mol_type = other DNA
ctgctggggcca

SEQ ID NO: 21752 - DNA, 11 bp, synthetic construct
  source 1..11: mol_type = other DNA
ctgctggggcc

SEQ ID NO: 21753 - DNA, 10 bp, synthetic construct
  source 1..10: mol_type = other DNA
ctgctggggc

SEQ ID NO: 21754-21755 - skipped (2 entries)

SEQ ID NO: 21756 - DNA, 17 bp, synthetic construct
  source 1..17: mol_type = other DNA
ctgctggggccatgttt

SEQ ID NO: 21757 - DNA, 16 bp, synthetic construct
  source 1..16: mol_type = other DNA
ctgctggggccatgtt

SEQ ID NO: 21758 - DNA, 15 bp, synthetic construct
  source 1..15: mol_type = other DNA
ctgctggggccatgt

SEQ ID NO: 21759 - DNA, 14 bp, synthetic construct
  source 1..14: mol_type = other DNA
ctgctggggccatg

SEQ ID NO: 21760 - DNA, 13 bp, synthetic construct
  source 1..13: mol_type = other DNA
ctgctggggccat

SEQ ID NO: 21761 - DNA, 12 bp, synthetic construct
  source 1..12: mol_type = other DNA
ctgctggggcca

SEQ ID NO: 21762 - DNA, 11 bp, synthetic construct
  source 1..11: mol_type = other DNA
ctgctggggcc

SEQ ID NO: 21763 - DNA, 10 bp, synthetic construct
  source 1..10: mol_type = other DNA
ctgctggggc

SEQ ID NO: 21764-21765 - skipped (2 entries)

SEQ ID NO: 21766 - DNA, 17 bp, synthetic construct
  source 1..17: mol_type = other DNA
ctgctggggccatgttt

SEQ ID NO: 21767 - DNA, 16 bp, synthetic construct
  source 1..16: mol_type = other DNA
ctgctggggccatgtt

SEQ ID NO: 21768 - DNA, 15 bp, synthetic construct
  source 1..15: mol_type = other DNA
ctgctggggccatgt

SEQ ID NO: 21769 - DNA, 14 bp, synthetic construct
  source 1..14: mol_type = other DNA
ctgctggggccatg

SEQ ID NO: 21770 - DNA, 13 bp, synthetic construct
  source 1..13: mol_type = other DNA
ctgctggggccat

SEQ ID NO: 21771 - DNA, 12 bp, synthetic construct
  source 1..12: mol_type = other DNA
ctgctggggcca

SEQ ID NO: 21772 - DNA, 11 bp, synthetic construct
  source 1..11: mol_type = other DNA
ctgctggggcc

SEQ ID NO: 21773 - DNA, 10 bp, synthetic construct
  source 1..10: mol_type = other DNA
ctgctggggc

SEQ ID NO: 21774-21775 - skipped (2 entries)

SEQ ID NO: 21776 - DNA, 17 bp, synthetic construct
  source 1..17: mol_type = other DNA
ctgctggggccatgttt

SEQ ID NO: 21777 - DNA, 16 bp, synthetic construct
  source 1..16: mol_type = other DNA
ctgctggggccatgtt

SEQ ID NO: 21778 - DNA, 15 bp, synthetic construct
  source 1..15: mol_type = other DNA
ctgctggggccatgt

SEQ ID NO: 21779 - DNA, 14 bp, synthetic construct
  source 1..14: mol_type = other DNA
ctgctggggccatg

SEQ ID NO: 21780 - DNA, 13 bp, synthetic construct
  source 1..13: mol_type = other DNA
ctgctggggccat

SEQ ID NO: 21781 - DNA, 12 bp, synthetic construct
  source 1..12: mol_type = other DNA
ctgctggggcca

SEQ ID NO: 21782 - DNA, 11 bp, synthetic construct
  source 1..11: mol_type = other DNA
ctgctggggcc

SEQ ID NO: 21783 - DNA, 10 bp, synthetic construct
  source 1..10: mol_type = other DNA
ctgctggggc

SEQ ID NO: 21784-21785 - skipped (2 entries)

SEQ ID NO: 21786 - DNA, 17 bp, synthetic construct
  source 1..17: mol_type = other DNA
ctgctggggccatgttt

SEQ ID NO: 21787 - DNA, 16 bp, synthetic construct
  source 1..16: mol_type = other DNA
ctgctggggccatgtt

SEQ ID NO: 21788 - DNA, 15 bp, synthetic construct
  source 1..15: mol_type = other DNA
ctgctggggccatgt

SEQ ID NO: 21789 - DNA, 14 bp, synthetic construct
  source 1..14: mol_type = other DNA
ctgctggggccatg

SEQ ID NO: 21790 - DNA, 13 bp, synthetic construct
  source 1..13: mol_type = other DNA
ctgctggggccat

SEQ ID NO: 21791 - DNA, 12 bp, synthetic construct
  source 1..12: mol_type = other DNA
ctgctggggcca

SEQ ID NO: 21792 - DNA, 11 bp, synthetic construct
  source 1..11: mol_type = other DNA
ctgctggggcc

SEQ ID NO: 21793 - DNA, 10 bp, synthetic construct
  source 1..10: mol_type = other DNA
ctgctggggc

SEQ ID NO: 21794-21795 - skipped (2 entries)

SEQ ID NO: 21796 - DNA, 17 bp, synthetic construct
  source 1..17: mol_type = other DNA
ctgctggggccatgttt

SEQ ID NO: 21797 - DNA, 16 bp, synthetic construct
  source 1..16: mol_type = other DNA
ctgctggggccatgtt

SEQ ID NO: 21798 - DNA, 15 bp, synthetic construct
  source 1..15: mol_type = other DNA
ctgctggggccatgt

SEQ ID NO: 21799 - DNA, 14 bp, synthetic construct
  source 1..14: mol_type = other DNA
ctgctggggccatg

SEQ ID NO: 21800 - DNA, 13 bp, synthetic construct
  source 1..13: mol_type = other DNA
ctgctggggccat

SEQ ID NO: 21801 - DNA, 12 bp, synthetic construct
  source 1..12: mol_type = other DNA
ctgctggggcca

SEQ ID NO: 21802 - DNA, 11 bp, synthetic construct
  source 1..11: mol_type = other DNA
ctgctggggcc

SEQ ID NO: 21803 - DNA, 10 bp, synthetic construct
  source 1..10: mol_type = other DNA
ctgctggggc

SEQ ID NO: 21804-21805 - skipped (2 entries)

SEQ ID NO: 21806 - DNA, 17 bp, synthetic construct
  source 1..17: mol_type = other DNA
agccttatgcacggcct

SEQ ID NO: 21807 - DNA, 16 bp, synthetic construct
  source 1..16: mol_type = other DNA
agccttatgcacggcc

SEQ ID NO: 21808 - DNA, 15 bp, synthetic construct
  source 1..15: mol_type = other DNA
agccttatgcacggc

SEQ ID NO: 21809 - DNA, 14 bp, synthetic construct
  source 1..14: mol_type = other DNA
agccttatgcacgg

SEQ ID NO: 21810 - DNA, 13 bp, synthetic construct
  source 1..13: mol_type = other DNA
agccttatgcacg

SEQ ID NO: 21811 - DNA, 12 bp, synthetic construct
  source 1..12: mol_type = other DNA
agccttatgcac

SEQ ID NO: 21812 - DNA, 11 bp, synthetic construct
  source 1..11: mol_type = other DNA
agccttatgca

SEQ ID NO: 21813 - DNA, 10 bp, synthetic construct
  source 1..10: mol_type = other DNA
agccttatgc

SEQ ID NO: 21814-21815 - skipped (2 entries)

SEQ ID NO: 21816 - DNA, 17 bp, synthetic construct
  source 1..17: mol_type = other DNA
agccttatgcacggcct

SEQ ID NO: 21817 - DNA, 16 bp, synthetic construct
  source 1..16: mol_type = other DNA
agccttatgcacggcc

SEQ ID NO: 21818 - DNA, 15 bp, synthetic construct
  source 1..15: mol_type = other DNA
agccttatgcacggc

SEQ ID NO: 21819 - DNA, 14 bp, synthetic construct
  source 1..14: mol_type = other DNA
agccttatgcacgg

SEQ ID NO: 21820 - DNA, 13 bp, synthetic construct
  source 1..13: mol_type = other DNA
agccttatgcacg

SEQ ID NO: 21821 - DNA, 12 bp, synthetic construct
  source 1..12: mol_type = other DNA
agccttatgcac

SEQ ID NO: 21822 - DNA, 11 bp, synthetic construct
  source 1..11: mol_type = other DNA
agccttatgca

SEQ ID NO: 21823 - DNA, 10 bp, synthetic construct
  source 1..10: mol_type = other DNA
agccttatgc

SEQ ID NO: 21824-21825 - skipped (2 entries)

SEQ ID NO: 21826 - DNA, 17 bp, synthetic construct
  source 1..17: mol_type = other DNA
agccttatgcacggcct

SEQ ID NO: 21827 - DNA, 16 bp, synthetic construct
  source 1..16: mol_type = other DNA
agccttatgcacggcc

SEQ ID NO: 21828 - DNA, 15 bp, synthetic construct
  source 1..15: mol_type = other DNA
agccttatgcacggc

SEQ ID NO: 21829 - DNA, 14 bp, synthetic construct
  source 1..14: mol_type = other DNA
agccttatgcacgg

SEQ ID NO: 21830 - DNA, 13 bp, synthetic construct
  source 1..13: mol_type = other DNA
agccttatgcacg

SEQ ID NO: 21831 - DNA, 12 bp, synthetic construct
  source 1..12: mol_type = other DNA
agccttatgcac

SEQ ID NO: 21832 - DNA, 11 bp, synthetic construct
  source 1..11: mol_type = other DNA
agccttatgca

SEQ ID NO: 21833 - DNA, 10 bp, synthetic construct
  source 1..10: mol_type = other DNA
agccttatgc

SEQ ID NO: 21834-21835 - skipped (2 entries)

SEQ ID NO: 21836 - DNA, 17 bp, synthetic construct
  source 1..17: mol_type = other DNA
agccttatgcacggcct

SEQ ID NO: 21837 - DNA, 16 bp, synthetic construct
  source 1..16: mol_type = other DNA
agccttatgcacggcc

SEQ ID NO: 21838 - DNA, 15 bp, synthetic construct
  source 1..15: mol_type = other DNA
agccttatgcacggc

SEQ ID NO: 21839 - DNA, 14 bp, synthetic construct
  source 1..14: mol_type = other DNA
agccttatgcacgg

SEQ ID NO: 21840 - DNA, 13 bp, synthetic construct
  source 1..13: mol_type = other DNA
agccttatgcacg

SEQ ID NO: 21841 - DNA, 12 bp, synthetic construct
  source 1..12: mol_type = other DNA
agccttatgcac

SEQ ID NO: 21842 - DNA, 11 bp, synthetic construct
  source 1..11: mol_type = other DNA
agccttatgca

SEQ ID NO: 21843 - DNA, 10 bp, synthetic construct
  source 1..10: mol_type = other DNA
agccttatgc

SEQ ID NO: 21844-21845 - skipped (2 entries)

SEQ ID NO: 21846 - DNA, 17 bp, synthetic construct
  source 1..17: mol_type = other DNA
agccttatgcacggcct

SEQ ID NO: 21847 - DNA, 16 bp, synthetic construct
  source 1..16: mol_type = other DNA
agccttatgcacggcc

SEQ ID NO: 21848 - DNA, 15 bp, synthetic construct
  source 1..15: mol_type = other DNA
agccttatgcacggc

SEQ ID NO: 21849 - DNA, 14 bp, synthetic construct
  source 1..14: mol_type = other DNA
agccttatgcacgg

SEQ ID NO: 21850 - DNA, 13 bp, synthetic construct
  source 1..13: mol_type = other DNA
agccttatgcacg

SEQ ID NO: 21851 - DNA, 12 bp, synthetic construct
  source 1..12: mol_type = other DNA
agccttatgcac

SEQ ID NO: 21852 - DNA, 11 bp, synthetic construct
  source 1..11: mol_type = other DNA
agccttatgca

SEQ ID NO: 21853 - DNA, 10 bp, synthetic construct
  source 1..10: mol_type = other DNA
agccttatgc

SEQ ID NO: 21854-21855 - skipped (2 entries)

SEQ ID NO: 21856 - DNA, 17 bp, synthetic construct
  source 1..17: mol_type = other DNA
agccttatgcacggcct

SEQ ID NO: 21857 - DNA, 16 bp, synthetic construct
  source 1..16: mol_type = other DNA
agccttatgcacggcc

SEQ ID NO: 21858 - DNA, 15 bp, synthetic construct
  source 1..15: mol_type = other DNA
agccttatgcacggc

SEQ ID NO: 21859 - DNA, 14 bp, synthetic construct
  source 1..14: mol_type = other DNA
agccttatgcacgg

SEQ ID NO: 21860 - DNA, 13 bp, synthetic construct
  source 1..13: mol_type = other DNA
agccttatgcacg

SEQ ID NO: 21861 - DNA, 12 bp, synthetic construct
  source 1..12: mol_type = other DNA
agccttatgcac

SEQ ID NO: 21862 - DNA, 11 bp, synthetic construct
  source 1..11: mol_type = other DNA
agccttatgca

SEQ ID NO: 21863 - DNA, 10 bp, synthetic construct
  source 1..10: mol_type = other DNA
agccttatgc

SEQ ID NO: 21864-21865 - skipped (2 entries)

SEQ ID NO: 21866 - DNA, 17 bp, synthetic construct
  source 1..17: mol_type = other DNA
agccttatgcacggcct

SEQ ID NO: 21867 - DNA, 16 bp, synthetic construct
  source 1..16: mol_type = other DNA
agccttatgcacggcc

SEQ ID NO: 21868 - DNA, 15 bp, synthetic construct
  source 1..15: mol_type = other DNA
agccttatgcacggc

SEQ ID NO: 21869 - DNA, 14 bp, synthetic construct
  source 1..14: mol_type = other DNA
agccttatgcacgg

SEQ ID NO: 21870 - DNA, 13 bp, synthetic construct
  source 1..13: mol_type = other DNA
agccttatgcacg

SEQ ID NO: 21871 - DNA, 12 bp, synthetic construct
  source 1..12: mol_type = other DNA
agccttatgcac

SEQ ID NO: 21872 - DNA, 11 bp, synthetic construct
  source 1..11: mol_type = other DNA
agccttatgca

SEQ ID NO: 21873 - DNA, 10 bp, synthetic construct
  source 1..10: mol_type = other DNA
agccttatgc

SEQ ID NO: 21874-21875 - skipped (2 entries)

SEQ ID NO: 21876 - DNA, 17 bp, synthetic construct
  source 1..17: mol_type = other DNA
agccttatgcacggcct

SEQ ID NO: 21877 - DNA, 16 bp, synthetic construct
  source 1..16: mol_type = other DNA
agccttatgcacggcc

SEQ ID NO: 21878 - DNA, 15 bp, synthetic construct
  source 1..15: mol_type = other DNA
agccttatgcacggc

SEQ ID NO: 21879 - DNA, 14 bp, synthetic construct
  source 1..14: mol_type = other DNA
agccttatgcacgg

SEQ ID NO: 21880 - DNA, 13 bp, synthetic construct
  source 1..13: mol_type = other DNA
agccttatgcacg

SEQ ID NO: 21881 - DNA, 12 bp, synthetic construct
  source 1..12: mol_type = other DNA
agccttatgcac

SEQ ID NO: 21882 - DNA, 11 bp, synthetic construct
  source 1..11: mol_type = other DNA
agccttatgca

SEQ ID NO: 21883 - DNA, 10 bp, synthetic construct
  source 1..10: mol_type = other DNA
agccttatgc

SEQ ID NO: 21884-21885 - skipped (2 entries)

SEQ ID NO: 21886 - DNA, 17 bp, synthetic construct
  source 1..17: mol_type = other DNA
agccttatgcacggcct

SEQ ID NO: 21887 - DNA, 16 bp, synthetic construct
  source 1..16: mol_type = other DNA
agccttatgcacggcc

SEQ ID NO: 21888 - DNA, 15 bp, synthetic construct
  source 1..15: mol_type = other DNA
agccttatgcacggc

SEQ ID NO: 21889 - DNA, 14 bp, synthetic construct
  source 1..14: mol_type = other DNA
agccttatgcacgg

SEQ ID NO: 21890 - DNA, 13 bp, synthetic construct
  source 1..13: mol_type = other DNA
agccttatgcacg

SEQ ID NO: 21891 - DNA, 12 bp, synthetic construct
  source 1..12: mol_type = other DNA
agccttatgcac

SEQ ID NO: 21892 - DNA, 11 bp, synthetic construct
  source 1..11: mol_type = other DNA
agccttatgca

SEQ ID NO: 21893 - DNA, 10 bp, synthetic construct
  source 1..10: mol_type = other DNA
agccttatgc

SEQ ID NO: 21894-21895 - skipped (2 entries)

SEQ ID NO: 21896 - DNA, 17 bp, synthetic construct
  source 1..17: mol_type = other DNA
agccttatgcacggcct

SEQ ID NO: 21897 - DNA, 16 bp, synthetic construct
  source 1..16: mol_type = other DNA
agccttatgcacggcc

SEQ ID NO: 21898 - DNA, 15 bp, synthetic construct
  source 1..15: mol_type = other DNA
agccttatgcacggc

SEQ ID NO: 21899 - DNA, 14 bp, synthetic construct
  source 1..14: mol_type = other DNA
agccttatgcacgg

SEQ ID NO: 21900 - DNA, 13 bp, synthetic construct
  source 1..13: mol_type = other DNA
agccttatgcacg

SEQ ID NO: 21901 - DNA, 12 bp, synthetic construct
  source 1..12: mol_type = other DNA
agccttatgcac

SEQ ID NO: 21902 - DNA, 11 bp, synthetic construct
  source 1..11: mol_type = other DNA
agccttatgca

SEQ ID NO: 21903 - DNA, 10 bp, synthetic construct
  source 1..10: mol_type = other DNA
agccttatgc

SEQ ID NO: 21904-21905 - skipped (2 entries)

SEQ ID NO: 21906 - DNA, 17 bp, synthetic construct
  source 1..17: mol_type = other DNA
agccttatgcacggcct

SEQ ID NO: 21907 - DNA, 16 bp, synthetic construct
  source 1..16: mol_type = other DNA
agccttatgcacggcc

SEQ ID NO: 21908 - DNA, 15 bp, synthetic construct
  source 1..15: mol_type = other DNA
agccttatgcacggc

SEQ ID NO: 21909 - DNA, 14 bp, synthetic construct
  source 1..14: mol_type = other DNA
agccttatgcacgg

SEQ ID NO: 21910 - DNA, 13 bp, synthetic construct
  source 1..13: mol_type = other DNA
agccttatgcacg

SEQ ID NO: 21911 - DNA, 12 bp, synthetic construct
  source 1..12: mol_type = other DNA
agccttatgcac

SEQ ID NO: 21912 - DNA, 11 bp, synthetic construct
  source 1..11: mol_type = other DNA
agccttatgca

SEQ ID NO: 21913 - DNA, 10 bp, synthetic construct
  source 1..10: mol_type = other DNA
agccttatgc

SEQ ID NO: 21914-21915 - skipped (2 entries)

SEQ ID NO: 21916 - DNA, 17 bp, synthetic construct
  source 1..17: mol_type = other DNA
agccttatgcacggcct

SEQ ID NO: 21917 - DNA, 16 bp, synthetic construct
  source 1..16: mol_type = other DNA
agccttatgcacggcc

SEQ ID NO: 21918 - DNA, 15 bp, synthetic construct
  source 1..15: mol_type = other DNA
agccttatgcacggc

SEQ ID NO: 21919 - DNA, 14 bp, synthetic construct
  source 1..14: mol_type = other DNA
agccttatgcacgg

SEQ ID NO: 21920 - DNA, 13 bp, synthetic construct
  source 1..13: mol_type = other DNA
agccttatgcacg

SEQ ID NO: 21921 - DNA, 12 bp, synthetic construct
  source 1..12: mol_type = other DNA
agccttatgcac

SEQ ID NO: 21922 - DNA, 11 bp, synthetic construct
  source 1..11: mol_type = other DNA
agccttatgca

SEQ ID NO: 21923 - DNA, 10 bp, synthetic construct
  source 1..10: mol_type = other DNA
agccttatgc

SEQ ID NO: 21924-21925 - skipped (2 entries)

SEQ ID NO: 21926 - DNA, 17 bp, synthetic construct
  source 1..17: mol_type = other DNA
agccttatgcacggcct

SEQ ID NO: 21927 - DNA, 16 bp, synthetic construct
  source 1..16: mol_type = other DNA
agccttatgcacggcc

SEQ ID NO: 21928 - DNA, 15 bp, synthetic construct
  source 1..15: mol_type = other DNA
agccttatgcacggc

SEQ ID NO: 21929 - DNA, 14 bp, synthetic construct
  source 1..14: mol_type = other DNA
agccttatgcacgg

SEQ ID NO: 21930 - DNA, 13 bp, synthetic construct
  source 1..13: mol_type = other DNA
agccttatgcacg

SEQ ID NO: 21931 - DNA, 12 bp, synthetic construct
  source 1..12: mol_type = other DNA
agccttatgcac

SEQ ID NO: 21932 - DNA, 11 bp, synthetic construct
  source 1..11: mol_type = other DNA
agccttatgca

SEQ ID NO: 21933 - DNA, 10 bp, synthetic construct
  source 1..10: mol_type = other DNA
agccttatgc

SEQ ID NO: 21934-21935 - skipped (2 entries)

SEQ ID NO: 21936 - DNA, 17 bp, synthetic construct
  source 1..17: mol_type = other DNA
agccttatgcacggcct

SEQ ID NO: 21937 - DNA, 16 bp, synthetic construct
  source 1..16: mol_type = other DNA
agccttatgcacggcc

SEQ ID NO: 21938 - DNA, 15 bp, synthetic construct
  source 1..15: mol_type = other DNA
agccttatgcacggc

SEQ ID NO: 21939 - DNA, 14 bp, synthetic construct
  source 1..14: mol_type = other DNA
agccttatgcacgg

SEQ ID NO: 21940 - DNA, 13 bp, synthetic construct
  source 1..13: mol_type = other DNA
agccttatgcacg

SEQ ID NO: 21941 - DNA, 12 bp, synthetic construct
  source 1..12: mol_type = other DNA
agccttatgcac

SEQ ID NO: 21942 - DNA, 11 bp, synthetic construct
  source 1..11: mol_type = other DNA
agccttatgca

SEQ ID NO: 21943 - DNA, 10 bp, synthetic construct
  source 1..10: mol_type = other DNA
agccttatgc

SEQ ID NO: 21944-21945 - skipped (2 entries)

SEQ ID NO: 21946 - DNA, 17 bp, synthetic construct
  source 1..17: mol_type = other DNA
agccttatgcacggcct

SEQ ID NO: 21947 - DNA, 16 bp, synthetic construct
  source 1..16: mol_type = other DNA
agccttatgcacggcc

SEQ ID NO: 21948 - DNA, 15 bp, synthetic construct
  source 1..15: mol_type = other DNA
agccttatgcacggc

SEQ ID NO: 21949 - DNA, 14 bp, synthetic construct
  source 1..14: mol_type = other DNA
agccttatgcacgg

SEQ ID NO: 21950 - DNA, 13 bp, synthetic construct
  source 1..13: mol_type = other DNA
agccttatgcacg

SEQ ID NO: 21951 - DNA, 12 bp, synthetic construct
  source 1..12: mol_type = other DNA
agccttatgcac

SEQ ID NO: 21952 - DNA, 11 bp, synthetic construct
  source 1..11: mol_type = other DNA
agccttatgca

SEQ ID NO: 21953 - DNA, 10 bp, synthetic construct
  source 1..10: mol_type = other DNA
agccttatgc

SEQ ID NO: 21954-21955 - skipped (2 entries)

SEQ ID NO: 21956 - DNA, 17 bp, synthetic construct
  source 1..17: mol_type = other DNA
agccttatgcacggcct

SEQ ID NO: 21957 - DNA, 16 bp, synthetic construct
  source 1..16: mol_type = other DNA
agccttatgcacggcc

SEQ ID NO: 21958 - DNA, 15 bp, synthetic construct
  source 1..15: mol_type = other DNA
agccttatgcacggc

SEQ ID NO: 21959 - DNA, 14 bp, synthetic construct
  source 1..14: mol_type = other DNA
agccttatgcacgg

SEQ ID NO: 21960 - DNA, 13 bp, synthetic construct
  source 1..13: mol_type = other DNA
agccttatgcacg

SEQ ID NO: 21961 - DNA, 12 bp, synthetic construct
  source 1..12: mol_type = other DNA
agccttatgcac

SEQ ID NO: 21962 - DNA, 11 bp, synthetic construct
  source 1..11: mol_type = other DNA
agccttatgca

SEQ ID NO: 21963 - DNA, 10 bp, synthetic construct
  source 1..10: mol_type = other DNA
agccttatgc

SEQ ID NO: 21964-21965 - skipped (2 entries)

SEQ ID NO: 21966 - DNA, 17 bp, synthetic construct
  source 1..17: mol_type = other DNA
agccttatgcacggcct

SEQ ID NO: 21967 - DNA, 16 bp, synthetic construct
  source 1..16: mol_type = other DNA
agccttatgcacggcc

SEQ ID NO: 21968 - DNA, 15 bp, synthetic construct
  source 1..15: mol_type = other DNA
agccttatgcacggc

SEQ ID NO: 21969 - DNA, 14 bp, synthetic construct
  source 1..14: mol_type = other DNA
agccttatgcacgg

SEQ ID NO: 21970 - DNA, 13 bp, synthetic construct
  source 1..13: mol_type = other DNA
agccttatgcacg

SEQ ID NO: 21971 - DNA, 12 bp, synthetic construct
  source 1..12: mol_type = other DNA
agccttatgcac

SEQ ID NO: 21972 - DNA, 11 bp, synthetic construct
  source 1..11: mol_type = other DNA
agccttatgca

SEQ ID NO: 21973 - DNA, 10 bp, synthetic construct
  source 1..10: mol_type = other DNA
agccttatgc

SEQ ID NO: 21974-21975 - skipped (2 entries)

SEQ ID NO: 21976 - DNA, 17 bp, synthetic construct
  source 1..17: mol_type = other DNA
agccttatgcacggcct

SEQ ID NO: 21977 - DNA, 16 bp, synthetic construct
  source 1..16: mol_type = other DNA
agccttatgcacggcc

SEQ ID NO: 21978 - DNA, 15 bp, synthetic construct
  source 1..15: mol_type = other DNA
agccttatgcacggc

SEQ ID NO: 21979 - DNA, 14 bp, synthetic construct
  source 1..14: mol_type = other DNA
agccttatgcacgg

SEQ ID NO: 21980 - DNA, 13 bp, synthetic construct
  source 1..13: mol_type = other DNA
agccttatgcacg

SEQ ID NO: 21981 - DNA, 12 bp, synthetic construct
  source 1..12: mol_type = other DNA
agccttatgcac

SEQ ID NO: 21982 - DNA, 11 bp, synthetic construct
  source 1..11: mol_type = other DNA
agccttatgca

SEQ ID NO: 21983 - DNA, 10 bp, synthetic construct
  source 1..10: mol_type = other DNA
agccttatgc

SEQ ID NO: 21984-21985 - skipped (2 entries)

SEQ ID NO: 21986 - DNA, 17 bp, synthetic construct
  source 1..17: mol_type = other DNA
ccttatgcacggcctgg

SEQ ID NO: 21987 - DNA, 16 bp, synthetic construct
  source 1..16: mol_type = other DNA
ccttatgcacggcctg

SEQ ID NO: 21988 - DNA, 15 bp, synthetic construct
  source 1..15: mol_type = other DNA
ccttatgcacggcct

SEQ ID NO: 21989 - DNA, 14 bp, synthetic construct
  source 1..14: mol_type = other DNA
ccttatgcacggcc

SEQ ID NO: 21990 - DNA, 13 bp, synthetic construct
  source 1..13: mol_type = other DNA
ccttatgcacggc

SEQ ID NO: 21991 - DNA, 12 bp, synthetic construct
  source 1..12: mol_type = other DNA
ccttatgcacgg

SEQ ID NO: 21992 - DNA, 11 bp, synthetic construct
  source 1..11: mol_type = other DNA
ccttatgcacg

SEQ ID NO: 21993 - DNA, 10 bp, synthetic construct
  source 1..10: mol_type = other DNA
ccttatgcac

SEQ ID NO: 21994-21995 - skipped (2 entries)

SEQ ID NO: 21996 - DNA, 17 bp, synthetic construct
  source 1..17: mol_type = other DNA
ccttatgcacggcctgg

SEQ ID NO: 21997 - DNA, 16 bp, synthetic construct
  source 1..16: mol_type = other DNA
ccttatgcacggcctg

SEQ ID NO: 21998 - DNA, 15 bp, synthetic construct
  source 1..15: mol_type = other DNA
ccttatgcacggcct

SEQ ID NO: 21999 - DNA, 14 bp, synthetic construct
  source 1..14: mol_type = other DNA
ccttatgcacggcc

SEQ ID NO: 22000 - DNA, 13 bp, synthetic construct
  source 1..13: mol_type = other DNA
ccttatgcacggc

SEQ ID NO: 22001 - DNA, 12 bp, synthetic construct
  source 1..12: mol_type = other DNA
ccttatgcacgg

SEQ ID NO: 22002 - DNA, 11 bp, synthetic construct
  source 1..11: mol_type = other DNA
ccttatgcacg

SEQ ID NO: 22003 - DNA, 10 bp, synthetic construct
  source 1..10: mol_type = other DNA
ccttatgcac

SEQ ID NO: 22004-22005 - skipped (2 entries)

SEQ ID NO: 22006 - DNA, 17 bp, synthetic construct
  source 1..17: mol_type = other DNA
ccttatgcacggcctgg

SEQ ID NO: 22007 - DNA, 16 bp, synthetic construct
  source 1..16: mol_type = other DNA
ccttatgcacggcctg

SEQ ID NO: 22008 - DNA, 15 bp, synthetic construct
  source 1..15: mol_type = other DNA
ccttatgcacggcct

SEQ ID NO: 22009 - DNA, 14 bp, synthetic construct
  source 1..14: mol_type = other DNA
ccttatgcacggcc

SEQ ID NO: 22010 - DNA, 13 bp, synthetic construct
  source 1..13: mol_type = other DNA
ccttatgcacggc

SEQ ID NO: 22011 - DNA, 12 bp, synthetic construct
  source 1..12: mol_type = other DNA
ccttatgcacgg

SEQ ID NO: 22012 - DNA, 11 bp, synthetic construct
  source 1..11: mol_type = other DNA
ccttatgcacg

SEQ ID NO: 22013 - DNA, 10 bp, synthetic construct
  source 1..10: mol_type = other DNA
ccttatgcac

SEQ ID NO: 22014-22015 - skipped (2 entries)

SEQ ID NO: 22016 - DNA, 17 bp, synthetic construct
  source 1..17: mol_type = other DNA
ccttatgcacggcctgg

SEQ ID NO: 22017 - DNA, 16 bp, synthetic construct
  source 1..16: mol_type = other DNA
ccttatgcacggcctg

SEQ ID NO: 22018 - DNA, 15 bp, synthetic construct
  source 1..15: mol_type = other DNA
ccttatgcacggcct

SEQ ID NO: 22019 - DNA, 14 bp, synthetic construct
  source 1..14: mol_type = other DNA
ccttatgcacggcc

SEQ ID NO: 22020 - DNA, 13 bp, synthetic construct
  source 1..13: mol_type = other DNA
ccttatgcacggc

SEQ ID NO: 22021 - DNA, 12 bp, synthetic construct
  source 1..12: mol_type = other DNA
ccttatgcacgg

SEQ ID NO: 22022 - DNA, 11 bp, synthetic construct
  source 1..11: mol_type = other DNA
ccttatgcacg

SEQ ID NO: 22023 - DNA, 10 bp, synthetic construct
  source 1..10: mol_type = other DNA
ccttatgcac

SEQ ID NO: 22024-22025 - skipped (2 entries)

SEQ ID NO: 22026 - DNA, 17 bp, synthetic construct
  source 1..17: mol_type = other DNA
ccttatgcacggcctgg

SEQ ID NO: 22027 - DNA, 16 bp, synthetic construct
  source 1..16: mol_type = other DNA
ccttatgcacggcctg

SEQ ID NO: 22028 - DNA, 15 bp, synthetic construct
  source 1..15: mol_type = other DNA
ccttatgcacggcct

SEQ ID NO: 22029 - DNA, 14 bp, synthetic construct
  source 1..14: mol_type = other DNA
ccttatgcacggcc

SEQ ID NO: 22030 - DNA, 13 bp, synthetic construct
  source 1..13: mol_type = other DNA
ccttatgcacggc

SEQ ID NO: 22031 - DNA, 12 bp, synthetic construct
  source 1..12: mol_type = other DNA
ccttatgcacgg

SEQ ID NO: 22032 - DNA, 11 bp, synthetic construct
  source 1..11: mol_type = other DNA
ccttatgcacg

SEQ ID NO: 22033 - DNA, 10 bp, synthetic construct
  source 1..10: mol_type = other DNA
ccttatgcac

SEQ ID NO: 22034-22035 - skipped (2 entries)

SEQ ID NO: 22036 - DNA, 17 bp, synthetic construct
  source 1..17: mol_type = other DNA
ccttatgcacggcctgg

SEQ ID NO: 22037 - DNA, 16 bp, synthetic construct
  source 1..16: mol_type = other DNA
ccttatgcacggcctg

SEQ ID NO: 22038 - DNA, 15 bp, synthetic construct
  source 1..15: mol_type = other DNA
ccttatgcacggcct

SEQ ID NO: 22039 - DNA, 14 bp, synthetic construct
  source 1..14: mol_type = other DNA
ccttatgcacggcc

SEQ ID NO: 22040 - DNA, 13 bp, synthetic construct
  source 1..13: mol_type = other DNA
ccttatgcacggc

SEQ ID NO: 22041 - DNA, 12 bp, synthetic construct
  source 1..12: mol_type = other DNA
ccttatgcacgg

SEQ ID NO: 22042 - DNA, 11 bp, synthetic construct
  source 1..11: mol_type = other DNA
ccttatgcacg

SEQ ID NO: 22043 - DNA, 10 bp, synthetic construct
  source 1..10: mol_type = other DNA
ccttatgcac

SEQ ID NO: 22044-22045 - skipped (2 entries)

SEQ ID NO: 22046 - DNA, 17 bp, synthetic construct
  source 1..17: mol_type = other DNA
ccttatgcacggcctgg

SEQ ID NO: 22047 - DNA, 16 bp, synthetic construct
  source 1..16: mol_type = other DNA
ccttatgcacggcctg

SEQ ID NO: 22048 - DNA, 15 bp, synthetic construct
  source 1..15: mol_type = other DNA
ccttatgcacggcct

SEQ ID NO: 22049 - DNA, 14 bp, synthetic construct
  source 1..14: mol_type = other DNA
ccttatgcacggcc

SEQ ID NO: 22050 - DNA, 13 bp, synthetic construct
  source 1..13: mol_type = other DNA
ccttatgcacggc

SEQ ID NO: 22051 - DNA, 12 bp, synthetic construct
  source 1..12: mol_type = other DNA
ccttatgcacgg

SEQ ID NO: 22052 - DNA, 11 bp, synthetic construct
  source 1..11: mol_type = other DNA
ccttatgcacg

SEQ ID NO: 22053 - DNA, 10 bp, synthetic construct
  source 1..10: mol_type = other DNA
ccttatgcac

SEQ ID NO: 22054-22055 - skipped (2 entries)

SEQ ID NO: 22056 - DNA, 17 bp, synthetic construct
  source 1..17: mol_type = other DNA
ccttatgcacggcctgg

SEQ ID NO: 22057 - DNA, 16 bp, synthetic construct
  source 1..16: mol_type = other DNA
ccttatgcacggcctg

SEQ ID NO: 22058 - DNA, 15 bp, synthetic construct
  source 1..15: mol_type = other DNA
ccttatgcacggcct

SEQ ID NO: 22059 - DNA, 14 bp, synthetic construct
  source 1..14: mol_type = other DNA
ccttatgcacggcc

SEQ ID NO: 22060 - DNA, 13 bp, synthetic construct
  source 1..13: mol_type = other DNA
ccttatgcacggc

SEQ ID NO: 22061 - DNA, 12 bp, synthetic construct
  source 1..12: mol_type = other DNA
ccttatgcacgg

SEQ ID NO: 22062 - DNA, 11 bp, synthetic construct
  source 1..11: mol_type = other DNA
ccttatgcacg

SEQ ID NO: 22063 - DNA, 10 bp, synthetic construct
  source 1..10: mol_type = other DNA
ccttatgcac

SEQ ID NO: 22064-22065 - skipped (2 entries)

SEQ ID NO: 22066 - DNA, 17 bp, synthetic construct
  source 1..17: mol_type = other DNA
ccttatgcacggcctgg

SEQ ID NO: 22067 - DNA, 16 bp, synthetic construct
  source 1..16: mol_type = other DNA
ccttatgcacggcctg

SEQ ID NO: 22068 - DNA, 15 bp, synthetic construct
  source 1..15: mol_type = other DNA
ccttatgcacggcct

SEQ ID NO: 22069 - DNA, 14 bp, synthetic construct
  source 1..14: mol_type = other DNA
ccttatgcacggcc

SEQ ID NO: 22070 - DNA, 13 bp, synthetic construct
  source 1..13: mol_type = other DNA
ccttatgcacggc

SEQ ID NO: 22071 - DNA, 12 bp, synthetic construct
  source 1..12: mol_type = other DNA
ccttatgcacgg

SEQ ID NO: 22072 - DNA, 11 bp, synthetic construct
  source 1..11: mol_type = other DNA
ccttatgcacg

SEQ ID NO: 22073 - DNA, 10 bp, synthetic construct
  source 1..10: mol_type = other DNA
ccttatgcac

SEQ ID NO: 22074-22075 - skipped (2 entries)

SEQ ID NO: 22076 - DNA, 17 bp, synthetic construct
  source 1..17: mol_type = other DNA
cttatgcacggcctgga

SEQ ID NO: 22077 - DNA, 16 bp, synthetic construct
  source 1..16: mol_type = other DNA
cttatgcacggcctgg

SEQ ID NO: 22078 - DNA, 15 bp, synthetic construct
  source 1..15: mol_type = other DNA
cttatgcacggcctg

SEQ ID NO: 22079 - DNA, 14 bp, synthetic construct
  source 1..14: mol_type = other DNA
cttatgcacggcct

SEQ ID NO: 22080 - DNA, 13 bp, synthetic construct
  source 1..13: mol_type = other DNA
cttatgcacggcc

SEQ ID NO: 22081 - DNA, 12 bp, synthetic construct
  source 1..12: mol_type = other DNA
cttatgcacggc

SEQ ID NO: 22082 - DNA, 11 bp, synthetic construct
  source 1..11: mol_type = other DNA
cttatgcacgg

SEQ ID NO: 22083 - DNA, 10 bp, synthetic construct
  source 1..10: mol_type = other DNA
cttatgcacg

SEQ ID NO: 22084-22085 - skipped (2 entries)

SEQ ID NO: 22086 - DNA, 17 bp, synthetic construct
  source 1..17: mol_type = other DNA
cttatgcacggcctgga

SEQ ID NO: 22087 - DNA, 16 bp, synthetic construct
  source 1..16: mol_type = other DNA
cttatgcacggcctgg

SEQ ID NO: 22088 - DNA, 15 bp, synthetic construct
  source 1..15: mol_type = other DNA
cttatgcacggcctg

SEQ ID NO: 22089 - DNA, 14 bp, synthetic construct
  source 1..14: mol_type = other DNA
cttatgcacggcct

SEQ ID NO: 22090 - DNA, 13 bp, synthetic construct
  source 1..13: mol_type = other DNA
cttatgcacggcc

SEQ ID NO: 22091 - DNA, 12 bp, synthetic construct
  source 1..12: mol_type = other DNA
cttatgcacggc

SEQ ID NO: 22092 - DNA, 11 bp, synthetic construct
  source 1..11: mol_type = other DNA
cttatgcacgg

SEQ ID NO: 22093 - DNA, 10 bp, synthetic construct
  source 1..10: mol_type = other DNA
cttatgcacg

SEQ ID NO: 22094-22095 - skipped (2 entries)

SEQ ID NO: 22096 - DNA, 17 bp, synthetic construct
  source 1..17: mol_type = other DNA
cttatgcacggcctgga

SEQ ID NO: 22097 - DNA, 16 bp, synthetic construct
  source 1..16: mol_type = other DNA
cttatgcacggcctgg

SEQ ID NO: 22098 - DNA, 15 bp, synthetic construct
  source 1..15: mol_type = other DNA
cttatgcacggcctg

SEQ ID NO: 22099 - DNA, 14 bp, synthetic construct
  source 1..14: mol_type = other DNA
cttatgcacggcct

SEQ ID NO: 22100 - DNA, 13 bp, synthetic construct
  source 1..13: mol_type = other DNA
cttatgcacggcc

SEQ ID NO: 22101 - DNA, 12 bp, synthetic construct
  source 1..12: mol_type = other DNA
cttatgcacggc

SEQ ID NO: 22102 - DNA, 11 bp, synthetic construct
  source 1..11: mol_type = other DNA
cttatgcacgg

SEQ ID NO: 22103 - DNA, 10 bp, synthetic construct
  source 1..10: mol_type = other DNA
cttatgcacg

SEQ ID NO: 22104-22105 - skipped (2 entries)

SEQ ID NO: 22106 - DNA, 17 bp, synthetic construct
  source 1..17: mol_type = other DNA
cttatgcacggcctgga

SEQ ID NO: 22107 - DNA, 16 bp, synthetic construct
  source 1..16: mol_type = other DNA
cttatgcacggcctgg

SEQ ID NO: 22108 - DNA, 15 bp, synthetic construct
  source 1..15: mol_type = other DNA
cttatgcacggcctg

SEQ ID NO: 22109 - DNA, 14 bp, synthetic construct
  source 1..14: mol_type = other DNA
cttatgcacggcct

SEQ ID NO: 22110 - DNA, 13 bp, synthetic construct
  source 1..13: mol_type = other DNA
cttatgcacggcc

SEQ ID NO: 22111 - DNA, 12 bp, synthetic construct
  source 1..12: mol_type = other DNA
cttatgcacggc

SEQ ID NO: 22112 - DNA, 11 bp, synthetic construct
  source 1..11: mol_type = other DNA
cttatgcacgg

SEQ ID NO: 22113 - DNA, 10 bp, synthetic construct
  source 1..10: mol_type = other DNA
cttatgcacg

SEQ ID NO: 22114-22115 - skipped (2 entries)

SEQ ID NO: 22116 - DNA, 17 bp, synthetic construct
  source 1..17: mol_type = other DNA
cttatgcacggcctgga

SEQ ID NO: 22117 - DNA, 16 bp, synthetic construct
  source 1..16: mol_type = other DNA
cttatgcacggcctgg

SEQ ID NO: 22118 - DNA, 15 bp, synthetic construct
  source 1..15: mol_type = other DNA
cttatgcacggcctg

SEQ ID NO: 22119 - DNA, 14 bp, synthetic construct
  source 1..14: mol_type = other DNA
cttatgcacggcct

SEQ ID NO: 22120 - DNA, 13 bp, synthetic construct
  source 1..13: mol_type = other DNA
cttatgcacggcc

SEQ ID NO: 22121 - DNA, 12 bp, synthetic construct
  source 1..12: mol_type = other DNA
cttatgcacggc

SEQ ID NO: 22122 - DNA, 11 bp, synthetic construct
  source 1..11: mol_type = other DNA
cttatgcacgg

SEQ ID NO: 22123 - DNA, 10 bp, synthetic construct
  source 1..10: mol_type = other DNA
cttatgcacg

SEQ ID NO: 22124-22125 - skipped (2 entries)

SEQ ID NO: 22126 - DNA, 17 bp, synthetic construct
  source 1..17: mol_type = other DNA
cttatgcacggcctgga

SEQ ID NO: 22127 - DNA, 16 bp, synthetic construct
  source 1..16: mol_type = other DNA
cttatgcacggcctgg

SEQ ID NO: 22128 - DNA, 15 bp, synthetic construct
  source 1..15: mol_type = other DNA
cttatgcacggcctg

SEQ ID NO: 22129 - DNA, 14 bp, synthetic construct
  source 1..14: mol_type = other DNA
cttatgcacggcct

SEQ ID NO: 22130 - DNA, 13 bp, synthetic construct
  source 1..13: mol_type = other DNA
cttatgcacggcc

SEQ ID NO: 22131 - DNA, 12 bp, synthetic construct
  source 1..12: mol_type = other DNA
cttatgcacggc

SEQ ID NO: 22132 - DNA, 11 bp, synthetic construct
  source 1..11: mol_type = other DNA
cttatgcacgg

SEQ ID NO: 22133 - DNA, 10 bp, synthetic construct
  source 1..10: mol_type = other DNA
cttatgcacg

SEQ ID NO: 22134-22135 - skipped (2 entries)

SEQ ID NO: 22136 - DNA, 17 bp, synthetic construct
  source 1..17: mol_type = other DNA
cttatgcacggcctgga

SEQ ID NO: 22137 - DNA, 16 bp, synthetic construct
  source 1..16: mol_type = other DNA
cttatgcacggcctgg

SEQ ID NO: 22138 - DNA, 15 bp, synthetic construct
  source 1..15: mol_type = other DNA
cttatgcacggcctg

SEQ ID NO: 22139 - DNA, 14 bp, synthetic construct
  source 1..14: mol_type = other DNA
cttatgcacggcct

SEQ ID NO: 22140 - DNA, 13 bp, synthetic construct
  source 1..13: mol_type = other DNA
cttatgcacggcc

SEQ ID NO: 22141 - DNA, 12 bp, synthetic construct
  source 1..12: mol_type = other DNA
cttatgcacggc

SEQ ID NO: 22142 - DNA, 11 bp, synthetic construct
  source 1..11: mol_type = other DNA
cttatgcacgg

SEQ ID NO: 22143 - DNA, 10 bp, synthetic construct
  source 1..10: mol_type = other DNA
cttatgcacg

SEQ ID NO: 22144-22145 - skipped (2 entries)

SEQ ID NO: 22146 - DNA, 17 bp, synthetic construct
  source 1..17: mol_type = other DNA
cttatgcacggcctgga

SEQ ID NO: 22147 - DNA, 16 bp, synthetic construct
  source 1..16: mol_type = other DNA
cttatgcacggcctgg

SEQ ID NO: 22148 - DNA, 15 bp, synthetic construct
  source 1..15: mol_type = other DNA
cttatgcacggcctg

SEQ ID NO: 22149 - DNA, 14 bp, synthetic construct
  source 1..14: mol_type = other DNA
cttatgcacggcct

SEQ ID NO: 22150 - DNA, 13 bp, synthetic construct
  source 1..13: mol_type = other DNA
cttatgcacggcc

SEQ ID NO: 22151 - DNA, 12 bp, synthetic construct
  source 1..12: mol_type = other DNA
cttatgcacggc

SEQ ID NO: 22152 - DNA, 11 bp, synthetic construct
  source 1..11: mol_type = other DNA
cttatgcacgg

SEQ ID NO: 22153 - DNA, 10 bp, synthetic construct
  source 1..10: mol_type = other DNA
cttatgcacg

SEQ ID NO: 22154-22155 - skipped (2 entries)

SEQ ID NO: 22156 - DNA, 17 bp, synthetic construct
  source 1..17: mol_type = other DNA
cttatgcacggcctgga

SEQ ID NO: 22157 - DNA, 16 bp, synthetic construct
  source 1..16: mol_type = other DNA
cttatgcacggcctgg

SEQ ID NO: 22158 - DNA, 15 bp, synthetic construct
  source 1..15: mol_type = other DNA
cttatgcacggcctg

SEQ ID NO: 22159 - DNA, 14 bp, synthetic construct
  source 1..14: mol_type = other DNA
cttatgcacggcct

SEQ ID NO: 22160 - DNA, 13 bp, synthetic construct
  source 1..13: mol_type = other DNA
cttatgcacggcc

SEQ ID NO: 22161 - DNA, 12 bp, synthetic construct
  source 1..12: mol_type = other DNA
cttatgcacggc

SEQ ID NO: 22162 - DNA, 11 bp, synthetic construct
  source 1..11: mol_type = other DNA
cttatgcacgg

SEQ ID NO: 22163 - DNA, 10 bp, synthetic construct
  source 1..10: mol_type = other DNA
cttatgcacg

SEQ ID NO: 22164-22165 - skipped (2 entries)

SEQ ID NO: 22166 - DNA, 31 bp, synthetic construct
  source 1..31: mol_type = other DNA
acatggccccagcagcttcagtccctttctc

SEQ ID NO: 22167 - DNA, 31 bp, synthetic construct; identical to SEQ ID NO: 22166
  source 1..31: mol_type = other DNA

SEQ ID NO: 22168 - DNA, 31 bp, synthetic construct; identical to SEQ ID NO: 22166
  source 1..31: mol_type = other DNA

SEQ ID NO: 22169 - DNA, 31 bp, synthetic construct; identical to SEQ ID NO: 22166
  source 1..31: mol_type = other DNA

SEQ ID NO: 22170 - DNA, 31 bp, synthetic construct; identical to SEQ ID NO: 22166
  source 1..31: mol_type = other DNA

SEQ ID NO: 22171 - DNA, 31 bp, synthetic construct; identical to SEQ ID NO: 22166
  source 1..31: mol_type = other DNA

SEQ ID NO: 22172 - DNA, 31 bp, synthetic construct; identical to SEQ ID NO: 22166
  source 1..31: mol_type = other DNA

SEQ ID NO: 22173 - DNA, 31 bp, synthetic construct; identical to SEQ ID NO: 22166
  source 1..31: mol_type = other DNA

SEQ ID NO: 22174 - DNA, 31 bp, synthetic construct; identical to SEQ ID NO: 22166
  source 1..31: mol_type = other DNA

SEQ ID NO: 22175 - DNA, 31 bp, synthetic construct; identical to SEQ ID NO: 22166
  source 1..31: mol_type = other DNA

SEQ ID NO: 22176 - DNA, 26 bp, synthetic construct
  source 1..26: mol_type = other DNA
gccccagcagcttcagtccctttctc

SEQ ID NO: 22177 - DNA, 26 bp, synthetic construct
  source 1..26: mol_type = other DNA
gccccagcagcttcagtccctttctc

SEQ ID NO: 22178 - DNA, 26 bp, synthetic construct
  source 1..26: mol_type = other DNA
gccccagcagcttcagtccctttctc

SEQ ID NO: 22179 - DNA, 26 bp, synthetic construct
  source 1..26: mol_type = other DNA
gccccagcagcttcagtccctttctc

SEQ ID NO: 22180 - DNA, 26 bp, synthetic construct
  source 1..26: mol_type = other DNA
gccccagcagcttcagtccctttctc

SEQ ID NO: 22181 - DNA, 26 bp, synthetic construct
  source 1..26: mol_type = other DNA
gccccagcagcttcagtccctttctc

SEQ ID NO: 22182 - DNA, 26 bp, synthetic construct
  source 1..26: mol_type = other DNA
gccccagcagcttcagtccctttctc

SEQ ID NO: 22183 - DNA, 26 bp, synthetic construct
  source 1..26: mol_type = other DNA
gccccagcagcttcagtccctttctc

SEQ ID NO: 22184 - DNA, 26 bp, synthetic construct
  source 1..26: mol_type = other DNA
gccccagcagcttcagtccctttctc

SEQ ID NO: 22185 - DNA, 26 bp, synthetic construct
  source 1..26: mol_type = other DNA
gccccagcagcttcagtccctttctc

SEQ ID NO: 22186 - DNA, 21 bp, synthetic construct
  source 1..21: mol_type = other DNA
agcagcttcagtccctttctc

SEQ ID NO: 22187 - DNA, 21 bp, synthetic construct
  source 1..21: mol_type = other DNA
agcagcttcagtccctttctc

SEQ ID NO: 22188 - DNA, 21 bp, synthetic construct
  source 1..21: mol_type = other DNA
agcagcttcagtccctttctc

SEQ ID NO: 22189 - DNA, 21 bp, synthetic construct
  source 1..21: mol_type = other DNA
agcagcttcagtccctttctc

SEQ ID NO: 22190 - DNA, 21 bp, synthetic construct
  source 1..21: mol_type = other DNA
agcagcttcagtccctttctc

SEQ ID NO: 22191 - DNA, 21 bp, synthetic construct
  source 1..21: mol_type = other DNA
agcagcttcagtccctttctc

SEQ ID NO: 22192 - DNA, 21 bp, synthetic construct
  source 1..21: mol_type = other DNA
agcagcttcagtccctttctc

SEQ ID NO: 22193 - DNA, 21 bp, synthetic construct
  source 1..21: mol_type = other DNA
agcagcttcagtccctttctc

SEQ ID NO: 22194 - DNA, 21 bp, synthetic construct
  source 1..21: mol_type = other DNA
agcagcttcagtccctttctc

SEQ ID NO: 22195 - DNA, 21 bp, synthetic construct
  source 1..21: mol_type = other DNA
agcagcttcagtccctttctc

SEQ ID NO: 22196 - DNA, 15 bp, synthetic construct
  source 1..15: mol_type = other DNA
ttcagtccctttctc

SEQ ID NO: 22197 - DNA, 15 bp, synthetic construct
  source 1..15: mol_type = other DNA
ttcagtccctttctc

SEQ ID NO: 22198 - DNA, 15 bp, synthetic construct
  source 1..15: mol_type = other DNA
ttcagtccctttctc

SEQ ID NO: 22199 - DNA, 15 bp, synthetic construct
  source 1..15: mol_type = other DNA
ttcagtccctttctc

SEQ ID NO: 22200 - DNA, 15 bp, synthetic construct
  source 1..15: mol_type = other DNA
ttcagtccctttctc

SEQ ID NO: 22201 - DNA, 15 bp, synthetic construct
  source 1..15: mol_type = other DNA
ttcagtccctttctc

SEQ ID NO: 22202 - DNA, 15 bp, synthetic construct
  source 1..15: mol_type = other DNA
ttcagtccctttctc

SEQ ID NO: 22203 - DNA, 15 bp, synthetic construct
  source 1..15: mol_type = other DNA
ttcagtccctttctc

SEQ ID NO: 22204 - DNA, 15 bp, synthetic construct
  source 1..15: mol_type = other DNA
ttcagtccctttctc

SEQ ID NO: 22205 - DNA, 15 bp, synthetic construct
  source 1..15: mol_type = other DNA
ttcagtccctttctc

SEQ ID NO: 22206 - DNA, 12 bp, synthetic construct
  source 1..12: mol_type = other DNA
agtccctttctc

SEQ ID NO: 22207 - DNA, 12 bp, synthetic construct
  source 1..12: mol_type = other DNA
agtccctttctc

SEQ ID NO: 22208 - DNA, 12 bp, synthetic construct
  source 1..12: mol_type = other DNA
agtccctttctc

SEQ ID NO: 22209 - DNA, 12 bp, synthetic construct
  source 1..12: mol_type = other DNA
agtccctttctc

SEQ ID NO: 22210 - DNA, 12 bp, synthetic construct
  source 1..12: mol_type = other DNA
agtccctttctc

SEQ ID NO: 22211 - DNA, 12 bp, synthetic construct
  source 1..12: mol_type = other DNA
agtccctttctc

SEQ ID NO: 22212 - DNA, 12 bp, synthetic construct
  source 1..12: mol_type = other DNA
agtccctttctc

SEQ ID NO: 22213 - DNA, 12 bp, synthetic construct
  source 1..12: mol_type = other DNA
agtccctttctc

SEQ ID NO: 22214 - DNA, 12 bp, synthetic construct
  source 1..12: mol_type = other DNA
agtccctttctc

SEQ ID NO: 22215 - DNA, 12 bp, synthetic construct
  source 1..12: mol_type = other DNA
agtccctttctc

SEQ ID NO: 22216 - DNA, 10 bp, synthetic construct
  source 1..10: mol_type = other DNA
tccctttctc

SEQ ID NO: 22217 - DNA, 10 bp, synthetic construct
  source 1..10: mol_type = other DNA
tccctttctc

SEQ ID NO: 22218 - DNA, 10 bp, synthetic construct
  source 1..10: mol_type = other DNA
tccctttctc

SEQ ID NO: 22219 - DNA, 10 bp, synthetic construct
  source 1..10: mol_type = other DNA
tccctttctc

SEQ ID NO: 22220 - DNA, 10 bp, synthetic construct
  source 1..10: mol_type = other DNA
tccctttctc

SEQ ID NO: 22221 - DNA, 10 bp, synthetic construct
  source 1..10: mol_type = other DNA
tccctttctc

SEQ ID NO: 22222 - DNA, 10 bp, synthetic construct
  source 1..10: mol_type = other DNA
tccctttctc

SEQ ID NO: 22223 - DNA, 10 bp, synthetic construct
  source 1..10: mol_type = other DNA
tccctttctc

SEQ ID NO: 22224 - DNA, 10 bp, synthetic construct
  source 1..10: mol_type = other DNA
tccctttctc

SEQ ID NO: 22225 - DNA, 10 bp, synthetic construct
  source 1..10: mol_type = other DNA
tccctttctc

SEQ ID NO: 22226-22255 - skipped (30 entries)

SEQ ID NO: 22256 - DNA, 33 bp, synthetic construct
  source 1..33: mol_type = other DNA
acatggccccagcagcttcagtccctttctcgt

SEQ ID NO: 22257 - DNA, 33 bp, synthetic construct; identical to SEQ ID NO: 22256
  source 1..33: mol_type = other DNA

SEQ ID NO: 22258 - DNA, 33 bp, synthetic construct; identical to SEQ ID NO: 22256
  source 1..33: mol_type = other DNA

SEQ ID NO: 22259 - DNA, 33 bp, synthetic construct; identical to SEQ ID NO: 22256
  source 1..33: mol_type = other DNA

SEQ ID NO: 22260 - DNA, 33 bp, synthetic construct; identical to SEQ ID NO: 22256
  source 1..33: mol_type = other DNA

SEQ ID NO: 22261 - DNA, 33 bp, synthetic construct; identical to SEQ ID NO: 22256
  source 1..33: mol_type = other DNA

SEQ ID NO: 22262 - DNA, 33 bp, synthetic construct; identical to SEQ ID NO: 22256
  source 1..33: mol_type = other DNA

SEQ ID NO: 22263 - DNA, 33 bp, synthetic construct; identical to SEQ ID NO: 22256
  source 1..33: mol_type = other DNA

SEQ ID NO: 22264 - DNA, 33 bp, synthetic construct; identical to SEQ ID NO: 22256
  source 1..33: mol_type = other DNA

SEQ ID NO: 22265 - DNA, 33 bp, synthetic construct; identical to SEQ ID NO: 22256
  source 1..33: mol_type = other DNA

SEQ ID NO: 22266 - DNA, 28 bp, synthetic construct
  source 1..28: mol_type = other DNA
gccccagcagcttcagtccctttctcgt

SEQ ID NO: 22267 - DNA, 28 bp, synthetic construct
  source 1..28: mol_type = other DNA
gccccagcagcttcagtccctttctcgt

SEQ ID NO: 22268 - DNA, 28 bp, synthetic construct
  source 1..28: mol_type = other DNA
gccccagcagcttcagtccctttctcgt

SEQ ID NO: 22269 - DNA, 28 bp, synthetic construct
  source 1..28: mol_type = other DNA
gccccagcagcttcagtccctttctcgt

SEQ ID NO: 22270 - DNA, 28 bp, synthetic construct
  source 1..28: mol_type = other DNA
gccccagcagcttcagtccctttctcgt

SEQ ID NO: 22271 - DNA, 28 bp, synthetic construct
  source 1..28: mol_type = other DNA
gccccagcagcttcagtccctttctcgt

SEQ ID NO: 22272 - DNA, 28 bp, synthetic construct
  source 1..28: mol_type = other DNA
gccccagcagcttcagtccctttctcgt

SEQ ID NO: 22273 - DNA, 28 bp, synthetic construct
  source 1..28: mol_type = other DNA
gccccagcagcttcagtccctttctcgt

SEQ ID NO: 22274 - DNA, 28 bp, synthetic construct
  source 1..28: mol_type = other DNA
gccccagcagcttcagtccctttctcgt

SEQ ID NO: 22275 - DNA, 28 bp, synthetic construct
  source 1..28: mol_type = other DNA
gccccagcagcttcagtccctttctcgt

SEQ ID NO: 22276 - DNA, 23 bp, synthetic construct
  source 1..23: mol_type = other DNA
agcagcttcagtccctttctcgt

SEQ ID NO: 22277 - DNA, 23 bp, synthetic construct
  source 1..23: mol_type = other DNA
agcagcttcagtccctttctcgt

SEQ ID NO: 22278 - DNA, 23 bp, synthetic construct
  source 1..23: mol_type = other DNA
agcagcttcagtccctttctcgt

SEQ ID NO: 22279 - DNA, 23 bp, synthetic construct
  source 1..23: mol_type = other DNA
agcagcttcagtccctttctcgt

SEQ ID NO: 22280 - DNA, 23 bp, synthetic construct
  source 1..23: mol_type = other DNA
agcagcttcagtccctttctcgt

SEQ ID NO: 22281 - DNA, 23 bp, synthetic construct
  source 1..23: mol_type = other DNA
agcagcttcagtccctttctcgt

SEQ ID NO: 22282 - DNA, 23 bp, synthetic construct
  source 1..23: mol_type = other DNA
agcagcttcagtccctttctcgt

SEQ ID NO: 22283 - DNA, 23 bp, synthetic construct
  source 1..23: mol_type = other DNA
agcagcttcagtccctttctcgt

SEQ ID NO: 22284 - DNA, 23 bp, synthetic construct
  source 1..23: mol_type = other DNA
agcagcttcagtccctttctcgt

SEQ ID NO: 22285 - DNA, 23 bp, synthetic construct
  source 1..23: mol_type = other DNA
agcagcttcagtccctttctcgt

SEQ ID NO: 22286 - DNA, 17 bp, synthetic construct
  source 1..17: mol_type = other DNA
ttcagtccctttctcgt

SEQ ID NO: 22287 - DNA, 17 bp, synthetic construct
  source 1..17: mol_type = other DNA
ttcagtccctttctcgt

SEQ ID NO: 22288 - DNA, 17 bp, synthetic construct
  source 1..17: mol_type = other DNA
ttcagtccctttctcgt

SEQ ID NO: 22289 - DNA, 17 bp, synthetic construct
  source 1..17: mol_type = other DNA
ttcagtccctttctcgt

SEQ ID NO: 22290 - DNA, 17 bp, synthetic construct
  source 1..17: mol_type = other DNA
ttcagtccctttctcgt

SEQ ID NO: 22291 - DNA, 17 bp, synthetic construct
  source 1..17: mol_type = other DNA
ttcagtccctttctcgt

SEQ ID NO: 22292 - DNA, 17 bp, synthetic construct
  source 1..17: mol_type = other DNA
ttcagtccctttctcgt

SEQ ID NO: 22293 - DNA, 17 bp, synthetic construct
  source 1..17: mol_type = other DNA
ttcagtccctttctcgt

SEQ ID NO: 22294 - DNA, 17 bp, synthetic construct
  source 1..17: mol_type = other DNA
ttcagtccctttctcgt

SEQ ID NO: 22295 - DNA, 17 bp, synthetic construct
  source 1..17: mol_type = other DNA
ttcagtccctttctcgt

SEQ ID NO: 22296 - DNA, 14 bp, synthetic construct
  source 1..14: mol_type = other DNA
agtccctttctcgt

SEQ ID NO: 22297 - DNA, 14 bp, synthetic construct
  source 1..14: mol_type = other DNA
agtccctttctcgt

SEQ ID NO: 22298 - DNA, 14 bp, synthetic construct
  source 1..14: mol_type = other DNA
agtccctttctcgt

SEQ ID NO: 22299 - DNA, 14 bp, synthetic construct
  source 1..14: mol_type = other DNA
agtccctttctcgt

SEQ ID NO: 22300 - DNA, 14 bp, synthetic construct
  source 1..14: mol_type = other DNA
agtccctttctcgt

SEQ ID NO: 22301 - DNA, 14 bp, synthetic construct
  source 1..14: mol_type = other DNA
agtccctttctcgt

SEQ ID NO: 22302 - DNA, 14 bp, synthetic construct
  source 1..14: mol_type = other DNA
agtccctttctcgt

SEQ ID NO: 22303 - DNA, 14 bp, synthetic construct
  source 1..14: mol_type = other DNA
agtccctttctcgt

SEQ ID NO: 22304 - DNA, 14 bp, synthetic construct
  source 1..14: mol_type = other DNA
agtccctttctcgt

SEQ ID NO: 22305 - DNA, 14 bp, synthetic construct
  source 1..14: mol_type = other DNA
agtccctttctcgt

SEQ ID NO: 22306 - DNA, 12 bp, synthetic construct
  source 1..12: mol_type = other DNA
tccctttctcgt

SEQ ID NO: 22307 - DNA, 12 bp, synthetic construct
  source 1..12: mol_type = other DNA
tccctttctcgt

SEQ ID NO: 22308 - DNA, 12 bp, synthetic construct
  source 1..12: mol_type = other DNA
tccctttctcgt

SEQ ID NO: 22309 - DNA, 12 bp, synthetic construct
  source 1..12: mol_type = other DNA
tccctttctcgt

SEQ ID NO: 22310 - DNA, 12 bp, synthetic construct
  source 1..12: mol_type = other DNA
tccctttctcgt

SEQ ID NO: 22311 - DNA, 12 bp, synthetic construct
  source 1..12: mol_type = other DNA
tccctttctcgt

SEQ ID NO: 22312 - DNA, 12 bp, synthetic construct
  source 1..12: mol_type = other DNA
tccctttctcgt

SEQ ID NO: 22313 - DNA, 12 bp, synthetic construct
  source 1..12: mol_type = other DNA
tccctttctcgt

SEQ ID NO: 22314 - DNA, 12 bp, synthetic construct
  source 1..12: mol_type = other DNA
tccctttctcgt

SEQ ID NO: 22315 - DNA, 12 bp, synthetic construct
  source 1..12: mol_type = other DNA
tccctttctcgt

SEQ ID NO: 22316 - DNA, 10 bp, synthetic construct
  source 1..10: mol_type = other DNA
cctttctcgt

SEQ ID NO: 22317 - DNA, 10 bp, synthetic construct
  source 1..10: mol_type = other DNA
cctttctcgt

SEQ ID NO: 22318 - DNA, 10 bp, synthetic construct
  source 1..10: mol_type = other DNA
cctttctcgt

SEQ ID NO: 22319 - DNA, 10 bp, synthetic construct
  source 1..10: mol_type = other DNA
cctttctcgt

SEQ ID NO: 22320 - DNA, 10 bp, synthetic construct
  source 1..10: mol_type = other DNA
cctttctcgt

SEQ ID NO: 22321 - DNA, 10 bp, synthetic construct
  source 1..10: mol_type = other DNA
cctttctcgt

SEQ ID NO: 22322 - DNA, 10 bp, synthetic construct
  source 1..10: mol_type = other DNA
cctttctcgt

SEQ ID NO: 22323 - DNA, 10 bp, synthetic construct
  source 1..10: mol_type = other DNA
cctttctcgt

SEQ ID NO: 22324 - DNA, 10 bp, synthetic construct
  source 1..10: mol_type = other DNA
cctttctcgt

SEQ ID NO: 22325 - DNA, 10 bp, synthetic construct
  source 1..10: mol_type = other DNA
cctttctcgt

SEQ ID NO: 22326-22345 - skipped (20 entries)

SEQ ID NO: 22346 - DNA, 34 bp, synthetic construct
  source 1..34: mol_type = other DNA
acatggccccagcagcttcagtccctttctcgtc

SEQ ID NO: 22347 - DNA, 34 bp, synthetic construct; identical to SEQ ID NO: 22346
  source 1..34: mol_type = other DNA

SEQ ID NO: 22348 - DNA, 34 bp, synthetic construct; identical to SEQ ID NO: 22346
  source 1..34: mol_type = other DNA

SEQ ID NO: 22349 - DNA, 34 bp, synthetic construct; identical to SEQ ID NO: 22346
  source 1..34: mol_type = other DNA

SEQ ID NO: 22350 - DNA, 34 bp, synthetic construct; identical to SEQ ID NO: 22346
  source 1..34: mol_type = other DNA

SEQ ID NO: 22351 - DNA, 34 bp, synthetic construct; identical to SEQ ID NO: 22346
  source 1..34: mol_type = other DNA

SEQ ID NO: 22352 - DNA, 34 bp, synthetic construct; identical to SEQ ID NO: 22346
  source 1..34: mol_type = other DNA

SEQ ID NO: 22353 - DNA, 34 bp, synthetic construct; identical to SEQ ID NO: 22346
  source 1..34: mol_type = other DNA

SEQ ID NO: 22354 - DNA, 34 bp, synthetic construct; identical to SEQ ID NO: 22346
  source 1..34: mol_type = other DNA

SEQ ID NO: 22355 - DNA, 34 bp, synthetic construct; identical to SEQ ID NO: 22346
  source 1..34: mol_type = other DNA

SEQ ID NO: 22356 - DNA, 29 bp, synthetic construct
  source 1..29: mol_type = other DNA
gccccagcagcttcagtccctttctcgtc

SEQ ID NO: 22357 - DNA, 29 bp, synthetic construct
  source 1..29: mol_type = other DNA
gccccagcagcttcagtccctttctcgtc

SEQ ID NO: 22358 - DNA, 29 bp, synthetic construct
  source 1..29: mol_type = other DNA
gccccagcagcttcagtccctttctcgtc

SEQ ID NO: 22359 - DNA, 29 bp, synthetic construct
  source 1..29: mol_type = other DNA
gccccagcagcttcagtccctttctcgtc

SEQ ID NO: 22360 - DNA, 29 bp, synthetic construct
  source 1..29: mol_type = other DNA
gccccagcagcttcagtccctttctcgtc

SEQ ID NO: 22361 - DNA, 29 bp, synthetic construct
  source 1..29: mol_type = other DNA
gccccagcagcttcagtccctttctcgtc

SEQ ID NO: 22362 - DNA, 29 bp, synthetic construct
  source 1..29: mol_type = other DNA
gccccagcagcttcagtccctttctcgtc

SEQ ID NO: 22363 - DNA, 29 bp, synthetic construct
  source 1..29: mol_type = other DNA
gccccagcagcttcagtccctttctcgtc

SEQ ID NO: 22364 - DNA, 29 bp, synthetic construct
  source 1..29: mol_type = other DNA
gccccagcagcttcagtccctttctcgtc

SEQ ID NO: 22365 - DNA, 29 bp, synthetic construct
  source 1..29: mol_type = other DNA
gccccagcagcttcagtccctttctcgtc

SEQ ID NO: 22366 - DNA, 24 bp, synthetic construct
  source 1..24: mol_type = other DNA
agcagcttcagtccctttctcgtc

SEQ ID NO: 22367 - DNA, 24 bp, synthetic construct
  source 1..24: mol_type = other DNA
agcagcttcagtccctttctcgtc

SEQ ID NO: 22368 - DNA, 24 bp, synthetic construct
  source 1..24: mol_type = other DNA
agcagcttcagtccctttctcgtc

SEQ ID NO: 22369 - DNA, 24 bp, synthetic construct
  source 1..24: mol_type = other DNA
agcagcttcagtccctttctcgtc

SEQ ID NO: 22370 - DNA, 24 bp, synthetic construct
  source 1..24: mol_type = other DNA
agcagcttcagtccctttctcgtc

SEQ ID NO: 22371 - DNA, 24 bp, synthetic construct
  source 1..24: mol_type = other DNA
agcagcttcagtccctttctcgtc

SEQ ID NO: 22372 - DNA, 24 bp, synthetic construct
  source 1..24: mol_type = other DNA
agcagcttcagtccctttctcgtc

SEQ ID NO: 22373 - DNA, 24 bp, synthetic construct
  source 1..24: mol_type = other DNA
agcagcttcagtccctttctcgtc

SEQ ID NO: 22374 - DNA, 24 bp, synthetic construct
  source 1..24: mol_type = other DNA
agcagcttcagtccctttctcgtc

SEQ ID NO: 22375 - DNA, 24 bp, synthetic construct
  source 1..24: mol_type = other DNA
agcagcttcagtccctttctcgtc

SEQ ID NO: 22376 - DNA, 18 bp, synthetic construct
  source 1..18: mol_type = other DNA
ttcagtccctttctcgtc

SEQ ID NO: 22377 - DNA, 18 bp, synthetic construct
  source 1..18: mol_type = other DNA
ttcagtccctttctcgtc

SEQ ID NO: 22378 - DNA, 18 bp, synthetic construct
  source 1..18: mol_type = other DNA
ttcagtccctttctcgtc

SEQ ID NO: 22379 - DNA, 18 bp, synthetic construct
  source 1..18: mol_type = other DNA
ttcagtccctttctcgtc

SEQ ID NO: 22380 - DNA, 18 bp, synthetic construct
  source 1..18: mol_type = other DNA
ttcagtccctttctcgtc

SEQ ID NO: 22381 - DNA, 18 bp, synthetic construct
  source 1..18: mol_type = other DNA
ttcagtccctttctcgtc

SEQ ID NO: 22382 - DNA, 18 bp, synthetic construct
  source 1..18: mol_type = other DNA
ttcagtccctttctcgtc

SEQ ID NO: 22383 - DNA, 18 bp, synthetic construct
  source 1..18: mol_type = other DNA
ttcagtccctttctcgtc

SEQ ID NO: 22384 - DNA, 18 bp, synthetic construct
  source 1..18: mol_type = other DNA
ttcagtccctttctcgtc

SEQ ID NO: 22385 - DNA, 18 bp, synthetic construct
  source 1..18: mol_type = other DNA
ttcagtccctttctcgtc

SEQ ID NO: 22386 - DNA, 15 bp, synthetic construct
  source 1..15: mol_type = other DNA
agtccctttctcgtc

SEQ ID NO: 22387 - DNA, 15 bp, synthetic construct
  source 1..15: mol_type = other DNA
agtccctttctcgtc

SEQ ID NO: 22388 - DNA, 15 bp, synthetic construct
  source 1..15: mol_type = other DNA
agtccctttctcgtc

SEQ ID NO: 22389 - DNA, 15 bp, synthetic construct
  source 1..15: mol_type = other DNA
agtccctttctcgtc

SEQ ID NO: 22390 - DNA, 15 bp, synthetic construct
  source 1..15: mol_type = other DNA
agtccctttctcgtc

SEQ ID NO: 22391 - DNA, 15 bp, synthetic construct
  source 1..15: mol_type = other DNA
agtccctttctcgtc

SEQ ID NO: 22392 - DNA, 15 bp, synthetic construct
  source 1..15: mol_type = other DNA
agtccctttctcgtc

SEQ ID NO: 22393 - DNA, 15 bp, synthetic construct
  source 1..15: mol_type = other DNA
agtccctttctcgtc

SEQ ID NO: 22394 - DNA, 15 bp, synthetic construct
  source 1..15: mol_type = other DNA
agtccctttctcgtc

SEQ ID NO: 22395 - DNA, 15 bp, synthetic construct
  source 1..15: mol_type = other DNA
agtccctttctcgtc

SEQ ID NO: 22396 - DNA, 13 bp, synthetic construct
  source 1..13: mol_type = other DNA
tccctttctcgtc

SEQ ID NO: 22397 - DNA, 13 bp, synthetic construct
  source 1..13: mol_type = other DNA
tccctttctcgtc

SEQ ID NO: 22398 - DNA, 13 bp, synthetic construct
  source 1..13: mol_type = other DNA
tccctttctcgtc

SEQ ID NO: 22399 - DNA, 13 bp, synthetic construct
  source 1..13: mol_type = other DNA
tccctttctcgtc

SEQ ID NO: 22400 - DNA, 13 bp, synthetic construct
  source 1..13: mol_type = other DNA
tccctttctcgtc

SEQ ID NO: 22401 - DNA, 13 bp, synthetic construct
  source 1..13: mol_type = other DNA
tccctttctcgtc

SEQ ID NO: 22402 - DNA, 13 bp, synthetic construct
  source 1..13: mol_type = other DNA
tccctttctcgtc

SEQ ID NO: 22403 - DNA, 13 bp, synthetic construct
  source 1..13: mol_type = other DNA
tccctttctcgtc

SEQ ID NO: 22404 - DNA, 13 bp, synthetic construct
  source 1..13: mol_type = other DNA
tccctttctcgtc

SEQ ID NO: 22405 - DNA, 13 bp, synthetic construct
  source 1..13: mol_type = other DNA
tccctttctcgtc

SEQ ID NO: 22406 - DNA, 11 bp, synthetic construct
  source 1..11: mol_type = other DNA
cctttctcgtc

SEQ ID NO: 22407 - DNA, 11 bp, synthetic construct
  source 1..11: mol_type = other DNA
cctttctcgtc

SEQ ID NO: 22408 - DNA, 11 bp, synthetic construct
  source 1..11: mol_type = other DNA
cctttctcgtc

SEQ ID NO: 22409 - DNA, 11 bp, synthetic construct
  source 1..11: mol_type = other DNA
cctttctcgtc

SEQ ID NO: 22410 - DNA, 11 bp, synthetic construct
  source 1..11: mol_type = other DNA
cctttctcgtc

SEQ ID NO: 22411 - DNA, 11 bp, synthetic construct
  source 1..11: mol_type = other DNA
cctttctcgtc

SEQ ID NO: 22412 - DNA, 11 bp, synthetic construct
  source 1..11: mol_type = other DNA
cctttctcgtc

SEQ ID NO: 22413 - DNA, 11 bp, synthetic construct
  source 1..11: mol_type = other DNA
cctttctcgtc

SEQ ID NO: 22414 - DNA, 11 bp, synthetic construct
  source 1..11: mol_type = other DNA
cctttctcgtc

SEQ ID NO: 22415 - DNA, 11 bp, synthetic construct
  source 1..11: mol_type = other DNA
cctttctcgtc

SEQ ID NO: 22416-22435 - skipped (20 entries)

SEQ ID NO: 22436 - DNA, 35 bp, synthetic construct
  source 1..35: mol_type = other DNA
acatggccccagcagcttcagtccctttctcgtcg

SEQ ID NO: 22437 - DNA, 35 bp, synthetic construct; identical to SEQ ID NO: 22436
  source 1..35: mol_type = other DNA

SEQ ID NO: 22438 - DNA, 35 bp, synthetic construct; identical to SEQ ID NO: 22436
  source 1..35: mol_type = other DNA

SEQ ID NO: 22439 - DNA, 35 bp, synthetic construct; identical to SEQ ID NO: 22436
  source 1..35: mol_type = other DNA

SEQ ID NO: 22440 - DNA, 35 bp, synthetic construct; identical to SEQ ID NO: 22436
  source 1..35: mol_type = other DNA

SEQ ID NO: 22441 - DNA, 35 bp, synthetic construct; identical to SEQ ID NO: 22436
  source 1..35: mol_type = other DNA

SEQ ID NO: 22442 - DNA, 35 bp, synthetic construct; identical to SEQ ID NO: 22436
  source 1..35: mol_type = other DNA

SEQ ID NO: 22443 - DNA, 35 bp, synthetic construct; identical to SEQ ID NO: 22436
  source 1..35: mol_type = other DNA

SEQ ID NO: 22444 - DNA, 35 bp, synthetic construct; identical to SEQ ID NO: 22436
  source 1..35: mol_type = other DNA

SEQ ID NO: 22445 - DNA, 35 bp, synthetic construct; identical to SEQ ID NO: 22436
  source 1..35: mol_type = other DNA

SEQ ID NO: 22446 - DNA, 30 bp, synthetic construct
  source 1..30: mol_type = other DNA
gccccagcagcttcagtccctttctcgtcg

SEQ ID NO: 22447 - DNA, 30 bp, synthetic construct; identical to SEQ ID NO: 22446
  source 1..30: mol_type = other DNA

SEQ ID NO: 22448 - DNA, 30 bp, synthetic construct; identical to SEQ ID NO: 22446
  source 1..30: mol_type = other DNA

SEQ ID NO: 22449 - DNA, 30 bp, synthetic construct; identical to SEQ ID NO: 22446
  source 1..30: mol_type = other DNA

SEQ ID NO: 22450 - DNA, 30 bp, synthetic construct; identical to SEQ ID NO: 22446
  source 1..30: mol_type = other DNA

SEQ ID NO: 22451 - DNA, 30 bp, synthetic construct; identical to SEQ ID NO: 22446
  source 1..30: mol_type = other DNA

SEQ ID NO: 22452 - DNA, 30 bp, synthetic construct; identical to SEQ ID NO: 22446
  source 1..30: mol_type = other DNA

SEQ ID NO: 22453 - DNA, 30 bp, synthetic construct; identical to SEQ ID NO: 22446
  source 1..30: mol_type = other DNA

SEQ ID NO: 22454 - DNA, 30 bp, synthetic construct; identical to SEQ ID NO: 22446
  source 1..30: mol_type = other DNA

SEQ ID NO: 22455 - DNA, 30 bp, synthetic construct; identical to SEQ ID NO: 22446
  source 1..30: mol_type = other DNA

SEQ ID NO: 22456 - DNA, 25 bp, synthetic construct
  source 1..25: mol_type = other DNA
agcagcttcagtccctttctcgtcg

SEQ ID NO: 22457 - DNA, 25 bp, synthetic construct
  source 1..25: mol_type = other DNA
agcagcttcagtccctttctcgtcg

SEQ ID NO: 22458 - DNA, 25 bp, synthetic construct
  source 1..25: mol_type = other DNA
agcagcttcagtccctttctcgtcg

SEQ ID NO: 22459 - DNA, 25 bp, synthetic construct
  source 1..25: mol_type = other DNA
agcagcttcagtccctttctcgtcg

SEQ ID NO: 22460 - DNA, 25 bp, synthetic construct
  source 1..25: mol_type = other DNA
agcagcttcagtccctttctcgtcg

SEQ ID NO: 22461 - DNA, 25 bp, synthetic construct
  source 1..25: mol_type = other DNA
agcagcttcagtccctttctcgtcg

SEQ ID NO: 22462 - DNA, 25 bp, synthetic construct
  source 1..25: mol_type = other DNA
agcagcttcagtccctttctcgtcg

SEQ ID NO: 22463 - DNA, 25 bp, synthetic construct
  source 1..25: mol_type = other DNA
agcagcttcagtccctttctcgtcg

SEQ ID NO: 22464 - DNA, 25 bp, synthetic construct
  source 1..25: mol_type = other DNA
agcagcttcagtccctttctcgtcg

SEQ ID NO: 22465 - DNA, 25 bp, synthetic construct
  source 1..25: mol_type = other DNA
agcagcttcagtccctttctcgtcg

SEQ ID NO: 22466 - DNA, 19 bp, synthetic construct
  source 1..19: mol_type = other DNA
ttcagtccctttctcgtcg

SEQ ID NO: 22467 - DNA, 19 bp, synthetic construct
  source 1..19: mol_type = other DNA
ttcagtccctttctcgtcg

SEQ ID NO: 22468 - DNA, 19 bp, synthetic construct
  source 1..19: mol_type = other DNA
ttcagtccctttctcgtcg

SEQ ID NO: 22469 - DNA, 19 bp, synthetic construct
  source 1..19: mol_type = other DNA
ttcagtccctttctcgtcg

SEQ ID NO: 22470 - DNA, 19 bp, synthetic construct
  source 1..19: mol_type = other DNA
ttcagtccctttctcgtcg

SEQ ID NO: 22471 - DNA, 19 bp, synthetic construct
  source 1..19: mol_type = other DNA
ttcagtccctttctcgtcg

SEQ ID NO: 22472 - DNA, 19 bp, synthetic construct
  source 1..19: mol_type = other DNA
ttcagtccctttctcgtcg

SEQ ID NO: 22473 - DNA, 19 bp, synthetic construct
  source 1..19: mol_type = other DNA
ttcagtccctttctcgtcg

SEQ ID NO: 22474 - DNA, 19 bp, synthetic construct
  source 1..19: mol_type = other DNA
ttcagtccctttctcgtcg

SEQ ID NO: 22475 - DNA, 19 bp, synthetic construct
  source 1..19: mol_type = other DNA
ttcagtccctttctcgtcg

SEQ ID NO: 22476 - DNA, 16 bp, synthetic construct
  source 1..16: mol_type = other DNA
agtccctttctcgtcg

SEQ ID NO: 22477 - DNA, 16 bp, synthetic construct
  source 1..16: mol_type = other DNA
agtccctttctcgtcg

SEQ ID NO: 22478 - DNA, 16 bp, synthetic construct
  source 1..16: mol_type = other DNA
agtccctttctcgtcg

SEQ ID NO: 22479 - DNA, 16 bp, synthetic construct
  source 1..16: mol_type = other DNA
agtccctttctcgtcg

SEQ ID NO: 22480 - DNA, 16 bp, synthetic construct
  source 1..16: mol_type = other DNA
agtccctttctcgtcg

SEQ ID NO: 22481 - DNA, 16 bp, synthetic construct
  source 1..16: mol_type = other DNA
agtccctttctcgtcg

SEQ ID NO: 22482 - DNA, 16 bp, synthetic construct
  source 1..16: mol_type = other DNA
agtccctttctcgtcg

SEQ ID NO: 22483 - DNA, 16 bp, synthetic construct
  source 1..16: mol_type = other DNA
agtccctttctcgtcg

SEQ ID NO: 22484 - DNA, 16 bp, synthetic construct
  source 1..16: mol_type = other DNA
agtccctttctcgtcg

SEQ ID NO: 22485 - DNA, 16 bp, synthetic construct
  source 1..16: mol_type = other DNA
agtccctttctcgtcg

SEQ ID NO: 22486 - DNA, 14 bp, synthetic construct
  source 1..14: mol_type = other DNA
tccctttctcgtcg

SEQ ID NO: 22487 - DNA, 14 bp, synthetic construct
  source 1..14: mol_type = other DNA
tccctttctcgtcg

SEQ ID NO: 22488 - DNA, 14 bp, synthetic construct
  source 1..14: mol_type = other DNA
tccctttctcgtcg

SEQ ID NO: 22489 - DNA, 14 bp, synthetic construct
  source 1..14: mol_type = other DNA
tccctttctcgtcg

SEQ ID NO: 22490 - DNA, 14 bp, synthetic construct
  source 1..14: mol_type = other DNA
tccctttctcgtcg

SEQ ID NO: 22491 - DNA, 14 bp, synthetic construct
  source 1..14: mol_type = other DNA
tccctttctcgtcg

SEQ ID NO: 22492 - DNA, 14 bp, synthetic construct
  source 1..14: mol_type = other DNA
tccctttctcgtcg

SEQ ID NO: 22493 - DNA, 14 bp, synthetic construct
  source 1..14: mol_type = other DNA
tccctttctcgtcg

SEQ ID NO: 22494 - DNA, 14 bp, synthetic construct
  source 1..14: mol_type = other DNA
tccctttctcgtcg

SEQ ID NO: 22495 - DNA, 14 bp, synthetic construct
  source 1..14: mol_type = other DNA
tccctttctcgtcg

SEQ ID NO: 22496 - DNA, 12 bp, synthetic construct
  source 1..12: mol_type = other DNA
cctttctcgtcg

SEQ ID NO: 22497 - DNA, 12 bp, synthetic construct
  source 1..12: mol_type = other DNA
cctttctcgtcg

SEQ ID NO: 22498 - DNA, 12 bp, synthetic construct
  source 1..12: mol_type = other DNA
cctttctcgtcg

SEQ ID NO: 22499 - DNA, 12 bp, synthetic construct
  source 1..12: mol_type = other DNA
cctttctcgtcg

SEQ ID NO: 22500 - DNA, 12 bp, synthetic construct
  source 1..12: mol_type = other DNA
cctttctcgtcg

SEQ ID NO: 22501 - DNA, 12 bp, synthetic construct
  source 1..12: mol_type = other DNA
cctttctcgtcg

SEQ ID NO: 22502 - DNA, 12 bp, synthetic construct
  source 1..12: mol_type = other DNA
cctttctcgtcg

SEQ ID NO: 22503 - DNA, 12 bp, synthetic construct
  source 1..12: mol_type = other DNA
cctttctcgtcg

SEQ ID NO: 22504 - DNA, 12 bp, synthetic construct
  source 1..12: mol_type = other DNA
cctttctcgtcg

SEQ ID NO: 22505 - DNA, 12 bp, synthetic construct
  source 1..12: mol_type = other DNA
cctttctcgtcg

SEQ ID NO: 22506 - DNA, 10 bp, synthetic construct
  source 1..10: mol_type = other DNA
tttctcgtcg

SEQ ID NO: 22507 - DNA, 10 bp, synthetic construct
  source 1..10: mol_type = other DNA
tttctcgtcg

SEQ ID NO: 22508 - DNA, 10 bp, synthetic construct
  source 1..10: mol_type = other DNA
tttctcgtcg

SEQ ID NO: 22509 - DNA, 10 bp, synthetic construct
  source 1..10: mol_type = other DNA
tttctcgtcg

SEQ ID NO: 22510 - DNA, 10 bp, synthetic construct
  source 1..10: mol_type = other DNA
tttctcgtcg

SEQ ID NO: 22511 - DNA, 10 bp, synthetic construct
  source 1..10: mol_type = other DNA
tttctcgtcg

SEQ ID NO: 22512 - DNA, 10 bp, synthetic construct
  source 1..10: mol_type = other DNA
tttctcgtcg

SEQ ID NO: 22513 - DNA, 10 bp, synthetic construct
  source 1..10: mol_type = other DNA
tttctcgtcg

SEQ ID NO: 22514 - DNA, 10 bp, synthetic construct
  source 1..10: mol_type = other DNA
tttctcgtcg

SEQ ID NO: 22515 - DNA, 10 bp, synthetic construct
  source 1..10: mol_type = other DNA
tttctcgtcg

SEQ ID NO: 22516-22525 - skipped (10 entries)

SEQ ID NO: 22526 - DNA, 46 bp, synthetic construct
  source 1..46: mol_type = other DNA
gccgtgcataaggctgtgctgaccatcgacgagaaagggactgaag

SEQ ID NO: 22527 - DNA, 46 bp, synthetic construct; identical to SEQ ID NO: 22526
  source 1..46: mol_type = other DNA

SEQ ID NO: 22528 - DNA, 46 bp, synthetic construct; identical to SEQ ID NO: 22526
  source 1..46: mol_type = other DNA

SEQ ID NO: 22529 - DNA, 46 bp, synthetic construct; identical to SEQ ID NO: 22526
  source 1..46: mol_type = other DNA

SEQ ID NO: 22530 - DNA, 46 bp, synthetic construct; identical to SEQ ID NO: 22526
  source 1..46: mol_type = other DNA

SEQ ID NO: 22531 - DNA, 46 bp, synthetic construct; identical to SEQ ID NO: 22526
  source 1..46: mol_type = other DNA

SEQ ID NO: 22532 - DNA, 46 bp, synthetic construct; identical to SEQ ID NO: 22526
  source 1..46: mol_type = other DNA

SEQ ID NO: 22533 - DNA, 46 bp, synthetic construct; identical to SEQ ID NO: 22526
  source 1..46: mol_type = other DNA

SEQ ID NO: 22534 - DNA, 46 bp, synthetic construct; identical to SEQ ID NO: 22526
  source 1..46: mol_type = other DNA

SEQ ID NO: 22535 - DNA, 46 bp, synthetic construct; identical to SEQ ID NO: 22526
  source 1..46: mol_type = other DNA

SEQ ID NO: 22536 - DNA, 41 bp, synthetic construct
  source 1..41: mol_type = other DNA
gcataaggctgtgctgaccatcgacgagaaagggactgaag

SEQ ID NO: 22537 - DNA, 41 bp, synthetic construct; identical to SEQ ID NO: 22536
  source 1..41: mol_type = other DNA

SEQ ID NO: 22538 - DNA, 41 bp, synthetic construct; identical to SEQ ID NO: 22536
  source 1..41: mol_type = other DNA

SEQ ID NO: 22539 - DNA, 41 bp, synthetic construct; identical to SEQ ID NO: 22536
  source 1..41: mol_type = other DNA

SEQ ID NO: 22540 - DNA, 41 bp, synthetic construct; identical to SEQ ID NO: 22536
  source 1..41: mol_type = other DNA

SEQ ID NO: 22541 - DNA, 41 bp, synthetic construct; identical to SEQ ID NO: 22536
  source 1..41: mol_type = other DNA

SEQ ID NO: 22542 - DNA, 41 bp, synthetic construct; identical to SEQ ID NO: 22536
  source 1..41: mol_type = other DNA

SEQ ID NO: 22543 - DNA, 41 bp, synthetic construct; identical to SEQ ID NO: 22536
  source 1..41: mol_type = other DNA

SEQ ID NO: 22544 - DNA, 41 bp, synthetic construct; identical to SEQ ID NO: 22536
  source 1..41: mol_type = other DNA

SEQ ID NO: 22545 - DNA, 41 bp, synthetic construct; identical to SEQ ID NO: 22536
  source 1..41: mol_type = other DNA

SEQ ID NO: 22546 - DNA, 36 bp, synthetic construct
  source 1..36: mol_type = other DNA
aggctgtgctgaccatcgacgagaaagggactgaag

SEQ ID NO: 22547 - DNA, 36 bp, synthetic construct; identical to SEQ ID NO: 22546
  source 1..36: mol_type = other DNA

SEQ ID NO: 22548 - DNA, 36 bp, synthetic construct; identical to SEQ ID NO: 22546
  source 1..36: mol_type = other DNA

SEQ ID NO: 22549 - DNA, 36 bp, synthetic construct; identical to SEQ ID NO: 22546
  source 1..36: mol_type = other DNA

SEQ ID NO: 22550 - DNA, 36 bp, synthetic construct; identical to SEQ ID NO: 22546
  source 1..36: mol_type = other DNA

SEQ ID NO: 22551 - DNA, 36 bp, synthetic construct; identical to SEQ ID NO: 22546
  source 1..36: mol_type = other DNA

SEQ ID NO: 22552 - DNA, 36 bp, synthetic construct; identical to SEQ ID NO: 22546
  source 1..36: mol_type = other DNA

SEQ ID NO: 22553 - DNA, 36 bp, synthetic construct; identical to SEQ ID NO: 22546
  source 1..36: mol_type = other DNA

SEQ ID NO: 22554 - DNA, 36 bp, synthetic construct; identical to SEQ ID NO: 22546
  source 1..36: mol_type = other DNA

SEQ ID NO: 22555 - DNA, 36 bp, synthetic construct; identical to SEQ ID NO: 22546
  source 1..36: mol_type = other DNA

SEQ ID NO: 22556 - DNA, 30 bp, synthetic construct
  source 1..30: mol_type = other DNA
tgctgaccatcgacgagaaagggactgaag

SEQ ID NO: 22557 - DNA, 30 bp, synthetic construct; identical to SEQ ID NO: 22556
  source 1..30: mol_type = other DNA

SEQ ID NO: 22558 - DNA, 30 bp, synthetic construct; identical to SEQ ID NO: 22556
  source 1..30: mol_type = other DNA

SEQ ID NO: 22559 - DNA, 30 bp, synthetic construct; identical to SEQ ID NO: 22556
  source 1..30: mol_type = other DNA

SEQ ID NO: 22560 - DNA, 30 bp, synthetic construct; identical to SEQ ID NO: 22556
  source 1..30: mol_type = other DNA

SEQ ID NO: 22561 - DNA, 30 bp, synthetic construct; identical to SEQ ID NO: 22556
  source 1..30: mol_type = other DNA

SEQ ID NO: 22562 - DNA, 30 bp, synthetic construct; identical to SEQ ID NO: 22556
  source 1..30: mol_type = other DNA

SEQ ID NO: 22563 - DNA, 30 bp, synthetic construct; identical to SEQ ID NO: 22556
  source 1..30: mol_type = other DNA

SEQ ID NO: 22564 - DNA, 30 bp, synthetic construct; identical to SEQ ID NO: 22556
  source 1..30: mol_type = other DNA

SEQ ID NO: 22565 - DNA, 30 bp, synthetic construct; identical to SEQ ID NO: 22556
  source 1..30: mol_type = other DNA

SEQ ID NO: 22566 - DNA, 27 bp, synthetic construct
  source 1..27: mol_type = other DNA
tgaccatcgacgagaaagggactgaag

SEQ ID NO: 22567 - DNA, 27 bp, synthetic construct
  source 1..27: mol_type = other DNA
tgaccatcgacgagaaagggactgaag

SEQ ID NO: 22568 - DNA, 27 bp, synthetic construct
  source 1..27: mol_type = other DNA
tgaccatcgacgagaaagggactgaag

SEQ ID NO: 22569 - DNA, 27 bp, synthetic construct
  source 1..27: mol_type = other DNA
tgaccatcgacgagaaagggactgaag

SEQ ID NO: 22570 - DNA, 27 bp, synthetic construct
  source 1..27: mol_type = other DNA
tgaccatcgacgagaaagggactgaag

SEQ ID NO: 22571 - DNA, 27 bp, synthetic construct
  source 1..27: mol_type = other DNA
tgaccatcgacgagaaagggactgaag

SEQ ID NO: 22572 - DNA, 27 bp, synthetic construct
  source 1..27: mol_type = other DNA
tgaccatcgacgagaaagggactgaag

SEQ ID NO: 22573 - DNA, 27 bp, synthetic construct
  source 1..27: mol_type = other DNA
tgaccatcgacgagaaagggactgaag

SEQ ID NO: 22574 - DNA, 27 bp, synthetic construct
  source 1..27: mol_type = other DNA
tgaccatcgacgagaaagggactgaag

SEQ ID NO: 22575 - DNA, 27 bp, synthetic construct
  source 1..27: mol_type = other DNA
tgaccatcgacgagaaagggactgaag

SEQ ID NO: 22576 - DNA, 25 bp, synthetic construct
  source 1..25: mol_type = other DNA
accatcgacgagaaagggactgaag

SEQ ID NO: 22577 - DNA, 25 bp, synthetic construct
  source 1..25: mol_type = other DNA
accatcgacgagaaagggactgaag

SEQ ID NO: 22578 - DNA, 25 bp, synthetic construct
  source 1..25: mol_type = other DNA
accatcgacgagaaagggactgaag

SEQ ID NO: 22579 - DNA, 25 bp, synthetic construct
  source 1..25: mol_type = other DNA
accatcgacgagaaagggactgaag

SEQ ID NO: 22580 - DNA, 25 bp, synthetic construct
  source 1..25: mol_type = other DNA
accatcgacgagaaagggactgaag

SEQ ID NO: 22581 - DNA, 25 bp, synthetic construct
  source 1..25: mol_type = other DNA
accatcgacgagaaagggactgaag

SEQ ID NO: 22582 - DNA, 25 bp, synthetic construct
  source 1..25: mol_type = other DNA
accatcgacgagaaagggactgaag

SEQ ID NO: 22583 - DNA, 25 bp, synthetic construct
  source 1..25: mol_type = other DNA
accatcgacgagaaagggactgaag

SEQ ID NO: 22584 - DNA, 25 bp, synthetic construct
  source 1..25: mol_type = other DNA
accatcgacgagaaagggactgaag

SEQ ID NO: 22585 - DNA, 25 bp, synthetic construct
  source 1..25: mol_type = other DNA
accatcgacgagaaagggactgaag

SEQ ID NO: 22586 - DNA, 22 bp, synthetic construct
  source 1..22: mol_type = other DNA
atcgacgagaaagggactgaag

SEQ ID NO: 22587 - DNA, 22 bp, synthetic construct
  source 1..22: mol_type = other DNA
atcgacgagaaagggactgaag

SEQ ID NO: 22588 - DNA, 22 bp, synthetic construct
  source 1..22: mol_type = other DNA
atcgacgagaaagggactgaag

SEQ ID NO: 22589 - DNA, 22 bp, synthetic construct
  source 1..22: mol_type = other DNA
atcgacgagaaagggactgaag

SEQ ID NO: 22590 - DNA, 22 bp, synthetic construct
  source 1..22: mol_type = other DNA
atcgacgagaaagggactgaag

SEQ ID NO: 22591 - DNA, 22 bp, synthetic construct
  source 1..22: mol_type = other DNA
atcgacgagaaagggactgaag

SEQ ID NO: 22592 - DNA, 22 bp, synthetic construct
  source 1..22: mol_type = other DNA
atcgacgagaaagggactgaag

SEQ ID NO: 22593 - DNA, 22 bp, synthetic construct
  source 1..22: mol_type = other DNA
atcgacgagaaagggactgaag

SEQ ID NO: 22594 - DNA, 22 bp, synthetic construct
  source 1..22: mol_type = other DNA
atcgacgagaaagggactgaag

SEQ ID NO: 22595 - DNA, 22 bp, synthetic construct
  source 1..22: mol_type = other DNA
atcgacgagaaagggactgaag

SEQ ID NO: 22596 - DNA, 21 bp, synthetic construct
  source 1..21: mol_type = other DNA
tcgacgagaaagggactgaag

SEQ ID NO: 22597 - DNA, 21 bp, synthetic construct
  source 1..21: mol_type = other DNA
tcgacgagaaagggactgaag

SEQ ID NO: 22598 - DNA, 21 bp, synthetic construct
  source 1..21: mol_type = other DNA
tcgacgagaaagggactgaag

SEQ ID NO: 22599 - DNA, 21 bp, synthetic construct
  source 1..21: mol_type = other DNA
tcgacgagaaagggactgaag

SEQ ID NO: 22600 - DNA, 21 bp, synthetic construct
  source 1..21: mol_type = other DNA
tcgacgagaaagggactgaag

SEQ ID NO: 22601 - DNA, 21 bp, synthetic construct
  source 1..21: mol_type = other DNA
tcgacgagaaagggactgaag

SEQ ID NO: 22602 - DNA, 21 bp, synthetic construct
  source 1..21: mol_type = other DNA
tcgacgagaaagggactgaag

SEQ ID NO: 22603 - DNA, 21 bp, synthetic construct
  source 1..21: mol_type = other DNA
tcgacgagaaagggactgaag

SEQ ID NO: 22604 - DNA, 21 bp, synthetic construct
  source 1..21: mol_type = other DNA
tcgacgagaaagggactgaag

SEQ ID NO: 22605 - DNA, 21 bp, synthetic construct
  source 1..21: mol_type = other DNA
tcgacgagaaagggactgaag

SEQ ID NO: 22606 - DNA, 19 bp, synthetic construct
  source 1..19: mol_type = other DNA
gacgagaaagggactgaag

SEQ ID NO: 22607 - DNA, 19 bp, synthetic construct
  source 1..19: mol_type = other DNA
gacgagaaagggactgaag

SEQ ID NO: 22608 - DNA, 19 bp, synthetic construct
  source 1..19: mol_type = other DNA
gacgagaaagggactgaag

SEQ ID NO: 22609 - DNA, 19 bp, synthetic construct
  source 1..19: mol_type = other DNA
gacgagaaagggactgaag

SEQ ID NO: 22610 - DNA, 19 bp, synthetic construct
  source 1..19: mol_type = other DNA
gacgagaaagggactgaag

SEQ ID NO: 22611 - DNA, 19 bp, synthetic construct
  source 1..19: mol_type = other DNA
gacgagaaagggactgaag

SEQ ID NO: 22612 - DNA, 19 bp, synthetic construct
  source 1..19: mol_type = other DNA
gacgagaaagggactgaag

SEQ ID NO: 22613 - DNA, 19 bp, synthetic construct
  source 1..19: mol_type = other DNA
gacgagaaagggactgaag

SEQ ID NO: 22614 - DNA, 19 bp, synthetic construct
  source 1..19: mol_type = other DNA
gacgagaaagggactgaag

SEQ ID NO: 22615 - DNA, 19 bp, synthetic construct
  source 1..19: mol_type = other DNA
gacgagaaagggactgaag

SEQ ID NO: 22616 - DNA, 46 bp, synthetic construct
  source 1..46: mol_type = other DNA
acatggccccagcagcttcagtccctttctcgtcgatggtcagcac

SEQ ID NO: 22617 - DNA, 46 bp, synthetic construct; identical to SEQ ID NO: 22616
  source 1..46: mol_type = other DNA

SEQ ID NO: 22618 - DNA, 46 bp, synthetic construct; identical to SEQ ID NO: 22616
  source 1..46: mol_type = other DNA

SEQ ID NO: 22619 - DNA, 46 bp, synthetic construct; identical to SEQ ID NO: 22616
  source 1..46: mol_type = other DNA

SEQ ID NO: 22620 - DNA, 46 bp, synthetic construct; identical to SEQ ID NO: 22616
  source 1..46: mol_type = other DNA

SEQ ID NO: 22621 - DNA, 46 bp, synthetic construct; identical to SEQ ID NO: 22616
  source 1..46: mol_type = other DNA

SEQ ID NO: 22622 - DNA, 46 bp, synthetic construct; identical to SEQ ID NO: 22616
  source 1..46: mol_type = other DNA

SEQ ID NO: 22623 - DNA, 46 bp, synthetic construct; identical to SEQ ID NO: 22616
  source 1..46: mol_type = other DNA

SEQ ID NO: 22624 - DNA, 46 bp, synthetic construct; identical to SEQ ID NO: 22616
  source 1..46: mol_type = other DNA

SEQ ID NO: 22625 - DNA, 46 bp, synthetic construct; identical to SEQ ID NO: 22616
  source 1..46: mol_type = other DNA

SEQ ID NO: 22626 - DNA, 41 bp, synthetic construct
  source 1..41: mol_type = other DNA
gccccagcagcttcagtccctttctcgtcgatggtcagcac

SEQ ID NO: 22627 - DNA, 41 bp, synthetic construct; identical to SEQ ID NO: 22626
  source 1..41: mol_type = other DNA

SEQ ID NO: 22628 - DNA, 41 bp, synthetic construct; identical to SEQ ID NO: 22626
  source 1..41: mol_type = other DNA

SEQ ID NO: 22629 - DNA, 41 bp, synthetic construct; identical to SEQ ID NO: 22626
  source 1..41: mol_type = other DNA

SEQ ID NO: 22630 - DNA, 41 bp, synthetic construct; identical to SEQ ID NO: 22626
  source 1..41: mol_type = other DNA

SEQ ID NO: 22631 - DNA, 41 bp, synthetic construct; identical to SEQ ID NO: 22626
  source 1..41: mol_type = other DNA

SEQ ID NO: 22632 - DNA, 41 bp, synthetic construct; identical to SEQ ID NO: 22626
  source 1..41: mol_type = other DNA

SEQ ID NO: 22633 - DNA, 41 bp, synthetic construct; identical to SEQ ID NO: 22626
  source 1..41: mol_type = other DNA

SEQ ID NO: 22634 - DNA, 41 bp, synthetic construct; identical to SEQ ID NO: 22626
  source 1..41: mol_type = other DNA

SEQ ID NO: 22635 - DNA, 41 bp, synthetic construct; identical to SEQ ID NO: 22626
  source 1..41: mol_type = other DNA

SEQ ID NO: 22636 - DNA, 36 bp, synthetic construct
  source 1..36: mol_type = other DNA
agcagcttcagtccctttctcgtcgatggtcagcac

SEQ ID NO: 22637 - DNA, 36 bp, synthetic construct; identical to SEQ ID NO: 22636
  source 1..36: mol_type = other DNA

SEQ ID NO: 22638 - DNA, 36 bp, synthetic construct; identical to SEQ ID NO: 22636
  source 1..36: mol_type = other DNA

SEQ ID NO: 22639 - DNA, 36 bp, synthetic construct; identical to SEQ ID NO: 22636
  source 1..36: mol_type = other DNA

SEQ ID NO: 22640 - DNA, 36 bp, synthetic construct; identical to SEQ ID NO: 22636
  source 1..36: mol_type = other DNA

SEQ ID NO: 22641 - DNA, 36 bp, synthetic construct; identical to SEQ ID NO: 22636
  source 1..36: mol_type = other DNA

SEQ ID NO: 22642 - DNA, 36 bp, synthetic construct; identical to SEQ ID NO: 22636
  source 1..36: mol_type = other DNA

SEQ ID NO: 22643 - DNA, 36 bp, synthetic construct; identical to SEQ ID NO: 22636
  source 1..36: mol_type = other DNA

SEQ ID NO: 22644 - DNA, 36 bp, synthetic construct; identical to SEQ ID NO: 22636
  source 1..36: mol_type = other DNA

SEQ ID NO: 22645 - DNA, 36 bp, synthetic construct; identical to SEQ ID NO: 22636
  source 1..36: mol_type = other DNA

SEQ ID NO: 22646 - DNA, 30 bp, synthetic construct
  source 1..30: mol_type = other DNA
ttcagtccctttctcgtcgatggtcagcac

SEQ ID NO: 22647 - DNA, 30 bp, synthetic construct; identical to SEQ ID NO: 22646
  source 1..30: mol_type = other DNA

SEQ ID NO: 22648 - DNA, 30 bp, synthetic construct; identical to SEQ ID NO: 22646
  source 1..30: mol_type = other DNA

SEQ ID NO: 22649 - DNA, 30 bp, synthetic construct; identical to SEQ ID NO: 22646
  source 1..30: mol_type = other DNA

SEQ ID NO: 22650 - DNA, 30 bp, synthetic construct; identical to SEQ ID NO: 22646
  source 1..30: mol_type = other DNA

SEQ ID NO: 22651 - DNA, 30 bp, synthetic construct; identical to SEQ ID NO: 22646
  source 1..30: mol_type = other DNA

SEQ ID NO: 22652 - DNA, 30 bp, synthetic construct; identical to SEQ ID NO: 22646
  source 1..30: mol_type = other DNA

SEQ ID NO: 22653 - DNA, 30 bp, synthetic construct; identical to SEQ ID NO: 22646
  source 1..30: mol_type = other DNA

SEQ ID NO: 22654 - DNA, 30 bp, synthetic construct; identical to SEQ ID NO: 22646
  source 1..30: mol_type = other DNA

SEQ ID NO: 22655 - DNA, 30 bp, synthetic construct; identical to SEQ ID NO: 22646
  source 1..30: mol_type = other DNA

SEQ ID NO: 22656 - DNA, 27 bp, synthetic construct
  source 1..27: mol_type = other DNA
agtccctttctcgtcgatggtcagcac

SEQ ID NO: 22657 - DNA, 27 bp, synthetic construct
  source 1..27: mol_type = other DNA
agtccctttctcgtcgatggtcagcac

SEQ ID NO: 22658 - DNA, 27 bp, synthetic construct
  source 1..27: mol_type = other DNA
agtccctttctcgtcgatggtcagcac

SEQ ID NO: 22659 - DNA, 27 bp, synthetic construct
  source 1..27: mol_type = other DNA
agtccctttctcgtcgatggtcagcac

SEQ ID NO: 22660 - DNA, 27 bp, synthetic construct
  source 1..27: mol_type = other DNA
agtccctttctcgtcgatggtcagcac

SEQ ID NO: 22661 - DNA, 27 bp, synthetic construct
  source 1..27: mol_type = other DNA
agtccctttctcgtcgatggtcagcac

SEQ ID NO: 22662 - DNA, 27 bp, synthetic construct
  source 1..27: mol_type = other DNA
agtccctttctcgtcgatggtcagcac

SEQ ID NO: 22663 - DNA, 27 bp, synthetic construct
  source 1..27: mol_type = other DNA
agtccctttctcgtcgatggtcagcac

SEQ ID NO: 22664 - DNA, 27 bp, synthetic construct
  source 1..27: mol_type = other DNA
agtccctttctcgtcgatggtcagcac

SEQ ID NO: 22665 - DNA, 27 bp, synthetic construct
  source 1..27: mol_type = other DNA
agtccctttctcgtcgatggtcagcac

SEQ ID NO: 22666 - DNA, 25 bp, synthetic construct
  source 1..25: mol_type = other DNA
tccctttctcgtcgatggtcagcac

SEQ ID NO: 22667 - DNA, 25 bp, synthetic construct
  source 1..25: mol_type = other DNA
tccctttctcgtcgatggtcagcac

SEQ ID NO: 22668 - DNA, 25 bp, synthetic construct
  source 1..25: mol_type = other DNA
tccctttctcgtcgatggtcagcac

SEQ ID NO: 22669 - DNA, 25 bp, synthetic construct
  source 1..25: mol_type = other DNA
tccctttctcgtcgatggtcagcac

SEQ ID NO: 22670 - DNA, 25 bp, synthetic construct
  source 1..25: mol_type = other DNA
tccctttctcgtcgatggtcagcac

SEQ ID NO: 22671 - DNA, 25 bp, synthetic construct
  source 1..25: mol_type = other DNA
tccctttctcgtcgatggtcagcac

SEQ ID NO: 22672 - DNA, 25 bp, synthetic construct
  source 1..25: mol_type = other DNA
tccctttctcgtcgatggtcagcac

SEQ ID NO: 22673 - DNA, 25 bp, synthetic construct
  source 1..25: mol_type = other DNA
tccctttctcgtcgatggtcagcac

SEQ ID NO: 22674 - DNA, 25 bp, synthetic construct
  source 1..25: mol_type = other DNA
tccctttctcgtcgatggtcagcac

SEQ ID NO: 22675 - DNA, 25 bp, synthetic construct
  source 1..25: mol_type = other DNA
tccctttctcgtcgatggtcagcac

SEQ ID NO: 22676 - DNA, 23 bp, synthetic construct
  source 1..23: mol_type = other DNA
cctttctcgtcgatggtcagcac

SEQ ID NO: 22677 - DNA, 23 bp, synthetic construct
  source 1..23: mol_type = other DNA
cctttctcgtcgatggtcagcac

SEQ ID NO: 22678 - DNA, 23 bp, synthetic construct
  source 1..23: mol_type = other DNA
cctttctcgtcgatggtcagcac

SEQ ID NO: 22679 - DNA, 23 bp, synthetic construct
  source 1..23: mol_type = other DNA
cctttctcgtcgatggtcagcac

SEQ ID NO: 22680 - DNA, 23 bp, synthetic construct
  source 1..23: mol_type = other DNA
cctttctcgtcgatggtcagcac

SEQ ID NO: 22681 - DNA, 23 bp, synthetic construct
  source 1..23: mol_type = other DNA
cctttctcgtcgatggtcagcac

SEQ ID NO: 22682 - DNA, 23 bp, synthetic construct
  source 1..23: mol_type = other DNA
cctttctcgtcgatggtcagcac

SEQ ID NO: 22683 - DNA, 23 bp, synthetic construct
  source 1..23: mol_type = other DNA
cctttctcgtcgatggtcagcac

SEQ ID NO: 22684 - DNA, 23 bp, synthetic construct
  source 1..23: mol_type = other DNA
cctttctcgtcgatggtcagcac

SEQ ID NO: 22685 - DNA, 23 bp, synthetic construct
  source 1..23: mol_type = other DNA
cctttctcgtcgatggtcagcac

SEQ ID NO: 22686 - DNA, 21 bp, synthetic construct
  source 1..21: mol_type = other DNA
tttctcgtcgatggtcagcac

SEQ ID NO: 22687 - DNA, 21 bp, synthetic construct
  source 1..21: mol_type = other DNA
tttctcgtcgatggtcagcac

SEQ ID NO: 22688 - DNA, 21 bp, synthetic construct
  source 1..21: mol_type = other DNA
tttctcgtcgatggtcagcac

SEQ ID NO: 22689 - DNA, 21 bp, synthetic construct
  source 1..21: mol_type = other DNA
tttctcgtcgatggtcagcac

SEQ ID NO: 22690 - DNA, 21 bp, synthetic construct
  source 1..21: mol_type = other DNA
tttctcgtcgatggtcagcac

SEQ ID NO: 22691 - DNA, 21 bp, synthetic construct
  source 1..21: mol_type = other DNA
tttctcgtcgatggtcagcac

SEQ ID NO: 22692 - DNA, 21 bp, synthetic construct
  source 1..21: mol_type = other DNA
tttctcgtcgatggtcagcac

SEQ ID NO: 22693 - DNA, 21 bp, synthetic construct
  source 1..21: mol_type = other DNA
tttctcgtcgatggtcagcac

SEQ ID NO: 22694 - DNA, 21 bp, synthetic construct
  source 1..21: mol_type = other DNA
tttctcgtcgatggtcagcac

SEQ ID NO: 22695 - DNA, 21 bp, synthetic construct
  source 1..21: mol_type = other DNA
tttctcgtcgatggtcagcac

SEQ ID NO: 22696 - DNA, 19 bp, synthetic construct
  source 1..19: mol_type = other DNA
tctcgtcgatggtcagcac

SEQ ID NO: 22697 - DNA, 19 bp, synthetic construct
  source 1..19: mol_type = other DNA
tctcgtcgatggtcagcac

SEQ ID NO: 22698 - DNA, 19 bp, synthetic construct
  source 1..19: mol_type = other DNA
tctcgtcgatggtcagcac

SEQ ID NO: 22699 - DNA, 19 bp, synthetic construct
  source 1..19: mol_type = other DNA
tctcgtcgatggtcagcac

SEQ ID NO: 22700 - DNA, 19 bp, synthetic construct
  source 1..19: mol_type = other DNA
tctcgtcgatggtcagcac

SEQ ID NO: 22701 - DNA, 19 bp, synthetic construct
  source 1..19: mol_type = other DNA
tctcgtcgatggtcagcac

SEQ ID NO: 22702 - DNA, 19 bp, synthetic construct
  source 1..19: mol_type = other DNA
tctcgtcgatggtcagcac

SEQ ID NO: 22703 - DNA, 19 bp, synthetic construct
  source 1..19: mol_type = other DNA
tctcgtcgatggtcagcac

SEQ ID NO: 22704 - DNA, 19 bp, synthetic construct
  source 1..19: mol_type = other DNA
tctcgtcgatggtcagcac

SEQ ID NO: 22705 - DNA, 19 bp, synthetic construct
  source 1..19: mol_type = other DNA
tctcgtcgatggtcagcac

SEQ ID NO: 22706 - DNA, 46 bp, synthetic construct; identical to SEQ ID NO: 22616
  source 1..46: mol_type = other DNA

SEQ ID NO: 22707 - DNA, 46 bp, synthetic construct; identical to SEQ ID NO: 22616
  source 1..46: mol_type = other DNA

SEQ ID NO: 22708 - DNA, 46 bp, synthetic construct; identical to SEQ ID NO: 22616
  source 1..46: mol_type = other DNA

SEQ ID NO: 22709 - DNA, 46 bp, synthetic construct; identical to SEQ ID NO: 22616
  source 1..46: mol_type = other DNA

SEQ ID NO: 22710 - DNA, 46 bp, synthetic construct; identical to SEQ ID NO: 22616
  source 1..46: mol_type = other DNA

SEQ ID NO: 22711 - DNA, 46 bp, synthetic construct; identical to SEQ ID NO: 22616
  source 1..46: mol_type = other DNA

SEQ ID NO: 22712 - DNA, 46 bp, synthetic construct; identical to SEQ ID NO: 22616
  source 1..46: mol_type = other DNA

SEQ ID NO: 22713 - DNA, 46 bp, synthetic construct; identical to SEQ ID NO: 22616
  source 1..46: mol_type = other DNA

SEQ ID NO: 22714 - DNA, 46 bp, synthetic construct; identical to SEQ ID NO: 22616
  source 1..46: mol_type = other DNA

SEQ ID NO: 22715 - DNA, 46 bp, synthetic construct; identical to SEQ ID NO: 22616
  source 1..46: mol_type = other DNA

SEQ ID NO: 22716 - DNA, 41 bp, synthetic construct; identical to SEQ ID NO: 22626
  source 1..41: mol_type = other DNA

SEQ ID NO: 22717 - DNA, 41 bp, synthetic construct; identical to SEQ ID NO: 22626
  source 1..41: mol_type = other DNA

SEQ ID NO: 22718 - DNA, 41 bp, synthetic construct; identical to SEQ ID NO: 22626
  source 1..41: mol_type = other DNA

SEQ ID NO: 22719 - DNA, 41 bp, synthetic construct; identical to SEQ ID NO: 22626
  source 1..41: mol_type = other DNA

SEQ ID NO: 22720 - DNA, 41 bp, synthetic construct; identical to SEQ ID NO: 22626
  source 1..41: mol_type = other DNA

SEQ ID NO: 22721 - DNA, 41 bp, synthetic construct; identical to SEQ ID NO: 22626
  source 1..41: mol_type = other DNA

SEQ ID NO: 22722 - DNA, 41 bp, synthetic construct; identical to SEQ ID NO: 22626
  source 1..41: mol_type = other DNA

SEQ ID NO: 22723 - DNA, 41 bp, synthetic construct; identical to SEQ ID NO: 22626
  source 1..41: mol_type = other DNA

SEQ ID NO: 22724 - DNA, 41 bp, synthetic construct; identical to SEQ ID NO: 22626
  source 1..41: mol_type = other DNA

SEQ ID NO: 22725 - DNA, 41 bp, synthetic construct; identical to SEQ ID NO: 22626
  source 1..41: mol_type = other DNA

SEQ ID NO: 22726 - DNA, 36 bp, synthetic construct; identical to SEQ ID NO: 22636
  source 1..36: mol_type = other DNA

SEQ ID NO: 22727 - DNA, 36 bp, synthetic construct; identical to SEQ ID NO: 22636
  source 1..36: mol_type = other DNA

SEQ ID NO: 22728 - DNA, 36 bp, synthetic construct; identical to SEQ ID NO: 22636
  source 1..36: mol_type = other DNA

SEQ ID NO: 22729 - DNA, 36 bp, synthetic construct; identical to SEQ ID NO: 22636
  source 1..36: mol_type = other DNA

SEQ ID NO: 22730 - DNA, 36 bp, synthetic construct; identical to SEQ ID NO: 22636
  source 1..36: mol_type = other DNA

SEQ ID NO: 22731 - DNA, 36 bp, synthetic construct; identical to SEQ ID NO: 22636
  source 1..36: mol_type = other DNA

SEQ ID NO: 22732 - DNA, 36 bp, synthetic construct; identical to SEQ ID NO: 22636
  source 1..36: mol_type = other DNA

SEQ ID NO: 22733 - DNA, 36 bp, synthetic construct; identical to SEQ ID NO: 22636
  source 1..36: mol_type = other DNA

SEQ ID NO: 22734 - DNA, 36 bp, synthetic construct; identical to SEQ ID NO: 22636
  source 1..36: mol_type = other DNA

SEQ ID NO: 22735 - DNA, 36 bp, synthetic construct; identical to SEQ ID NO: 22636
  source 1..36: mol_type = other DNA

SEQ ID NO: 22736 - DNA, 30 bp, synthetic construct; identical to SEQ ID NO: 22646
  source 1..30: mol_type = other DNA

SEQ ID NO: 22737 - DNA, 30 bp, synthetic construct; identical to SEQ ID NO: 22646
  source 1..30: mol_type = other DNA

SEQ ID NO: 22738 - DNA, 30 bp, synthetic construct; identical to SEQ ID NO: 22646
  source 1..30: mol_type = other DNA

SEQ ID NO: 22739 - DNA, 30 bp, synthetic construct; identical to SEQ ID NO: 22646
  source 1..30: mol_type = other DNA

SEQ ID NO: 22740 - DNA, 30 bp, synthetic construct; identical to SEQ ID NO: 22646
  source 1..30: mol_type = other DNA

SEQ ID NO: 22741 - DNA, 30 bp, synthetic construct; identical to SEQ ID NO: 22646
  source 1..30: mol_type = other DNA

SEQ ID NO: 22742 - DNA, 30 bp, synthetic construct; identical to SEQ ID NO: 22646
  source 1..30: mol_type = other DNA

SEQ ID NO: 22743 - DNA, 30 bp, synthetic construct; identical to SEQ ID NO: 22646
  source 1..30: mol_type = other DNA

SEQ ID NO: 22744 - DNA, 30 bp, synthetic construct; identical to SEQ ID NO: 22646
  source 1..30: mol_type = other DNA

SEQ ID NO: 22745 - DNA, 30 bp, synthetic construct; identical to SEQ ID NO: 22646
  source 1..30: mol_type = other DNA

SEQ ID NO: 22746 - DNA, 27 bp, synthetic construct
  source 1..27: mol_type = other DNA
agtccctttctcgtcgatggtcagcac

SEQ ID NO: 22747 - DNA, 27 bp, synthetic construct
  source 1..27: mol_type = other DNA
agtccctttctcgtcgatggtcagcac

SEQ ID NO: 22748 - DNA, 27 bp, synthetic construct
  source 1..27: mol_type = other DNA
agtccctttctcgtcgatggtcagcac

SEQ ID NO: 22749 - DNA, 27 bp, synthetic construct
  source 1..27: mol_type = other DNA
agtccctttctcgtcgatggtcagcac

SEQ ID NO: 22750 - DNA, 27 bp, synthetic construct
  source 1..27: mol_type = other DNA
agtccctttctcgtcgatggtcagcac

SEQ ID NO: 22751 - DNA, 27 bp, synthetic construct
  source 1..27: mol_type = other DNA
agtccctttctcgtcgatggtcagcac

SEQ ID NO: 22752 - DNA, 27 bp, synthetic construct
  source 1..27: mol_type = other DNA
agtccctttctcgtcgatggtcagcac

SEQ ID NO: 22753 - DNA, 27 bp, synthetic construct
  source 1..27: mol_type = other DNA
agtccctttctcgtcgatggtcagcac

SEQ ID NO: 22754 - DNA, 27 bp, synthetic construct
  source 1..27: mol_type = other DNA
agtccctttctcgtcgatggtcagcac

SEQ ID NO: 22755 - DNA, 27 bp, synthetic construct
  source 1..27: mol_type = other DNA
agtccctttctcgtcgatggtcagcac

SEQ ID NO: 22756 - DNA, 25 bp, synthetic construct
  source 1..25: mol_type = other DNA
tccctttctcgtcgatggtcagcac

SEQ ID NO: 22757 - DNA, 25 bp, synthetic construct
  source 1..25: mol_type = other DNA
tccctttctcgtcgatggtcagcac

SEQ ID NO: 22758 - DNA, 25 bp, synthetic construct
  source 1..25: mol_type = other DNA
tccctttctcgtcgatggtcagcac

SEQ ID NO: 22759 - DNA, 25 bp, synthetic construct
  source 1..25: mol_type = other DNA
tccctttctcgtcgatggtcagcac

SEQ ID NO: 22760 - DNA, 25 bp, synthetic construct
  source 1..25: mol_type = other DNA
tccctttctcgtcgatggtcagcac

SEQ ID NO: 22761 - DNA, 25 bp, synthetic construct
  source 1..25: mol_type = other DNA
tccctttctcgtcgatggtcagcac

SEQ ID NO: 22762 - DNA, 25 bp, synthetic construct
  source 1..25: mol_type = other DNA
tccctttctcgtcgatggtcagcac

SEQ ID NO: 22763 - DNA, 25 bp, synthetic construct
  source 1..25: mol_type = other DNA
tccctttctcgtcgatggtcagcac

SEQ ID NO: 22764 - DNA, 25 bp, synthetic construct
  source 1..25: mol_type = other DNA
tccctttctcgtcgatggtcagcac

SEQ ID NO: 22765 - DNA, 25 bp, synthetic construct
  source 1..25: mol_type = other DNA
tccctttctcgtcgatggtcagcac

SEQ ID NO: 22766 - DNA, 23 bp, synthetic construct
  source 1..23: mol_type = other DNA
cctttctcgtcgatggtcagcac

SEQ ID NO: 22767 - DNA, 23 bp, synthetic construct
  source 1..23: mol_type = other DNA
cctttctcgtcgatggtcagcac

SEQ ID NO: 22768 - DNA, 23 bp, synthetic construct
  source 1..23: mol_type = other DNA
cctttctcgtcgatggtcagcac

SEQ ID NO: 22769 - DNA, 23 bp, synthetic construct
  source 1..23: mol_type = other DNA
cctttctcgtcgatggtcagcac

SEQ ID NO: 22770 - DNA, 23 bp, synthetic construct
  source 1..23: mol_type = other DNA
cctttctcgtcgatggtcagcac

SEQ ID NO: 22771 - DNA, 23 bp, synthetic construct
  source 1..23: mol_type = other DNA
cctttctcgtcgatggtcagcac

SEQ ID NO: 22772 - DNA, 23 bp, synthetic construct
  source 1..23: mol_type = other DNA
cctttctcgtcgatggtcagcac

SEQ ID NO: 22773 - DNA, 23 bp, synthetic construct
  source 1..23: mol_type = other DNA
cctttctcgtcgatggtcagcac

SEQ ID NO: 22774 - DNA, 23 bp, synthetic construct
  source 1..23: mol_type = other DNA
cctttctcgtcgatggtcagcac

SEQ ID NO: 22775 - DNA, 23 bp, synthetic construct
  source 1..23: mol_type = other DNA
cctttctcgtcgatggtcagcac

SEQ ID NO: 22776 - DNA, 21 bp, synthetic construct
  source 1..21: mol_type = other DNA
tttctcgtcgatggtcagcac

SEQ ID NO: 22777 - DNA, 21 bp, synthetic construct
  source 1..21: mol_type = other DNA
tttctcgtcgatggtcagcac

SEQ ID NO: 22778 - DNA, 21 bp, synthetic construct
  source 1..21: mol_type = other DNA
tttctcgtcgatggtcagcac

SEQ ID NO: 22779 - DNA, 21 bp, synthetic construct
  source 1..21: mol_type = other DNA
tttctcgtcgatggtcagcac

SEQ ID NO: 22780 - DNA, 21 bp, synthetic construct
  source 1..21: mol_type = other DNA
tttctcgtcgatggtcagcac

SEQ ID NO: 22781 - DNA, 21 bp, synthetic construct
  source 1..21: mol_type = other DNA
tttctcgtcgatggtcagcac

SEQ ID NO: 22782 - DNA, 21 bp, synthetic construct
  source 1..21: mol_type = other DNA
tttctcgtcgatggtcagcac

SEQ ID NO: 22783 - DNA, 21 bp, synthetic construct
  source 1..21: mol_type = other DNA
tttctcgtcgatggtcagcac

SEQ ID NO: 22784 - DNA, 21 bp, synthetic construct
  source 1..21: mol_type = other DNA
tttctcgtcgatggtcagcac

SEQ ID NO: 22785 - DNA, 21 bp, synthetic construct
  source 1..21: mol_type = other DNA
tttctcgtcgatggtcagcac

SEQ ID NO: 22786 - DNA, 19 bp, synthetic construct
  source 1..19: mol_type = other DNA
tctcgtcgatggtcagcac

SEQ ID NO: 22787 - DNA, 19 bp, synthetic construct
  source 1..19: mol_type = other DNA
tctcgtcgatggtcagcac

SEQ ID NO: 22788 - DNA, 19 bp, synthetic construct
  source 1..19: mol_type = other DNA
tctcgtcgatggtcagcac

SEQ ID NO: 22789 - DNA, 19 bp, synthetic construct
  source 1..19: mol_type = other DNA
tctcgtcgatggtcagcac

SEQ ID NO: 22790 - DNA, 19 bp, synthetic construct
  source 1..19: mol_type = other DNA
tctcgtcgatggtcagcac

SEQ ID NO: 22791 - DNA, 19 bp, synthetic construct
  source 1..19: mol_type = other DNA
tctcgtcgatggtcagcac

SEQ ID NO: 22792 - DNA, 19 bp, synthetic construct
  source 1..19: mol_type = other DNA
tctcgtcgatggtcagcac

SEQ ID NO: 22793 - DNA, 19 bp, synthetic construct
  source 1..19: mol_type = other DNA
tctcgtcgatggtcagcac

SEQ ID NO: 22794 - DNA, 19 bp, synthetic construct
  source 1..19: mol_type = other DNA
tctcgtcgatggtcagcac

SEQ ID NO: 22795 - DNA, 19 bp, synthetic construct
  source 1..19: mol_type = other DNA
tctcgtcgatggtcagcac

SEQ ID NO: 22796 - DNA, 48 bp, synthetic construct
  source 1..48: mol_type = other DNA
acatggccccagcagcttcagtccctttctcgtcgatggtcagcacag

SEQ ID NO: 22797 - DNA, 48 bp, synthetic construct; identical to SEQ ID NO: 22796
  source 1..48: mol_type = other DNA

SEQ ID NO: 22798 - DNA, 48 bp, synthetic construct; identical to SEQ ID NO: 22796
  source 1..48: mol_type = other DNA

SEQ ID NO: 22799 - DNA, 48 bp, synthetic construct; identical to SEQ ID NO: 22796
  source 1..48: mol_type = other DNA

SEQ ID NO: 22800 - DNA, 48 bp, synthetic construct; identical to SEQ ID NO: 22796
  source 1..48: mol_type = other DNA

SEQ ID NO: 22801 - DNA, 48 bp, synthetic construct; identical to SEQ ID NO: 22796
  source 1..48: mol_type = other DNA

SEQ ID NO: 22802 - DNA, 48 bp, synthetic construct; identical to SEQ ID NO: 22796
  source 1..48: mol_type = other DNA

SEQ ID NO: 22803 - DNA, 48 bp, synthetic construct; identical to SEQ ID NO: 22796
  source 1..48: mol_type = other DNA

SEQ ID NO: 22804 - DNA, 48 bp, synthetic construct; identical to SEQ ID NO: 22796
  source 1..48: mol_type = other DNA

SEQ ID NO: 22805 - DNA, 48 bp, synthetic construct; identical to SEQ ID NO: 22796
  source 1..48: mol_type = other DNA

SEQ ID NO: 22806 - DNA, 43 bp, synthetic construct
  source 1..43: mol_type = other DNA
gccccagcagcttcagtccctttctcgtcgatggtcagcacag

SEQ ID NO: 22807 - DNA, 43 bp, synthetic construct; identical to SEQ ID NO: 22806
  source 1..43: mol_type = other DNA

SEQ ID NO: 22808 - DNA, 43 bp, synthetic construct; identical to SEQ ID NO: 22806
  source 1..43: mol_type = other DNA

SEQ ID NO: 22809 - DNA, 43 bp, synthetic construct; identical to SEQ ID NO: 22806
  source 1..43: mol_type = other DNA

SEQ ID NO: 22810 - DNA, 43 bp, synthetic construct; identical to SEQ ID NO: 22806
  source 1..43: mol_type = other DNA

SEQ ID NO: 22811 - DNA, 43 bp, synthetic construct; identical to SEQ ID NO: 22806
  source 1..43: mol_type = other DNA

SEQ ID NO: 22812 - DNA, 43 bp, synthetic construct; identical to SEQ ID NO: 22806
  source 1..43: mol_type = other DNA

SEQ ID NO: 22813 - DNA, 43 bp, synthetic construct; identical to SEQ ID NO: 22806
  source 1..43: mol_type = other DNA

SEQ ID NO: 22814 - DNA, 43 bp, synthetic construct; identical to SEQ ID NO: 22806
  source 1..43: mol_type = other DNA

SEQ ID NO: 22815 - DNA, 43 bp, synthetic construct; identical to SEQ ID NO: 22806
  source 1..43: mol_type = other DNA

SEQ ID NO: 22816 - DNA, 38 bp, synthetic construct
  source 1..38: mol_type = other DNA
agcagcttcagtccctttctcgtcgatggtcagcacag

SEQ ID NO: 22817 - DNA, 38 bp, synthetic construct; identical to SEQ ID NO: 22816
  source 1..38: mol_type = other DNA

SEQ ID NO: 22818 - DNA, 38 bp, synthetic construct; identical to SEQ ID NO: 22816
  source 1..38: mol_type = other DNA

SEQ ID NO: 22819 - DNA, 38 bp, synthetic construct; identical to SEQ ID NO: 22816
  source 1..38: mol_type = other DNA

SEQ ID NO: 22820 - DNA, 38 bp, synthetic construct; identical to SEQ ID NO: 22816
  source 1..38: mol_type = other DNA

SEQ ID NO: 22821 - DNA, 38 bp, synthetic construct; identical to SEQ ID NO: 22816
  source 1..38: mol_type = other DNA

SEQ ID NO: 22822 - DNA, 38 bp, synthetic construct; identical to SEQ ID NO: 22816
  source 1..38: mol_type = other DNA

SEQ ID NO: 22823 - DNA, 38 bp, synthetic construct; identical to SEQ ID NO: 22816
  source 1..38: mol_type = other DNA

SEQ ID NO: 22824 - DNA, 38 bp, synthetic construct; identical to SEQ ID NO: 22816
  source 1..38: mol_type = other DNA

SEQ ID NO: 22825 - DNA, 38 bp, synthetic construct; identical to SEQ ID NO: 22816
  source 1..38: mol_type = other DNA

SEQ ID NO: 22826 - DNA, 32 bp, synthetic construct
  source 1..32: mol_type = other DNA
ttcagtccctttctcgtcgatggtcagcacag

SEQ ID NO: 22827 - DNA, 32 bp, synthetic construct; identical to SEQ ID NO: 22826
  source 1..32: mol_type = other DNA

SEQ ID NO: 22828 - DNA, 32 bp, synthetic construct; identical to SEQ ID NO: 22826
  source 1..32: mol_type = other DNA

SEQ ID NO: 22829 - DNA, 32 bp, synthetic construct; identical to SEQ ID NO: 22826
  source 1..32: mol_type = other DNA

SEQ ID NO: 22830 - DNA, 32 bp, synthetic construct; identical to SEQ ID NO: 22826
  source 1..32: mol_type = other DNA

SEQ ID NO: 22831 - DNA, 32 bp, synthetic construct; identical to SEQ ID NO: 22826
  source 1..32: mol_type = other DNA

SEQ ID NO: 22832 - DNA, 32 bp, synthetic construct; identical to SEQ ID NO: 22826
  source 1..32: mol_type = other DNA

SEQ ID NO: 22833 - DNA, 32 bp, synthetic construct; identical to SEQ ID NO: 22826
  source 1..32: mol_type = other DNA

SEQ ID NO: 22834 - DNA, 32 bp, synthetic construct; identical to SEQ ID NO: 22826
  source 1..32: mol_type = other DNA

SEQ ID NO: 22835 - DNA, 32 bp, synthetic construct; identical to SEQ ID NO: 22826
  source 1..32: mol_type = other DNA

SEQ ID NO: 22836 - DNA, 29 bp, synthetic construct
  source 1..29: mol_type = other DNA
agtccctttctcgtcgatggtcagcacag

SEQ ID NO: 22837 - DNA, 29 bp, synthetic construct
  source 1..29: mol_type = other DNA
agtccctttctcgtcgatggtcagcacag

SEQ ID NO: 22838 - DNA, 29 bp, synthetic construct
  source 1..29: mol_type = other DNA
agtccctttctcgtcgatggtcagcacag

SEQ ID NO: 22839 - DNA, 29 bp, synthetic construct
  source 1..29: mol_type = other DNA
agtccctttctcgtcgatggtcagcacag

SEQ ID NO: 22840 - DNA, 29 bp, synthetic construct
  source 1..29: mol_type = other DNA
agtccctttctcgtcgatggtcagcacag

SEQ ID NO: 22841 - DNA, 29 bp, synthetic construct
  source 1..29: mol_type = other DNA
agtccctttctcgtcgatggtcagcacag

SEQ ID NO: 22842 - DNA, 29 bp, synthetic construct
  source 1..29: mol_type = other DNA
agtccctttctcgtcgatggtcagcacag

SEQ ID NO: 22843 - DNA, 29 bp, synthetic construct
  source 1..29: mol_type = other DNA
agtccctttctcgtcgatggtcagcacag

SEQ ID NO: 22844 - DNA, 29 bp, synthetic construct
  source 1..29: mol_type = other DNA
agtccctttctcgtcgatggtcagcacag

SEQ ID NO: 22845 - DNA, 29 bp, synthetic construct
  source 1..29: mol_type = other DNA
agtccctttctcgtcgatggtcagcacag

SEQ ID NO: 22846 - DNA, 27 bp, synthetic construct
  source 1..27: mol_type = other DNA
tccctttctcgtcgatggtcagcacag

SEQ ID NO: 22847 - DNA, 27 bp, synthetic construct
  source 1..27: mol_type = other DNA
tccctttctcgtcgatggtcagcacag

SEQ ID NO: 22848 - DNA, 27 bp, synthetic construct
  source 1..27: mol_type = other DNA
tccctttctcgtcgatggtcagcacag

SEQ ID NO: 22849 - DNA, 27 bp, synthetic construct
  source 1..27: mol_type = other DNA
tccctttctcgtcgatggtcagcacag

SEQ ID NO: 22850 - DNA, 27 bp, synthetic construct
  source 1..27: mol_type = other DNA
tccctttctcgtcgatggtcagcacag

SEQ ID NO: 22851 - DNA, 27 bp, synthetic construct
  source 1..27: mol_type = other DNA
tccctttctcgtcgatggtcagcacag

SEQ ID NO: 22852 - DNA, 27 bp, synthetic construct
  source 1..27: mol_type = other DNA
tccctttctcgtcgatggtcagcacag

SEQ ID NO: 22853 - DNA, 27 bp, synthetic construct
  source 1..27: mol_type = other DNA
tccctttctcgtcgatggtcagcacag

SEQ ID NO: 22854 - DNA, 27 bp, synthetic construct
  source 1..27: mol_type = other DNA
tccctttctcgtcgatggtcagcacag

SEQ ID NO: 22855 - DNA, 27 bp, synthetic construct
  source 1..27: mol_type = other DNA
tccctttctcgtcgatggtcagcacag

SEQ ID NO: 22856 - DNA, 25 bp, synthetic construct
  source 1..25: mol_type = other DNA
cctttctcgtcgatggtcagcacag

SEQ ID NO: 22857 - DNA, 25 bp, synthetic construct
  source 1..25: mol_type = other DNA
cctttctcgtcgatggtcagcacag

SEQ ID NO: 22858 - DNA, 25 bp, synthetic construct
  source 1..25: mol_type = other DNA
cctttctcgtcgatggtcagcacag

SEQ ID NO: 22859 - DNA, 25 bp, synthetic construct
  source 1..25: mol_type = other DNA
cctttctcgtcgatggtcagcacag

SEQ ID NO: 22860 - DNA, 25 bp, synthetic construct
  source 1..25: mol_type = other DNA
cctttctcgtcgatggtcagcacag

SEQ ID NO: 22861 - DNA, 25 bp, synthetic construct
  source 1..25: mol_type = other DNA
cctttctcgtcgatggtcagcacag

SEQ ID NO: 22862 - DNA, 25 bp, synthetic construct
  source 1..25: mol_type = other DNA
cctttctcgtcgatggtcagcacag

SEQ ID NO: 22863 - DNA, 25 bp, synthetic construct
  source 1..25: mol_type = other DNA
cctttctcgtcgatggtcagcacag

SEQ ID NO: 22864 - DNA, 25 bp, synthetic construct
  source 1..25: mol_type = other DNA
cctttctcgtcgatggtcagcacag

SEQ ID NO: 22865 - DNA, 25 bp, synthetic construct
  source 1..25: mol_type = other DNA
cctttctcgtcgatggtcagcacag

SEQ ID NO: 22866 - DNA, 23 bp, synthetic construct
  source 1..23: mol_type = other DNA
tttctcgtcgatggtcagcacag

SEQ ID NO: 22867 - DNA, 23 bp, synthetic construct
  source 1..23: mol_type = other DNA
tttctcgtcgatggtcagcacag

SEQ ID NO: 22868 - DNA, 23 bp, synthetic construct
  source 1..23: mol_type = other DNA
tttctcgtcgatggtcagcacag

SEQ ID NO: 22869 - DNA, 23 bp, synthetic construct
  source 1..23: mol_type = other DNA
tttctcgtcgatggtcagcacag

SEQ ID NO: 22870 - DNA, 23 bp, synthetic construct
  source 1..23: mol_type = other DNA
tttctcgtcgatggtcagcacag

SEQ ID NO: 22871 - DNA, 23 bp, synthetic construct
  source 1..23: mol_type = other DNA
tttctcgtcgatggtcagcacag

SEQ ID NO: 22872 - DNA, 23 bp, synthetic construct
  source 1..23: mol_type = other DNA
tttctcgtcgatggtcagcacag

SEQ ID NO: 22873 - DNA, 23 bp, synthetic construct
  source 1..23: mol_type = other DNA
tttctcgtcgatggtcagcacag

SEQ ID NO: 22874 - DNA, 23 bp, synthetic construct
  source 1..23: mol_type = other DNA
tttctcgtcgatggtcagcacag

SEQ ID NO: 22875 - DNA, 23 bp, synthetic construct
  source 1..23: mol_type = other DNA
tttctcgtcgatggtcagcacag

SEQ ID NO: 22876 - DNA, 21 bp, synthetic construct
  source 1..21: mol_type = other DNA
tctcgtcgatggtcagcacag

SEQ ID NO: 22877 - DNA, 21 bp, synthetic construct
  source 1..21: mol_type = other DNA
tctcgtcgatggtcagcacag

SEQ ID NO: 22878 - DNA, 21 bp, synthetic construct
  source 1..21: mol_type = other DNA
tctcgtcgatggtcagcacag

SEQ ID NO: 22879 - DNA, 21 bp, synthetic construct
  source 1..21: mol_type = other DNA
tctcgtcgatggtcagcacag

SEQ ID NO: 22880 - DNA, 21 bp, synthetic construct
  source 1..21: mol_type = other DNA
tctcgtcgatggtcagcacag

SEQ ID NO: 22881 - DNA, 21 bp, synthetic construct
  source 1..21: mol_type = other DNA
tctcgtcgatggtcagcacag

SEQ ID NO: 22882 - DNA, 21 bp, synthetic construct
  source 1..21: mol_type = other DNA
tctcgtcgatggtcagcacag

SEQ ID NO: 22883 - DNA, 21 bp, synthetic construct
  source 1..21: mol_type = other DNA
tctcgtcgatggtcagcacag

SEQ ID NO: 22884 - DNA, 21 bp, synthetic construct
  source 1..21: mol_type = other DNA
tctcgtcgatggtcagcacag

SEQ ID NO: 22885 - DNA, 21 bp, synthetic construct
  source 1..21: mol_type = other DNA
tctcgtcgatggtcagcacag

SEQ ID NO: 22886 - DNA, 49 bp, synthetic construct
  source 1..49: mol_type = other DNA
acatggccccagcagcttcagtccctttctcgtcgatggtcagcacagc

SEQ ID NO: 22887 - DNA, 49 bp, synthetic construct; identical to SEQ ID NO: 22886
  source 1..49: mol_type = other DNA

SEQ ID NO: 22888 - DNA, 49 bp, synthetic construct; identical to SEQ ID NO: 22886
  source 1..49: mol_type = other DNA

SEQ ID NO: 22889 - DNA, 49 bp, synthetic construct; identical to SEQ ID NO: 22886
  source 1..49: mol_type = other DNA

SEQ ID NO: 22890 - DNA, 49 bp, synthetic construct; identical to SEQ ID NO: 22886
  source 1..49: mol_type = other DNA

SEQ ID NO: 22891 - DNA, 49 bp, synthetic construct; identical to SEQ ID NO: 22886
  source 1..49: mol_type = other DNA

SEQ ID NO: 22892 - DNA, 49 bp, synthetic construct; identical to SEQ ID NO: 22886
  source 1..49: mol_type = other DNA

SEQ ID NO: 22893 - DNA, 49 bp, synthetic construct; identical to SEQ ID NO: 22886
  source 1..49: mol_type = other DNA

SEQ ID NO: 22894 - DNA, 49 bp, synthetic construct; identical to SEQ ID NO: 22886
  source 1..49: mol_type = other DNA

SEQ ID NO: 22895 - DNA, 49 bp, synthetic construct; identical to SEQ ID NO: 22886
  source 1..49: mol_type = other DNA

SEQ ID NO: 22896 - DNA, 44 bp, synthetic construct
  source 1..44: mol_type = other DNA
gccccagcagcttcagtccctttctcgtcgatggtcagcacagc

SEQ ID NO: 22897 - DNA, 44 bp, synthetic construct; identical to SEQ ID NO: 22896
  source 1..44: mol_type = other DNA

SEQ ID NO: 22898 - DNA, 44 bp, synthetic construct; identical to SEQ ID NO: 22896
  source 1..44: mol_type = other DNA

SEQ ID NO: 22899 - DNA, 44 bp, synthetic construct; identical to SEQ ID NO: 22896
  source 1..44: mol_type = other DNA

SEQ ID NO: 22900 - DNA, 44 bp, synthetic construct; identical to SEQ ID NO: 22896
  source 1..44: mol_type = other DNA

SEQ ID NO: 22901 - DNA, 44 bp, synthetic construct; identical to SEQ ID NO: 22896
  source 1..44: mol_type = other DNA

SEQ ID NO: 22902 - DNA, 44 bp, synthetic construct; identical to SEQ ID NO: 22896
  source 1..44: mol_type = other DNA

SEQ ID NO: 22903 - DNA, 44 bp, synthetic construct; identical to SEQ ID NO: 22896
  source 1..44: mol_type = other DNA

SEQ ID NO: 22904 - DNA, 44 bp, synthetic construct; identical to SEQ ID NO: 22896
  source 1..44: mol_type = other DNA

SEQ ID NO: 22905 - DNA, 44 bp, synthetic construct; identical to SEQ ID NO: 22896
  source 1..44: mol_type = other DNA

SEQ ID NO: 22906 - DNA, 39 bp, synthetic construct
  source 1..39: mol_type = other DNA
agcagcttcagtccctttctcgtcgatggtcagcacagc

SEQ ID NO: 22907 - DNA, 39 bp, synthetic construct; identical to SEQ ID NO: 22906
  source 1..39: mol_type = other DNA

SEQ ID NO: 22908 - DNA, 39 bp, synthetic construct; identical to SEQ ID NO: 22906
  source 1..39: mol_type = other DNA

SEQ ID NO: 22909 - DNA, 39 bp, synthetic construct; identical to SEQ ID NO: 22906
  source 1..39: mol_type = other DNA

SEQ ID NO: 22910 - DNA, 39 bp, synthetic construct; identical to SEQ ID NO: 22906
  source 1..39: mol_type = other DNA

SEQ ID NO: 22911 - DNA, 39 bp, synthetic construct; identical to SEQ ID NO: 22906
  source 1..39: mol_type = other DNA

SEQ ID NO: 22912 - DNA, 39 bp, synthetic construct; identical to SEQ ID NO: 22906
  source 1..39: mol_type = other DNA

SEQ ID NO: 22913 - DNA, 39 bp, synthetic construct; identical to SEQ ID NO: 22906
  source 1..39: mol_type = other DNA

SEQ ID NO: 22914 - DNA, 39 bp, synthetic construct; identical to SEQ ID NO: 22906
  source 1..39: mol_type = other DNA

SEQ ID NO: 22915 - DNA, 39 bp, synthetic construct; identical to SEQ ID NO: 22906
  source 1..39: mol_type = other DNA

SEQ ID NO: 22916 - DNA, 33 bp, synthetic construct
  source 1..33: mol_type = other DNA
ttcagtccctttctcgtcgatggtcagcacagc

SEQ ID NO: 22917 - DNA, 33 bp, synthetic construct; identical to SEQ ID NO: 22916
  source 1..33: mol_type = other DNA

SEQ ID NO: 22918 - DNA, 33 bp, synthetic construct; identical to SEQ ID NO: 22916
  source 1..33: mol_type = other DNA

SEQ ID NO: 22919 - DNA, 33 bp, synthetic construct; identical to SEQ ID NO: 22916
  source 1..33: mol_type = other DNA

SEQ ID NO: 22920 - DNA, 33 bp, synthetic construct; identical to SEQ ID NO: 22916
  source 1..33: mol_type = other DNA

SEQ ID NO: 22921 - DNA, 33 bp, synthetic construct; identical to SEQ ID NO: 22916
  source 1..33: mol_type = other DNA

SEQ ID NO: 22922 - DNA, 33 bp, synthetic construct; identical to SEQ ID NO: 22916
  source 1..33: mol_type = other DNA

SEQ ID NO: 22923 - DNA, 33 bp, synthetic construct; identical to SEQ ID NO: 22916
  source 1..33: mol_type = other DNA

SEQ ID NO: 22924 - DNA, 33 bp, synthetic construct; identical to SEQ ID NO: 22916
  source 1..33: mol_type = other DNA

SEQ ID NO: 22925 - DNA, 33 bp, synthetic construct; identical to SEQ ID NO: 22916
  source 1..33: mol_type = other DNA

SEQ ID NO: 22926 - DNA, 30 bp, synthetic construct
  source 1..30: mol_type = other DNA
agtccctttctcgtcgatggtcagcacagc

SEQ ID NO: 22927 - DNA, 30 bp, synthetic construct; identical to SEQ ID NO: 22926
  source 1..30: mol_type = other DNA

SEQ ID NO: 22928 - DNA, 30 bp, synthetic construct; identical to SEQ ID NO: 22926
  source 1..30: mol_type = other DNA

SEQ ID NO: 22929 - DNA, 30 bp, synthetic construct; identical to SEQ ID NO: 22926
  source 1..30: mol_type = other DNA

SEQ ID NO: 22930 - DNA, 30 bp, synthetic construct; identical to SEQ ID NO: 22926
  source 1..30: mol_type = other DNA

SEQ ID NO: 22931 - DNA, 30 bp, synthetic construct; identical to SEQ ID NO: 22926
  source 1..30: mol_type = other DNA

SEQ ID NO: 22932 - DNA, 30 bp, synthetic construct; identical to SEQ ID NO: 22926
  source 1..30: mol_type = other DNA

SEQ ID NO: 22933 - DNA, 30 bp, synthetic construct; identical to SEQ ID NO: 22926
  source 1..30: mol_type = other DNA

SEQ ID NO: 22934 - DNA, 30 bp, synthetic construct; identical to SEQ ID NO: 22926
  source 1..30: mol_type = other DNA

SEQ ID NO: 22935 - DNA, 30 bp, synthetic construct; identical to SEQ ID NO: 22926
  source 1..30: mol_type = other DNA

SEQ ID NO: 22936 - DNA, 28 bp, synthetic construct
  source 1..28: mol_type = other DNA
tccctttctcgtcgatggtcagcacagc

SEQ ID NO: 22937 - DNA, 28 bp, synthetic construct
  source 1..28: mol_type = other DNA
tccctttctcgtcgatggtcagcacagc

SEQ ID NO: 22938 - DNA, 28 bp, synthetic construct
  source 1..28: mol_type = other DNA
tccctttctcgtcgatggtcagcacagc

SEQ ID NO: 22939 - DNA, 28 bp, synthetic construct
  source 1..28: mol_type = other DNA
tccctttctcgtcgatggtcagcacagc

SEQ ID NO: 22940 - DNA, 28 bp, synthetic construct
  source 1..28: mol_type = other DNA
tccctttctcgtcgatggtcagcacagc

SEQ ID NO: 22941 - DNA, 28 bp, synthetic construct
  source 1..28: mol_type = other DNA
tccctttctcgtcgatggtcagcacagc

SEQ ID NO: 22942 - DNA, 28 bp, synthetic construct
  source 1..28: mol_type = other DNA
tccctttctcgtcgatggtcagcacagc

SEQ ID NO: 22943 - DNA, 28 bp, synthetic construct
  source 1..28: mol_type = other DNA
tccctttctcgtcgatggtcagcacagc

SEQ ID NO: 22944 - DNA, 28 bp, synthetic construct
  source 1..28: mol_type = other DNA
tccctttctcgtcgatggtcagcacagc

SEQ ID NO: 22945 - DNA, 28 bp, synthetic construct
  source 1..28: mol_type = other DNA
tccctttctcgtcgatggtcagcacagc

SEQ ID NO: 22946 - DNA, 26 bp, synthetic construct
  source 1..26: mol_type = other DNA
cctttctcgtcgatggtcagcacagc

SEQ ID NO: 22947 - DNA, 26 bp, synthetic construct
  source 1..26: mol_type = other DNA
cctttctcgtcgatggtcagcacagc

SEQ ID NO: 22948 - DNA, 26 bp, synthetic construct
  source 1..26: mol_type = other DNA
cctttctcgtcgatggtcagcacagc

SEQ ID NO: 22949 - DNA, 26 bp, synthetic construct
  source 1..26: mol_type = other DNA
cctttctcgtcgatggtcagcacagc

SEQ ID NO: 22950 - DNA, 26 bp, synthetic construct
  source 1..26: mol_type = other DNA
cctttctcgtcgatggtcagcacagc

SEQ ID NO: 22951 - DNA, 26 bp, synthetic construct
  source 1..26: mol_type = other DNA
cctttctcgtcgatggtcagcacagc

SEQ ID NO: 22952 - DNA, 26 bp, synthetic construct
  source 1..26: mol_type = other DNA
cctttctcgtcgatggtcagcacagc

SEQ ID NO: 22953 - DNA, 26 bp, synthetic construct
  source 1..26: mol_type = other DNA
cctttctcgtcgatggtcagcacagc

SEQ ID NO: 22954 - DNA, 26 bp, synthetic construct
  source 1..26: mol_type = other DNA
cctttctcgtcgatggtcagcacagc

SEQ ID NO: 22955 - DNA, 26 bp, synthetic construct
  source 1..26: mol_type = other DNA
cctttctcgtcgatggtcagcacagc

SEQ ID NO: 22956 - DNA, 24 bp, synthetic construct
  source 1..24: mol_type = other DNA
tttctcgtcgatggtcagcacagc

SEQ ID NO: 22957 - DNA, 24 bp, synthetic construct
  source 1..24: mol_type = other DNA
tttctcgtcgatggtcagcacagc

SEQ ID NO: 22958 - DNA, 24 bp, synthetic construct
  source 1..24: mol_type = other DNA
tttctcgtcgatggtcagcacagc

SEQ ID NO: 22959 - DNA, 24 bp, synthetic construct
  source 1..24: mol_type = other DNA
tttctcgtcgatggtcagcacagc

SEQ ID NO: 22960 - DNA, 24 bp, synthetic construct
  source 1..24: mol_type = other DNA
tttctcgtcgatggtcagcacagc

SEQ ID NO: 22961 - DNA, 24 bp, synthetic construct
  source 1..24: mol_type = other DNA
tttctcgtcgatggtcagcacagc

SEQ ID NO: 22962 - DNA, 24 bp, synthetic construct
  source 1..24: mol_type = other DNA
tttctcgtcgatggtcagcacagc

SEQ ID NO: 22963 - DNA, 24 bp, synthetic construct
  source 1..24: mol_type = other DNA
tttctcgtcgatggtcagcacagc

SEQ ID NO: 22964 - DNA, 24 bp, synthetic construct
  source 1..24: mol_type = other DNA
tttctcgtcgatggtcagcacagc

SEQ ID NO: 22965 - DNA, 24 bp, synthetic construct
  source 1..24: mol_type = other DNA
tttctcgtcgatggtcagcacagc

SEQ ID NO: 22966 - DNA, 22 bp, synthetic construct
  source 1..22: mol_type = other DNA
tctcgtcgatggtcagcacagc

SEQ ID NO: 22967 - DNA, 22 bp, synthetic construct
  source 1..22: mol_type = other DNA
tctcgtcgatggtcagcacagc

SEQ ID NO: 22968 - DNA, 22 bp, synthetic construct
  source 1..22: mol_type = other DNA
tctcgtcgatggtcagcacagc

SEQ ID NO: 22969 - DNA, 22 bp, synthetic construct
  source 1..22: mol_type = other DNA
tctcgtcgatggtcagcacagc

SEQ ID NO: 22970 - DNA, 22 bp, synthetic construct
  source 1..22: mol_type = other DNA
tctcgtcgatggtcagcacagc

SEQ ID NO: 22971 - DNA, 22 bp, synthetic construct
  source 1..22: mol_type = other DNA
tctcgtcgatggtcagcacagc

SEQ ID NO: 22972 - DNA, 22 bp, synthetic construct
  source 1..22: mol_type = other DNA
tctcgtcgatggtcagcacagc

SEQ ID NO: 22973 - DNA, 22 bp, synthetic construct
  source 1..22: mol_type = other DNA
tctcgtcgatggtcagcacagc

SEQ ID NO: 22974 - DNA, 22 bp, synthetic construct
  source 1..22: mol_type = other DNA
tctcgtcgatggtcagcacagc

SEQ ID NO: 22975 - DNA, 22 bp, synthetic construct
  source 1..22: mol_type = other DNA
tctcgtcgatggtcagcacagc

SEQ ID NO: 22976 - DNA, 144 bp, synthetic construct
  source 1..144: mol_type = other DNA
ctgtgctgaccatcgacaaggttttagagctagaaatagcaagttaaaataaggctagtccgttatcaacttgaaaaagtggcaccgagtcggtgcacatggccccagcagcttcagtccctttctcgtcgatggtcagcacag

SEQ ID NO: 22977 - DNA, 143 bp, synthetic construct
  source 1..143: mol_type = other DNA
ctgtgctgaccatcgacaaggttttagagctagaaatagcaagttaaaataaggctagtccgttatcaacttgaaaaagtggcaccgagtcggtgcacatggccccagcagcttcagtccctttctcgtcgatggtcagcaca

SEQ ID NO: 22978 - DNA, 142 bp, synthetic construct
  source 1..142: mol_type = other DNA
ctgtgctgaccatcgacaaggttttagagctagaaatagcaagttaaaataaggctagtccgttatcaacttgaaaaagtggcaccgagtcggtgcacatggccccagcagcttcagtccctttctcgtcgatggtcagcac

SEQ ID NO: 22979 - DNA, 141 bp, synthetic construct
  source 1..141: mol_type = other DNA
ctgtgctgaccatcgacaaggttttagagctagaaatagcaagttaaaataaggctagtccgttatcaacttgaaaaagtggcaccgagtcggtgcacatggccccagcagcttcagtccctttctcgtcgatggtcagca

SEQ ID NO: 22980 - DNA, 140 bp, synthetic construct
  source 1..140: mol_type = other DNA
ctgtgctgaccatcgacaaggttttagagctagaaatagcaagttaaaataaggctagtccgttatcaacttgaaaaagtggcaccgagtcggtgcacatggccccagcagcttcagtccctttctcgtcgatggtcagc

SEQ ID NO: 22981 - DNA, 139 bp, synthetic construct
  source 1..139: mol_type = other DNA
ctgtgctgaccatcgacaaggttttagagctagaaatagcaagttaaaataaggctagtccgttatcaacttgaaaaagtggcaccgagtcggtgcacatggccccagcagcttcagtccctttctcgtcgatggtcag

SEQ ID NO: 22982 - DNA, 138 bp, synthetic construct
  source 1..138: mol_type = other DNA
ctgtgctgaccatcgacaaggttttagagctagaaatagcaagttaaaataaggctagtccgttatcaacttgaaaaagtggcaccgagtcggtgcacatggccccagcagcttcagtccctttctcgtcgatggtca

SEQ ID NO: 22983 - DNA, 137 bp, synthetic construct
  source 1..137: mol_type = other DNA
ctgtgctgaccatcgacaaggttttagagctagaaatagcaagttaaaataaggctagtccgttatcaacttgaaaaagtggcaccgagtcggtgcacatggccccagcagcttcagtccctttctcgtcgatggtc

SEQ ID NO: 22984 - DNA, 136 bp, synthetic construct
  source 1..136: mol_type = other DNA
ctgtgctgaccatcgacaaggttttagagctagaaatagcaagttaaaataaggctagtccgttatcaacttgaaaaagtggcaccgagtcggtgcacatggccccagcagcttcagtccctttctcgtcgatggt

SEQ ID NO: 22985 - DNA, 135 bp, synthetic construct
  source 1..135: mol_type = other DNA
ctgtgctgaccatcgacaaggttttagagctagaaatagcaagttaaaataaggctagtccgttatcaacttgaaaaagtggcaccgagtcggtgcacatggccccagcagcttcagtccctttctcgtcgatgg

SEQ ID NO: 22986 - DNA, 139 bp, synthetic construct
  source 1..139: mol_type = other DNA
ctgtgctgaccatcgacaaggttttagagctagaaatagcaagttaaaataaggctagtccgttatcaacttgaaaaagtggcaccgagtcggtgcgccccagcagcttcagtccctttctcgtcgatggtcagcacag

SEQ ID NO: 22987 - DNA, 138 bp, synthetic construct
  source 1..138: mol_type = other DNA
ctgtgctgaccatcgacaaggttttagagctagaaatagcaagttaaaataaggctagtccgttatcaacttgaaaaagtggcaccgagtcggtgcgccccagcagcttcagtccctttctcgtcgatggtcagcaca

SEQ ID NO: 22988 - DNA, 137 bp, synthetic construct
  source 1..137: mol_type = other DNA
ctgtgctgaccatcgacaaggttttagagctagaaatagcaagttaaaataaggctagtccgttatcaacttgaaaaagtggcaccgagtcggtgcgccccagcagcttcagtccctttctcgtcgatggtcagcac

SEQ ID NO: 22989 - DNA, 136 bp, synthetic construct
  source 1..136: mol_type = other DNA
ctgtgctgaccatcgacaaggttttagagctagaaatagcaagttaaaataaggctagtccgttatcaacttgaaaaagtggcaccgagtcggtgcgccccagcagcttcagtccctttctcgtcgatggtcagca

SEQ ID NO: 22990 - DNA, 135 bp, synthetic construct
  source 1..135: mol_type = other DNA
ctgtgctgaccatcgacaaggttttagagctagaaatagcaagttaaaataaggctagtccgttatcaacttgaaaaagtggcaccgagtcggtgcgccccagcagcttcagtccctttctcgtcgatggtcagc

SEQ ID NO: 22991 - DNA, 134 bp, synthetic construct
  source 1..134: mol_type = other DNA
ctgtgctgaccatcgacaaggttttagagctagaaatagcaagttaaaataaggctagtccgttatcaacttgaaaaagtggcaccgagtcggtgcgccccagcagcttcagtccctttctcgtcgatggtcag

SEQ ID NO: 22992 - DNA, 133 bp, synthetic construct
  source 1..133: mol_type = other DNA
ctgtgctgaccatcgacaaggttttagagctagaaatagcaagttaaaataaggctagtccgttatcaacttgaaaaagtggcaccgagtcggtgcgccccagcagcttcagtccctttctcgtcgatggtca

SEQ ID NO: 22993 - DNA, 132 bp, synthetic construct
  source 1..132: mol_type = other DNA
ctgtgctgaccatcgacaaggttttagagctagaaatagcaagttaaaataaggctagtccgttatcaacttgaaaaagtggcaccgagtcggtgcgccccagcagcttcagtccctttctcgtcgatggtc

SEQ ID NO: 22994 - DNA, 131 bp, synthetic construct
  source 1..131: mol_type = other DNA
ctgtgctgaccatcgacaaggttttagagctagaaatagcaagttaaaataaggctagtccgttatcaacttgaaaaagtggcaccgagtcggtgcgccccagcagcttcagtccctttctcgtcgatggt

SEQ ID NO: 22995 - DNA, 130 bp, synthetic construct
  source 1..130: mol_type = other DNA
ctgtgctgaccatcgacaaggttttagagctagaaatagcaagttaaaataaggctagtccgttatcaacttgaaaaagtggcaccgagtcggtgcgccccagcagcttcagtccctttctcgtcgatgg

SEQ ID NO: 22996 - DNA, 134 bp, synthetic construct
  source 1..134: mol_type = other DNA
ctgtgctgaccatcgacaaggttttagagctagaaatagcaagttaaaataaggctagtccgttatcaacttgaaaaagtggcaccgagtcggtgcagcagcttcagtccctttctcgtcgatggtcagcacag

SEQ ID NO: 22997 - DNA, 133 bp, synthetic construct
  source 1..133: mol_type = other DNA
ctgtgctgaccatcgacaaggttttagagctagaaatagcaagttaaaataaggctagtccgttatcaacttgaaaaagtggcaccgagtcggtgcagcagcttcagtccctttctcgtcgatggtcagcaca

SEQ ID NO: 22998 - DNA, 132 bp, synthetic construct
  source 1..132: mol_type = other DNA
ctgtgctgaccatcgacaaggttttagagctagaaatagcaagttaaaataaggctagtccgttatcaacttgaaaaagtggcaccgagtcggtgcagcagcttcagtccctttctcgtcgatggtcagcac

SEQ ID NO: 22999 - DNA, 131 bp, synthetic construct
  source 1..131: mol_type = other DNA
ctgtgctgaccatcgacaaggttttagagctagaaatagcaagttaaaataaggctagtccgttatcaacttgaaaaagtggcaccgagtcggtgcagcagcttcagtccctttctcgtcgatggtcagca

SEQ ID NO: 23000 - DNA, 130 bp, synthetic construct
  source 1..130: mol_type = other DNA
ctgtgctgaccatcgacaaggttttagagctagaaatagcaagttaaaataaggctagtccgttatcaacttgaaaaagtggcaccgagtcggtgcagcagcttcagtccctttctcgtcgatggtcagc

SEQ ID NO: 23001 - DNA, 129 bp, synthetic construct
  source 1..129: mol_type = other DNA
ctgtgctgaccatcgacaaggttttagagctagaaatagcaagttaaaataaggctagtccgttatcaacttgaaaaagtggcaccgagtcggtgcagcagcttcagtccctttctcgtcgatggtcag

SEQ ID NO: 23002 - DNA, 128 bp, synthetic construct
  source 1..128: mol_type = other DNA
ctgtgctgaccatcgacaaggttttagagctagaaatagcaagttaaaataaggctagtccgttatcaacttgaaaaagtggcaccgagtcggtgcagcagcttcagtccctttctcgtcgatggtca

SEQ ID NO: 23003 - DNA, 127 bp, synthetic construct
  source 1..127: mol_type = other DNA
ctgtgctgaccatcgacaaggttttagagctagaaatagcaagttaaaataaggctagtccgttatcaacttgaaaaagtggcaccgagtcggtgcagcagcttcagtccctttctcgtcgatggtc

SEQ ID NO: 23004 - DNA, 126 bp, synthetic construct
  source 1..126: mol_type = other DNA
ctgtgctgaccatcgacaaggttttagagctagaaatagcaagttaaaataaggctagtccgttatcaacttgaaaaagtggcaccgagtcggtgcagcagcttcagtccctttctcgtcgatggt

SEQ ID NO: 23005 - DNA, 125 bp, synthetic construct
  source 1..125: mol_type = other DNA
ctgtgctgaccatcgacaaggttttagagctagaaatagcaagttaaaataaggctagtccgttatcaacttgaaaaagtggcaccgagtcggtgcagcagcttcagtccctttctcgtcgatgg

SEQ ID NO: 23006 - DNA, 128 bp, synthetic construct
  source 1..128: mol_type = other DNA
ctgtgctgaccatcgacaaggttttagagctagaaatagcaagttaaaataaggctagtccgttatcaacttgaaaaagtggcaccgagtcggtgcttcagtccctttctcgtcgatggtcagcacag

SEQ ID NO: 23007 - DNA, 127 bp, synthetic construct
  source 1..127: mol_type = other DNA
ctgtgctgaccatcgacaaggttttagagctagaaatagcaagttaaaataaggctagtccgttatcaacttgaaaaagtggcaccgagtcggtgcttcagtccctttctcgtcgatggtcagcaca

SEQ ID NO: 23008 - DNA, 126 bp, synthetic construct
  source 1..126: mol_type = other DNA
ctgtgctgaccatcgacaaggttttagagctagaaatagcaagttaaaataaggctagtccgttatcaacttgaaaaagtggcaccgagtcggtgcttcagtccctttctcgtcgatggtcagcac

SEQ ID NO: 23009 - DNA, 125 bp, synthetic construct
  source 1..125: mol_type = other DNA
ctgtgctgaccatcgacaaggttttagagctagaaatagcaagttaaaataaggctagtccgttatcaacttgaaaaagtggcaccgagtcggtgcttcagtccctttctcgtcgatggtcagca

SEQ ID NO: 23010 - DNA, 124 bp, synthetic construct
  source 1..124: mol_type = other DNA
ctgtgctgaccatcgacaaggttttagagctagaaatagcaagttaaaataaggctagtccgttatcaacttgaaaaagtggcaccgagtcggtgcttcagtccctttctcgtcgatggtcagc

SEQ ID NO: 23011 - DNA, 123 bp, synthetic construct
  source 1..123: mol_type = other DNA
ctgtgctgaccatcgacaaggttttagagctagaaatagcaagttaaaataaggctagtccgttatcaacttgaaaaagtggcaccgagtcggtgcttcagtccctttctcgtcgatggtcag

SEQ ID NO: 23012 - DNA, 122 bp, synthetic construct
  source 1..122: mol_type = other DNA
ctgtgctgaccatcgacaaggttttagagctagaaatagcaagttaaaataaggctagtccgttatcaacttgaaaaagtggcaccgagtcggtgcttcagtccctttctcgtcgatggtca

SEQ ID NO: 23013 - DNA, 121 bp, synthetic construct
  source 1..121: mol_type = other DNA
ctgtgctgaccatcgacaaggttttagagctagaaatagcaagttaaaataaggctagtccgttatcaacttgaaaaagtggcaccgagtcggtgcttcagtccctttctcgtcgatggtc

SEQ ID NO: 23014 - DNA, 120 bp, synthetic construct
  source 1..120: mol_type = other DNA
ctgtgctgaccatcgacaaggttttagagctagaaatagcaagttaaaataaggctagtccgttatcaacttgaaaaagtggcaccgagtcggtgcttcagtccctttctcgtcgatggt

SEQ ID NO: 23015 - DNA, 119 bp, synthetic construct
  source 1..119: mol_type = other DNA
ctgtgctgaccatcgacaaggttttagagctagaaatagcaagttaaaataaggctagtccgttatcaacttgaaaaagtggcaccgagtcggtgcttcagtccctttctcgtcgatgg

SEQ ID NO: 23016 - DNA, 125 bp, synthetic construct
  source 1..125: mol_type = other DNA
ctgtgctgaccatcgacaaggttttagagctagaaatagcaagttaaaataaggctagtccgttatcaacttgaaaaagtggcaccgagtcggtgcagtccctttctcgtcgatggtcagcacag

SEQ ID NO: 23017 - DNA, 124 bp, synthetic construct
  source 1..124: mol_type = other DNA
ctgtgctgaccatcgacaaggttttagagctagaaatagcaagttaaaataaggctagtccgttatcaacttgaaaaagtggcaccgagtcggtgcagtccctttctcgtcgatggtcagcaca

SEQ ID NO: 23018 - DNA, 123 bp, synthetic construct
  source 1..123: mol_type = other DNA
ctgtgctgaccatcgacaaggttttagagctagaaatagcaagttaaaataaggctagtccgttatcaacttgaaaaagtggcaccgagtcggtgcagtccctttctcgtcgatggtcagcac

SEQ ID NO: 23019 - DNA, 122 bp, synthetic construct
  source 1..122: mol_type = other DNA
ctgtgctgaccatcgacaaggttttagagctagaaatagcaagttaaaataaggctagtccgttatcaacttgaaaaagtggcaccgagtcggtgcagtccctttctcgtcgatggtcagca

SEQ ID NO: 23020 - DNA, 121 bp, synthetic construct
  source 1..121: mol_type = other DNA
ctgtgctgaccatcgacaaggttttagagctagaaatagcaagttaaaataaggctagtccgttatcaacttgaaaaagtggcaccgagtcggtgcagtccctttctcgtcgatggtcagc

SEQ ID NO: 23021 - DNA, 120 bp, synthetic construct
  source 1..120: mol_type = other DNA
ctgtgctgaccatcgacaaggttttagagctagaaatagcaagttaaaataaggctagtccgttatcaacttgaaaaagtggcaccgagtcggtgcagtccctttctcgtcgatggtcag

SEQ ID NO: 23022 - DNA, 119 bp, synthetic construct
  source 1..119: mol_type = other DNA
ctgtgctgaccatcgacaaggttttagagctagaaatagcaagttaaaataaggctagtccgttatcaacttgaaaaagtggcaccgagtcggtgcagtccctttctcgtcgatggtca

SEQ ID NO: 23023 - DNA, 118 bp, synthetic construct
  source 1..118: mol_type = other DNA
ctgtgctgaccatcgacaaggttttagagctagaaatagcaagttaaaataaggctagtccgttatcaacttgaaaaagtggcaccgagtcggtgcagtccctttctcgtcgatggtc

SEQ ID NO: 23024 - DNA, 117 bp, synthetic construct
  source 1..117: mol_type = other DNA
ctgtgctgaccatcgacaaggttttagagctagaaatagcaagttaaaataaggctagtccgttatcaacttgaaaaagtggcaccgagtcggtgcagtccctttctcgtcgatggt

SEQ ID NO: 23025 - DNA, 116 bp, synthetic construct
  source 1..116: mol_type = other DNA
ctgtgctgaccatcgacaaggttttagagctagaaatagcaagttaaaataaggctagtccgttatcaacttgaaaaagtggcaccgagtcggtgcagtccctttctcgtcgatgg

SEQ ID NO: 23026 - DNA, 123 bp, synthetic construct
  source 1..123: mol_type = other DNA
ctgtgctgaccatcgacaaggttttagagctagaaatagcaagttaaaataaggctagtccgttatcaacttgaaaaagtggcaccgagtcggtgctccctttctcgtcgatggtcagcacag

SEQ ID NO: 23027 - DNA, 122 bp, synthetic construct
  source 1..122: mol_type = other DNA
ctgtgctgaccatcgacaaggttttagagctagaaatagcaagttaaaataaggctagtccgttatcaacttgaaaaagtggcaccgagtcggtgctccctttctcgtcgatggtcagcaca

SEQ ID NO: 23028 - DNA, 121 bp, synthetic construct
  source 1..121: mol_type = other DNA
ctgtgctgaccatcgacaaggttttagagctagaaatagcaagttaaaataaggctagtccgttatcaacttgaaaaagtggcaccgagtcggtgctccctttctcgtcgatggtcagcac

SEQ ID NO: 23029 - DNA, 120 bp, synthetic construct
  source 1..120: mol_type = other DNA
ctgtgctgaccatcgacaaggttttagagctagaaatagcaagttaaaataaggctagtccgttatcaacttgaaaaagtggcaccgagtcggtgctccctttctcgtcgatggtcagca

SEQ ID NO: 23030 - DNA, 119 bp, synthetic construct
  source 1..119: mol_type = other DNA
ctgtgctgaccatcgacaaggttttagagctagaaatagcaagttaaaataaggctagtccgttatcaacttgaaaaagtggcaccgagtcggtgctccctttctcgtcgatggtcagc

SEQ ID NO: 23031 - DNA, 118 bp, synthetic construct
  source 1..118: mol_type = other DNA
ctgtgctgaccatcgacaaggttttagagctagaaatagcaagttaaaataaggctagtccgttatcaacttgaaaaagtggcaccgagtcggtgctccctttctcgtcgatggtcag

SEQ ID NO: 23032 - DNA, 117 bp, synthetic construct
  source 1..117: mol_type = other DNA
ctgtgctgaccatcgacaaggttttagagctagaaatagcaagttaaaataaggctagtccgttatcaacttgaaaaagtggcaccgagtcggtgctccctttctcgtcgatggtca

SEQ ID NO: 23033 - DNA, 116 bp, synthetic construct
  source 1..116: mol_type = other DNA
ctgtgctgaccatcgacaaggttttagagctagaaatagcaagttaaaataaggctagtccgttatcaacttgaaaaagtggcaccgagtcggtgctccctttctcgtcgatggtc

SEQ ID NO: 23034 - DNA, 115 bp, synthetic construct
  source 1..115: mol_type = other DNA
ctgtgctgaccatcgacaaggttttagagctagaaatagcaagttaaaataaggctagtccgttatcaacttgaaaaagtggcaccgagtcggtgctccctttctcgtcgatggt

SEQ ID NO: 23035 - DNA, 114 bp, synthetic construct
  source 1..114: mol_type = other DNA
ctgtgctgaccatcgacaaggttttagagctagaaatagcaagttaaaataaggctagtccgttatcaacttgaaaaagtggcaccgagtcggtgctccctttctcgtcgatgg

SEQ ID NO: 23036 - DNA, 121 bp, synthetic construct
  source 1..121: mol_type = other DNA
ctgtgctgaccatcgacaaggttttagagctagaaatagcaagttaaaataaggctagtccgttatcaacttgaaaaagtggcaccgagtcggtgccctttctcgtcgatggtcagcacag

SEQ ID NO: 23037 - DNA, 120 bp, synthetic construct
  source 1..120: mol_type = other DNA
ctgtgctgaccatcgacaaggttttagagctagaaatagcaagttaaaataaggctagtccgttatcaacttgaaaaagtggcaccgagtcggtgccctttctcgtcgatggtcagcaca

SEQ ID NO: 23038 - DNA, 119 bp, synthetic construct
  source 1..119: mol_type = other DNA
ctgtgctgaccatcgacaaggttttagagctagaaatagcaagttaaaataaggctagtccgttatcaacttgaaaaagtggcaccgagtcggtgccctttctcgtcgatggtcagcac

SEQ ID NO: 23039 - DNA, 118 bp, synthetic construct
  source 1..118: mol_type = other DNA
ctgtgctgaccatcgacaaggttttagagctagaaatagcaagttaaaataaggctagtccgttatcaacttgaaaaagtggcaccgagtcggtgccctttctcgtcgatggtcagca

SEQ ID NO: 23040 - DNA, 117 bp, synthetic construct
  source 1..117: mol_type = other DNA
ctgtgctgaccatcgacaaggttttagagctagaaatagcaagttaaaataaggctagtccgttatcaacttgaaaaagtggcaccgagtcggtgccctttctcgtcgatggtcagc

SEQ ID NO: 23041 - DNA, 116 bp, synthetic construct
  source 1..116: mol_type = other DNA
ctgtgctgaccatcgacaaggttttagagctagaaatagcaagttaaaataaggctagtccgttatcaacttgaaaaagtggcaccgagtcggtgccctttctcgtcgatggtcag

SEQ ID NO: 23042 - DNA, 115 bp, synthetic construct
  source 1..115: mol_type = other DNA
ctgtgctgaccatcgacaaggttttagagctagaaatagcaagttaaaataaggctagtccgttatcaacttgaaaaagtggcaccgagtcggtgccctttctcgtcgatggtca

SEQ ID NO: 23043 - DNA, 114 bp, synthetic construct
  source 1..114: mol_type = other DNA
ctgtgctgaccatcgacaaggttttagagctagaaatagcaagttaaaataaggctagtccgttatcaacttgaaaaagtggcaccgagtcggtgccctttctcgtcgatggtc

SEQ ID NO: 23044 - DNA, 113 bp, synthetic construct
  source 1..113: mol_type = other DNA
ctgtgctgaccatcgacaaggttttagagctagaaatagcaagttaaaataaggctagtccgttatcaacttgaaaaagtggcaccgagtcggtgccctttctcgtcgatggt

SEQ ID NO: 23045 - DNA, 112 bp, synthetic construct
  source 1..112: mol_type = other DNA
ctgtgctgaccatcgacaaggttttagagctagaaatagcaagttaaaataaggctagtccgttatcaacttgaaaaagtggcaccgagtcggtgccctttctcgtcgatgg

SEQ ID NO: 23046 - DNA, 119 bp, synthetic construct
  source 1..119: mol_type = other DNA
ctgtgctgaccatcgacaaggttttagagctagaaatagcaagttaaaataaggctagtccgttatcaacttgaaaaagtggcaccgagtcggtgctttctcgtcgatggtcagcacag

SEQ ID NO: 23047 - DNA, 118 bp, synthetic construct
  source 1..118: mol_type = other DNA
ctgtgctgaccatcgacaaggttttagagctagaaatagcaagttaaaataaggctagtccgttatcaacttgaaaaagtggcaccgagtcggtgctttctcgtcgatggtcagcaca

SEQ ID NO: 23048 - DNA, 117 bp, synthetic construct
  source 1..117: mol_type = other DNA
ctgtgctgaccatcgacaaggttttagagctagaaatagcaagttaaaataaggctagtccgttatcaacttgaaaaagtggcaccgagtcggtgctttctcgtcgatggtcagcac

SEQ ID NO: 23049 - DNA, 116 bp, synthetic construct
  source 1..116: mol_type = other DNA
ctgtgctgaccatcgacaaggttttagagctagaaatagcaagttaaaataaggctagtccgttatcaacttgaaaaagtggcaccgagtcggtgctttctcgtcgatggtcagca

SEQ ID NO: 23050 - DNA, 115 bp, synthetic construct
  source 1..115: mol_type = other DNA
ctgtgctgaccatcgacaaggttttagagctagaaatagcaagttaaaataaggctagtccgttatcaacttgaaaaagtggcaccgagtcggtgctttctcgtcgatggtcagc

SEQ ID NO: 23051 - DNA, 114 bp, synthetic construct
  source 1..114: mol_type = other DNA
ctgtgctgaccatcgacaaggttttagagctagaaatagcaagttaaaataaggctagtccgttatcaacttgaaaaagtggcaccgagtcggtgctttctcgtcgatggtcag

SEQ ID NO: 23052 - DNA, 113 bp, synthetic construct
  source 1..113: mol_type = other DNA
ctgtgctgaccatcgacaaggttttagagctagaaatagcaagttaaaataaggctagtccgttatcaacttgaaaaagtggcaccgagtcggtgctttctcgtcgatggtca

SEQ ID NO: 23053 - DNA, 112 bp, synthetic construct
  source 1..112: mol_type = other DNA
ctgtgctgaccatcgacaaggttttagagctagaaatagcaagttaaaataaggctagtccgttatcaacttgaaaaagtggcaccgagtcggtgctttctcgtcgatggtc

SEQ ID NO: 23054 - DNA, 111 bp, synthetic construct
  source 1..111: mol_type = other DNA
ctgtgctgaccatcgacaaggttttagagctagaaatagcaagttaaaataaggctagtccgttatcaacttgaaaaagtggcaccgagtcggtgctttctcgtcgatggt

SEQ ID NO: 23055 - DNA, 110 bp, synthetic construct
  source 1..110: mol_type = other DNA
ctgtgctgaccatcgacaaggttttagagctagaaatagcaagttaaaataaggctagtccgttatcaacttgaaaaagtggcaccgagtcggtgctttctcgtcgatgg

SEQ ID NO: 23056 - DNA, 117 bp, synthetic construct
  source 1..117: mol_type = other DNA
ctgtgctgaccatcgacaaggttttagagctagaaatagcaagttaaaataaggctagtccgttatcaacttgaaaaagtggcaccgagtcggtgctctcgtcgatggtcagcacag

SEQ ID NO: 23057 - DNA, 116 bp, synthetic construct
  source 1..116: mol_type = other DNA
ctgtgctgaccatcgacaaggttttagagctagaaatagcaagttaaaataaggctagtccgttatcaacttgaaaaagtggcaccgagtcggtgctctcgtcgatggtcagcaca

SEQ ID NO: 23058 - DNA, 115 bp, synthetic construct
  source 1..115: mol_type = other DNA
ctgtgctgaccatcgacaaggttttagagctagaaatagcaagttaaaataaggctagtccgttatcaacttgaaaaagtggcaccgagtcggtgctctcgtcgatggtcagcac

SEQ ID NO: 23059 - DNA, 114 bp, synthetic construct
  source 1..114: mol_type = other DNA
ctgtgctgaccatcgacaaggttttagagctagaaatagcaagttaaaataaggctagtccgttatcaacttgaaaaagtggcaccgagtcggtgctctcgtcgatggtcagca

SEQ ID NO: 23060 - DNA, 113 bp, synthetic construct
  source 1..113: mol_type = other DNA
ctgtgctgaccatcgacaaggttttagagctagaaatagcaagttaaaataaggctagtccgttatcaacttgaaaaagtggcaccgagtcggtgctctcgtcgatggtcagc

SEQ ID NO: 23061 - DNA, 112 bp, synthetic construct
  source 1..112: mol_type = other DNA
ctgtgctgaccatcgacaaggttttagagctagaaatagcaagttaaaataaggctagtccgttatcaacttgaaaaagtggcaccgagtcggtgctctcgtcgatggtcag

SEQ ID NO: 23062 - DNA, 111 bp, synthetic construct
  source 1..111: mol_type = other DNA
ctgtgctgaccatcgacaaggttttagagctagaaatagcaagttaaaataaggctagtccgttatcaacttgaaaaagtggcaccgagtcggtgctctcgtcgatggtca

SEQ ID NO: 23063 - DNA, 110 bp, synthetic construct
  source 1..110: mol_type = other DNA
ctgtgctgaccatcgacaaggttttagagctagaaatagcaagttaaaataaggctagtccgttatcaacttgaaaaagtggcaccgagtcggtgctctcgtcgatggtc

SEQ ID NO: 23064 - DNA, 109 bp, synthetic construct
  source 1..109: mol_type = other DNA
ctgtgctgaccatcgacaaggttttagagctagaaatagcaagttaaaataaggctagtccgttatcaacttgaaaaagtggcaccgagtcggtgctctcgtcgatggt

SEQ ID NO: 23065 - DNA, 108 bp, synthetic construct
  source 1..108: mol_type = other DNA
ctgtgctgaccatcgacaaggttttagagctagaaatagcaagttaaaataaggctagtccgttatcaacttgaaaaagtggcaccgagtcggtgctctcgtcgatgg

SEQ ID NO: 23066 - DNA, 146 bp, synthetic construct
  source 1..146: mol_type = other DNA
ggctgtgctgaccatcgacagttttagagctagaaatagcaagttaaaataaggctagtccgttatcaacttgaaaaagtggcaccgagtcggtgcacatggccccagcagcttcagtccctttctcgtcgatggtcagcacagcc

SEQ ID NO: 23067 - DNA, 145 bp, synthetic construct
  source 1..145: mol_type = other DNA
ggctgtgctgaccatcgacagttttagagctagaaatagcaagttaaaataaggctagtccgttatcaacttgaaaaagtggcaccgagtcggtgcacatggccccagcagcttcagtccctttctcgtcgatggtcagcacagc

SEQ ID NO: 23068 - DNA, 144 bp, synthetic construct
  source 1..144: mol_type = other DNA
ggctgtgctgaccatcgacagttttagagctagaaatagcaagttaaaataaggctagtccgttatcaacttgaaaaagtggcaccgagtcggtgcacatggccccagcagcttcagtccctttctcgtcgatggtcagcacag

SEQ ID NO: 23069 - DNA, 143 bp, synthetic construct
  source 1..143: mol_type = other DNA
ggctgtgctgaccatcgacagttttagagctagaaatagcaagttaaaataaggctagtccgttatcaacttgaaaaagtggcaccgagtcggtgcacatggccccagcagcttcagtccctttctcgtcgatggtcagcaca

SEQ ID NO: 23070 - DNA, 142 bp, synthetic construct
  source 1..142: mol_type = other DNA
ggctgtgctgaccatcgacagttttagagctagaaatagcaagttaaaataaggctagtccgttatcaacttgaaaaagtggcaccgagtcggtgcacatggccccagcagcttcagtccctttctcgtcgatggtcagcac

SEQ ID NO: 23071 - DNA, 141 bp, synthetic construct
  source 1..141: mol_type = other DNA
ggctgtgctgaccatcgacagttttagagctagaaatagcaagttaaaataaggctagtccgttatcaacttgaaaaagtggcaccgagtcggtgcacatggccccagcagcttcagtccctttctcgtcgatggtcagca

SEQ ID NO: 23072 - DNA, 140 bp, synthetic construct
  source 1..140: mol_type = other DNA
ggctgtgctgaccatcgacagttttagagctagaaatagcaagttaaaataaggctagtccgttatcaacttgaaaaagtggcaccgagtcggtgcacatggccccagcagcttcagtccctttctcgtcgatggtcagc

SEQ ID NO: 23073 - DNA, 139 bp, synthetic construct
  source 1..139: mol_type = other DNA
ggctgtgctgaccatcgacagttttagagctagaaatagcaagttaaaataaggctagtccgttatcaacttgaaaaagtggcaccgagtcggtgcacatggccccagcagcttcagtccctttctcgtcgatggtcag

SEQ ID NO: 23074 - DNA, 138 bp, synthetic construct
  source 1..138: mol_type = other DNA
ggctgtgctgaccatcgacagttttagagctagaaatagcaagttaaaataaggctagtccgttatcaacttgaaaaagtggcaccgagtcggtgcacatggccccagcagcttcagtccctttctcgtcgatggtca

SEQ ID NO: 23075 - DNA, 137 bp, synthetic construct
  source 1..137: mol_type = other DNA
ggctgtgctgaccatcgacagttttagagctagaaatagcaagttaaaataaggctagtccgttatcaacttgaaaaagtggcaccgagtcggtgcacatggccccagcagcttcagtccctttctcgtcgatggtc

SEQ ID NO: 23076 - DNA, 141 bp, synthetic construct
  source 1..141: mol_type = other DNA
ggctgtgctgaccatcgacagttttagagctagaaatagcaagttaaaataaggctagtccgttatcaacttgaaaaagtggcaccgagtcggtgcgccccagcagcttcagtccctttctcgtcgatggtcagcacagcc

SEQ ID NO: 23077 - DNA, 140 bp, synthetic construct
  source 1..140: mol_type = other DNA
ggctgtgctgaccatcgacagttttagagctagaaatagcaagttaaaataaggctagtccgttatcaacttgaaaaagtggcaccgagtcggtgcgccccagcagcttcagtccctttctcgtcgatggtcagcacagc

SEQ ID NO: 23078 - DNA, 139 bp, synthetic construct
  source 1..139: mol_type = other DNA
ggctgtgctgaccatcgacagttttagagctagaaatagcaagttaaaataaggctagtccgttatcaacttgaaaaagtggcaccgagtcggtgcgccccagcagcttcagtccctttctcgtcgatggtcagcacag

SEQ ID NO: 23079 - DNA, 138 bp, synthetic construct
  source 1..138: mol_type = other DNA
ggctgtgctgaccatcgacagttttagagctagaaatagcaagttaaaataaggctagtccgttatcaacttgaaaaagtggcaccgagtcggtgcgccccagcagcttcagtccctttctcgtcgatggtcagcaca

SEQ ID NO: 23080 - DNA, 137 bp, synthetic construct
  source 1..137: mol_type = other DNA
ggctgtgctgaccatcgacagttttagagctagaaatagcaagttaaaataaggctagtccgttatcaacttgaaaaagtggcaccgagtcggtgcgccccagcagcttcagtccctttctcgtcgatggtcagcac

SEQ ID NO: 23081 - DNA, 136 bp, synthetic construct
  source 1..136: mol_type = other DNA
ggctgtgctgaccatcgacagttttagagctagaaatagcaagttaaaataaggctagtccgttatcaacttgaaaaagtggcaccgagtcggtgcgccccagcagcttcagtccctttctcgtcgatggtcagca

SEQ ID NO: 23082 - DNA, 135 bp, synthetic construct
  source 1..135: mol_type = other DNA
ggctgtgctgaccatcgacagttttagagctagaaatagcaagttaaaataaggctagtccgttatcaacttgaaaaagtggcaccgagtcggtgcgccccagcagcttcagtccctttctcgtcgatggtcagc

SEQ ID NO: 23083 - DNA, 134 bp, synthetic construct
  source 1..134: mol_type = other DNA
ggctgtgctgaccatcgacagttttagagctagaaatagcaagttaaaataaggctagtccgttatcaacttgaaaaagtggcaccgagtcggtgcgccccagcagcttcagtccctttctcgtcgatggtcag

SEQ ID NO: 23084 - DNA, 133 bp, synthetic construct
  source 1..133: mol_type = other DNA
ggctgtgctgaccatcgacagttttagagctagaaatagcaagttaaaataaggctagtccgttatcaacttgaaaaagtggcaccgagtcggtgcgccccagcagcttcagtccctttctcgtcgatggtca

SEQ ID NO: 23085 - DNA, 132 bp, synthetic construct
  source 1..132: mol_type = other DNA
ggctgtgctgaccatcgacagttttagagctagaaatagcaagttaaaataaggctagtccgttatcaacttgaaaaagtggcaccgagtcggtgcgccccagcagcttcagtccctttctcgtcgatggtc

SEQ ID NO: 23086 - DNA, 136 bp, synthetic construct
  source 1..136: mol_type = other DNA
ggctgtgctgaccatcgacagttttagagctagaaatagcaagttaaaataaggctagtccgttatcaacttgaaaaagtggcaccgagtcggtgcagcagcttcagtccctttctcgtcgatggtcagcacagcc

SEQ ID NO: 23087 - DNA, 135 bp, synthetic construct
  source 1..135: mol_type = other DNA
ggctgtgctgaccatcgacagttttagagctagaaatagcaagttaaaataaggctagtccgttatcaacttgaaaaagtggcaccgagtcggtgcagcagcttcagtccctttctcgtcgatggtcagcacagc

SEQ ID NO: 23088 - DNA, 134 bp, synthetic construct
  source 1..134: mol_type = other DNA
ggctgtgctgaccatcgacagttttagagctagaaatagcaagttaaaataaggctagtccgttatcaacttgaaaaagtggcaccgagtcggtgcagcagcttcagtccctttctcgtcgatggtcagcacag

SEQ ID NO: 23089 - DNA, 133 bp, synthetic construct
  source 1..133: mol_type = other DNA
ggctgtgctgaccatcgacagttttagagctagaaatagcaagttaaaataaggctagtccgttatcaacttgaaaaagtggcaccgagtcggtgcagcagcttcagtccctttctcgtcgatggtcagcaca

SEQ ID NO: 23090 - DNA, 132 bp, synthetic construct
  source 1..132: mol_type = other DNA
ggctgtgctgaccatcgacagttttagagctagaaatagcaagttaaaataaggctagtccgttatcaacttgaaaaagtggcaccgagtcggtgcagcagcttcagtccctttctcgtcgatggtcagcac

SEQ ID NO: 23091 - DNA, 131 bp, synthetic construct
  source 1..131: mol_type = other DNA
ggctgtgctgaccatcgacagttttagagctagaaatagcaagttaaaataaggctagtccgttatcaacttgaaaaagtggcaccgagtcggtgcagcagcttcagtccctttctcgtcgatggtcagca

SEQ ID NO: 23092 - DNA, 130 bp, synthetic construct
  source 1..130: mol_type = other DNA
ggctgtgctgaccatcgacagttttagagctagaaatagcaagttaaaataaggctagtccgttatcaacttgaaaaagtggcaccgagtcggtgcagcagcttcagtccctttctcgtcgatggtcagc

SEQ ID NO: 23093 - DNA, 129 bp, synthetic construct
  source 1..129: mol_type = other DNA
ggctgtgctgaccatcgacagttttagagctagaaatagcaagttaaaataaggctagtccgttatcaacttgaaaaagtggcaccgagtcggtgcagcagcttcagtccctttctcgtcgatggtcag

SEQ ID NO: 23094 - DNA, 128 bp, synthetic construct
  source 1..128: mol_type = other DNA
ggctgtgctgaccatcgacagttttagagctagaaatagcaagttaaaataaggctagtccgttatcaacttgaaaaagtggcaccgagtcggtgcagcagcttcagtccctttctcgtcgatggtca

SEQ ID NO: 23095 - DNA, 127 bp, synthetic construct
  source 1..127: mol_type = other DNA
ggctgtgctgaccatcgacagttttagagctagaaatagcaagttaaaataaggctagtccgttatcaacttgaaaaagtggcaccgagtcggtgcagcagcttcagtccctttctcgtcgatggtc

SEQ ID NO: 23096 - DNA, 130 bp, synthetic construct
  source 1..130: mol_type = other DNA
ggctgtgctgaccatcgacagttttagagctagaaatagcaagttaaaataaggctagtccgttatcaacttgaaaaagtggcaccgagtcggtgcttcagtccctttctcgtcgatggtcagcacagcc

SEQ ID NO: 23097 - DNA, 129 bp, synthetic construct
  source 1..129: mol_type = other DNA
ggctgtgctgaccatcgacagttttagagctagaaatagcaagttaaaataaggctagtccgttatcaacttgaaaaagtggcaccgagtcggtgcttcagtccctttctcgtcgatggtcagcacagc

SEQ ID NO: 23098 - DNA, 128 bp, synthetic construct
  source 1..128: mol_type = other DNA
ggctgtgctgaccatcgacagttttagagctagaaatagcaagttaaaataaggctagtccgttatcaacttgaaaaagtggcaccgagtcggtgcttcagtccctttctcgtcgatggtcagcacag

SEQ ID NO: 23099 - DNA, 127 bp, synthetic construct
  source 1..127: mol_type = other DNA
ggctgtgctgaccatcgacagttttagagctagaaatagcaagttaaaataaggctagtccgttatcaacttgaaaaagtggcaccgagtcggtgcttcagtccctttctcgtcgatggtcagcaca

SEQ ID NO: 23100 - DNA, 126 bp, synthetic construct
  source 1..126: mol_type = other DNA
ggctgtgctgaccatcgacagttttagagctagaaatagcaagttaaaataaggctagtccgttatcaacttgaaaaagtggcaccgagtcggtgcttcagtccctttctcgtcgatggtcagcac

SEQ ID NO: 23101 - DNA, 125 bp, synthetic construct
  source 1..125: mol_type = other DNA
ggctgtgctgaccatcgacagttttagagctagaaatagcaagttaaaataaggctagtccgttatcaacttgaaaaagtggcaccgagtcggtgcttcagtccctttctcgtcgatggtcagca

SEQ ID NO: 23102 - DNA, 124 bp, synthetic construct
  source 1..124: mol_type = other DNA
ggctgtgctgaccatcgacagttttagagctagaaatagcaagttaaaataaggctagtccgttatcaacttgaaaaagtggcaccgagtcggtgcttcagtccctttctcgtcgatggtcagc

SEQ ID NO: 23103 - DNA, 123 bp, synthetic construct
  source 1..123: mol_type = other DNA
ggctgtgctgaccatcgacagttttagagctagaaatagcaagttaaaataaggctagtccgttatcaacttgaaaaagtggcaccgagtcggtgcttcagtccctttctcgtcgatggtcag

SEQ ID NO: 23104 - DNA, 122 bp, synthetic construct
  source 1..122: mol_type = other DNA
ggctgtgctgaccatcgacagttttagagctagaaatagcaagttaaaataaggctagtccgttatcaacttgaaaaagtggcaccgagtcggtgcttcagtccctttctcgtcgatggtca

SEQ ID NO: 23105 - DNA, 121 bp, synthetic construct
  source 1..121: mol_type = other DNA
ggctgtgctgaccatcgacagttttagagctagaaatagcaagttaaaataaggctagtccgttatcaacttgaaaaagtggcaccgagtcggtgcttcagtccctttctcgtcgatggtc

SEQ ID NO: 23106 - DNA, 127 bp, synthetic construct
  source 1..127: mol_type = other DNA
ggctgtgctgaccatcgacagttttagagctagaaatagcaagttaaaataaggctagtccgttatcaacttgaaaaagtggcaccgagtcggtgcagtccctttctcgtcgatggtcagcacagcc

SEQ ID NO: 23107 - DNA, 126 bp, synthetic construct
  source 1..126: mol_type = other DNA
ggctgtgctgaccatcgacagttttagagctagaaatagcaagttaaaataaggctagtccgttatcaacttgaaaaagtggcaccgagtcggtgcagtccctttctcgtcgatggtcagcacagc

SEQ ID NO: 23108 - DNA, 125 bp, synthetic construct
  source 1..125: mol_type = other DNA
ggctgtgctgaccatcgacagttttagagctagaaatagcaagttaaaataaggctagtccgttatcaacttgaaaaagtggcaccgagtcggtgcagtccctttctcgtcgatggtcagcacag

SEQ ID NO: 23109 - DNA, 124 bp, synthetic construct
  source 1..124: mol_type = other DNA
ggctgtgctgaccatcgacagttttagagctagaaatagcaagttaaaataaggctagtccgttatcaacttgaaaaagtggcaccgagtcggtgcagtccctttctcgtcgatggtcagcaca

SEQ ID NO: 23110 - DNA, 123 bp, synthetic construct
  source 1..123: mol_type = other DNA
ggctgtgctgaccatcgacagttttagagctagaaatagcaagttaaaataaggctagtccgttatcaacttgaaaaagtggcaccgagtcggtgcagtccctttctcgtcgatggtcagcac

SEQ ID NO: 23111 - DNA, 122 bp, synthetic construct
  source 1..122: mol_type = other DNA
ggctgtgctgaccatcgacagttttagagctagaaatagcaagttaaaataaggctagtccgttatcaacttgaaaaagtggcaccgagtcggtgcagtccctttctcgtcgatggtcagca

SEQ ID NO: 23112 - DNA, 121 bp, synthetic construct
  source 1..121: mol_type = other DNA
ggctgtgctgaccatcgacagttttagagctagaaatagcaagttaaaataaggctagtccgttatcaacttgaaaaagtggcaccgagtcggtgcagtccctttctcgtcgatggtcagc

SEQ ID NO: 23113 - DNA, 120 bp, synthetic construct
  source 1..120: mol_type = other DNA
ggctgtgctgaccatcgacagttttagagctagaaatagcaagttaaaataaggctagtccgttatcaacttgaaaaagtggcaccgagtcggtgcagtccctttctcgtcgatggtcag

SEQ ID NO: 23114 - DNA, 119 bp, synthetic construct
  source 1..119: mol_type = other DNA
ggctgtgctgaccatcgacagttttagagctagaaatagcaagttaaaataaggctagtccgttatcaacttgaaaaagtggcaccgagtcggtgcagtccctttctcgtcgatggtca

SEQ ID NO: 23115 - DNA, 118 bp, synthetic construct
  source 1..118: mol_type = other DNA
ggctgtgctgaccatcgacagttttagagctagaaatagcaagttaaaataaggctagtccgttatcaacttgaaaaagtggcaccgagtcggtgcagtccctttctcgtcgatggtc

SEQ ID NO: 23116 - DNA, 125 bp, synthetic construct
  source 1..125: mol_type = other DNA
ggctgtgctgaccatcgacagttttagagctagaaatagcaagttaaaataaggctagtccgttatcaacttgaaaaagtggcaccgagtcggtgctccctttctcgtcgatggtcagcacagcc

SEQ ID NO: 23117 - DNA, 124 bp, synthetic construct
  source 1..124: mol_type = other DNA
ggctgtgctgaccatcgacagttttagagctagaaatagcaagttaaaataaggctagtccgttatcaacttgaaaaagtggcaccgagtcggtgctccctttctcgtcgatggtcagcacagc

SEQ ID NO: 23118 - DNA, 123 bp, synthetic construct
  source 1..123: mol_type = other DNA
ggctgtgctgaccatcgacagttttagagctagaaatagcaagttaaaataaggctagtccgttatcaacttgaaaaagtggcaccgagtcggtgctccctttctcgtcgatggtcagcacag

SEQ ID NO: 23119 - DNA, 122 bp, synthetic construct
  source 1..122: mol_type = other DNA
ggctgtgctgaccatcgacagttttagagctagaaatagcaagttaaaataaggctagtccgttatcaacttgaaaaagtggcaccgagtcggtgctccctttctcgtcgatggtcagcaca

SEQ ID NO: 23120 - DNA, 121 bp, synthetic construct
  source 1..121: mol_type = other DNA
ggctgtgctgaccatcgacagttttagagctagaaatagcaagttaaaataaggctagtccgttatcaacttgaaaaagtggcaccgagtcggtgctccctttctcgtcgatggtcagcac

SEQ ID NO: 23121 - DNA, 120 bp, synthetic construct
  source 1..120: mol_type = other DNA
ggctgtgctgaccatcgacagttttagagctagaaatagcaagttaaaataaggctagtccgttatcaacttgaaaaagtggcaccgagtcggtgctccctttctcgtcgatggtcagca

SEQ ID NO: 23122 - DNA, 119 bp, synthetic construct
  source 1..119: mol_type = other DNA
ggctgtgctgaccatcgacagttttagagctagaaatagcaagttaaaataaggctagtccgttatcaacttgaaaaagtggcaccgagtcggtgctccctttctcgtcgatggtcagc

SEQ ID NO: 23123 - DNA, 118 bp, synthetic construct
  source 1..118: mol_type = other DNA
ggctgtgctgaccatcgacagttttagagctagaaatagcaagttaaaataaggctagtccgttatcaacttgaaaaagtggcaccgagtcggtgctccctttctcgtcgatggtcag

SEQ ID NO: 23124 - DNA, 117 bp, synthetic construct
  source 1..117: mol_type = other DNA
ggctgtgctgaccatcgacagttttagagctagaaatagcaagttaaaataaggctagtccgttatcaacttgaaaaagtggcaccgagtcggtgctccctttctcgtcgatggtca

SEQ ID NO: 23125 - DNA, 116 bp, synthetic construct
  source 1..116: mol_type = other DNA
ggctgtgctgaccatcgacagttttagagctagaaatagcaagttaaaataaggctagtccgttatcaacttgaaaaagtggcaccgagtcggtgctccctttctcgtcgatggtc

SEQ ID NO: 23126 - DNA, 123 bp, synthetic construct
  source 1..123: mol_type = other DNA
ggctgtgctgaccatcgacagttttagagctagaaatagcaagttaaaataaggctagtccgttatcaacttgaaaaagtggcaccgagtcggtgccctttctcgtcgatggtcagcacagcc

SEQ ID NO: 23127 - DNA, 122 bp, synthetic construct
  source 1..122: mol_type = other DNA
ggctgtgctgaccatcgacagttttagagctagaaatagcaagttaaaataaggctagtccgttatcaacttgaaaaagtggcaccgagtcggtgccctttctcgtcgatggtcagcacagc

SEQ ID NO: 23128 - DNA, 121 bp, synthetic construct
  source 1..121: mol_type = other DNA
ggctgtgctgaccatcgacagttttagagctagaaatagcaagttaaaataaggctagtccgttatcaacttgaaaaagtggcaccgagtcggtgccctttctcgtcgatggtcagcacag

SEQ ID NO: 23129 - DNA, 120 bp, synthetic construct
  source 1..120: mol_type = other DNA
ggctgtgctgaccatcgacagttttagagctagaaatagcaagttaaaataaggctagtccgttatcaacttgaaaaagtggcaccgagtcggtgccctttctcgtcgatggtcagcaca

SEQ ID NO: 23130 - DNA, 119 bp, synthetic construct
  source 1..119: mol_type = other DNA
ggctgtgctgaccatcgacagttttagagctagaaatagcaagttaaaataaggctagtccgttatcaacttgaaaaagtggcaccgagtcggtgccctttctcgtcgatggtcagcac

SEQ ID NO: 23131 - DNA, 118 bp, synthetic construct
  source 1..118: mol_type = other DNA
ggctgtgctgaccatcgacagttttagagctagaaatagcaagttaaaataaggctagtccgttatcaacttgaaaaagtggcaccgagtcggtgccctttctcgtcgatggtcagca

SEQ ID NO: 23132 - DNA, 117 bp, synthetic construct
  source 1..117: mol_type = other DNA
ggctgtgctgaccatcgacagttttagagctagaaatagcaagttaaaataaggctagtccgttatcaacttgaaaaagtggcaccgagtcggtgccctttctcgtcgatggtcagc

SEQ ID NO: 23133 - DNA, 116 bp, synthetic construct
  source 1..116: mol_type = other DNA
ggctgtgctgaccatcgacagttttagagctagaaatagcaagttaaaataaggctagtccgttatcaacttgaaaaagtggcaccgagtcggtgccctttctcgtcgatggtcag

SEQ ID NO: 23134 - DNA, 115 bp, synthetic construct
  source 1..115: mol_type = other DNA
ggctgtgctgaccatcgacagttttagagctagaaatagcaagttaaaataaggctagtccgttatcaacttgaaaaagtggcaccgagtcggtgccctttctcgtcgatggtca

SEQ ID NO: 23135 - DNA, 114 bp, synthetic construct
  source 1..114: mol_type = other DNA
ggctgtgctgaccatcgacagttttagagctagaaatagcaagttaaaataaggctagtccgttatcaacttgaaaaagtggcaccgagtcggtgccctttctcgtcgatggtc

SEQ ID NO: 23136 - DNA, 121 bp, synthetic construct
  source 1..121: mol_type = other DNA
ggctgtgctgaccatcgacagttttagagctagaaatagcaagttaaaataaggctagtccgttatcaacttgaaaaagtggcaccgagtcggtgctttctcgtcgatggtcagcacagcc

SEQ ID NO: 23137 - DNA, 120 bp, synthetic construct
  source 1..120: mol_type = other DNA
ggctgtgctgaccatcgacagttttagagctagaaatagcaagttaaaataaggctagtccgttatcaacttgaaaaagtggcaccgagtcggtgctttctcgtcgatggtcagcacagc

SEQ ID NO: 23138 - DNA, 119 bp, synthetic construct
  source 1..119: mol_type = other DNA
ggctgtgctgaccatcgacagttttagagctagaaatagcaagttaaaataaggctagtccgttatcaacttgaaaaagtggcaccgagtcggtgctttctcgtcgatggtcagcacag

SEQ ID NO: 23139 - DNA, 118 bp, synthetic construct
  source 1..118: mol_type = other DNA
ggctgtgctgaccatcgacagttttagagctagaaatagcaagttaaaataaggctagtccgttatcaacttgaaaaagtggcaccgagtcggtgctttctcgtcgatggtcagcaca

SEQ ID NO: 23140 - DNA, 117 bp, synthetic construct
  source 1..117: mol_type = other DNA
ggctgtgctgaccatcgacagttttagagctagaaatagcaagttaaaataaggctagtccgttatcaacttgaaaaagtggcaccgagtcggtgctttctcgtcgatggtcagcac

SEQ ID NO: 23141 - DNA, 116 bp, synthetic construct
  source 1..116: mol_type = other DNA
ggctgtgctgaccatcgacagttttagagctagaaatagcaagttaaaataaggctagtccgttatcaacttgaaaaagtggcaccgagtcggtgctttctcgtcgatggtcagca

SEQ ID NO: 23142 - DNA, 115 bp, synthetic construct
  source 1..115: mol_type = other DNA
ggctgtgctgaccatcgacagttttagagctagaaatagcaagttaaaataaggctagtccgttatcaacttgaaaaagtggcaccgagtcggtgctttctcgtcgatggtcagc

SEQ ID NO: 23143 - DNA, 114 bp, synthetic construct
  source 1..114: mol_type = other DNA
ggctgtgctgaccatcgacagttttagagctagaaatagcaagttaaaataaggctagtccgttatcaacttgaaaaagtggcaccgagtcggtgctttctcgtcgatggtcag

SEQ ID NO: 23144 - DNA, 113 bp, synthetic construct
  source 1..113: mol_type = other DNA
ggctgtgctgaccatcgacagttttagagctagaaatagcaagttaaaataaggctagtccgttatcaacttgaaaaagtggcaccgagtcggtgctttctcgtcgatggtca

SEQ ID NO: 23145 - DNA, 112 bp, synthetic construct
  source 1..112: mol_type = other DNA
ggctgtgctgaccatcgacagttttagagctagaaatagcaagttaaaataaggctagtccgttatcaacttgaaaaagtggcaccgagtcggtgctttctcgtcgatggtc

SEQ ID NO: 23146 - DNA, 119 bp, synthetic construct
  source 1..119: mol_type = other DNA
ggctgtgctgaccatcgacagttttagagctagaaatagcaagttaaaataaggctagtccgttatcaacttgaaaaagtggcaccgagtcggtgctctcgtcgatggtcagcacagcc

SEQ ID NO: 23147 - DNA, 118 bp, synthetic construct
  source 1..118: mol_type = other DNA
ggctgtgctgaccatcgacagttttagagctagaaatagcaagttaaaataaggctagtccgttatcaacttgaaaaagtggcaccgagtcggtgctctcgtcgatggtcagcacagc

SEQ ID NO: 23148 - DNA, 117 bp, synthetic construct
  source 1..117: mol_type = other DNA
ggctgtgctgaccatcgacagttttagagctagaaatagcaagttaaaataaggctagtccgttatcaacttgaaaaagtggcaccgagtcggtgctctcgtcgatggtcagcacag

SEQ ID NO: 23149 - DNA, 116 bp, synthetic construct
  source 1..116: mol_type = other DNA
ggctgtgctgaccatcgacagttttagagctagaaatagcaagttaaaataaggctagtccgttatcaacttgaaaaagtggcaccgagtcggtgctctcgtcgatggtcagcaca

SEQ ID NO: 23150 - DNA, 115 bp, synthetic construct
  source 1..115: mol_type = other DNA
ggctgtgctgaccatcgacagttttagagctagaaatagcaagttaaaataaggctagtccgttatcaacttgaaaaagtggcaccgagtcggtgctctcgtcgatggtcagcac

SEQ ID NO: 23151 - DNA, 114 bp, synthetic construct
  source 1..114: mol_type = other DNA
ggctgtgctgaccatcgacagttttagagctagaaatagcaagttaaaataaggctagtccgttatcaacttgaaaaagtggcaccgagtcggtgctctcgtcgatggtcagca

SEQ ID NO: 23152 - DNA, 113 bp, synthetic construct
  source 1..113: mol_type = other DNA
ggctgtgctgaccatcgacagttttagagctagaaatagcaagttaaaataaggctagtccgttatcaacttgaaaaagtggcaccgagtcggtgctctcgtcgatggtcagc

SEQ ID NO: 23153 - DNA, 112 bp, synthetic construct
  source 1..112: mol_type = other DNA
ggctgtgctgaccatcgacagttttagagctagaaatagcaagttaaaataaggctagtccgttatcaacttgaaaaagtggcaccgagtcggtgctctcgtcgatggtcag

SEQ ID NO: 23154 - DNA, 111 bp, synthetic construct
  source 1..111: mol_type = other DNA
ggctgtgctgaccatcgacagttttagagctagaaatagcaagttaaaataaggctagtccgttatcaacttgaaaaagtggcaccgagtcggtgctctcgtcgatggtca

SEQ ID NO: 23155 - DNA, 110 bp, synthetic construct
  source 1..110: mol_type = other DNA
ggctgtgctgaccatcgacagttttagagctagaaatagcaagttaaaataaggctagtccgttatcaacttgaaaaagtggcaccgagtcggtgctctcgtcgatggtc

SEQ ID NO: 23156 - DNA, 147 bp, synthetic construct
  source 1..147: mol_type = other DNA
aggctgtgctgaccatcgacgttttagagctagaaatagcaagttaaaataaggctagtccgttatcaacttgaaaaagtggcaccgagtcggtgcacatggccccagcagcttcagtccctttctcgtcgatggtcagcacagcct

SEQ ID NO: 23157 - DNA, 146 bp, synthetic construct
  source 1..146: mol_type = other DNA
aggctgtgctgaccatcgacgttttagagctagaaatagcaagttaaaataaggctagtccgttatcaacttgaaaaagtggcaccgagtcggtgcacatggccccagcagcttcagtccctttctcgtcgatggtcagcacagcc

SEQ ID NO: 23158 - DNA, 145 bp, synthetic construct
  source 1..145: mol_type = other DNA
aggctgtgctgaccatcgacgttttagagctagaaatagcaagttaaaataaggctagtccgttatcaacttgaaaaagtggcaccgagtcggtgcacatggccccagcagcttcagtccctttctcgtcgatggtcagcacagc

SEQ ID NO: 23159 - DNA, 144 bp, synthetic construct
  source 1..144: mol_type = other DNA
aggctgtgctgaccatcgacgttttagagctagaaatagcaagttaaaataaggctagtccgttatcaacttgaaaaagtggcaccgagtcggtgcacatggccccagcagcttcagtccctttctcgtcgatggtcagcacag

SEQ ID NO: 23160 - DNA, 143 bp, synthetic construct
  source 1..143: mol_type = other DNA
aggctgtgctgaccatcgacgttttagagctagaaatagcaagttaaaataaggctagtccgttatcaacttgaaaaagtggcaccgagtcggtgcacatggccccagcagcttcagtccctttctcgtcgatggtcagcaca

SEQ ID NO: 23161 - DNA, 142 bp, synthetic construct
  source 1..142: mol_type = other DNA
aggctgtgctgaccatcgacgttttagagctagaaatagcaagttaaaataaggctagtccgttatcaacttgaaaaagtggcaccgagtcggtgcacatggccccagcagcttcagtccctttctcgtcgatggtcagcac

SEQ ID NO: 23162 - DNA, 141 bp, synthetic construct
  source 1..141: mol_type = other DNA
aggctgtgctgaccatcgacgttttagagctagaaatagcaagttaaaataaggctagtccgttatcaacttgaaaaagtggcaccgagtcggtgcacatggccccagcagcttcagtccctttctcgtcgatggtcagca

SEQ ID NO: 23163 - DNA, 140 bp, synthetic construct
  source 1..140: mol_type = other DNA
aggctgtgctgaccatcgacgttttagagctagaaatagcaagttaaaataaggctagtccgttatcaacttgaaaaagtggcaccgagtcggtgcacatggccccagcagcttcagtccctttctcgtcgatggtcagc

SEQ ID NO: 23164 - DNA, 139 bp, synthetic construct
  source 1..139: mol_type = other DNA
aggctgtgctgaccatcgacgttttagagctagaaatagcaagttaaaataaggctagtccgttatcaacttgaaaaagtggcaccgagtcggtgcacatggccccagcagcttcagtccctttctcgtcgatggtcag

SEQ ID NO: 23165 - DNA, 138 bp, synthetic construct
  source 1..138: mol_type = other DNA
aggctgtgctgaccatcgacgttttagagctagaaatagcaagttaaaataaggctagtccgttatcaacttgaaaaagtggcaccgagtcggtgcacatggccccagcagcttcagtccctttctcgtcgatggtca

SEQ ID NO: 23166 - DNA, 142 bp, synthetic construct
  source 1..142: mol_type = other DNA
aggctgtgctgaccatcgacgttttagagctagaaatagcaagttaaaataaggctagtccgttatcaacttgaaaaagtggcaccgagtcggtgcgccccagcagcttcagtccctttctcgtcgatggtcagcacagcct

SEQ ID NO: 23167 - DNA, 141 bp, synthetic construct
  source 1..141: mol_type = other DNA
aggctgtgctgaccatcgacgttttagagctagaaatagcaagttaaaataaggctagtccgttatcaacttgaaaaagtggcaccgagtcggtgcgccccagcagcttcagtccctttctcgtcgatggtcagcacagcc

SEQ ID NO: 23168 - DNA, 140 bp, synthetic construct
  source 1..140: mol_type = other DNA
aggctgtgctgaccatcgacgttttagagctagaaatagcaagttaaaataaggctagtccgttatcaacttgaaaaagtggcaccgagtcggtgcgccccagcagcttcagtccctttctcgtcgatggtcagcacagc

SEQ ID NO: 23169 - DNA, 139 bp, synthetic construct
  source 1..139: mol_type = other DNA
aggctgtgctgaccatcgacgttttagagctagaaatagcaagttaaaataaggctagtccgttatcaacttgaaaaagtggcaccgagtcggtgcgccccagcagcttcagtccctttctcgtcgatggtcagcacag

SEQ ID NO: 23170 - DNA, 138 bp, synthetic construct
  source 1..138: mol_type = other DNA
aggctgtgctgaccatcgacgttttagagctagaaatagcaagttaaaataaggctagtccgttatcaacttgaaaaagtggcaccgagtcggtgcgccccagcagcttcagtccctttctcgtcgatggtcagcaca

SEQ ID NO: 23171 - DNA, 137 bp, synthetic construct
  source 1..137: mol_type = other DNA
aggctgtgctgaccatcgacgttttagagctagaaatagcaagttaaaataaggctagtccgttatcaacttgaaaaagtggcaccgagtcggtgcgccccagcagcttcagtccctttctcgtcgatggtcagcac

SEQ ID NO: 23172 - DNA, 136 bp, synthetic construct
  source 1..136: mol_type = other DNA
aggctgtgctgaccatcgacgttttagagctagaaatagcaagttaaaataaggctagtccgttatcaacttgaaaaagtggcaccgagtcggtgcgccccagcagcttcagtccctttctcgtcgatggtcagca

SEQ ID NO: 23173 - DNA, 135 bp, synthetic construct
  source 1..135: mol_type = other DNA
aggctgtgctgaccatcgacgttttagagctagaaatagcaagttaaaataaggctagtccgttatcaacttgaaaaagtggcaccgagtcggtgcgccccagcagcttcagtccctttctcgtcgatggtcagc

SEQ ID NO: 23174 - DNA, 134 bp, synthetic construct
  source 1..134: mol_type = other DNA
aggctgtgctgaccatcgacgttttagagctagaaatagcaagttaaaataaggctagtccgttatcaacttgaaaaagtggcaccgagtcggtgcgccccagcagcttcagtccctttctcgtcgatggtcag

SEQ ID NO: 23175 - DNA, 133 bp, synthetic construct
  source 1..133: mol_type = other DNA
aggctgtgctgaccatcgacgttttagagctagaaatagcaagttaaaataaggctagtccgttatcaacttgaaaaagtggcaccgagtcggtgcgccccagcagcttcagtccctttctcgtcgatggtca

SEQ ID NO: 23176 - DNA, 137 bp, synthetic construct
  source 1..137: mol_type = other DNA
aggctgtgctgaccatcgacgttttagagctagaaatagcaagttaaaataaggctagtccgttatcaacttgaaaaagtggcaccgagtcggtgcagcagcttcagtccctttctcgtcgatggtcagcacagcct

SEQ ID NO: 23177 - DNA, 136 bp, synthetic construct
  source 1..136: mol_type = other DNA
aggctgtgctgaccatcgacgttttagagctagaaatagcaagttaaaataaggctagtccgttatcaacttgaaaaagtggcaccgagtcggtgcagcagcttcagtccctttctcgtcgatggtcagcacagcc

SEQ ID NO: 23178 - DNA, 135 bp, synthetic construct
  source 1..135: mol_type = other DNA
aggctgtgctgaccatcgacgttttagagctagaaatagcaagttaaaataaggctagtccgttatcaacttgaaaaagtggcaccgagtcggtgcagcagcttcagtccctttctcgtcgatggtcagcacagc

SEQ ID NO: 23179 - DNA, 134 bp, synthetic construct
  source 1..134: mol_type = other DNA
aggctgtgctgaccatcgacgttttagagctagaaatagcaagttaaaataaggctagtccgttatcaacttgaaaaagtggcaccgagtcggtgcagcagcttcagtccctttctcgtcgatggtcagcacag

SEQ ID NO: 23180 - DNA, 133 bp, synthetic construct
  source 1..133: mol_type = other DNA
aggctgtgctgaccatcgacgttttagagctagaaatagcaagttaaaataaggctagtccgttatcaacttgaaaaagtggcaccgagtcggtgcagcagcttcagtccctttctcgtcgatggtcagcaca

SEQ ID NO: 23181 - DNA, 132 bp, synthetic construct
  source 1..132: mol_type = other DNA
aggctgtgctgaccatcgacgttttagagctagaaatagcaagttaaaataaggctagtccgttatcaacttgaaaaagtggcaccgagtcggtgcagcagcttcagtccctttctcgtcgatggtcagcac

SEQ ID NO: 23182 - DNA, 131 bp, synthetic construct
  source 1..131: mol_type = other DNA
aggctgtgctgaccatcgacgttttagagctagaaatagcaagttaaaataaggctagtccgttatcaacttgaaaaagtggcaccgagtcggtgcagcagcttcagtccctttctcgtcgatggtcagca

SEQ ID NO: 23183 - DNA, 130 bp, synthetic construct
  source 1..130: mol_type = other DNA
aggctgtgctgaccatcgacgttttagagctagaaatagcaagttaaaataaggctagtccgttatcaacttgaaaaagtggcaccgagtcggtgcagcagcttcagtccctttctcgtcgatggtcagc

SEQ ID NO: 23184 - DNA, 129 bp, synthetic construct
  source 1..129: mol_type = other DNA
aggctgtgctgaccatcgacgttttagagctagaaatagcaagttaaaataaggctagtccgttatcaacttgaaaaagtggcaccgagtcggtgcagcagcttcagtccctttctcgtcgatggtcag

SEQ ID NO: 23185 - DNA, 128 bp, synthetic construct
  source 1..128: mol_type = other DNA
aggctgtgctgaccatcgacgttttagagctagaaatagcaagttaaaataaggctagtccgttatcaacttgaaaaagtggcaccgagtcggtgcagcagcttcagtccctttctcgtcgatggtca

SEQ ID NO: 23186 - DNA, 131 bp, synthetic construct
  source 1..131: mol_type = other DNA
aggctgtgctgaccatcgacgttttagagctagaaatagcaagttaaaataaggctagtccgttatcaacttgaaaaagtggcaccgagtcggtgcttcagtccctttctcgtcgatggtcagcacagcct

SEQ ID NO: 23187 - DNA, 130 bp, synthetic construct
  source 1..130: mol_type = other DNA
aggctgtgctgaccatcgacgttttagagctagaaatagcaagttaaaataaggctagtccgttatcaacttgaaaaagtggcaccgagtcggtgcttcagtccctttctcgtcgatggtcagcacagcc

SEQ ID NO: 23188 - DNA, 129 bp, synthetic construct
  source 1..129: mol_type = other DNA
aggctgtgctgaccatcgacgttttagagctagaaatagcaagttaaaataaggctagtccgttatcaacttgaaaaagtggcaccgagtcggtgcttcagtccctttctcgtcgatggtcagcacagc

SEQ ID NO: 23189 - DNA, 128 bp, synthetic construct
  source 1..128: mol_type = other DNA
aggctgtgctgaccatcgacgttttagagctagaaatagcaagttaaaataaggctagtccgttatcaacttgaaaaagtggcaccgagtcggtgcttcagtccctttctcgtcgatggtcagcacag

SEQ ID NO: 23190 - DNA, 127 bp, synthetic construct
  source 1..127: mol_type = other DNA
aggctgtgctgaccatcgacgttttagagctagaaatagcaagttaaaataaggctagtccgttatcaacttgaaaaagtggcaccgagtcggtgcttcagtccctttctcgtcgatggtcagcaca

SEQ ID NO: 23191 - DNA, 126 bp, synthetic construct
  source 1..126: mol_type = other DNA
aggctgtgctgaccatcgacgttttagagctagaaatagcaagttaaaataaggctagtccgttatcaacttgaaaaagtggcaccgagtcggtgcttcagtccctttctcgtcgatggtcagcac

SEQ ID NO: 23192 - DNA, 125 bp, synthetic construct
  source 1..125: mol_type = other DNA
aggctgtgctgaccatcgacgttttagagctagaaatagcaagttaaaataaggctagtccgttatcaacttgaaaaagtggcaccgagtcggtgcttcagtccctttctcgtcgatggtcagca

SEQ ID NO: 23193 - DNA, 124 bp, synthetic construct
  source 1..124: mol_type = other DNA
aggctgtgctgaccatcgacgttttagagctagaaatagcaagttaaaataaggctagtccgttatcaacttgaaaaagtggcaccgagtcggtgcttcagtccctttctcgtcgatggtcagc

SEQ ID NO: 23194 - DNA, 123 bp, synthetic construct
  source 1..123: mol_type = other DNA
aggctgtgctgaccatcgacgttttagagctagaaatagcaagttaaaataaggctagtccgttatcaacttgaaaaagtggcaccgagtcggtgcttcagtccctttctcgtcgatggtcag

SEQ ID NO: 23195 - DNA, 122 bp, synthetic construct
  source 1..122: mol_type = other DNA
aggctgtgctgaccatcgacgttttagagctagaaatagcaagttaaaataaggctagtccgttatcaacttgaaaaagtggcaccgagtcggtgcttcagtccctttctcgtcgatggtca

SEQ ID NO: 23196 - DNA, 128 bp, synthetic construct
  source 1..128: mol_type = other DNA
aggctgtgctgaccatcgacgttttagagctagaaatagcaagttaaaataaggctagtccgttatcaacttgaaaaagtggcaccgagtcggtgcagtccctttctcgtcgatggtcagcacagcct

SEQ ID NO: 23197 - DNA, 127 bp, synthetic construct
  source 1..127: mol_type = other DNA
aggctgtgctgaccatcgacgttttagagctagaaatagcaagttaaaataaggctagtccgttatcaacttgaaaaagtggcaccgagtcggtgcagtccctttctcgtcgatggtcagcacagcc

SEQ ID NO: 23198 - DNA, 126 bp, synthetic construct
  source 1..126: mol_type = other DNA
aggctgtgctgaccatcgacgttttagagctagaaatagcaagttaaaataaggctagtccgttatcaacttgaaaaagtggcaccgagtcggtgcagtccctttctcgtcgatggtcagcacagc

SEQ ID NO: 23199 - DNA, 125 bp, synthetic construct
  source 1..125: mol_type = other DNA
aggctgtgctgaccatcgacgttttagagctagaaatagcaagttaaaataaggctagtccgttatcaacttgaaaaagtggcaccgagtcggtgcagtccctttctcgtcgatggtcagcacag

SEQ ID NO: 23200 - DNA, 124 bp, synthetic construct
  source 1..124: mol_type = other DNA
aggctgtgctgaccatcgacgttttagagctagaaatagcaagttaaaataaggctagtccgttatcaacttgaaaaagtggcaccgagtcggtgcagtccctttctcgtcgatggtcagcaca

SEQ ID NO: 23201 - DNA, 123 bp, synthetic construct
  source 1..123: mol_type = other DNA
aggctgtgctgaccatcgacgttttagagctagaaatagcaagttaaaataaggctagtccgttatcaacttgaaaaagtggcaccgagtcggtgcagtccctttctcgtcgatggtcagcac

SEQ ID NO: 23202 - DNA, 122 bp, synthetic construct
  source 1..122: mol_type = other DNA
aggctgtgctgaccatcgacgttttagagctagaaatagcaagttaaaataaggctagtccgttatcaacttgaaaaagtggcaccgagtcggtgcagtccctttctcgtcgatggtcagca

SEQ ID NO: 23203 - DNA, 121 bp, synthetic construct
  source 1..121: mol_type = other DNA
aggctgtgctgaccatcgacgttttagagctagaaatagcaagttaaaataaggctagtccgttatcaacttgaaaaagtggcaccgagtcggtgcagtccctttctcgtcgatggtcagc

SEQ ID NO: 23204 - DNA, 120 bp, synthetic construct
  source 1..120: mol_type = other DNA
aggctgtgctgaccatcgacgttttagagctagaaatagcaagttaaaataaggctagtccgttatcaacttgaaaaagtggcaccgagtcggtgcagtccctttctcgtcgatggtcag

SEQ ID NO: 23205 - DNA, 119 bp, synthetic construct
  source 1..119: mol_type = other DNA
aggctgtgctgaccatcgacgttttagagctagaaatagcaagttaaaataaggctagtccgttatcaacttgaaaaagtggcaccgagtcggtgcagtccctttctcgtcgatggtca

SEQ ID NO: 23206 - DNA, 126 bp, synthetic construct
  source 1..126: mol_type = other DNA
aggctgtgctgaccatcgacgttttagagctagaaatagcaagttaaaataaggctagtccgttatcaacttgaaaaagtggcaccgagtcggtgctccctttctcgtcgatggtcagcacagcct

SEQ ID NO: 23207 - DNA, 125 bp, synthetic construct
  source 1..125: mol_type = other DNA
aggctgtgctgaccatcgacgttttagagctagaaatagcaagttaaaataaggctagtccgttatcaacttgaaaaagtggcaccgagtcggtgctccctttctcgtcgatggtcagcacagcc

SEQ ID NO: 23208 - DNA, 124 bp, synthetic construct
  source 1..124: mol_type = other DNA
aggctgtgctgaccatcgacgttttagagctagaaatagcaagttaaaataaggctagtccgttatcaacttgaaaaagtggcaccgagtcggtgctccctttctcgtcgatggtcagcacagc

SEQ ID NO: 23209 - DNA, 123 bp, synthetic construct
  source 1..123: mol_type = other DNA
aggctgtgctgaccatcgacgttttagagctagaaatagcaagttaaaataaggctagtccgttatcaacttgaaaaagtggcaccgagtcggtgctccctttctcgtcgatggtcagcacag

SEQ ID NO: 23210 - DNA, 122 bp, synthetic construct
  source 1..122: mol_type = other DNA
aggctgtgctgaccatcgacgttttagagctagaaatagcaagttaaaataaggctagtccgttatcaacttgaaaaagtggcaccgagtcggtgctccctttctcgtcgatggtcagcaca

SEQ ID NO: 23211 - DNA, 121 bp, synthetic construct
  source 1..121: mol_type = other DNA
aggctgtgctgaccatcgacgttttagagctagaaatagcaagttaaaataaggctagtccgttatcaacttgaaaaagtggcaccgagtcggtgctccctttctcgtcgatggtcagcac

SEQ ID NO: 23212 - DNA, 120 bp, synthetic construct
  source 1..120: mol_type = other DNA
aggctgtgctgaccatcgacgttttagagctagaaatagcaagttaaaataaggctagtccgttatcaacttgaaaaagtggcaccgagtcggtgctccctttctcgtcgatggtcagca

SEQ ID NO: 23213 - DNA, 119 bp, synthetic construct
  source 1..119: mol_type = other DNA
aggctgtgctgaccatcgacgttttagagctagaaatagcaagttaaaataaggctagtccgttatcaacttgaaaaagtggcaccgagtcggtgctccctttctcgtcgatggtcagc

SEQ ID NO: 23214 - DNA, 118 bp, synthetic construct
  source 1..118: mol_type = other DNA
aggctgtgctgaccatcgacgttttagagctagaaatagcaagttaaaataaggctagtccgttatcaacttgaaaaagtggcaccgagtcggtgctccctttctcgtcgatggtcag

SEQ ID NO: 23215 - DNA, 117 bp, synthetic construct
  source 1..117: mol_type = other DNA
aggctgtgctgaccatcgacgttttagagctagaaatagcaagttaaaataaggctagtccgttatcaacttgaaaaagtggcaccgagtcggtgctccctttctcgtcgatggtca

SEQ ID NO: 23216 - DNA, 124 bp, synthetic construct
  source 1..124: mol_type = other DNA
aggctgtgctgaccatcgacgttttagagctagaaatagcaagttaaaataaggctagtccgttatcaacttgaaaaagtggcaccgagtcggtgccctttctcgtcgatggtcagcacagcct

SEQ ID NO: 23217 - DNA, 123 bp, synthetic construct
  source 1..123: mol_type = other DNA
aggctgtgctgaccatcgacgttttagagctagaaatagcaagttaaaataaggctagtccgttatcaacttgaaaaagtggcaccgagtcggtgccctttctcgtcgatggtcagcacagcc

SEQ ID NO: 23218 - DNA, 122 bp, synthetic construct
  source 1..122: mol_type = other DNA
aggctgtgctgaccatcgacgttttagagctagaaatagcaagttaaaataaggctagtccgttatcaacttgaaaaagtggcaccgagtcggtgccctttctcgtcgatggtcagcacagc

SEQ ID NO: 23219 - DNA, 121 bp, synthetic construct
  source 1..121: mol_type = other DNA
aggctgtgctgaccatcgacgttttagagctagaaatagcaagttaaaataaggctagtccgttatcaacttgaaaaagtggcaccgagtcggtgccctttctcgtcgatggtcagcacag

SEQ ID NO: 23220 - DNA, 120 bp, synthetic construct
  source 1..120: mol_type = other DNA
aggctgtgctgaccatcgacgttttagagctagaaatagcaagttaaaataaggctagtccgttatcaacttgaaaaagtggcaccgagtcggtgccctttctcgtcgatggtcagcaca

SEQ ID NO: 23221 - DNA, 119 bp, synthetic construct
  source 1..119: mol_type = other DNA
aggctgtgctgaccatcgacgttttagagctagaaatagcaagttaaaataaggctagtccgttatcaacttgaaaaagtggcaccgagtcggtgccctttctcgtcgatggtcagcac

SEQ ID NO: 23222 - DNA, 118 bp, synthetic construct
  source 1..118: mol_type = other DNA
aggctgtgctgaccatcgacgttttagagctagaaatagcaagttaaaataaggctagtccgttatcaacttgaaaaagtggcaccgagtcggtgccctttctcgtcgatggtcagca

SEQ ID NO: 23223 - DNA, 117 bp, synthetic construct
  source 1..117: mol_type = other DNA
aggctgtgctgaccatcgacgttttagagctagaaatagcaagttaaaataaggctagtccgttatcaacttgaaaaagtggcaccgagtcggtgccctttctcgtcgatggtcagc

SEQ ID NO: 23224 - DNA, 116 bp, synthetic construct
  source 1..116: mol_type = other DNA
aggctgtgctgaccatcgacgttttagagctagaaatagcaagttaaaataaggctagtccgttatcaacttgaaaaagtggcaccgagtcggtgccctttctcgtcgatggtcag

SEQ ID NO: 23225 - DNA, 115 bp, synthetic construct
  source 1..115: mol_type = other DNA
aggctgtgctgaccatcgacgttttagagctagaaatagcaagttaaaataaggctagtccgttatcaacttgaaaaagtggcaccgagtcggtgccctttctcgtcgatggtca

SEQ ID NO: 23226 - DNA, 122 bp, synthetic construct
  source 1..122: mol_type = other DNA
aggctgtgctgaccatcgacgttttagagctagaaatagcaagttaaaataaggctagtccgttatcaacttgaaaaagtggcaccgagtcggtgctttctcgtcgatggtcagcacagcct

SEQ ID NO: 23227 - DNA, 121 bp, synthetic construct
  source 1..121: mol_type = other DNA
aggctgtgctgaccatcgacgttttagagctagaaatagcaagttaaaataaggctagtccgttatcaacttgaaaaagtggcaccgagtcggtgctttctcgtcgatggtcagcacagcc

SEQ ID NO: 23228 - DNA, 120 bp, synthetic construct
  source 1..120: mol_type = other DNA
aggctgtgctgaccatcgacgttttagagctagaaatagcaagttaaaataaggctagtccgttatcaacttgaaaaagtggcaccgagtcggtgctttctcgtcgatggtcagcacagc

SEQ ID NO: 23229 - DNA, 119 bp, synthetic construct
  source 1..119: mol_type = other DNA
aggctgtgctgaccatcgacgttttagagctagaaatagcaagttaaaataaggctagtccgttatcaacttgaaaaagtggcaccgagtcggtgctttctcgtcgatggtcagcacag

SEQ ID NO: 23230 - DNA, 118 bp, synthetic construct
  source 1..118: mol_type = other DNA
aggctgtgctgaccatcgacgttttagagctagaaatagcaagttaaaataaggctagtccgttatcaacttgaaaaagtggcaccgagtcggtgctttctcgtcgatggtcagcaca

SEQ ID NO: 23231 - DNA, 117 bp, synthetic construct
  source 1..117: mol_type = other DNA
aggctgtgctgaccatcgacgttttagagctagaaatagcaagttaaaataaggctagtccgttatcaacttgaaaaagtggcaccgagtcggtgctttctcgtcgatggtcagcac

SEQ ID NO: 23232 - DNA, 116 bp, synthetic construct
  source 1..116: mol_type = other DNA
aggctgtgctgaccatcgacgttttagagctagaaatagcaagttaaaataaggctagtccgttatcaacttgaaaaagtggcaccgagtcggtgctttctcgtcgatggtcagca

SEQ ID NO: 23233 - DNA, 115 bp, synthetic construct
  source 1..115: mol_type = other DNA
aggctgtgctgaccatcgacgttttagagctagaaatagcaagttaaaataaggctagtccgttatcaacttgaaaaagtggcaccgagtcggtgctttctcgtcgatggtcagc

SEQ ID NO: 23234 - DNA, 114 bp, synthetic construct
  source 1..114: mol_type = other DNA
aggctgtgctgaccatcgacgttttagagctagaaatagcaagttaaaataaggctagtccgttatcaacttgaaaaagtggcaccgagtcggtgctttctcgtcgatggtcag

SEQ ID NO: 23235 - DNA, 113 bp, synthetic construct
  source 1..113: mol_type = other DNA
aggctgtgctgaccatcgacgttttagagctagaaatagcaagttaaaataaggctagtccgttatcaacttgaaaaagtggcaccgagtcggtgctttctcgtcgatggtca

SEQ ID NO: 23236 - DNA, 120 bp, synthetic construct
  source 1..120: mol_type = other DNA
aggctgtgctgaccatcgacgttttagagctagaaatagcaagttaaaataaggctagtccgttatcaacttgaaaaagtggcaccgagtcggtgctctcgtcgatggtcagcacagcct

SEQ ID NO: 23237 - DNA, 119 bp, synthetic construct
  source 1..119: mol_type = other DNA
aggctgtgctgaccatcgacgttttagagctagaaatagcaagttaaaataaggctagtccgttatcaacttgaaaaagtggcaccgagtcggtgctctcgtcgatggtcagcacagcc

SEQ ID NO: 23238 - DNA, 118 bp, synthetic construct
  source 1..118: mol_type = other DNA
aggctgtgctgaccatcgacgttttagagctagaaatagcaagttaaaataaggctagtccgttatcaacttgaaaaagtggcaccgagtcggtgctctcgtcgatggtcagcacagc

SEQ ID NO: 23239 - DNA, 117 bp, synthetic construct
  source 1..117: mol_type = other DNA
aggctgtgctgaccatcgacgttttagagctagaaatagcaagttaaaataaggctagtccgttatcaacttgaaaaagtggcaccgagtcggtgctctcgtcgatggtcagcacag

SEQ ID NO: 23240 - DNA, 116 bp, synthetic construct
  source 1..116: mol_type = other DNA
aggctgtgctgaccatcgacgttttagagctagaaatagcaagttaaaataaggctagtccgttatcaacttgaaaaagtggcaccgagtcggtgctctcgtcgatggtcagcaca

SEQ ID NO: 23241 - DNA, 115 bp, synthetic construct
  source 1..115: mol_type = other DNA
aggctgtgctgaccatcgacgttttagagctagaaatagcaagttaaaataaggctagtccgttatcaacttgaaaaagtggcaccgagtcggtgctctcgtcgatggtcagcac

SEQ ID NO: 23242 - DNA, 114 bp, synthetic construct
  source 1..114: mol_type = other DNA
aggctgtgctgaccatcgacgttttagagctagaaatagcaagttaaaataaggctagtccgttatcaacttgaaaaagtggcaccgagtcggtgctctcgtcgatggtcagca

SEQ ID NO: 23243 - DNA, 113 bp, synthetic construct
  source 1..113: mol_type = other DNA
aggctgtgctgaccatcgacgttttagagctagaaatagcaagttaaaataaggctagtccgttatcaacttgaaaaagtggcaccgagtcggtgctctcgtcgatggtcagc

SEQ ID NO: 23244 - DNA, 112 bp, synthetic construct
  source 1..112: mol_type = other DNA
aggctgtgctgaccatcgacgttttagagctagaaatagcaagttaaaataaggctagtccgttatcaacttgaaaaagtggcaccgagtcggtgctctcgtcgatggtcag

SEQ ID NO: 23245 - DNA, 111 bp, synthetic construct
  source 1..111: mol_type = other DNA
aggctgtgctgaccatcgacgttttagagctagaaatagcaagttaaaataaggctagtccgttatcaacttgaaaaagtggcaccgagtcggtgctctcgtcgatggtca

SEQ ID NO: 23246 - DNA, 156 bp, synthetic construct
  source 1..156: mol_type = other DNA
aaggctgtgctgaccatcgagtctttgtactctggtaccagaagctacaaagataaggcttcatgccgaaatcaacaccctgtcattttatggcagggtgttttacatggccccagcagcttcagtccctttctcgtcgatggtcagcacagcctt

SEQ ID NO: 23247 - DNA, 155 bp, synthetic construct
  source 1..155: mol_type = other DNA
aaggctgtgctgaccatcgagtctttgtactctggtaccagaagctacaaagataaggcttcatgccgaaatcaacaccctgtcattttatggcagggtgttttacatggccccagcagcttcagtccctttctcgtcgatggtcagcacagcct

SEQ ID NO: 23248 - DNA, 154 bp, synthetic construct
  source 1..154: mol_type = other DNA
aaggctgtgctgaccatcgagtctttgtactctggtaccagaagctacaaagataaggcttcatgccgaaatcaacaccctgtcattttatggcagggtgttttacatggccccagcagcttcagtccctttctcgtcgatggtcagcacagcc

SEQ ID NO: 23249 - DNA, 153 bp, synthetic construct
  source 1..153: mol_type = other DNA
aaggctgtgctgaccatcgagtctttgtactctggtaccagaagctacaaagataaggcttcatgccgaaatcaacaccctgtcattttatggcagggtgttttacatggccccagcagcttcagtccctttctcgtcgatggtcagcacagc

SEQ ID NO: 23250 - DNA, 152 bp, synthetic construct
  source 1..152: mol_type = other DNA
aaggctgtgctgaccatcgagtctttgtactctggtaccagaagctacaaagataaggcttcatgccgaaatcaacaccctgtcattttatggcagggtgttttacatggccccagcagcttcagtccctttctcgtcgatggtcagcacag

SEQ ID NO: 23251 - DNA, 151 bp, synthetic construct
  source 1..151: mol_type = other DNA
aaggctgtgctgaccatcgagtctttgtactctggtaccagaagctacaaagataaggcttcatgccgaaatcaacaccctgtcattttatggcagggtgttttacatggccccagcagcttcagtccctttctcgtcgatggtcagcaca

SEQ ID NO: 23252 - DNA, 150 bp, synthetic construct
  source 1..150: mol_type = other DNA
aaggctgtgctgaccatcgagtctttgtactctggtaccagaagctacaaagataaggcttcatgccgaaatcaacaccctgtcattttatggcagggtgttttacatggccccagcagcttcagtccctttctcgtcgatggtcagcac

SEQ ID NO: 23253 - DNA, 149 bp, synthetic construct
  source 1..149: mol_type = other DNA
aaggctgtgctgaccatcgagtctttgtactctggtaccagaagctacaaagataaggcttcatgccgaaatcaacaccctgtcattttatggcagggtgttttacatggccccagcagcttcagtccctttctcgtcgatggtcagca

SEQ ID NO: 23254 - DNA, 148 bp, synthetic construct
  source 1..148: mol_type = other DNA
aaggctgtgctgaccatcgagtctttgtactctggtaccagaagctacaaagataaggcttcatgccgaaatcaacaccctgtcattttatggcagggtgttttacatggccccagcagcttcagtccctttctcgtcgatggtcagc

SEQ ID NO: 23255 - DNA, 147 bp, synthetic construct
  source 1..147: mol_type = other DNA
aaggctgtgctgaccatcgagtctttgtactctggtaccagaagctacaaagataaggcttcatgccgaaatcaacaccctgtcattttatggcagggtgttttacatggccccagcagcttcagtccctttctcgtcgatggtcag

SEQ ID NO: 23256 - DNA, 151 bp, synthetic construct
  source 1..151: mol_type = other DNA
aaggctgtgctgaccatcgagtctttgtactctggtaccagaagctacaaagataaggcttcatgccgaaatcaacaccctgtcattttatggcagggtgttttgccccagcagcttcagtccctttctcgtcgatggtcagcacagcctt

SEQ ID NO: 23257 - DNA, 150 bp, synthetic construct
  source 1..150: mol_type = other DNA
aaggctgtgctgaccatcgagtctttgtactctggtaccagaagctacaaagataaggcttcatgccgaaatcaacaccctgtcattttatggcagggtgttttgccccagcagcttcagtccctttctcgtcgatggtcagcacagcct

SEQ ID NO: 23258 - DNA, 149 bp, synthetic construct
  source 1..149: mol_type = other DNA
aaggctgtgctgaccatcgagtctttgtactctggtaccagaagctacaaagataaggcttcatgccgaaatcaacaccctgtcattttatggcagggtgttttgccccagcagcttcagtccctttctcgtcgatggtcagcacagcc

SEQ ID NO: 23259 - DNA, 148 bp, synthetic construct
  source 1..148: mol_type = other DNA
aaggctgtgctgaccatcgagtctttgtactctggtaccagaagctacaaagataaggcttcatgccgaaatcaacaccctgtcattttatggcagggtgttttgccccagcagcttcagtccctttctcgtcgatggtcagcacagc

SEQ ID NO: 23260 - DNA, 147 bp, synthetic construct
  source 1..147: mol_type = other DNA
aaggctgtgctgaccatcgagtctttgtactctggtaccagaagctacaaagataaggcttcatgccgaaatcaacaccctgtcattttatggcagggtgttttgccccagcagcttcagtccctttctcgtcgatggtcagcacag

SEQ ID NO: 23261 - DNA, 146 bp, synthetic construct; identical to SEQ ID NO: 19099
  source 1..146: mol_type = other DNA

SEQ ID NO: 23262 - DNA, 145 bp, synthetic construct
  source 1..145: mol_type = other DNA
aaggctgtgctgaccatcgagtctttgtactctggtaccagaagctacaaagataaggcttcatgccgaaatcaacaccctgtcattttatggcagggtgttttgccccagcagcttcagtccctttctcgtcgatggtcagcac

SEQ ID NO: 23263 - DNA, 144 bp, synthetic construct
  source 1..144: mol_type = other DNA
aaggctgtgctgaccatcgagtctttgtactctggtaccagaagctacaaagataaggcttcatgccgaaatcaacaccctgtcattttatggcagggtgttttgccccagcagcttcagtccctttctcgtcgatggtcagca

SEQ ID NO: 23264 - DNA, 143 bp, synthetic construct
  source 1..143: mol_type = other DNA
aaggctgtgctgaccatcgagtctttgtactctggtaccagaagctacaaagataaggcttcatgccgaaatcaacaccctgtcattttatggcagggtgttttgccccagcagcttcagtccctttctcgtcgatggtcagc

SEQ ID NO: 23265 - DNA, 142 bp, synthetic construct
  source 1..142: mol_type = other DNA
aaggctgtgctgaccatcgagtctttgtactctggtaccagaagctacaaagataaggcttcatgccgaaatcaacaccctgtcattttatggcagggtgttttgccccagcagcttcagtccctttctcgtcgatggtcag

SEQ ID NO: 23266 - DNA, 146 bp, synthetic construct
  source 1..146: mol_type = other DNA
aaggctgtgctgaccatcgagtctttgtactctggtaccagaagctacaaagataaggcttcatgccgaaatcaacaccctgtcattttatggcagggtgttttagcagcttcagtccctttctcgtcgatggtcagcacagcctt

SEQ ID NO: 23267 - DNA, 145 bp, synthetic construct
  source 1..145: mol_type = other DNA
aaggctgtgctgaccatcgagtctttgtactctggtaccagaagctacaaagataaggcttcatgccgaaatcaacaccctgtcattttatggcagggtgttttagcagcttcagtccctttctcgtcgatggtcagcacagcct

SEQ ID NO: 23268 - DNA, 144 bp, synthetic construct
  source 1..144: mol_type = other DNA
aaggctgtgctgaccatcgagtctttgtactctggtaccagaagctacaaagataaggcttcatgccgaaatcaacaccctgtcattttatggcagggtgttttagcagcttcagtccctttctcgtcgatggtcagcacagcc

SEQ ID NO: 23269 - DNA, 143 bp, synthetic construct
  source 1..143: mol_type = other DNA
aaggctgtgctgaccatcgagtctttgtactctggtaccagaagctacaaagataaggcttcatgccgaaatcaacaccctgtcattttatggcagggtgttttagcagcttcagtccctttctcgtcgatggtcagcacagc

SEQ ID NO: 23270 - DNA, 142 bp, synthetic construct
  source 1..142: mol_type = other DNA
aaggctgtgctgaccatcgagtctttgtactctggtaccagaagctacaaagataaggcttcatgccgaaatcaacaccctgtcattttatggcagggtgttttagcagcttcagtccctttctcgtcgatggtcagcacag

SEQ ID NO: 23271 - DNA, 141 bp, synthetic construct
  source 1..141: mol_type = other DNA
aaggctgtgctgaccatcgagtctttgtactctggtaccagaagctacaaagataaggcttcatgccgaaatcaacaccctgtcattttatggcagggtgttttagcagcttcagtccctttctcgtcgatggtcagcaca

SEQ ID NO: 23272 - DNA, 140 bp, synthetic construct
  source 1..140: mol_type = other DNA
aaggctgtgctgaccatcgagtctttgtactctggtaccagaagctacaaagataaggcttcatgccgaaatcaacaccctgtcattttatggcagggtgttttagcagcttcagtccctttctcgtcgatggtcagcac

SEQ ID NO: 23273 - DNA, 139 bp, synthetic construct
  source 1..139: mol_type = other DNA
aaggctgtgctgaccatcgagtctttgtactctggtaccagaagctacaaagataaggcttcatgccgaaatcaacaccctgtcattttatggcagggtgttttagcagcttcagtccctttctcgtcgatggtcagca

SEQ ID NO: 23274 - DNA, 138 bp, synthetic construct
  source 1..138: mol_type = other DNA
aaggctgtgctgaccatcgagtctttgtactctggtaccagaagctacaaagataaggcttcatgccgaaatcaacaccctgtcattttatggcagggtgttttagcagcttcagtccctttctcgtcgatggtcagc

SEQ ID NO: 23275 - DNA, 137 bp, synthetic construct
  source 1..137: mol_type = other DNA
aaggctgtgctgaccatcgagtctttgtactctggtaccagaagctacaaagataaggcttcatgccgaaatcaacaccctgtcattttatggcagggtgttttagcagcttcagtccctttctcgtcgatggtcag

SEQ ID NO: 23276 - DNA, 140 bp, synthetic construct
  source 1..140: mol_type = other DNA
aaggctgtgctgaccatcgagtctttgtactctggtaccagaagctacaaagataaggcttcatgccgaaatcaacaccctgtcattttatggcagggtgttttttcagtccctttctcgtcgatggtcagcacagcctt

SEQ ID NO: 23277 - DNA, 139 bp, synthetic construct
  source 1..139: mol_type = other DNA
aaggctgtgctgaccatcgagtctttgtactctggtaccagaagctacaaagataaggcttcatgccgaaatcaacaccctgtcattttatggcagggtgttttttcagtccctttctcgtcgatggtcagcacagcct

SEQ ID NO: 23278 - DNA, 138 bp, synthetic construct
  source 1..138: mol_type = other DNA
aaggctgtgctgaccatcgagtctttgtactctggtaccagaagctacaaagataaggcttcatgccgaaatcaacaccctgtcattttatggcagggtgttttttcagtccctttctcgtcgatggtcagcacagcc

SEQ ID NO: 23279 - DNA, 137 bp, synthetic construct
  source 1..137: mol_type = other DNA
aaggctgtgctgaccatcgagtctttgtactctggtaccagaagctacaaagataaggcttcatgccgaaatcaacaccctgtcattttatggcagggtgttttttcagtccctttctcgtcgatggtcagcacagc

SEQ ID NO: 23280 - DNA, 136 bp, synthetic construct
  source 1..136: mol_type = other DNA
aaggctgtgctgaccatcgagtctttgtactctggtaccagaagctacaaagataaggcttcatgccgaaatcaacaccctgtcattttatggcagggtgttttttcagtccctttctcgtcgatggtcagcacag

SEQ ID NO: 23281 - DNA, 135 bp, synthetic construct
  source 1..135: mol_type = other DNA
aaggctgtgctgaccatcgagtctttgtactctggtaccagaagctacaaagataaggcttcatgccgaaatcaacaccctgtcattttatggcagggtgttttttcagtccctttctcgtcgatggtcagcaca

SEQ ID NO: 23282 - DNA, 134 bp, synthetic construct
  source 1..134: mol_type = other DNA
aaggctgtgctgaccatcgagtctttgtactctggtaccagaagctacaaagataaggcttcatgccgaaatcaacaccctgtcattttatggcagggtgttttttcagtccctttctcgtcgatggtcagcac

SEQ ID NO: 23283 - DNA, 133 bp, synthetic construct
  source 1..133: mol_type = other DNA
aaggctgtgctgaccatcgagtctttgtactctggtaccagaagctacaaagataaggcttcatgccgaaatcaacaccctgtcattttatggcagggtgttttttcagtccctttctcgtcgatggtcagca

SEQ ID NO: 23284 - DNA, 132 bp, synthetic construct
  source 1..132: mol_type = other DNA
aaggctgtgctgaccatcgagtctttgtactctggtaccagaagctacaaagataaggcttcatgccgaaatcaacaccctgtcattttatggcagggtgttttttcagtccctttctcgtcgatggtcagc

SEQ ID NO: 23285 - DNA, 131 bp, synthetic construct
  source 1..131: mol_type = other DNA
aaggctgtgctgaccatcgagtctttgtactctggtaccagaagctacaaagataaggcttcatgccgaaatcaacaccctgtcattttatggcagggtgttttttcagtccctttctcgtcgatggtcag

SEQ ID NO: 23286 - DNA, 137 bp, synthetic construct
  source 1..137: mol_type = other DNA
aaggctgtgctgaccatcgagtctttgtactctggtaccagaagctacaaagataaggcttcatgccgaaatcaacaccctgtcattttatggcagggtgttttagtccctttctcgtcgatggtcagcacagcctt

SEQ ID NO: 23287 - DNA, 136 bp, synthetic construct
  source 1..136: mol_type = other DNA
aaggctgtgctgaccatcgagtctttgtactctggtaccagaagctacaaagataaggcttcatgccgaaatcaacaccctgtcattttatggcagggtgttttagtccctttctcgtcgatggtcagcacagcct

SEQ ID NO: 23288 - DNA, 135 bp, synthetic construct
  source 1..135: mol_type = other DNA
aaggctgtgctgaccatcgagtctttgtactctggtaccagaagctacaaagataaggcttcatgccgaaatcaacaccctgtcattttatggcagggtgttttagtccctttctcgtcgatggtcagcacagcc

SEQ ID NO: 23289 - DNA, 134 bp, synthetic construct
  source 1..134: mol_type = other DNA
aaggctgtgctgaccatcgagtctttgtactctggtaccagaagctacaaagataaggcttcatgccgaaatcaacaccctgtcattttatggcagggtgttttagtccctttctcgtcgatggtcagcacagc

SEQ ID NO: 23290 - DNA, 133 bp, synthetic construct
  source 1..133: mol_type = other DNA
aaggctgtgctgaccatcgagtctttgtactctggtaccagaagctacaaagataaggcttcatgccgaaatcaacaccctgtcattttatggcagggtgttttagtccctttctcgtcgatggtcagcacag

SEQ ID NO: 23291 - DNA, 132 bp, synthetic construct
  source 1..132: mol_type = other DNA
aaggctgtgctgaccatcgagtctttgtactctggtaccagaagctacaaagataaggcttcatgccgaaatcaacaccctgtcattttatggcagggtgttttagtccctttctcgtcgatggtcagcaca

SEQ ID NO: 23292 - DNA, 131 bp, synthetic construct
  source 1..131: mol_type = other DNA
aaggctgtgctgaccatcgagtctttgtactctggtaccagaagctacaaagataaggcttcatgccgaaatcaacaccctgtcattttatggcagggtgttttagtccctttctcgtcgatggtcagcac

SEQ ID NO: 23293 - DNA, 130 bp, synthetic construct
  source 1..130: mol_type = other DNA
aaggctgtgctgaccatcgagtctttgtactctggtaccagaagctacaaagataaggcttcatgccgaaatcaacaccctgtcattttatggcagggtgttttagtccctttctcgtcgatggtcagca

SEQ ID NO: 23294 - DNA, 129 bp, synthetic construct
  source 1..129: mol_type = other DNA
aaggctgtgctgaccatcgagtctttgtactctggtaccagaagctacaaagataaggcttcatgccgaaatcaacaccctgtcattttatggcagggtgttttagtccctttctcgtcgatggtcagc

SEQ ID NO: 23295 - DNA, 128 bp, synthetic construct
  source 1..128: mol_type = other DNA
aaggctgtgctgaccatcgagtctttgtactctggtaccagaagctacaaagataaggcttcatgccgaaatcaacaccctgtcattttatggcagggtgttttagtccctttctcgtcgatggtcag

SEQ ID NO: 23296 - DNA, 135 bp, synthetic construct
  source 1..135: mol_type = other DNA
aaggctgtgctgaccatcgagtctttgtactctggtaccagaagctacaaagataaggcttcatgccgaaatcaacaccctgtcattttatggcagggtgtttttccctttctcgtcgatggtcagcacagcctt

SEQ ID NO: 23297 - DNA, 134 bp, synthetic construct
  source 1..134: mol_type = other DNA
aaggctgtgctgaccatcgagtctttgtactctggtaccagaagctacaaagataaggcttcatgccgaaatcaacaccctgtcattttatggcagggtgtttttccctttctcgtcgatggtcagcacagcct

SEQ ID NO: 23298 - DNA, 133 bp, synthetic construct
  source 1..133: mol_type = other DNA
aaggctgtgctgaccatcgagtctttgtactctggtaccagaagctacaaagataaggcttcatgccgaaatcaacaccctgtcattttatggcagggtgtttttccctttctcgtcgatggtcagcacagcc

SEQ ID NO: 23299 - DNA, 132 bp, synthetic construct
  source 1..132: mol_type = other DNA
aaggctgtgctgaccatcgagtctttgtactctggtaccagaagctacaaagataaggcttcatgccgaaatcaacaccctgtcattttatggcagggtgtttttccctttctcgtcgatggtcagcacagc

SEQ ID NO: 23300 - DNA, 131 bp, synthetic construct
  source 1..131: mol_type = other DNA
aaggctgtgctgaccatcgagtctttgtactctggtaccagaagctacaaagataaggcttcatgccgaaatcaacaccctgtcattttatggcagggtgtttttccctttctcgtcgatggtcagcacag

SEQ ID NO: 23301 - DNA, 130 bp, synthetic construct
  source 1..130: mol_type = other DNA
aaggctgtgctgaccatcgagtctttgtactctggtaccagaagctacaaagataaggcttcatgccgaaatcaacaccctgtcattttatggcagggtgtttttccctttctcgtcgatggtcagcaca

SEQ ID NO: 23302 - DNA, 129 bp, synthetic construct
  source 1..129: mol_type = other DNA
aaggctgtgctgaccatcgagtctttgtactctggtaccagaagctacaaagataaggcttcatgccgaaatcaacaccctgtcattttatggcagggtgtttttccctttctcgtcgatggtcagcac

SEQ ID NO: 23303 - DNA, 128 bp, synthetic construct
  source 1..128: mol_type = other DNA
aaggctgtgctgaccatcgagtctttgtactctggtaccagaagctacaaagataaggcttcatgccgaaatcaacaccctgtcattttatggcagggtgtttttccctttctcgtcgatggtcagca

SEQ ID NO: 23304 - DNA, 127 bp, synthetic construct
  source 1..127: mol_type = other DNA
aaggctgtgctgaccatcgagtctttgtactctggtaccagaagctacaaagataaggcttcatgccgaaatcaacaccctgtcattttatggcagggtgtttttccctttctcgtcgatggtcagc

SEQ ID NO: 23305 - DNA, 126 bp, synthetic construct
  source 1..126: mol_type = other DNA
aaggctgtgctgaccatcgagtctttgtactctggtaccagaagctacaaagataaggcttcatgccgaaatcaacaccctgtcattttatggcagggtgtttttccctttctcgtcgatggtcag

SEQ ID NO: 23306 - DNA, 133 bp, synthetic construct
  source 1..133: mol_type = other DNA
aaggctgtgctgaccatcgagtctttgtactctggtaccagaagctacaaagataaggcttcatgccgaaatcaacaccctgtcattttatggcagggtgttttcctttctcgtcgatggtcagcacagcctt

SEQ ID NO: 23307 - DNA, 132 bp, synthetic construct
  source 1..132: mol_type = other DNA
aaggctgtgctgaccatcgagtctttgtactctggtaccagaagctacaaagataaggcttcatgccgaaatcaacaccctgtcattttatggcagggtgttttcctttctcgtcgatggtcagcacagcct

SEQ ID NO: 23308 - DNA, 131 bp, synthetic construct
  source 1..131: mol_type = other DNA
aaggctgtgctgaccatcgagtctttgtactctggtaccagaagctacaaagataaggcttcatgccgaaatcaacaccctgtcattttatggcagggtgttttcctttctcgtcgatggtcagcacagcc

SEQ ID NO: 23309 - DNA, 130 bp, synthetic construct
  source 1..130: mol_type = other DNA
aaggctgtgctgaccatcgagtctttgtactctggtaccagaagctacaaagataaggcttcatgccgaaatcaacaccctgtcattttatggcagggtgttttcctttctcgtcgatggtcagcacagc

SEQ ID NO: 23310 - DNA, 129 bp, synthetic construct
  source 1..129: mol_type = other DNA
aaggctgtgctgaccatcgagtctttgtactctggtaccagaagctacaaagataaggcttcatgccgaaatcaacaccctgtcattttatggcagggtgttttcctttctcgtcgatggtcagcacag

SEQ ID NO: 23311 - DNA, 128 bp, synthetic construct
  source 1..128: mol_type = other DNA
aaggctgtgctgaccatcgagtctttgtactctggtaccagaagctacaaagataaggcttcatgccgaaatcaacaccctgtcattttatggcagggtgttttcctttctcgtcgatggtcagcaca

SEQ ID NO: 23312 - DNA, 127 bp, synthetic construct
  source 1..127: mol_type = other DNA
aaggctgtgctgaccatcgagtctttgtactctggtaccagaagctacaaagataaggcttcatgccgaaatcaacaccctgtcattttatggcagggtgttttcctttctcgtcgatggtcagcac

SEQ ID NO: 23313 - DNA, 126 bp, synthetic construct
  source 1..126: mol_type = other DNA
aaggctgtgctgaccatcgagtctttgtactctggtaccagaagctacaaagataaggcttcatgccgaaatcaacaccctgtcattttatggcagggtgttttcctttctcgtcgatggtcagca

SEQ ID NO: 23314 - DNA, 125 bp, synthetic construct
  source 1..125: mol_type = other DNA
aaggctgtgctgaccatcgagtctttgtactctggtaccagaagctacaaagataaggcttcatgccgaaatcaacaccctgtcattttatggcagggtgttttcctttctcgtcgatggtcagc

SEQ ID NO: 23315 - DNA, 124 bp, synthetic construct
  source 1..124: mol_type = other DNA
aaggctgtgctgaccatcgagtctttgtactctggtaccagaagctacaaagataaggcttcatgccgaaatcaacaccctgtcattttatggcagggtgttttcctttctcgtcgatggtcag

SEQ ID NO: 23316 - DNA, 131 bp, synthetic construct
  source 1..131: mol_type = other DNA
aaggctgtgctgaccatcgagtctttgtactctggtaccagaagctacaaagataaggcttcatgccgaaatcaacaccctgtcattttatggcagggtgtttttttctcgtcgatggtcagcacagcctt

SEQ ID NO: 23317 - DNA, 130 bp, synthetic construct
  source 1..130: mol_type = other DNA
aaggctgtgctgaccatcgagtctttgtactctggtaccagaagctacaaagataaggcttcatgccgaaatcaacaccctgtcattttatggcagggtgtttttttctcgtcgatggtcagcacagcct

SEQ ID NO: 23318 - DNA, 129 bp, synthetic construct
  source 1..129: mol_type = other DNA
aaggctgtgctgaccatcgagtctttgtactctggtaccagaagctacaaagataaggcttcatgccgaaatcaacaccctgtcattttatggcagggtgtttttttctcgtcgatggtcagcacagcc

SEQ ID NO: 23319 - DNA, 128 bp, synthetic construct
  source 1..128: mol_type = other DNA
aaggctgtgctgaccatcgagtctttgtactctggtaccagaagctacaaagataaggcttcatgccgaaatcaacaccctgtcattttatggcagggtgtttttttctcgtcgatggtcagcacagc

SEQ ID NO: 23320 - DNA, 127 bp, synthetic construct
  source 1..127: mol_type = other DNA
aaggctgtgctgaccatcgagtctttgtactctggtaccagaagctacaaagataaggcttcatgccgaaatcaacaccctgtcattttatggcagggtgtttttttctcgtcgatggtcagcacag

SEQ ID NO: 23321 - DNA, 126 bp, synthetic construct
  source 1..126: mol_type = other DNA
aaggctgtgctgaccatcgagtctttgtactctggtaccagaagctacaaagataaggcttcatgccgaaatcaacaccctgtcattttatggcagggtgtttttttctcgtcgatggtcagcaca

SEQ ID NO: 23322 - DNA, 125 bp, synthetic construct
  source 1..125: mol_type = other DNA
aaggctgtgctgaccatcgagtctttgtactctggtaccagaagctacaaagataaggcttcatgccgaaatcaacaccctgtcattttatggcagggtgtttttttctcgtcgatggtcagcac

SEQ ID NO: 23323 - DNA, 124 bp, synthetic construct
  source 1..124: mol_type = other DNA
aaggctgtgctgaccatcgagtctttgtactctggtaccagaagctacaaagataaggcttcatgccgaaatcaacaccctgtcattttatggcagggtgtttttttctcgtcgatggtcagca

SEQ ID NO: 23324 - DNA, 123 bp, synthetic construct
  source 1..123: mol_type = other DNA
aaggctgtgctgaccatcgagtctttgtactctggtaccagaagctacaaagataaggcttcatgccgaaatcaacaccctgtcattttatggcagggtgtttttttctcgtcgatggtcagc

SEQ ID NO: 23325 - DNA, 122 bp, synthetic construct
  source 1..122: mol_type = other DNA
aaggctgtgctgaccatcgagtctttgtactctggtaccagaagctacaaagataaggcttcatgccgaaatcaacaccctgtcattttatggcagggtgtttttttctcgtcgatggtcag

SEQ ID NO: 23326 - DNA, 129 bp, synthetic construct
  source 1..129: mol_type = other DNA
aaggctgtgctgaccatcgagtctttgtactctggtaccagaagctacaaagataaggcttcatgccgaaatcaacaccctgtcattttatggcagggtgtttttctcgtcgatggtcagcacagcctt

SEQ ID NO: 23327 - DNA, 128 bp, synthetic construct
  source 1..128: mol_type = other DNA
aaggctgtgctgaccatcgagtctttgtactctggtaccagaagctacaaagataaggcttcatgccgaaatcaacaccctgtcattttatggcagggtgtttttctcgtcgatggtcagcacagcct

SEQ ID NO: 23328 - DNA, 127 bp, synthetic construct
  source 1..127: mol_type = other DNA
aaggctgtgctgaccatcgagtctttgtactctggtaccagaagctacaaagataaggcttcatgccgaaatcaacaccctgtcattttatggcagggtgtttttctcgtcgatggtcagcacagcc

SEQ ID NO: 23329 - DNA, 126 bp, synthetic construct
  source 1..126: mol_type = other DNA
aaggctgtgctgaccatcgagtctttgtactctggtaccagaagctacaaagataaggcttcatgccgaaatcaacaccctgtcattttatggcagggtgtttttctcgtcgatggtcagcacagc

SEQ ID NO: 23330 - DNA, 125 bp, synthetic construct
  source 1..125: mol_type = other DNA
aaggctgtgctgaccatcgagtctttgtactctggtaccagaagctacaaagataaggcttcatgccgaaatcaacaccctgtcattttatggcagggtgtttttctcgtcgatggtcagcacag

SEQ ID NO: 23331 - DNA, 124 bp, synthetic construct
  source 1..124: mol_type = other DNA
aaggctgtgctgaccatcgagtctttgtactctggtaccagaagctacaaagataaggcttcatgccgaaatcaacaccctgtcattttatggcagggtgtttttctcgtcgatggtcagcaca

SEQ ID NO: 23332 - DNA, 123 bp, synthetic construct
  source 1..123: mol_type = other DNA
aaggctgtgctgaccatcgagtctttgtactctggtaccagaagctacaaagataaggcttcatgccgaaatcaacaccctgtcattttatggcagggtgtttttctcgtcgatggtcagcac

SEQ ID NO: 23333 - DNA, 122 bp, synthetic construct
  source 1..122: mol_type = other DNA
aaggctgtgctgaccatcgagtctttgtactctggtaccagaagctacaaagataaggcttcatgccgaaatcaacaccctgtcattttatggcagggtgtttttctcgtcgatggtcagca

SEQ ID NO: 23334 - DNA, 121 bp, synthetic construct
  source 1..121: mol_type = other DNA
aaggctgtgctgaccatcgagtctttgtactctggtaccagaagctacaaagataaggcttcatgccgaaatcaacaccctgtcattttatggcagggtgtttttctcgtcgatggtcagc

SEQ ID NO: 23335 - DNA, 120 bp, synthetic construct
  source 1..120: mol_type = other DNA
aaggctgtgctgaccatcgagtctttgtactctggtaccagaagctacaaagataaggcttcatgccgaaatcaacaccctgtcattttatggcagggtgtttttctcgtcgatggtcag

SEQ ID NO: 23336 - DNA, 181 bp, synthetic construct
  source 1..181: mol_type = other DNA
taaaaacatggccccagcagcttgttgtagctcccgaaacgttgctacaataaggccgtctgaaaagatgtgccgcaacgctctgccccttaaagcttctgctttaaggggcatcgttgccgtgcataaggctgtgctgaccatcgacgagaaagggactgaagctgctggggccatgttt

SEQ ID NO: 23337 - DNA, 180 bp, synthetic construct
  source 1..180: mol_type = other DNA
taaaaacatggccccagcagcttgttgtagctcccgaaacgttgctacaataaggccgtctgaaaagatgtgccgcaacgctctgccccttaaagcttctgctttaaggggcatcgttgccgtgcataaggctgtgctgaccatcgacgagaaagggactgaagctgctggggccatgtt

SEQ ID NO: 23338 - DNA, 179 bp, synthetic construct
  source 1..179: mol_type = other DNA
taaaaacatggccccagcagcttgttgtagctcccgaaacgttgctacaataaggccgtctgaaaagatgtgccgcaacgctctgccccttaaagcttctgctttaaggggcatcgttgccgtgcataaggctgtgctgaccatcgacgagaaagggactgaagctgctggggccatgt

SEQ ID NO: 23339 - DNA, 178 bp, synthetic construct
  source 1..178: mol_type = other DNA
taaaaacatggccccagcagcttgttgtagctcccgaaacgttgctacaataaggccgtctgaaaagatgtgccgcaacgctctgccccttaaagcttctgctttaaggggcatcgttgccgtgcataaggctgtgctgaccatcgacgagaaagggactgaagctgctggggccatg

SEQ ID NO: 23340 - DNA, 177 bp, synthetic construct
  source 1..177: mol_type = other DNA
taaaaacatggccccagcagcttgttgtagctcccgaaacgttgctacaataaggccgtctgaaaagatgtgccgcaacgctctgccccttaaagcttctgctttaaggggcatcgttgccgtgcataaggctgtgctgaccatcgacgagaaagggactgaagctgctggggccat

SEQ ID NO: 23341 - DNA, 176 bp, synthetic construct
  source 1..176: mol_type = other DNA
taaaaacatggccccagcagcttgttgtagctcccgaaacgttgctacaataaggccgtctgaaaagatgtgccgcaacgctctgccccttaaagcttctgctttaaggggcatcgttgccgtgcataaggctgtgctgaccatcgacgagaaagggactgaagctgctggggcca

SEQ ID NO: 23342 - DNA, 175 bp, synthetic construct
  source 1..175: mol_type = other DNA
taaaaacatggccccagcagcttgttgtagctcccgaaacgttgctacaataaggccgtctgaaaagatgtgccgcaacgctctgccccttaaagcttctgctttaaggggcatcgttgccgtgcataaggctgtgctgaccatcgacgagaaagggactgaagctgctggggcc

SEQ ID NO: 23343 - DNA, 174 bp, synthetic construct
  source 1..174: mol_type = other DNA
taaaaacatggccccagcagcttgttgtagctcccgaaacgttgctacaataaggccgtctgaaaagatgtgccgcaacgctctgccccttaaagcttctgctttaaggggcatcgttgccgtgcataaggctgtgctgaccatcgacgagaaagggactgaagctgctggggc

SEQ ID NO: 23344 - DNA, 173 bp, synthetic construct
  source 1..173: mol_type = other DNA
taaaaacatggccccagcagcttgttgtagctcccgaaacgttgctacaataaggccgtctgaaaagatgtgccgcaacgctctgccccttaaagcttctgctttaaggggcatcgttgccgtgcataaggctgtgctgaccatcgacgagaaagggactgaagctgctgggg

SEQ ID NO: 23345 - DNA, 172 bp, synthetic construct
  source 1..172: mol_type = other DNA
taaaaacatggccccagcagcttgttgtagctcccgaaacgttgctacaataaggccgtctgaaaagatgtgccgcaacgctctgccccttaaagcttctgctttaaggggcatcgttgccgtgcataaggctgtgctgaccatcgacgagaaagggactgaagctgctggg

SEQ ID NO: 23346 - DNA, 176 bp, synthetic construct
  source 1..176: mol_type = other DNA
taaaaacatggccccagcagcttgttgtagctcccgaaacgttgctacaataaggccgtctgaaaagatgtgccgcaacgctctgccccttaaagcttctgctttaaggggcatcgttgcataaggctgtgctgaccatcgacgagaaagggactgaagctgctggggccatgttt

SEQ ID NO: 23347 - DNA, 175 bp, synthetic construct
  source 1..175: mol_type = other DNA
taaaaacatggccccagcagcttgttgtagctcccgaaacgttgctacaataaggccgtctgaaaagatgtgccgcaacgctctgccccttaaagcttctgctttaaggggcatcgttgcataaggctgtgctgaccatcgacgagaaagggactgaagctgctggggccatgtt

SEQ ID NO: 23348 - DNA, 174 bp, synthetic construct
  source 1..174: mol_type = other DNA
taaaaacatggccccagcagcttgttgtagctcccgaaacgttgctacaataaggccgtctgaaaagatgtgccgcaacgctctgccccttaaagcttctgctttaaggggcatcgttgcataaggctgtgctgaccatcgacgagaaagggactgaagctgctggggccatgt

SEQ ID NO: 23349 - DNA, 173 bp, synthetic construct
  source 1..173: mol_type = other DNA
taaaaacatggccccagcagcttgttgtagctcccgaaacgttgctacaataaggccgtctgaaaagatgtgccgcaacgctctgccccttaaagcttctgctttaaggggcatcgttgcataaggctgtgctgaccatcgacgagaaagggactgaagctgctggggccatg

SEQ ID NO: 23350 - DNA, 172 bp, synthetic construct
  source 1..172: mol_type = other DNA
taaaaacatggccccagcagcttgttgtagctcccgaaacgttgctacaataaggccgtctgaaaagatgtgccgcaacgctctgccccttaaagcttctgctttaaggggcatcgttgcataaggctgtgctgaccatcgacgagaaagggactgaagctgctggggccat

SEQ ID NO: 23351 - DNA, 171 bp, synthetic construct
  source 1..171: mol_type = other DNA
taaaaacatggccccagcagcttgttgtagctcccgaaacgttgctacaataaggccgtctgaaaagatgtgccgcaacgctctgccccttaaagcttctgctttaaggggcatcgttgcataaggctgtgctgaccatcgacgagaaagggactgaagctgctggggcca

SEQ ID NO: 23352 - DNA, 170 bp, synthetic construct
  source 1..170: mol_type = other DNA
taaaaacatggccccagcagcttgttgtagctcccgaaacgttgctacaataaggccgtctgaaaagatgtgccgcaacgctctgccccttaaagcttctgctttaaggggcatcgttgcataaggctgtgctgaccatcgacgagaaagggactgaagctgctggggcc

SEQ ID NO: 23353 - DNA, 169 bp, synthetic construct
  source 1..169: mol_type = other DNA
taaaaacatggccccagcagcttgttgtagctcccgaaacgttgctacaataaggccgtctgaaaagatgtgccgcaacgctctgccccttaaagcttctgctttaaggggcatcgttgcataaggctgtgctgaccatcgacgagaaagggactgaagctgctggggc

SEQ ID NO: 23354 - DNA, 168 bp, synthetic construct
  source 1..168: mol_type = other DNA
taaaaacatggccccagcagcttgttgtagctcccgaaacgttgctacaataaggccgtctgaaaagatgtgccgcaacgctctgccccttaaagcttctgctttaaggggcatcgttgcataaggctgtgctgaccatcgacgagaaagggactgaagctgctgggg

SEQ ID NO: 23355 - DNA, 167 bp, synthetic construct
  source 1..167: mol_type = other DNA
taaaaacatggccccagcagcttgttgtagctcccgaaacgttgctacaataaggccgtctgaaaagatgtgccgcaacgctctgccccttaaagcttctgctttaaggggcatcgttgcataaggctgtgctgaccatcgacgagaaagggactgaagctgctggg

SEQ ID NO: 23356 - DNA, 171 bp, synthetic construct
  source 1..171: mol_type = other DNA
taaaaacatggccccagcagcttgttgtagctcccgaaacgttgctacaataaggccgtctgaaaagatgtgccgcaacgctctgccccttaaagcttctgctttaaggggcatcgttaggctgtgctgaccatcgacgagaaagggactgaagctgctggggccatgttt

SEQ ID NO: 23357 - DNA, 170 bp, synthetic construct
  source 1..170: mol_type = other DNA
taaaaacatggccccagcagcttgttgtagctcccgaaacgttgctacaataaggccgtctgaaaagatgtgccgcaacgctctgccccttaaagcttctgctttaaggggcatcgttaggctgtgctgaccatcgacgagaaagggactgaagctgctggggccatgtt

SEQ ID NO: 23358 - DNA, 169 bp, synthetic construct
  source 1..169: mol_type = other DNA
taaaaacatggccccagcagcttgttgtagctcccgaaacgttgctacaataaggccgtctgaaaagatgtgccgcaacgctctgccccttaaagcttctgctttaaggggcatcgttaggctgtgctgaccatcgacgagaaagggactgaagctgctggggccatgt

SEQ ID NO: 23359 - DNA, 168 bp, synthetic construct
  source 1..168: mol_type = other DNA
taaaaacatggccccagcagcttgttgtagctcccgaaacgttgctacaataaggccgtctgaaaagatgtgccgcaacgctctgccccttaaagcttctgctttaaggggcatcgttaggctgtgctgaccatcgacgagaaagggactgaagctgctggggccatg

SEQ ID NO: 23360 - DNA, 167 bp, synthetic construct
  source 1..167: mol_type = other DNA
taaaaacatggccccagcagcttgttgtagctcccgaaacgttgctacaataaggccgtctgaaaagatgtgccgcaacgctctgccccttaaagcttctgctttaaggggcatcgttaggctgtgctgaccatcgacgagaaagggactgaagctgctggggccat

SEQ ID NO: 23361 - DNA, 166 bp, synthetic construct
  source 1..166: mol_type = other DNA
taaaaacatggccccagcagcttgttgtagctcccgaaacgttgctacaataaggccgtctgaaaagatgtgccgcaacgctctgccccttaaagcttctgctttaaggggcatcgttaggctgtgctgaccatcgacgagaaagggactgaagctgctggggcca

SEQ ID NO: 23362 - DNA, 165 bp, synthetic construct
  source 1..165: mol_type = other DNA
taaaaacatggccccagcagcttgttgtagctcccgaaacgttgctacaataaggccgtctgaaaagatgtgccgcaacgctctgccccttaaagcttctgctttaaggggcatcgttaggctgtgctgaccatcgacgagaaagggactgaagctgctggggcc

SEQ ID NO: 23363 - DNA, 164 bp, synthetic construct
  source 1..164: mol_type = other DNA
taaaaacatggccccagcagcttgttgtagctcccgaaacgttgctacaataaggccgtctgaaaagatgtgccgcaacgctctgccccttaaagcttctgctttaaggggcatcgttaggctgtgctgaccatcgacgagaaagggactgaagctgctggggc

SEQ ID NO: 23364 - DNA, 163 bp, synthetic construct
  source 1..163: mol_type = other DNA
taaaaacatggccccagcagcttgttgtagctcccgaaacgttgctacaataaggccgtctgaaaagatgtgccgcaacgctctgccccttaaagcttctgctttaaggggcatcgttaggctgtgctgaccatcgacgagaaagggactgaagctgctgggg

SEQ ID NO: 23365 - DNA, 162 bp, synthetic construct
  source 1..162: mol_type = other DNA
taaaaacatggccccagcagcttgttgtagctcccgaaacgttgctacaataaggccgtctgaaaagatgtgccgcaacgctctgccccttaaagcttctgctttaaggggcatcgttaggctgtgctgaccatcgacgagaaagggactgaagctgctggg

SEQ ID NO: 23366 - DNA, 165 bp, synthetic construct
  source 1..165: mol_type = other DNA
taaaaacatggccccagcagcttgttgtagctcccgaaacgttgctacaataaggccgtctgaaaagatgtgccgcaacgctctgccccttaaagcttctgctttaaggggcatcgtttgctgaccatcgacgagaaagggactgaagctgctggggccatgttt

SEQ ID NO: 23367 - DNA, 164 bp, synthetic construct
  source 1..164: mol_type = other DNA
taaaaacatggccccagcagcttgttgtagctcccgaaacgttgctacaataaggccgtctgaaaagatgtgccgcaacgctctgccccttaaagcttctgctttaaggggcatcgtttgctgaccatcgacgagaaagggactgaagctgctggggccatgtt

SEQ ID NO: 23368 - DNA, 163 bp, synthetic construct
  source 1..163: mol_type = other DNA
taaaaacatggccccagcagcttgttgtagctcccgaaacgttgctacaataaggccgtctgaaaagatgtgccgcaacgctctgccccttaaagcttctgctttaaggggcatcgtttgctgaccatcgacgagaaagggactgaagctgctggggccatgt

SEQ ID NO: 23369 - DNA, 162 bp, synthetic construct
  source 1..162: mol_type = other DNA
taaaaacatggccccagcagcttgttgtagctcccgaaacgttgctacaataaggccgtctgaaaagatgtgccgcaacgctctgccccttaaagcttctgctttaaggggcatcgtttgctgaccatcgacgagaaagggactgaagctgctggggccatg

SEQ ID NO: 23370 - DNA, 161 bp, synthetic construct
  source 1..161: mol_type = other DNA
taaaaacatggccccagcagcttgttgtagctcccgaaacgttgctacaataaggccgtctgaaaagatgtgccgcaacgctctgccccttaaagcttctgctttaaggggcatcgtttgctgaccatcgacgagaaagggactgaagctgctggggccat

SEQ ID NO: 23371 - DNA, 160 bp, synthetic construct
  source 1..160: mol_type = other DNA
taaaaacatggccccagcagcttgttgtagctcccgaaacgttgctacaataaggccgtctgaaaagatgtgccgcaacgctctgccccttaaagcttctgctttaaggggcatcgtttgctgaccatcgacgagaaagggactgaagctgctggggcca

SEQ ID NO: 23372 - DNA, 159 bp, synthetic construct
  source 1..159: mol_type = other DNA
taaaaacatggccccagcagcttgttgtagctcccgaaacgttgctacaataaggccgtctgaaaagatgtgccgcaacgctctgccccttaaagcttctgctttaaggggcatcgtttgctgaccatcgacgagaaagggactgaagctgctggggcc

SEQ ID NO: 23373 - DNA, 158 bp, synthetic construct
  source 1..158: mol_type = other DNA
taaaaacatggccccagcagcttgttgtagctcccgaaacgttgctacaataaggccgtctgaaaagatgtgccgcaacgctctgccccttaaagcttctgctttaaggggcatcgtttgctgaccatcgacgagaaagggactgaagctgctggggc

SEQ ID NO: 23374 - DNA, 157 bp, synthetic construct
  source 1..157: mol_type = other DNA
taaaaacatggccccagcagcttgttgtagctcccgaaacgttgctacaataaggccgtctgaaaagatgtgccgcaacgctctgccccttaaagcttctgctttaaggggcatcgtttgctgaccatcgacgagaaagggactgaagctgctgggg

SEQ ID NO: 23375 - DNA, 156 bp, synthetic construct
  source 1..156: mol_type = other DNA
taaaaacatggccccagcagcttgttgtagctcccgaaacgttgctacaataaggccgtctgaaaagatgtgccgcaacgctctgccccttaaagcttctgctttaaggggcatcgtttgctgaccatcgacgagaaagggactgaagctgctggg

SEQ ID NO: 23376 - DNA, 162 bp, synthetic construct
  source 1..162: mol_type = other DNA
taaaaacatggccccagcagcttgttgtagctcccgaaacgttgctacaataaggccgtctgaaaagatgtgccgcaacgctctgccccttaaagcttctgctttaaggggcatcgtttgaccatcgacgagaaagggactgaagctgctggggccatgttt

SEQ ID NO: 23377 - DNA, 161 bp, synthetic construct
  source 1..161: mol_type = other DNA
taaaaacatggccccagcagcttgttgtagctcccgaaacgttgctacaataaggccgtctgaaaagatgtgccgcaacgctctgccccttaaagcttctgctttaaggggcatcgtttgaccatcgacgagaaagggactgaagctgctggggccatgtt

SEQ ID NO: 23378 - DNA, 160 bp, synthetic construct
  source 1..160: mol_type = other DNA
taaaaacatggccccagcagcttgttgtagctcccgaaacgttgctacaataaggccgtctgaaaagatgtgccgcaacgctctgccccttaaagcttctgctttaaggggcatcgtttgaccatcgacgagaaagggactgaagctgctggggccatgt

SEQ ID NO: 23379 - DNA, 159 bp, synthetic construct
  source 1..159: mol_type = other DNA
taaaaacatggccccagcagcttgttgtagctcccgaaacgttgctacaataaggccgtctgaaaagatgtgccgcaacgctctgccccttaaagcttctgctttaaggggcatcgtttgaccatcgacgagaaagggactgaagctgctggggccatg

SEQ ID NO: 23380 - DNA, 158 bp, synthetic construct
  source 1..158: mol_type = other DNA
taaaaacatggccccagcagcttgttgtagctcccgaaacgttgctacaataaggccgtctgaaaagatgtgccgcaacgctctgccccttaaagcttctgctttaaggggcatcgtttgaccatcgacgagaaagggactgaagctgctggggccat

SEQ ID NO: 23381 - DNA, 157 bp, synthetic construct
  source 1..157: mol_type = other DNA
taaaaacatggccccagcagcttgttgtagctcccgaaacgttgctacaataaggccgtctgaaaagatgtgccgcaacgctctgccccttaaagcttctgctttaaggggcatcgtttgaccatcgacgagaaagggactgaagctgctggggcca

SEQ ID NO: 23382 - DNA, 156 bp, synthetic construct
  source 1..156: mol_type = other DNA
taaaaacatggccccagcagcttgttgtagctcccgaaacgttgctacaataaggccgtctgaaaagatgtgccgcaacgctctgccccttaaagcttctgctttaaggggcatcgtttgaccatcgacgagaaagggactgaagctgctggggcc

SEQ ID NO: 23383 - DNA, 155 bp, synthetic construct
  source 1..155: mol_type = other DNA
taaaaacatggccccagcagcttgttgtagctcccgaaacgttgctacaataaggccgtctgaaaagatgtgccgcaacgctctgccccttaaagcttctgctttaaggggcatcgtttgaccatcgacgagaaagggactgaagctgctggggc

SEQ ID NO: 23384 - DNA, 154 bp, synthetic construct
  source 1..154: mol_type = other DNA
taaaaacatggccccagcagcttgttgtagctcccgaaacgttgctacaataaggccgtctgaaaagatgtgccgcaacgctctgccccttaaagcttctgctttaaggggcatcgtttgaccatcgacgagaaagggactgaagctgctgggg

SEQ ID NO: 23385 - DNA, 153 bp, synthetic construct
  source 1..153: mol_type = other DNA
taaaaacatggccccagcagcttgttgtagctcccgaaacgttgctacaataaggccgtctgaaaagatgtgccgcaacgctctgccccttaaagcttctgctttaaggggcatcgtttgaccatcgacgagaaagggactgaagctgctggg

SEQ ID NO: 23386 - DNA, 160 bp, synthetic construct
  source 1..160: mol_type = other DNA
taaaaacatggccccagcagcttgttgtagctcccgaaacgttgctacaataaggccgtctgaaaagatgtgccgcaacgctctgccccttaaagcttctgctttaaggggcatcgttaccatcgacgagaaagggactgaagctgctggggccatgttt

SEQ ID NO: 23387 - DNA, 159 bp, synthetic construct
  source 1..159: mol_type = other DNA
taaaaacatggccccagcagcttgttgtagctcccgaaacgttgctacaataaggccgtctgaaaagatgtgccgcaacgctctgccccttaaagcttctgctttaaggggcatcgttaccatcgacgagaaagggactgaagctgctggggccatgtt

SEQ ID NO: 23388 - DNA, 158 bp, synthetic construct
  source 1..158: mol_type = other DNA
taaaaacatggccccagcagcttgttgtagctcccgaaacgttgctacaataaggccgtctgaaaagatgtgccgcaacgctctgccccttaaagcttctgctttaaggggcatcgttaccatcgacgagaaagggactgaagctgctggggccatgt

SEQ ID NO: 23389 - DNA, 157 bp, synthetic construct
  source 1..157: mol_type = other DNA
taaaaacatggccccagcagcttgttgtagctcccgaaacgttgctacaataaggccgtctgaaaagatgtgccgcaacgctctgccccttaaagcttctgctttaaggggcatcgttaccatcgacgagaaagggactgaagctgctggggccatg

SEQ ID NO: 23390 - DNA, 156 bp, synthetic construct
  source 1..156: mol_type = other DNA
taaaaacatggccccagcagcttgttgtagctcccgaaacgttgctacaataaggccgtctgaaaagatgtgccgcaacgctctgccccttaaagcttctgctttaaggggcatcgttaccatcgacgagaaagggactgaagctgctggggccat

SEQ ID NO: 23391 - DNA, 155 bp, synthetic construct
  source 1..155: mol_type = other DNA
taaaaacatggccccagcagcttgttgtagctcccgaaacgttgctacaataaggccgtctgaaaagatgtgccgcaacgctctgccccttaaagcttctgctttaaggggcatcgttaccatcgacgagaaagggactgaagctgctggggcca

SEQ ID NO: 23392 - DNA, 154 bp, synthetic construct
  source 1..154: mol_type = other DNA
taaaaacatggccccagcagcttgttgtagctcccgaaacgttgctacaataaggccgtctgaaaagatgtgccgcaacgctctgccccttaaagcttctgctttaaggggcatcgttaccatcgacgagaaagggactgaagctgctggggcc

SEQ ID NO: 23393 - DNA, 153 bp, synthetic construct
  source 1..153: mol_type = other DNA
taaaaacatggccccagcagcttgttgtagctcccgaaacgttgctacaataaggccgtctgaaaagatgtgccgcaacgctctgccccttaaagcttctgctttaaggggcatcgttaccatcgacgagaaagggactgaagctgctggggc

SEQ ID NO: 23394 - DNA, 152 bp, synthetic construct
  source 1..152: mol_type = other DNA
taaaaacatggccccagcagcttgttgtagctcccgaaacgttgctacaataaggccgtctgaaaagatgtgccgcaacgctctgccccttaaagcttctgctttaaggggcatcgttaccatcgacgagaaagggactgaagctgctgggg

SEQ ID NO: 23395 - DNA, 151 bp, synthetic construct
  source 1..151: mol_type = other DNA
taaaaacatggccccagcagcttgttgtagctcccgaaacgttgctacaataaggccgtctgaaaagatgtgccgcaacgctctgccccttaaagcttctgctttaaggggcatcgttaccatcgacgagaaagggactgaagctgctggg

SEQ ID NO: 23396 - DNA, 157 bp, synthetic construct
  source 1..157: mol_type = other DNA
taaaaacatggccccagcagcttgttgtagctcccgaaacgttgctacaataaggccgtctgaaaagatgtgccgcaacgctctgccccttaaagcttctgctttaaggggcatcgttatcgacgagaaagggactgaagctgctggggccatgttt

SEQ ID NO: 23397 - DNA, 156 bp, synthetic construct
  source 1..156: mol_type = other DNA
taaaaacatggccccagcagcttgttgtagctcccgaaacgttgctacaataaggccgtctgaaaagatgtgccgcaacgctctgccccttaaagcttctgctttaaggggcatcgttatcgacgagaaagggactgaagctgctggggccatgtt

SEQ ID NO: 23398 - DNA, 155 bp, synthetic construct
  source 1..155: mol_type = other DNA
taaaaacatggccccagcagcttgttgtagctcccgaaacgttgctacaataaggccgtctgaaaagatgtgccgcaacgctctgccccttaaagcttctgctttaaggggcatcgttatcgacgagaaagggactgaagctgctggggccatgt

SEQ ID NO: 23399 - DNA, 154 bp, synthetic construct
  source 1..154: mol_type = other DNA
taaaaacatggccccagcagcttgttgtagctcccgaaacgttgctacaataaggccgtctgaaaagatgtgccgcaacgctctgccccttaaagcttctgctttaaggggcatcgttatcgacgagaaagggactgaagctgctggggccatg

SEQ ID NO: 23400 - DNA, 153 bp, synthetic construct
  source 1..153: mol_type = other DNA
taaaaacatggccccagcagcttgttgtagctcccgaaacgttgctacaataaggccgtctgaaaagatgtgccgcaacgctctgccccttaaagcttctgctttaaggggcatcgttatcgacgagaaagggactgaagctgctggggccat

SEQ ID NO: 23401 - DNA, 152 bp, synthetic construct
  source 1..152: mol_type = other DNA
taaaaacatggccccagcagcttgttgtagctcccgaaacgttgctacaataaggccgtctgaaaagatgtgccgcaacgctctgccccttaaagcttctgctttaaggggcatcgttatcgacgagaaagggactgaagctgctggggcca

SEQ ID NO: 23402 - DNA, 151 bp, synthetic construct
  source 1..151: mol_type = other DNA
taaaaacatggccccagcagcttgttgtagctcccgaaacgttgctacaataaggccgtctgaaaagatgtgccgcaacgctctgccccttaaagcttctgctttaaggggcatcgttatcgacgagaaagggactgaagctgctggggcc

SEQ ID NO: 23403 - DNA, 150 bp, synthetic construct
  source 1..150: mol_type = other DNA
taaaaacatggccccagcagcttgttgtagctcccgaaacgttgctacaataaggccgtctgaaaagatgtgccgcaacgctctgccccttaaagcttctgctttaaggggcatcgttatcgacgagaaagggactgaagctgctggggc

SEQ ID NO: 23404 - DNA, 149 bp, synthetic construct
  source 1..149: mol_type = other DNA
taaaaacatggccccagcagcttgttgtagctcccgaaacgttgctacaataaggccgtctgaaaagatgtgccgcaacgctctgccccttaaagcttctgctttaaggggcatcgttatcgacgagaaagggactgaagctgctgggg

SEQ ID NO: 23405 - DNA, 148 bp, synthetic construct
  source 1..148: mol_type = other DNA
taaaaacatggccccagcagcttgttgtagctcccgaaacgttgctacaataaggccgtctgaaaagatgtgccgcaacgctctgccccttaaagcttctgctttaaggggcatcgttatcgacgagaaagggactgaagctgctggg

SEQ ID NO: 23406 - DNA, 156 bp, synthetic construct
  source 1..156: mol_type = other DNA
taaaaacatggccccagcagcttgttgtagctcccgaaacgttgctacaataaggccgtctgaaaagatgtgccgcaacgctctgccccttaaagcttctgctttaaggggcatcgtttcgacgagaaagggactgaagctgctggggccatgttt

SEQ ID NO: 23407 - DNA, 155 bp, synthetic construct
  source 1..155: mol_type = other DNA
taaaaacatggccccagcagcttgttgtagctcccgaaacgttgctacaataaggccgtctgaaaagatgtgccgcaacgctctgccccttaaagcttctgctttaaggggcatcgtttcgacgagaaagggactgaagctgctggggccatgtt

SEQ ID NO: 23408 - DNA, 154 bp, synthetic construct
  source 1..154: mol_type = other DNA
taaaaacatggccccagcagcttgttgtagctcccgaaacgttgctacaataaggccgtctgaaaagatgtgccgcaacgctctgccccttaaagcttctgctttaaggggcatcgtttcgacgagaaagggactgaagctgctggggccatgt

SEQ ID NO: 23409 - DNA, 153 bp, synthetic construct
  source 1..153: mol_type = other DNA
taaaaacatggccccagcagcttgttgtagctcccgaaacgttgctacaataaggccgtctgaaaagatgtgccgcaacgctctgccccttaaagcttctgctttaaggggcatcgtttcgacgagaaagggactgaagctgctggggccatg

SEQ ID NO: 23410 - DNA, 152 bp, synthetic construct
  source 1..152: mol_type = other DNA
taaaaacatggccccagcagcttgttgtagctcccgaaacgttgctacaataaggccgtctgaaaagatgtgccgcaacgctctgccccttaaagcttctgctttaaggggcatcgtttcgacgagaaagggactgaagctgctggggccat

SEQ ID NO: 23411 - DNA, 151 bp, synthetic construct
  source 1..151: mol_type = other DNA
taaaaacatggccccagcagcttgttgtagctcccgaaacgttgctacaataaggccgtctgaaaagatgtgccgcaacgctctgccccttaaagcttctgctttaaggggcatcgtttcgacgagaaagggactgaagctgctggggcca

SEQ ID NO: 23412 - DNA, 150 bp, synthetic construct
  source 1..150: mol_type = other DNA
taaaaacatggccccagcagcttgttgtagctcccgaaacgttgctacaataaggccgtctgaaaagatgtgccgcaacgctctgccccttaaagcttctgctttaaggggcatcgtttcgacgagaaagggactgaagctgctggggcc

SEQ ID NO: 23413 - DNA, 149 bp, synthetic construct
  source 1..149: mol_type = other DNA
taaaaacatggccccagcagcttgttgtagctcccgaaacgttgctacaataaggccgtctgaaaagatgtgccgcaacgctctgccccttaaagcttctgctttaaggggcatcgtttcgacgagaaagggactgaagctgctggggc

SEQ ID NO: 23414 - DNA, 148 bp, synthetic construct
  source 1..148: mol_type = other DNA
taaaaacatggccccagcagcttgttgtagctcccgaaacgttgctacaataaggccgtctgaaaagatgtgccgcaacgctctgccccttaaagcttctgctttaaggggcatcgtttcgacgagaaagggactgaagctgctgggg

SEQ ID NO: 23415 - DNA, 147 bp, synthetic construct
  source 1..147: mol_type = other DNA
taaaaacatggccccagcagcttgttgtagctcccgaaacgttgctacaataaggccgtctgaaaagatgtgccgcaacgctctgccccttaaagcttctgctttaaggggcatcgtttcgacgagaaagggactgaagctgctggg

SEQ ID NO: 23416 - DNA, 154 bp, synthetic construct
  source 1..154: mol_type = other DNA
taaaaacatggccccagcagcttgttgtagctcccgaaacgttgctacaataaggccgtctgaaaagatgtgccgcaacgctctgccccttaaagcttctgctttaaggggcatcgttgacgagaaagggactgaagctgctggggccatgttt

SEQ ID NO: 23417 - DNA, 153 bp, synthetic construct
  source 1..153: mol_type = other DNA
taaaaacatggccccagcagcttgttgtagctcccgaaacgttgctacaataaggccgtctgaaaagatgtgccgcaacgctctgccccttaaagcttctgctttaaggggcatcgttgacgagaaagggactgaagctgctggggccatgtt

SEQ ID NO: 23418 - DNA, 152 bp, synthetic construct
  source 1..152: mol_type = other DNA
taaaaacatggccccagcagcttgttgtagctcccgaaacgttgctacaataaggccgtctgaaaagatgtgccgcaacgctctgccccttaaagcttctgctttaaggggcatcgttgacgagaaagggactgaagctgctggggccatgt

SEQ ID NO: 23419 - DNA, 151 bp, synthetic construct
  source 1..151: mol_type = other DNA
taaaaacatggccccagcagcttgttgtagctcccgaaacgttgctacaataaggccgtctgaaaagatgtgccgcaacgctctgccccttaaagcttctgctttaaggggcatcgttgacgagaaagggactgaagctgctggggccatg

SEQ ID NO: 23420 - DNA, 150 bp, synthetic construct
  source 1..150: mol_type = other DNA
taaaaacatggccccagcagcttgttgtagctcccgaaacgttgctacaataaggccgtctgaaaagatgtgccgcaacgctctgccccttaaagcttctgctttaaggggcatcgttgacgagaaagggactgaagctgctggggccat

SEQ ID NO: 23421 - DNA, 149 bp, synthetic construct
  source 1..149: mol_type = other DNA
taaaaacatggccccagcagcttgttgtagctcccgaaacgttgctacaataaggccgtctgaaaagatgtgccgcaacgctctgccccttaaagcttctgctttaaggggcatcgttgacgagaaagggactgaagctgctggggcca

SEQ ID NO: 23422 - DNA, 148 bp, synthetic construct
  source 1..148: mol_type = other DNA
taaaaacatggccccagcagcttgttgtagctcccgaaacgttgctacaataaggccgtctgaaaagatgtgccgcaacgctctgccccttaaagcttctgctttaaggggcatcgttgacgagaaagggactgaagctgctggggcc

SEQ ID NO: 23423 - DNA, 147 bp, synthetic construct
  source 1..147: mol_type = other DNA
taaaaacatggccccagcagcttgttgtagctcccgaaacgttgctacaataaggccgtctgaaaagatgtgccgcaacgctctgccccttaaagcttctgctttaaggggcatcgttgacgagaaagggactgaagctgctggggc

SEQ ID NO: 23424 - DNA, 146 bp, synthetic construct
  source 1..146: mol_type = other DNA
taaaaacatggccccagcagcttgttgtagctcccgaaacgttgctacaataaggccgtctgaaaagatgtgccgcaacgctctgccccttaaagcttctgctttaaggggcatcgttgacgagaaagggactgaagctgctgggg

SEQ ID NO: 23425 - DNA, 145 bp, synthetic construct
  source 1..145: mol_type = other DNA
taaaaacatggccccagcagcttgttgtagctcccgaaacgttgctacaataaggccgtctgaaaagatgtgccgcaacgctctgccccttaaagcttctgctttaaggggcatcgttgacgagaaagggactgaagctgctggg

SEQ ID NO: 23426 - DNA, 159 bp, synthetic construct
  source 1..159: mol_type = other DNA
aggccgtgcataaggctgtggttttagagctagaaatagcaagttaaaataaggctagtccgttatcaacttgaaaaagtggcaccgagtcggtgcacatggccccagcagcttcagtccctttctcgtcgatggtcagcacagccttatgcacggcct

SEQ ID NO: 23427 - DNA, 158 bp, synthetic construct
  source 1..158: mol_type = other DNA
aggccgtgcataaggctgtggttttagagctagaaatagcaagttaaaataaggctagtccgttatcaacttgaaaaagtggcaccgagtcggtgcacatggccccagcagcttcagtccctttctcgtcgatggtcagcacagccttatgcacggcc

SEQ ID NO: 23428 - DNA, 157 bp, synthetic construct
  source 1..157: mol_type = other DNA
aggccgtgcataaggctgtggttttagagctagaaatagcaagttaaaataaggctagtccgttatcaacttgaaaaagtggcaccgagtcggtgcacatggccccagcagcttcagtccctttctcgtcgatggtcagcacagccttatgcacggc

SEQ ID NO: 23429 - DNA, 156 bp, synthetic construct
  source 1..156: mol_type = other DNA
aggccgtgcataaggctgtggttttagagctagaaatagcaagttaaaataaggctagtccgttatcaacttgaaaaagtggcaccgagtcggtgcacatggccccagcagcttcagtccctttctcgtcgatggtcagcacagccttatgcacgg

SEQ ID NO: 23430 - DNA, 155 bp, synthetic construct
  source 1..155: mol_type = other DNA
aggccgtgcataaggctgtggttttagagctagaaatagcaagttaaaataaggctagtccgttatcaacttgaaaaagtggcaccgagtcggtgcacatggccccagcagcttcagtccctttctcgtcgatggtcagcacagccttatgcacg

SEQ ID NO: 23431 - DNA, 154 bp, synthetic construct
  source 1..154: mol_type = other DNA
aggccgtgcataaggctgtggttttagagctagaaatagcaagttaaaataaggctagtccgttatcaacttgaaaaagtggcaccgagtcggtgcacatggccccagcagcttcagtccctttctcgtcgatggtcagcacagccttatgcac

SEQ ID NO: 23432 - DNA, 153 bp, synthetic construct
  source 1..153: mol_type = other DNA
aggccgtgcataaggctgtggttttagagctagaaatagcaagttaaaataaggctagtccgttatcaacttgaaaaagtggcaccgagtcggtgcacatggccccagcagcttcagtccctttctcgtcgatggtcagcacagccttatgca

SEQ ID NO: 23433 - DNA, 152 bp, synthetic construct
  source 1..152: mol_type = other DNA
aggccgtgcataaggctgtggttttagagctagaaatagcaagttaaaataaggctagtccgttatcaacttgaaaaagtggcaccgagtcggtgcacatggccccagcagcttcagtccctttctcgtcgatggtcagcacagccttatgc

SEQ ID NO: 23434 - DNA, 151 bp, synthetic construct
  source 1..151: mol_type = other DNA
aggccgtgcataaggctgtggttttagagctagaaatagcaagttaaaataaggctagtccgttatcaacttgaaaaagtggcaccgagtcggtgcacatggccccagcagcttcagtccctttctcgtcgatggtcagcacagccttatg

SEQ ID NO: 23435 - DNA, 150 bp, synthetic construct
  source 1..150: mol_type = other DNA
aggccgtgcataaggctgtggttttagagctagaaatagcaagttaaaataaggctagtccgttatcaacttgaaaaagtggcaccgagtcggtgcacatggccccagcagcttcagtccctttctcgtcgatggtcagcacagccttat

SEQ ID NO: 23436 - DNA, 154 bp, synthetic construct
  source 1..154: mol_type = other DNA
aggccgtgcataaggctgtggttttagagctagaaatagcaagttaaaataaggctagtccgttatcaacttgaaaaagtggcaccgagtcggtgcgccccagcagcttcagtccctttctcgtcgatggtcagcacagccttatgcacggcct

SEQ ID NO: 23437 - DNA, 153 bp, synthetic construct
  source 1..153: mol_type = other DNA
aggccgtgcataaggctgtggttttagagctagaaatagcaagttaaaataaggctagtccgttatcaacttgaaaaagtggcaccgagtcggtgcgccccagcagcttcagtccctttctcgtcgatggtcagcacagccttatgcacggcc

SEQ ID NO: 23438 - DNA, 152 bp, synthetic construct
  source 1..152: mol_type = other DNA
aggccgtgcataaggctgtggttttagagctagaaatagcaagttaaaataaggctagtccgttatcaacttgaaaaagtggcaccgagtcggtgcgccccagcagcttcagtccctttctcgtcgatggtcagcacagccttatgcacggc

SEQ ID NO: 23439 - DNA, 151 bp, synthetic construct
  source 1..151: mol_type = other DNA
aggccgtgcataaggctgtggttttagagctagaaatagcaagttaaaataaggctagtccgttatcaacttgaaaaagtggcaccgagtcggtgcgccccagcagcttcagtccctttctcgtcgatggtcagcacagccttatgcacgg

SEQ ID NO: 23440 - DNA, 150 bp, synthetic construct
  source 1..150: mol_type = other DNA
aggccgtgcataaggctgtggttttagagctagaaatagcaagttaaaataaggctagtccgttatcaacttgaaaaagtggcaccgagtcggtgcgccccagcagcttcagtccctttctcgtcgatggtcagcacagccttatgcacg

SEQ ID NO: 23441 - DNA, 149 bp, synthetic construct
  source 1..149: mol_type = other DNA
aggccgtgcataaggctgtggttttagagctagaaatagcaagttaaaataaggctagtccgttatcaacttgaaaaagtggcaccgagtcggtgcgccccagcagcttcagtccctttctcgtcgatggtcagcacagccttatgcac

SEQ ID NO: 23442 - DNA, 148 bp, synthetic construct
  source 1..148: mol_type = other DNA
aggccgtgcataaggctgtggttttagagctagaaatagcaagttaaaataaggctagtccgttatcaacttgaaaaagtggcaccgagtcggtgcgccccagcagcttcagtccctttctcgtcgatggtcagcacagccttatgca

SEQ ID NO: 23443 - DNA, 147 bp, synthetic construct
  source 1..147: mol_type = other DNA
aggccgtgcataaggctgtggttttagagctagaaatagcaagttaaaataaggctagtccgttatcaacttgaaaaagtggcaccgagtcggtgcgccccagcagcttcagtccctttctcgtcgatggtcagcacagccttatgc

SEQ ID NO: 23444 - DNA, 146 bp, synthetic construct
  source 1..146: mol_type = other DNA
aggccgtgcataaggctgtggttttagagctagaaatagcaagttaaaataaggctagtccgttatcaacttgaaaaagtggcaccgagtcggtgcgccccagcagcttcagtccctttctcgtcgatggtcagcacagccttatg

SEQ ID NO: 23445 - DNA, 145 bp, synthetic construct
  source 1..145: mol_type = other DNA
aggccgtgcataaggctgtggttttagagctagaaatagcaagttaaaataaggctagtccgttatcaacttgaaaaagtggcaccgagtcggtgcgccccagcagcttcagtccctttctcgtcgatggtcagcacagccttat

SEQ ID NO: 23446 - DNA, 149 bp, synthetic construct
  source 1..149: mol_type = other DNA
aggccgtgcataaggctgtggttttagagctagaaatagcaagttaaaataaggctagtccgttatcaacttgaaaaagtggcaccgagtcggtgcagcagcttcagtccctttctcgtcgatggtcagcacagccttatgcacggcct

SEQ ID NO: 23447 - DNA, 148 bp, synthetic construct
  source 1..148: mol_type = other DNA
aggccgtgcataaggctgtggttttagagctagaaatagcaagttaaaataaggctagtccgttatcaacttgaaaaagtggcaccgagtcggtgcagcagcttcagtccctttctcgtcgatggtcagcacagccttatgcacggcc

SEQ ID NO: 23448 - DNA, 147 bp, synthetic construct
  source 1..147: mol_type = other DNA
aggccgtgcataaggctgtggttttagagctagaaatagcaagttaaaataaggctagtccgttatcaacttgaaaaagtggcaccgagtcggtgcagcagcttcagtccctttctcgtcgatggtcagcacagccttatgcacggc

SEQ ID NO: 23449 - DNA, 146 bp, synthetic construct
  source 1..146: mol_type = other DNA
aggccgtgcataaggctgtggttttagagctagaaatagcaagttaaaataaggctagtccgttatcaacttgaaaaagtggcaccgagtcggtgcagcagcttcagtccctttctcgtcgatggtcagcacagccttatgcacgg

SEQ ID NO: 23450 - DNA, 145 bp, synthetic construct
  source 1..145: mol_type = other DNA
aggccgtgcataaggctgtggttttagagctagaaatagcaagttaaaataaggctagtccgttatcaacttgaaaaagtggcaccgagtcggtgcagcagcttcagtccctttctcgtcgatggtcagcacagccttatgcacg

SEQ ID NO: 23451 - DNA, 144 bp, synthetic construct
  source 1..144: mol_type = other DNA
aggccgtgcataaggctgtggttttagagctagaaatagcaagttaaaataaggctagtccgttatcaacttgaaaaagtggcaccgagtcggtgcagcagcttcagtccctttctcgtcgatggtcagcacagccttatgcac

SEQ ID NO: 23452 - DNA, 143 bp, synthetic construct
  source 1..143: mol_type = other DNA
aggccgtgcataaggctgtggttttagagctagaaatagcaagttaaaataaggctagtccgttatcaacttgaaaaagtggcaccgagtcggtgcagcagcttcagtccctttctcgtcgatggtcagcacagccttatgca

SEQ ID NO: 23453 - DNA, 142 bp, synthetic construct
  source 1..142: mol_type = other DNA
aggccgtgcataaggctgtggttttagagctagaaatagcaagttaaaataaggctagtccgttatcaacttgaaaaagtggcaccgagtcggtgcagcagcttcagtccctttctcgtcgatggtcagcacagccttatgc

SEQ ID NO: 23454 - DNA, 141 bp, synthetic construct
  source 1..141: mol_type = other DNA
aggccgtgcataaggctgtggttttagagctagaaatagcaagttaaaataaggctagtccgttatcaacttgaaaaagtggcaccgagtcggtgcagcagcttcagtccctttctcgtcgatggtcagcacagccttatg

SEQ ID NO: 23455 - DNA, 140 bp, synthetic construct
  source 1..140: mol_type = other DNA
aggccgtgcataaggctgtggttttagagctagaaatagcaagttaaaataaggctagtccgttatcaacttgaaaaagtggcaccgagtcggtgcagcagcttcagtccctttctcgtcgatggtcagcacagccttat

SEQ ID NO: 23456 - DNA, 143 bp, synthetic construct
  source 1..143: mol_type = other DNA
aggccgtgcataaggctgtggttttagagctagaaatagcaagttaaaataaggctagtccgttatcaacttgaaaaagtggcaccgagtcggtgcttcagtccctttctcgtcgatggtcagcacagccttatgcacggcct

SEQ ID NO: 23457 - DNA, 142 bp, synthetic construct
  source 1..142: mol_type = other DNA
aggccgtgcataaggctgtggttttagagctagaaatagcaagttaaaataaggctagtccgttatcaacttgaaaaagtggcaccgagtcggtgcttcagtccctttctcgtcgatggtcagcacagccttatgcacggcc

SEQ ID NO: 23458 - DNA, 141 bp, synthetic construct
  source 1..141: mol_type = other DNA
aggccgtgcataaggctgtggttttagagctagaaatagcaagttaaaataaggctagtccgttatcaacttgaaaaagtggcaccgagtcggtgcttcagtccctttctcgtcgatggtcagcacagccttatgcacggc

SEQ ID NO: 23459 - DNA, 140 bp, synthetic construct
  source 1..140: mol_type = other DNA
aggccgtgcataaggctgtggttttagagctagaaatagcaagttaaaataaggctagtccgttatcaacttgaaaaagtggcaccgagtcggtgcttcagtccctttctcgtcgatggtcagcacagccttatgcacgg

SEQ ID NO: 23460 - DNA, 139 bp, synthetic construct
  source 1..139: mol_type = other DNA
aggccgtgcataaggctgtggttttagagctagaaatagcaagttaaaataaggctagtccgttatcaacttgaaaaagtggcaccgagtcggtgcttcagtccctttctcgtcgatggtcagcacagccttatgcacg

SEQ ID NO: 23461 - DNA, 138 bp, synthetic construct; identical to SEQ ID NO: 19144
  source 1..138: mol_type = other DNA

SEQ ID NO: 23462 - DNA, 137 bp, synthetic construct
  source 1..137: mol_type = other DNA
aggccgtgcataaggctgtggttttagagctagaaatagcaagttaaaataaggctagtccgttatcaacttgaaaaagtggcaccgagtcggtgcttcagtccctttctcgtcgatggtcagcacagccttatgca

SEQ ID NO: 23463 - DNA, 136 bp, synthetic construct
  source 1..136: mol_type = other DNA
aggccgtgcataaggctgtggttttagagctagaaatagcaagttaaaataaggctagtccgttatcaacttgaaaaagtggcaccgagtcggtgcttcagtccctttctcgtcgatggtcagcacagccttatgc

SEQ ID NO: 23464 - DNA, 135 bp, synthetic construct
  source 1..135: mol_type = other DNA
aggccgtgcataaggctgtggttttagagctagaaatagcaagttaaaataaggctagtccgttatcaacttgaaaaagtggcaccgagtcggtgcttcagtccctttctcgtcgatggtcagcacagccttatg

SEQ ID NO: 23465 - DNA, 134 bp, synthetic construct
  source 1..134: mol_type = other DNA
aggccgtgcataaggctgtggttttagagctagaaatagcaagttaaaataaggctagtccgttatcaacttgaaaaagtggcaccgagtcggtgcttcagtccctttctcgtcgatggtcagcacagccttat

SEQ ID NO: 23466 - DNA, 140 bp, synthetic construct
  source 1..140: mol_type = other DNA
aggccgtgcataaggctgtggttttagagctagaaatagcaagttaaaataaggctagtccgttatcaacttgaaaaagtggcaccgagtcggtgcagtccctttctcgtcgatggtcagcacagccttatgcacggcct

SEQ ID NO: 23467 - DNA, 139 bp, synthetic construct
  source 1..139: mol_type = other DNA
aggccgtgcataaggctgtggttttagagctagaaatagcaagttaaaataaggctagtccgttatcaacttgaaaaagtggcaccgagtcggtgcagtccctttctcgtcgatggtcagcacagccttatgcacggcc

SEQ ID NO: 23468 - DNA, 138 bp, synthetic construct
  source 1..138: mol_type = other DNA
aggccgtgcataaggctgtggttttagagctagaaatagcaagttaaaataaggctagtccgttatcaacttgaaaaagtggcaccgagtcggtgcagtccctttctcgtcgatggtcagcacagccttatgcacggc

SEQ ID NO: 23469 - DNA, 137 bp, synthetic construct
  source 1..137: mol_type = other DNA
aggccgtgcataaggctgtggttttagagctagaaatagcaagttaaaataaggctagtccgttatcaacttgaaaaagtggcaccgagtcggtgcagtccctttctcgtcgatggtcagcacagccttatgcacgg

SEQ ID NO: 23470 - DNA, 136 bp, synthetic construct
  source 1..136: mol_type = other DNA
aggccgtgcataaggctgtggttttagagctagaaatagcaagttaaaataaggctagtccgttatcaacttgaaaaagtggcaccgagtcggtgcagtccctttctcgtcgatggtcagcacagccttatgcacg

SEQ ID NO: 23471 - DNA, 135 bp, synthetic construct
  source 1..135: mol_type = other DNA
aggccgtgcataaggctgtggttttagagctagaaatagcaagttaaaataaggctagtccgttatcaacttgaaaaagtggcaccgagtcggtgcagtccctttctcgtcgatggtcagcacagccttatgcac

SEQ ID NO: 23472 - DNA, 134 bp, synthetic construct
  source 1..134: mol_type = other DNA
aggccgtgcataaggctgtggttttagagctagaaatagcaagttaaaataaggctagtccgttatcaacttgaaaaagtggcaccgagtcggtgcagtccctttctcgtcgatggtcagcacagccttatgca

SEQ ID NO: 23473 - DNA, 133 bp, synthetic construct
  source 1..133: mol_type = other DNA
aggccgtgcataaggctgtggttttagagctagaaatagcaagttaaaataaggctagtccgttatcaacttgaaaaagtggcaccgagtcggtgcagtccctttctcgtcgatggtcagcacagccttatgc

SEQ ID NO: 23474 - DNA, 132 bp, synthetic construct
  source 1..132: mol_type = other DNA
aggccgtgcataaggctgtggttttagagctagaaatagcaagttaaaataaggctagtccgttatcaacttgaaaaagtggcaccgagtcggtgcagtccctttctcgtcgatggtcagcacagccttatg

SEQ ID NO: 23475 - DNA, 131 bp, synthetic construct
  source 1..131: mol_type = other DNA
aggccgtgcataaggctgtggttttagagctagaaatagcaagttaaaataaggctagtccgttatcaacttgaaaaagtggcaccgagtcggtgcagtccctttctcgtcgatggtcagcacagccttat

SEQ ID NO: 23476 - DNA, 138 bp, synthetic construct
  source 1..138: mol_type = other DNA
aggccgtgcataaggctgtggttttagagctagaaatagcaagttaaaataaggctagtccgttatcaacttgaaaaagtggcaccgagtcggtgctccctttctcgtcgatggtcagcacagccttatgcacggcct

SEQ ID NO: 23477 - DNA, 137 bp, synthetic construct
  source 1..137: mol_type = other DNA
aggccgtgcataaggctgtggttttagagctagaaatagcaagttaaaataaggctagtccgttatcaacttgaaaaagtggcaccgagtcggtgctccctttctcgtcgatggtcagcacagccttatgcacggcc

SEQ ID NO: 23478 - DNA, 136 bp, synthetic construct
  source 1..136: mol_type = other DNA
aggccgtgcataaggctgtggttttagagctagaaatagcaagttaaaataaggctagtccgttatcaacttgaaaaagtggcaccgagtcggtgctccctttctcgtcgatggtcagcacagccttatgcacggc

SEQ ID NO: 23479 - DNA, 135 bp, synthetic construct
  source 1..135: mol_type = other DNA
aggccgtgcataaggctgtggttttagagctagaaatagcaagttaaaataaggctagtccgttatcaacttgaaaaagtggcaccgagtcggtgctccctttctcgtcgatggtcagcacagccttatgcacgg

SEQ ID NO: 23480 - DNA, 134 bp, synthetic construct
  source 1..134: mol_type = other DNA
aggccgtgcataaggctgtggttttagagctagaaatagcaagttaaaataaggctagtccgttatcaacttgaaaaagtggcaccgagtcggtgctccctttctcgtcgatggtcagcacagccttatgcacg

SEQ ID NO: 23481 - DNA, 133 bp, synthetic construct
  source 1..133: mol_type = other DNA
aggccgtgcataaggctgtggttttagagctagaaatagcaagttaaaataaggctagtccgttatcaacttgaaaaagtggcaccgagtcggtgctccctttctcgtcgatggtcagcacagccttatgcac

SEQ ID NO: 23482 - DNA, 132 bp, synthetic construct
  source 1..132: mol_type = other DNA
aggccgtgcataaggctgtggttttagagctagaaatagcaagttaaaataaggctagtccgttatcaacttgaaaaagtggcaccgagtcggtgctccctttctcgtcgatggtcagcacagccttatgca

SEQ ID NO: 23483 - DNA, 131 bp, synthetic construct
  source 1..131: mol_type = other DNA
aggccgtgcataaggctgtggttttagagctagaaatagcaagttaaaataaggctagtccgttatcaacttgaaaaagtggcaccgagtcggtgctccctttctcgtcgatggtcagcacagccttatgc

SEQ ID NO: 23484 - DNA, 130 bp, synthetic construct
  source 1..130: mol_type = other DNA
aggccgtgcataaggctgtggttttagagctagaaatagcaagttaaaataaggctagtccgttatcaacttgaaaaagtggcaccgagtcggtgctccctttctcgtcgatggtcagcacagccttatg

SEQ ID NO: 23485 - DNA, 129 bp, synthetic construct
  source 1..129: mol_type = other DNA
aggccgtgcataaggctgtggttttagagctagaaatagcaagttaaaataaggctagtccgttatcaacttgaaaaagtggcaccgagtcggtgctccctttctcgtcgatggtcagcacagccttat

SEQ ID NO: 23486 - DNA, 136 bp, synthetic construct
  source 1..136: mol_type = other DNA
aggccgtgcataaggctgtggttttagagctagaaatagcaagttaaaataaggctagtccgttatcaacttgaaaaagtggcaccgagtcggtgccctttctcgtcgatggtcagcacagccttatgcacggcct

SEQ ID NO: 23487 - DNA, 135 bp, synthetic construct
  source 1..135: mol_type = other DNA
aggccgtgcataaggctgtggttttagagctagaaatagcaagttaaaataaggctagtccgttatcaacttgaaaaagtggcaccgagtcggtgccctttctcgtcgatggtcagcacagccttatgcacggcc

SEQ ID NO: 23488 - DNA, 134 bp, synthetic construct
  source 1..134: mol_type = other DNA
aggccgtgcataaggctgtggttttagagctagaaatagcaagttaaaataaggctagtccgttatcaacttgaaaaagtggcaccgagtcggtgccctttctcgtcgatggtcagcacagccttatgcacggc

SEQ ID NO: 23489 - DNA, 133 bp, synthetic construct
  source 1..133: mol_type = other DNA
aggccgtgcataaggctgtggttttagagctagaaatagcaagttaaaataaggctagtccgttatcaacttgaaaaagtggcaccgagtcggtgccctttctcgtcgatggtcagcacagccttatgcacgg

SEQ ID NO: 23490 - DNA, 132 bp, synthetic construct
  source 1..132: mol_type = other DNA
aggccgtgcataaggctgtggttttagagctagaaatagcaagttaaaataaggctagtccgttatcaacttgaaaaagtggcaccgagtcggtgccctttctcgtcgatggtcagcacagccttatgcacg

SEQ ID NO: 23491 - DNA, 131 bp, synthetic construct
  source 1..131: mol_type = other DNA
aggccgtgcataaggctgtggttttagagctagaaatagcaagttaaaataaggctagtccgttatcaacttgaaaaagtggcaccgagtcggtgccctttctcgtcgatggtcagcacagccttatgcac

SEQ ID NO: 23492 - DNA, 130 bp, synthetic construct
  source 1..130: mol_type = other DNA
aggccgtgcataaggctgtggttttagagctagaaatagcaagttaaaataaggctagtccgttatcaacttgaaaaagtggcaccgagtcggtgccctttctcgtcgatggtcagcacagccttatgca

SEQ ID NO: 23493 - DNA, 129 bp, synthetic construct
  source 1..129: mol_type = other DNA
aggccgtgcataaggctgtggttttagagctagaaatagcaagttaaaataaggctagtccgttatcaacttgaaaaagtggcaccgagtcggtgccctttctcgtcgatggtcagcacagccttatgc

SEQ ID NO: 23494 - DNA, 128 bp, synthetic construct
  source 1..128: mol_type = other DNA
aggccgtgcataaggctgtggttttagagctagaaatagcaagttaaaataaggctagtccgttatcaacttgaaaaagtggcaccgagtcggtgccctttctcgtcgatggtcagcacagccttatg

SEQ ID NO: 23495 - DNA, 127 bp, synthetic construct
  source 1..127: mol_type = other DNA
aggccgtgcataaggctgtggttttagagctagaaatagcaagttaaaataaggctagtccgttatcaacttgaaaaagtggcaccgagtcggtgccctttctcgtcgatggtcagcacagccttat

SEQ ID NO: 23496 - DNA, 134 bp, synthetic construct
  source 1..134: mol_type = other DNA
aggccgtgcataaggctgtggttttagagctagaaatagcaagttaaaataaggctagtccgttatcaacttgaaaaagtggcaccgagtcggtgctttctcgtcgatggtcagcacagccttatgcacggcct

SEQ ID NO: 23497 - DNA, 133 bp, synthetic construct
  source 1..133: mol_type = other DNA
aggccgtgcataaggctgtggttttagagctagaaatagcaagttaaaataaggctagtccgttatcaacttgaaaaagtggcaccgagtcggtgctttctcgtcgatggtcagcacagccttatgcacggcc

SEQ ID NO: 23498 - DNA, 132 bp, synthetic construct
  source 1..132: mol_type = other DNA
aggccgtgcataaggctgtggttttagagctagaaatagcaagttaaaataaggctagtccgttatcaacttgaaaaagtggcaccgagtcggtgctttctcgtcgatggtcagcacagccttatgcacggc

SEQ ID NO: 23499 - DNA, 131 bp, synthetic construct
  source 1..131: mol_type = other DNA
aggccgtgcataaggctgtggttttagagctagaaatagcaagttaaaataaggctagtccgttatcaacttgaaaaagtggcaccgagtcggtgctttctcgtcgatggtcagcacagccttatgcacgg

SEQ ID NO: 23500 - DNA, 130 bp, synthetic construct
  source 1..130: mol_type = other DNA
aggccgtgcataaggctgtggttttagagctagaaatagcaagttaaaataaggctagtccgttatcaacttgaaaaagtggcaccgagtcggtgctttctcgtcgatggtcagcacagccttatgcacg

SEQ ID NO: 23501 - DNA, 129 bp, synthetic construct
  source 1..129: mol_type = other DNA
aggccgtgcataaggctgtggttttagagctagaaatagcaagttaaaataaggctagtccgttatcaacttgaaaaagtggcaccgagtcggtgctttctcgtcgatggtcagcacagccttatgcac

SEQ ID NO: 23502 - DNA, 128 bp, synthetic construct
  source 1..128: mol_type = other DNA
aggccgtgcataaggctgtggttttagagctagaaatagcaagttaaaataaggctagtccgttatcaacttgaaaaagtggcaccgagtcggtgctttctcgtcgatggtcagcacagccttatgca

SEQ ID NO: 23503 - DNA, 127 bp, synthetic construct
  source 1..127: mol_type = other DNA
aggccgtgcataaggctgtggttttagagctagaaatagcaagttaaaataaggctagtccgttatcaacttgaaaaagtggcaccgagtcggtgctttctcgtcgatggtcagcacagccttatgc

SEQ ID NO: 23504 - DNA, 126 bp, synthetic construct
  source 1..126: mol_type = other DNA
aggccgtgcataaggctgtggttttagagctagaaatagcaagttaaaataaggctagtccgttatcaacttgaaaaagtggcaccgagtcggtgctttctcgtcgatggtcagcacagccttatg

SEQ ID NO: 23505 - DNA, 125 bp, synthetic construct
  source 1..125: mol_type = other DNA
aggccgtgcataaggctgtggttttagagctagaaatagcaagttaaaataaggctagtccgttatcaacttgaaaaagtggcaccgagtcggtgctttctcgtcgatggtcagcacagccttat

SEQ ID NO: 23506 - DNA, 132 bp, synthetic construct
  source 1..132: mol_type = other DNA
aggccgtgcataaggctgtggttttagagctagaaatagcaagttaaaataaggctagtccgttatcaacttgaaaaagtggcaccgagtcggtgctctcgtcgatggtcagcacagccttatgcacggcct

SEQ ID NO: 23507 - DNA, 131 bp, synthetic construct
  source 1..131: mol_type = other DNA
aggccgtgcataaggctgtggttttagagctagaaatagcaagttaaaataaggctagtccgttatcaacttgaaaaagtggcaccgagtcggtgctctcgtcgatggtcagcacagccttatgcacggcc

SEQ ID NO: 23508 - DNA, 130 bp, synthetic construct
  source 1..130: mol_type = other DNA
aggccgtgcataaggctgtggttttagagctagaaatagcaagttaaaataaggctagtccgttatcaacttgaaaaagtggcaccgagtcggtgctctcgtcgatggtcagcacagccttatgcacggc

SEQ ID NO: 23509 - DNA, 129 bp, synthetic construct
  source 1..129: mol_type = other DNA
aggccgtgcataaggctgtggttttagagctagaaatagcaagttaaaataaggctagtccgttatcaacttgaaaaagtggcaccgagtcggtgctctcgtcgatggtcagcacagccttatgcacgg

SEQ ID NO: 23510 - DNA, 128 bp, synthetic construct
  source 1..128: mol_type = other DNA
aggccgtgcataaggctgtggttttagagctagaaatagcaagttaaaataaggctagtccgttatcaacttgaaaaagtggcaccgagtcggtgctctcgtcgatggtcagcacagccttatgcacg

SEQ ID NO: 23511 - DNA, 127 bp, synthetic construct
  source 1..127: mol_type = other DNA
aggccgtgcataaggctgtggttttagagctagaaatagcaagttaaaataaggctagtccgttatcaacttgaaaaagtggcaccgagtcggtgctctcgtcgatggtcagcacagccttatgcac

SEQ ID NO: 23512 - DNA, 126 bp, synthetic construct
  source 1..126: mol_type = other DNA
aggccgtgcataaggctgtggttttagagctagaaatagcaagttaaaataaggctagtccgttatcaacttgaaaaagtggcaccgagtcggtgctctcgtcgatggtcagcacagccttatgca

SEQ ID NO: 23513 - DNA, 125 bp, synthetic construct
  source 1..125: mol_type = other DNA
aggccgtgcataaggctgtggttttagagctagaaatagcaagttaaaataaggctagtccgttatcaacttgaaaaagtggcaccgagtcggtgctctcgtcgatggtcagcacagccttatgc

SEQ ID NO: 23514 - DNA, 124 bp, synthetic construct
  source 1..124: mol_type = other DNA
aggccgtgcataaggctgtggttttagagctagaaatagcaagttaaaataaggctagtccgttatcaacttgaaaaagtggcaccgagtcggtgctctcgtcgatggtcagcacagccttatg

SEQ ID NO: 23515 - DNA, 123 bp, synthetic construct
  source 1..123: mol_type = other DNA
aggccgtgcataaggctgtggttttagagctagaaatagcaagttaaaataaggctagtccgttatcaacttgaaaaagtggcaccgagtcggtgctctcgtcgatggtcagcacagccttat

SEQ ID NO: 23516 - DNA, 181 bp, synthetic construct
  source 1..181: mol_type = other DNA
tccaggccgtgcataaggctgtggttgtagctcccgaaacgttgctacaataaggccgtctgaaaagatgtgccgcaacgctctgccccttaaagcttctgctttaaggggcatcgttacatggccccagcagcttcagtccctttctcgtcgatggtcagcacagccttatgcacggcct

SEQ ID NO: 23517 - DNA, 180 bp, synthetic construct
  source 1..180: mol_type = other DNA
tccaggccgtgcataaggctgtggttgtagctcccgaaacgttgctacaataaggccgtctgaaaagatgtgccgcaacgctctgccccttaaagcttctgctttaaggggcatcgttacatggccccagcagcttcagtccctttctcgtcgatggtcagcacagccttatgcacggcc

SEQ ID NO: 23518 - DNA, 179 bp, synthetic construct
  source 1..179: mol_type = other DNA
tccaggccgtgcataaggctgtggttgtagctcccgaaacgttgctacaataaggccgtctgaaaagatgtgccgcaacgctctgccccttaaagcttctgctttaaggggcatcgttacatggccccagcagcttcagtccctttctcgtcgatggtcagcacagccttatgcacggc

SEQ ID NO: 23519 - DNA, 178 bp, synthetic construct
  source 1..178: mol_type = other DNA
tccaggccgtgcataaggctgtggttgtagctcccgaaacgttgctacaataaggccgtctgaaaagatgtgccgcaacgctctgccccttaaagcttctgctttaaggggcatcgttacatggccccagcagcttcagtccctttctcgtcgatggtcagcacagccttatgcacgg

SEQ ID NO: 23520 - DNA, 177 bp, synthetic construct
  source 1..177: mol_type = other DNA
tccaggccgtgcataaggctgtggttgtagctcccgaaacgttgctacaataaggccgtctgaaaagatgtgccgcaacgctctgccccttaaagcttctgctttaaggggcatcgttacatggccccagcagcttcagtccctttctcgtcgatggtcagcacagccttatgcacg

SEQ ID NO: 23521 - DNA, 176 bp, synthetic construct
  source 1..176: mol_type = other DNA
tccaggccgtgcataaggctgtggttgtagctcccgaaacgttgctacaataaggccgtctgaaaagatgtgccgcaacgctctgccccttaaagcttctgctttaaggggcatcgttacatggccccagcagcttcagtccctttctcgtcgatggtcagcacagccttatgcac

SEQ ID NO: 23522 - DNA, 175 bp, synthetic construct
  source 1..175: mol_type = other DNA
tccaggccgtgcataaggctgtggttgtagctcccgaaacgttgctacaataaggccgtctgaaaagatgtgccgcaacgctctgccccttaaagcttctgctttaaggggcatcgttacatggccccagcagcttcagtccctttctcgtcgatggtcagcacagccttatgca

SEQ ID NO: 23523 - DNA, 174 bp, synthetic construct
  source 1..174: mol_type = other DNA
tccaggccgtgcataaggctgtggttgtagctcccgaaacgttgctacaataaggccgtctgaaaagatgtgccgcaacgctctgccccttaaagcttctgctttaaggggcatcgttacatggccccagcagcttcagtccctttctcgtcgatggtcagcacagccttatgc

SEQ ID NO: 23524 - DNA, 173 bp, synthetic construct
  source 1..173: mol_type = other DNA
tccaggccgtgcataaggctgtggttgtagctcccgaaacgttgctacaataaggccgtctgaaaagatgtgccgcaacgctctgccccttaaagcttctgctttaaggggcatcgttacatggccccagcagcttcagtccctttctcgtcgatggtcagcacagccttatg

SEQ ID NO: 23525 - DNA, 172 bp, synthetic construct
  source 1..172: mol_type = other DNA
tccaggccgtgcataaggctgtggttgtagctcccgaaacgttgctacaataaggccgtctgaaaagatgtgccgcaacgctctgccccttaaagcttctgctttaaggggcatcgttacatggccccagcagcttcagtccctttctcgtcgatggtcagcacagccttat

SEQ ID NO: 23526 - DNA, 176 bp, synthetic construct
  source 1..176: mol_type = other DNA
tccaggccgtgcataaggctgtggttgtagctcccgaaacgttgctacaataaggccgtctgaaaagatgtgccgcaacgctctgccccttaaagcttctgctttaaggggcatcgttgccccagcagcttcagtccctttctcgtcgatggtcagcacagccttatgcacggcct

SEQ ID NO: 23527 - DNA, 175 bp, synthetic construct
  source 1..175: mol_type = other DNA
tccaggccgtgcataaggctgtggttgtagctcccgaaacgttgctacaataaggccgtctgaaaagatgtgccgcaacgctctgccccttaaagcttctgctttaaggggcatcgttgccccagcagcttcagtccctttctcgtcgatggtcagcacagccttatgcacggcc

SEQ ID NO: 23528 - DNA, 174 bp, synthetic construct
  source 1..174: mol_type = other DNA
tccaggccgtgcataaggctgtggttgtagctcccgaaacgttgctacaataaggccgtctgaaaagatgtgccgcaacgctctgccccttaaagcttctgctttaaggggcatcgttgccccagcagcttcagtccctttctcgtcgatggtcagcacagccttatgcacggc

SEQ ID NO: 23529 - DNA, 173 bp, synthetic construct
  source 1..173: mol_type = other DNA
tccaggccgtgcataaggctgtggttgtagctcccgaaacgttgctacaataaggccgtctgaaaagatgtgccgcaacgctctgccccttaaagcttctgctttaaggggcatcgttgccccagcagcttcagtccctttctcgtcgatggtcagcacagccttatgcacgg

SEQ ID NO: 23530 - DNA, 172 bp, synthetic construct
  source 1..172: mol_type = other DNA
tccaggccgtgcataaggctgtggttgtagctcccgaaacgttgctacaataaggccgtctgaaaagatgtgccgcaacgctctgccccttaaagcttctgctttaaggggcatcgttgccccagcagcttcagtccctttctcgtcgatggtcagcacagccttatgcacg

SEQ ID NO: 23531 - DNA, 171 bp, synthetic construct
  source 1..171: mol_type = other DNA
tccaggccgtgcataaggctgtggttgtagctcccgaaacgttgctacaataaggccgtctgaaaagatgtgccgcaacgctctgccccttaaagcttctgctttaaggggcatcgttgccccagcagcttcagtccctttctcgtcgatggtcagcacagccttatgcac

SEQ ID NO: 23532 - DNA, 170 bp, synthetic construct
  source 1..170: mol_type = other DNA
tccaggccgtgcataaggctgtggttgtagctcccgaaacgttgctacaataaggccgtctgaaaagatgtgccgcaacgctctgccccttaaagcttctgctttaaggggcatcgttgccccagcagcttcagtccctttctcgtcgatggtcagcacagccttatgca

SEQ ID NO: 23533 - DNA, 169 bp, synthetic construct
  source 1..169: mol_type = other DNA
tccaggccgtgcataaggctgtggttgtagctcccgaaacgttgctacaataaggccgtctgaaaagatgtgccgcaacgctctgccccttaaagcttctgctttaaggggcatcgttgccccagcagcttcagtccctttctcgtcgatggtcagcacagccttatgc

SEQ ID NO: 23534 - DNA, 168 bp, synthetic construct
  source 1..168: mol_type = other DNA
tccaggccgtgcataaggctgtggttgtagctcccgaaacgttgctacaataaggccgtctgaaaagatgtgccgcaacgctctgccccttaaagcttctgctttaaggggcatcgttgccccagcagcttcagtccctttctcgtcgatggtcagcacagccttatg

SEQ ID NO: 23535 - DNA, 167 bp, synthetic construct
  source 1..167: mol_type = other DNA
tccaggccgtgcataaggctgtggttgtagctcccgaaacgttgctacaataaggccgtctgaaaagatgtgccgcaacgctctgccccttaaagcttctgctttaaggggcatcgttgccccagcagcttcagtccctttctcgtcgatggtcagcacagccttat

SEQ ID NO: 23536 - DNA, 171 bp, synthetic construct
  source 1..171: mol_type = other DNA
tccaggccgtgcataaggctgtggttgtagctcccgaaacgttgctacaataaggccgtctgaaaagatgtgccgcaacgctctgccccttaaagcttctgctttaaggggcatcgttagcagcttcagtccctttctcgtcgatggtcagcacagccttatgcacggcct

SEQ ID NO: 23537 - DNA, 170 bp, synthetic construct
  source 1..170: mol_type = other DNA
tccaggccgtgcataaggctgtggttgtagctcccgaaacgttgctacaataaggccgtctgaaaagatgtgccgcaacgctctgccccttaaagcttctgctttaaggggcatcgttagcagcttcagtccctttctcgtcgatggtcagcacagccttatgcacggcc

SEQ ID NO: 23538 - DNA, 169 bp, synthetic construct
  source 1..169: mol_type = other DNA
tccaggccgtgcataaggctgtggttgtagctcccgaaacgttgctacaataaggccgtctgaaaagatgtgccgcaacgctctgccccttaaagcttctgctttaaggggcatcgttagcagcttcagtccctttctcgtcgatggtcagcacagccttatgcacggc

SEQ ID NO: 23539 - DNA, 168 bp, synthetic construct
  source 1..168: mol_type = other DNA
tccaggccgtgcataaggctgtggttgtagctcccgaaacgttgctacaataaggccgtctgaaaagatgtgccgcaacgctctgccccttaaagcttctgctttaaggggcatcgttagcagcttcagtccctttctcgtcgatggtcagcacagccttatgcacgg

SEQ ID NO: 23540 - DNA, 167 bp, synthetic construct
  source 1..167: mol_type = other DNA
tccaggccgtgcataaggctgtggttgtagctcccgaaacgttgctacaataaggccgtctgaaaagatgtgccgcaacgctctgccccttaaagcttctgctttaaggggcatcgttagcagcttcagtccctttctcgtcgatggtcagcacagccttatgcacg

SEQ ID NO: 23541 - DNA, 166 bp, synthetic construct
  source 1..166: mol_type = other DNA
tccaggccgtgcataaggctgtggttgtagctcccgaaacgttgctacaataaggccgtctgaaaagatgtgccgcaacgctctgccccttaaagcttctgctttaaggggcatcgttagcagcttcagtccctttctcgtcgatggtcagcacagccttatgcac

SEQ ID NO: 23542 - DNA, 165 bp, synthetic construct
  source 1..165: mol_type = other DNA
tccaggccgtgcataaggctgtggttgtagctcccgaaacgttgctacaataaggccgtctgaaaagatgtgccgcaacgctctgccccttaaagcttctgctttaaggggcatcgttagcagcttcagtccctttctcgtcgatggtcagcacagccttatgca

SEQ ID NO: 23543 - DNA, 164 bp, synthetic construct
  source 1..164: mol_type = other DNA
tccaggccgtgcataaggctgtggttgtagctcccgaaacgttgctacaataaggccgtctgaaaagatgtgccgcaacgctctgccccttaaagcttctgctttaaggggcatcgttagcagcttcagtccctttctcgtcgatggtcagcacagccttatgc

SEQ ID NO: 23544 - DNA, 163 bp, synthetic construct
  source 1..163: mol_type = other DNA
tccaggccgtgcataaggctgtggttgtagctcccgaaacgttgctacaataaggccgtctgaaaagatgtgccgcaacgctctgccccttaaagcttctgctttaaggggcatcgttagcagcttcagtccctttctcgtcgatggtcagcacagccttatg

SEQ ID NO: 23545 - DNA, 162 bp, synthetic construct
  source 1..162: mol_type = other DNA
tccaggccgtgcataaggctgtggttgtagctcccgaaacgttgctacaataaggccgtctgaaaagatgtgccgcaacgctctgccccttaaagcttctgctttaaggggcatcgttagcagcttcagtccctttctcgtcgatggtcagcacagccttat

SEQ ID NO: 23546 - DNA, 165 bp, synthetic construct
  source 1..165: mol_type = other DNA
tccaggccgtgcataaggctgtggttgtagctcccgaaacgttgctacaataaggccgtctgaaaagatgtgccgcaacgctctgccccttaaagcttctgctttaaggggcatcgttttcagtccctttctcgtcgatggtcagcacagccttatgcacggcct

SEQ ID NO: 23547 - DNA, 164 bp, synthetic construct
  source 1..164: mol_type = other DNA
tccaggccgtgcataaggctgtggttgtagctcccgaaacgttgctacaataaggccgtctgaaaagatgtgccgcaacgctctgccccttaaagcttctgctttaaggggcatcgttttcagtccctttctcgtcgatggtcagcacagccttatgcacggcc

SEQ ID NO: 23548 - DNA, 163 bp, synthetic construct
  source 1..163: mol_type = other DNA
tccaggccgtgcataaggctgtggttgtagctcccgaaacgttgctacaataaggccgtctgaaaagatgtgccgcaacgctctgccccttaaagcttctgctttaaggggcatcgttttcagtccctttctcgtcgatggtcagcacagccttatgcacggc

SEQ ID NO: 23549 - DNA, 162 bp, synthetic construct
  source 1..162: mol_type = other DNA
tccaggccgtgcataaggctgtggttgtagctcccgaaacgttgctacaataaggccgtctgaaaagatgtgccgcaacgctctgccccttaaagcttctgctttaaggggcatcgttttcagtccctttctcgtcgatggtcagcacagccttatgcacgg

SEQ ID NO: 23550 - DNA, 161 bp, synthetic construct
  source 1..161: mol_type = other DNA
tccaggccgtgcataaggctgtggttgtagctcccgaaacgttgctacaataaggccgtctgaaaagatgtgccgcaacgctctgccccttaaagcttctgctttaaggggcatcgttttcagtccctttctcgtcgatggtcagcacagccttatgcacg

SEQ ID NO: 23551 - DNA, 160 bp, synthetic construct
  source 1..160: mol_type = other DNA
tccaggccgtgcataaggctgtggttgtagctcccgaaacgttgctacaataaggccgtctgaaaagatgtgccgcaacgctctgccccttaaagcttctgctttaaggggcatcgttttcagtccctttctcgtcgatggtcagcacagccttatgcac

SEQ ID NO: 23552 - DNA, 159 bp, synthetic construct
  source 1..159: mol_type = other DNA
tccaggccgtgcataaggctgtggttgtagctcccgaaacgttgctacaataaggccgtctgaaaagatgtgccgcaacgctctgccccttaaagcttctgctttaaggggcatcgttttcagtccctttctcgtcgatggtcagcacagccttatgca

SEQ ID NO: 23553 - DNA, 158 bp, synthetic construct
  source 1..158: mol_type = other DNA
tccaggccgtgcataaggctgtggttgtagctcccgaaacgttgctacaataaggccgtctgaaaagatgtgccgcaacgctctgccccttaaagcttctgctttaaggggcatcgttttcagtccctttctcgtcgatggtcagcacagccttatgc

SEQ ID NO: 23554 - DNA, 157 bp, synthetic construct
  source 1..157: mol_type = other DNA
tccaggccgtgcataaggctgtggttgtagctcccgaaacgttgctacaataaggccgtctgaaaagatgtgccgcaacgctctgccccttaaagcttctgctttaaggggcatcgttttcagtccctttctcgtcgatggtcagcacagccttatg

SEQ ID NO: 23555 - DNA, 156 bp, synthetic construct
  source 1..156: mol_type = other DNA
tccaggccgtgcataaggctgtggttgtagctcccgaaacgttgctacaataaggccgtctgaaaagatgtgccgcaacgctctgccccttaaagcttctgctttaaggggcatcgttttcagtccctttctcgtcgatggtcagcacagccttat

SEQ ID NO: 23556 - DNA, 162 bp, synthetic construct
  source 1..162: mol_type = other DNA
tccaggccgtgcataaggctgtggttgtagctcccgaaacgttgctacaataaggccgtctgaaaagatgtgccgcaacgctctgccccttaaagcttctgctttaaggggcatcgttagtccctttctcgtcgatggtcagcacagccttatgcacggcct

SEQ ID NO: 23557 - DNA, 161 bp, synthetic construct
  source 1..161: mol_type = other DNA
tccaggccgtgcataaggctgtggttgtagctcccgaaacgttgctacaataaggccgtctgaaaagatgtgccgcaacgctctgccccttaaagcttctgctttaaggggcatcgttagtccctttctcgtcgatggtcagcacagccttatgcacggcc

SEQ ID NO: 23558 - DNA, 160 bp, synthetic construct
  source 1..160: mol_type = other DNA
tccaggccgtgcataaggctgtggttgtagctcccgaaacgttgctacaataaggccgtctgaaaagatgtgccgcaacgctctgccccttaaagcttctgctttaaggggcatcgttagtccctttctcgtcgatggtcagcacagccttatgcacggc

SEQ ID NO: 23559 - DNA, 159 bp, synthetic construct
  source 1..159: mol_type = other DNA
tccaggccgtgcataaggctgtggttgtagctcccgaaacgttgctacaataaggccgtctgaaaagatgtgccgcaacgctctgccccttaaagcttctgctttaaggggcatcgttagtccctttctcgtcgatggtcagcacagccttatgcacgg

SEQ ID NO: 23560 - DNA, 158 bp, synthetic construct
  source 1..158: mol_type = other DNA
tccaggccgtgcataaggctgtggttgtagctcccgaaacgttgctacaataaggccgtctgaaaagatgtgccgcaacgctctgccccttaaagcttctgctttaaggggcatcgttagtccctttctcgtcgatggtcagcacagccttatgcacg

SEQ ID NO: 23561 - DNA, 157 bp, synthetic construct
  source 1..157: mol_type = other DNA
tccaggccgtgcataaggctgtggttgtagctcccgaaacgttgctacaataaggccgtctgaaaagatgtgccgcaacgctctgccccttaaagcttctgctttaaggggcatcgttagtccctttctcgtcgatggtcagcacagccttatgcac

SEQ ID NO: 23562 - DNA, 156 bp, synthetic construct
  source 1..156: mol_type = other DNA
tccaggccgtgcataaggctgtggttgtagctcccgaaacgttgctacaataaggccgtctgaaaagatgtgccgcaacgctctgccccttaaagcttctgctttaaggggcatcgttagtccctttctcgtcgatggtcagcacagccttatgca

SEQ ID NO: 23563 - DNA, 155 bp, synthetic construct
  source 1..155: mol_type = other DNA
tccaggccgtgcataaggctgtggttgtagctcccgaaacgttgctacaataaggccgtctgaaaagatgtgccgcaacgctctgccccttaaagcttctgctttaaggggcatcgttagtccctttctcgtcgatggtcagcacagccttatgc

SEQ ID NO: 23564 - DNA, 154 bp, synthetic construct
  source 1..154: mol_type = other DNA
tccaggccgtgcataaggctgtggttgtagctcccgaaacgttgctacaataaggccgtctgaaaagatgtgccgcaacgctctgccccttaaagcttctgctttaaggggcatcgttagtccctttctcgtcgatggtcagcacagccttatg

SEQ ID NO: 23565 - DNA, 153 bp, synthetic construct
  source 1..153: mol_type = other DNA
tccaggccgtgcataaggctgtggttgtagctcccgaaacgttgctacaataaggccgtctgaaaagatgtgccgcaacgctctgccccttaaagcttctgctttaaggggcatcgttagtccctttctcgtcgatggtcagcacagccttat

SEQ ID NO: 23566 - DNA, 160 bp, synthetic construct
  source 1..160: mol_type = other DNA
tccaggccgtgcataaggctgtggttgtagctcccgaaacgttgctacaataaggccgtctgaaaagatgtgccgcaacgctctgccccttaaagcttctgctttaaggggcatcgtttccctttctcgtcgatggtcagcacagccttatgcacggcct

SEQ ID NO: 23567 - DNA, 159 bp, synthetic construct
  source 1..159: mol_type = other DNA
tccaggccgtgcataaggctgtggttgtagctcccgaaacgttgctacaataaggccgtctgaaaagatgtgccgcaacgctctgccccttaaagcttctgctttaaggggcatcgtttccctttctcgtcgatggtcagcacagccttatgcacggcc

SEQ ID NO: 23568 - DNA, 158 bp, synthetic construct
  source 1..158: mol_type = other DNA
tccaggccgtgcataaggctgtggttgtagctcccgaaacgttgctacaataaggccgtctgaaaagatgtgccgcaacgctctgccccttaaagcttctgctttaaggggcatcgtttccctttctcgtcgatggtcagcacagccttatgcacggc

SEQ ID NO: 23569 - DNA, 157 bp, synthetic construct
  source 1..157: mol_type = other DNA
tccaggccgtgcataaggctgtggttgtagctcccgaaacgttgctacaataaggccgtctgaaaagatgtgccgcaacgctctgccccttaaagcttctgctttaaggggcatcgtttccctttctcgtcgatggtcagcacagccttatgcacgg

SEQ ID NO: 23570 - DNA, 156 bp, synthetic construct
  source 1..156: mol_type = other DNA
tccaggccgtgcataaggctgtggttgtagctcccgaaacgttgctacaataaggccgtctgaaaagatgtgccgcaacgctctgccccttaaagcttctgctttaaggggcatcgtttccctttctcgtcgatggtcagcacagccttatgcacg

SEQ ID NO: 23571 - DNA, 155 bp, synthetic construct
  source 1..155: mol_type = other DNA
tccaggccgtgcataaggctgtggttgtagctcccgaaacgttgctacaataaggccgtctgaaaagatgtgccgcaacgctctgccccttaaagcttctgctttaaggggcatcgtttccctttctcgtcgatggtcagcacagccttatgcac

SEQ ID NO: 23572 - DNA, 154 bp, synthetic construct
  source 1..154: mol_type = other DNA
tccaggccgtgcataaggctgtggttgtagctcccgaaacgttgctacaataaggccgtctgaaaagatgtgccgcaacgctctgccccttaaagcttctgctttaaggggcatcgtttccctttctcgtcgatggtcagcacagccttatgca

SEQ ID NO: 23573 - DNA, 153 bp, synthetic construct
  source 1..153: mol_type = other DNA
tccaggccgtgcataaggctgtggttgtagctcccgaaacgttgctacaataaggccgtctgaaaagatgtgccgcaacgctctgccccttaaagcttctgctttaaggggcatcgtttccctttctcgtcgatggtcagcacagccttatgc

SEQ ID NO: 23574 - DNA, 152 bp, synthetic construct
  source 1..152: mol_type = other DNA
tccaggccgtgcataaggctgtggttgtagctcccgaaacgttgctacaataaggccgtctgaaaagatgtgccgcaacgctctgccccttaaagcttctgctttaaggggcatcgtttccctttctcgtcgatggtcagcacagccttatg

SEQ ID NO: 23575 - DNA, 151 bp, synthetic construct
  source 1..151: mol_type = other DNA
tccaggccgtgcataaggctgtggttgtagctcccgaaacgttgctacaataaggccgtctgaaaagatgtgccgcaacgctctgccccttaaagcttctgctttaaggggcatcgtttccctttctcgtcgatggtcagcacagccttat

SEQ ID NO: 23576 - DNA, 158 bp, synthetic construct
  source 1..158: mol_type = other DNA
tccaggccgtgcataaggctgtggttgtagctcccgaaacgttgctacaataaggccgtctgaaaagatgtgccgcaacgctctgccccttaaagcttctgctttaaggggcatcgttcctttctcgtcgatggtcagcacagccttatgcacggcct

SEQ ID NO: 23577 - DNA, 157 bp, synthetic construct
  source 1..157: mol_type = other DNA
tccaggccgtgcataaggctgtggttgtagctcccgaaacgttgctacaataaggccgtctgaaaagatgtgccgcaacgctctgccccttaaagcttctgctttaaggggcatcgttcctttctcgtcgatggtcagcacagccttatgcacggcc

SEQ ID NO: 23578 - DNA, 156 bp, synthetic construct
  source 1..156: mol_type = other DNA
tccaggccgtgcataaggctgtggttgtagctcccgaaacgttgctacaataaggccgtctgaaaagatgtgccgcaacgctctgccccttaaagcttctgctttaaggggcatcgttcctttctcgtcgatggtcagcacagccttatgcacggc

SEQ ID NO: 23579 - DNA, 155 bp, synthetic construct
  source 1..155: mol_type = other DNA
tccaggccgtgcataaggctgtggttgtagctcccgaaacgttgctacaataaggccgtctgaaaagatgtgccgcaacgctctgccccttaaagcttctgctttaaggggcatcgttcctttctcgtcgatggtcagcacagccttatgcacgg

SEQ ID NO: 23580 - DNA, 154 bp, synthetic construct
  source 1..154: mol_type = other DNA
tccaggccgtgcataaggctgtggttgtagctcccgaaacgttgctacaataaggccgtctgaaaagatgtgccgcaacgctctgccccttaaagcttctgctttaaggggcatcgttcctttctcgtcgatggtcagcacagccttatgcacg

SEQ ID NO: 23581 - DNA, 153 bp, synthetic construct
  source 1..153: mol_type = other DNA
tccaggccgtgcataaggctgtggttgtagctcccgaaacgttgctacaataaggccgtctgaaaagatgtgccgcaacgctctgccccttaaagcttctgctttaaggggcatcgttcctttctcgtcgatggtcagcacagccttatgcac

SEQ ID NO: 23582 - DNA, 152 bp, synthetic construct
  source 1..152: mol_type = other DNA
tccaggccgtgcataaggctgtggttgtagctcccgaaacgttgctacaataaggccgtctgaaaagatgtgccgcaacgctctgccccttaaagcttctgctttaaggggcatcgttcctttctcgtcgatggtcagcacagccttatgca

SEQ ID NO: 23583 - DNA, 151 bp, synthetic construct
  source 1..151: mol_type = other DNA
tccaggccgtgcataaggctgtggttgtagctcccgaaacgttgctacaataaggccgtctgaaaagatgtgccgcaacgctctgccccttaaagcttctgctttaaggggcatcgttcctttctcgtcgatggtcagcacagccttatgc

SEQ ID NO: 23584 - DNA, 150 bp, synthetic construct
  source 1..150: mol_type = other DNA
tccaggccgtgcataaggctgtggttgtagctcccgaaacgttgctacaataaggccgtctgaaaagatgtgccgcaacgctctgccccttaaagcttctgctttaaggggcatcgttcctttctcgtcgatggtcagcacagccttatg

SEQ ID NO: 23585 - DNA, 149 bp, synthetic construct
  source 1..149: mol_type = other DNA
tccaggccgtgcataaggctgtggttgtagctcccgaaacgttgctacaataaggccgtctgaaaagatgtgccgcaacgctctgccccttaaagcttctgctttaaggggcatcgttcctttctcgtcgatggtcagcacagccttat

SEQ ID NO: 23586 - DNA, 156 bp, synthetic construct
  source 1..156: mol_type = other DNA
tccaggccgtgcataaggctgtggttgtagctcccgaaacgttgctacaataaggccgtctgaaaagatgtgccgcaacgctctgccccttaaagcttctgctttaaggggcatcgtttttctcgtcgatggtcagcacagccttatgcacggcct

SEQ ID NO: 23587 - DNA, 155 bp, synthetic construct
  source 1..155: mol_type = other DNA
tccaggccgtgcataaggctgtggttgtagctcccgaaacgttgctacaataaggccgtctgaaaagatgtgccgcaacgctctgccccttaaagcttctgctttaaggggcatcgtttttctcgtcgatggtcagcacagccttatgcacggcc

SEQ ID NO: 23588 - DNA, 154 bp, synthetic construct
  source 1..154: mol_type = other DNA
tccaggccgtgcataaggctgtggttgtagctcccgaaacgttgctacaataaggccgtctgaaaagatgtgccgcaacgctctgccccttaaagcttctgctttaaggggcatcgtttttctcgtcgatggtcagcacagccttatgcacggc

SEQ ID NO: 23589 - DNA, 153 bp, synthetic construct
  source 1..153: mol_type = other DNA
tccaggccgtgcataaggctgtggttgtagctcccgaaacgttgctacaataaggccgtctgaaaagatgtgccgcaacgctctgccccttaaagcttctgctttaaggggcatcgtttttctcgtcgatggtcagcacagccttatgcacgg

SEQ ID NO: 23590 - DNA, 152 bp, synthetic construct
  source 1..152: mol_type = other DNA
tccaggccgtgcataaggctgtggttgtagctcccgaaacgttgctacaataaggccgtctgaaaagatgtgccgcaacgctctgccccttaaagcttctgctttaaggggcatcgtttttctcgtcgatggtcagcacagccttatgcacg

SEQ ID NO: 23591 - DNA, 151 bp, synthetic construct
  source 1..151: mol_type = other DNA
tccaggccgtgcataaggctgtggttgtagctcccgaaacgttgctacaataaggccgtctgaaaagatgtgccgcaacgctctgccccttaaagcttctgctttaaggggcatcgtttttctcgtcgatggtcagcacagccttatgcac

SEQ ID NO: 23592 - DNA, 150 bp, synthetic construct
  source 1..150: mol_type = other DNA
tccaggccgtgcataaggctgtggttgtagctcccgaaacgttgctacaataaggccgtctgaaaagatgtgccgcaacgctctgccccttaaagcttctgctttaaggggcatcgtttttctcgtcgatggtcagcacagccttatgca

SEQ ID NO: 23593 - DNA, 149 bp, synthetic construct
  source 1..149: mol_type = other DNA
tccaggccgtgcataaggctgtggttgtagctcccgaaacgttgctacaataaggccgtctgaaaagatgtgccgcaacgctctgccccttaaagcttctgctttaaggggcatcgtttttctcgtcgatggtcagcacagccttatgc

SEQ ID NO: 23594 - DNA, 148 bp, synthetic construct
  source 1..148: mol_type = other DNA
tccaggccgtgcataaggctgtggttgtagctcccgaaacgttgctacaataaggccgtctgaaaagatgtgccgcaacgctctgccccttaaagcttctgctttaaggggcatcgtttttctcgtcgatggtcagcacagccttatg

SEQ ID NO: 23595 - DNA, 147 bp, synthetic construct
  source 1..147: mol_type = other DNA
tccaggccgtgcataaggctgtggttgtagctcccgaaacgttgctacaataaggccgtctgaaaagatgtgccgcaacgctctgccccttaaagcttctgctttaaggggcatcgtttttctcgtcgatggtcagcacagccttat

SEQ ID NO: 23596 - DNA, 154 bp, synthetic construct
  source 1..154: mol_type = other DNA
tccaggccgtgcataaggctgtggttgtagctcccgaaacgttgctacaataaggccgtctgaaaagatgtgccgcaacgctctgccccttaaagcttctgctttaaggggcatcgtttctcgtcgatggtcagcacagccttatgcacggcct

SEQ ID NO: 23597 - DNA, 153 bp, synthetic construct
  source 1..153: mol_type = other DNA
tccaggccgtgcataaggctgtggttgtagctcccgaaacgttgctacaataaggccgtctgaaaagatgtgccgcaacgctctgccccttaaagcttctgctttaaggggcatcgtttctcgtcgatggtcagcacagccttatgcacggcc

SEQ ID NO: 23598 - DNA, 152 bp, synthetic construct
  source 1..152: mol_type = other DNA
tccaggccgtgcataaggctgtggttgtagctcccgaaacgttgctacaataaggccgtctgaaaagatgtgccgcaacgctctgccccttaaagcttctgctttaaggggcatcgtttctcgtcgatggtcagcacagccttatgcacggc

SEQ ID NO: 23599 - DNA, 151 bp, synthetic construct
  source 1..151: mol_type = other DNA
tccaggccgtgcataaggctgtggttgtagctcccgaaacgttgctacaataaggccgtctgaaaagatgtgccgcaacgctctgccccttaaagcttctgctttaaggggcatcgtttctcgtcgatggtcagcacagccttatgcacgg

SEQ ID NO: 23600 - DNA, 150 bp, synthetic construct
  source 1..150: mol_type = other DNA
tccaggccgtgcataaggctgtggttgtagctcccgaaacgttgctacaataaggccgtctgaaaagatgtgccgcaacgctctgccccttaaagcttctgctttaaggggcatcgtttctcgtcgatggtcagcacagccttatgcacg

SEQ ID NO: 23601 - DNA, 149 bp, synthetic construct
  source 1..149: mol_type = other DNA
tccaggccgtgcataaggctgtggttgtagctcccgaaacgttgctacaataaggccgtctgaaaagatgtgccgcaacgctctgccccttaaagcttctgctttaaggggcatcgtttctcgtcgatggtcagcacagccttatgcac

SEQ ID NO: 23602 - DNA, 148 bp, synthetic construct
  source 1..148: mol_type = other DNA
tccaggccgtgcataaggctgtggttgtagctcccgaaacgttgctacaataaggccgtctgaaaagatgtgccgcaacgctctgccccttaaagcttctgctttaaggggcatcgtttctcgtcgatggtcagcacagccttatgca

SEQ ID NO: 23603 - DNA, 147 bp, synthetic construct
  source 1..147: mol_type = other DNA
tccaggccgtgcataaggctgtggttgtagctcccgaaacgttgctacaataaggccgtctgaaaagatgtgccgcaacgctctgccccttaaagcttctgctttaaggggcatcgtttctcgtcgatggtcagcacagccttatgc

SEQ ID NO: 23604 - DNA, 146 bp, synthetic construct
  source 1..146: mol_type = other DNA
tccaggccgtgcataaggctgtggttgtagctcccgaaacgttgctacaataaggccgtctgaaaagatgtgccgcaacgctctgccccttaaagcttctgctttaaggggcatcgtttctcgtcgatggtcagcacagccttatg

SEQ ID NO: 23605 - DNA, 145 bp, synthetic construct
  source 1..145: mol_type = other DNA
tccaggccgtgcataaggctgtggttgtagctcccgaaacgttgctacaataaggccgtctgaaaagatgtgccgcaacgctctgccccttaaagcttctgctttaaggggcatcgtttctcgtcgatggtcagcacagccttat

SEQ ID NO: 23606 - DNA, 161 bp, synthetic construct
  source 1..161: mol_type = other DNA
ccaggccgtgcataaggctggttttagagctagaaatagcaagttaaaataaggctagtccgttatcaacttgaaaaagtggcaccgagtcggtgcacatggccccagcagcttcagtccctttctcgtcgatggtcagcacagccttatgcacggcctgg

SEQ ID NO: 23607 - DNA, 160 bp, synthetic construct
  source 1..160: mol_type = other DNA
ccaggccgtgcataaggctggttttagagctagaaatagcaagttaaaataaggctagtccgttatcaacttgaaaaagtggcaccgagtcggtgcacatggccccagcagcttcagtccctttctcgtcgatggtcagcacagccttatgcacggcctg

SEQ ID NO: 23608 - DNA, 159 bp, synthetic construct
  source 1..159: mol_type = other DNA
ccaggccgtgcataaggctggttttagagctagaaatagcaagttaaaataaggctagtccgttatcaacttgaaaaagtggcaccgagtcggtgcacatggccccagcagcttcagtccctttctcgtcgatggtcagcacagccttatgcacggcct

SEQ ID NO: 23609 - DNA, 158 bp, synthetic construct
  source 1..158: mol_type = other DNA
ccaggccgtgcataaggctggttttagagctagaaatagcaagttaaaataaggctagtccgttatcaacttgaaaaagtggcaccgagtcggtgcacatggccccagcagcttcagtccctttctcgtcgatggtcagcacagccttatgcacggcc

SEQ ID NO: 23610 - DNA, 157 bp, synthetic construct
  source 1..157: mol_type = other DNA
ccaggccgtgcataaggctggttttagagctagaaatagcaagttaaaataaggctagtccgttatcaacttgaaaaagtggcaccgagtcggtgcacatggccccagcagcttcagtccctttctcgtcgatggtcagcacagccttatgcacggc

SEQ ID NO: 23611 - DNA, 156 bp, synthetic construct
  source 1..156: mol_type = other DNA
ccaggccgtgcataaggctggttttagagctagaaatagcaagttaaaataaggctagtccgttatcaacttgaaaaagtggcaccgagtcggtgcacatggccccagcagcttcagtccctttctcgtcgatggtcagcacagccttatgcacgg

SEQ ID NO: 23612 - DNA, 155 bp, synthetic construct
  source 1..155: mol_type = other DNA
ccaggccgtgcataaggctggttttagagctagaaatagcaagttaaaataaggctagtccgttatcaacttgaaaaagtggcaccgagtcggtgcacatggccccagcagcttcagtccctttctcgtcgatggtcagcacagccttatgcacg

SEQ ID NO: 23613 - DNA, 154 bp, synthetic construct
  source 1..154: mol_type = other DNA
ccaggccgtgcataaggctggttttagagctagaaatagcaagttaaaataaggctagtccgttatcaacttgaaaaagtggcaccgagtcggtgcacatggccccagcagcttcagtccctttctcgtcgatggtcagcacagccttatgcac

SEQ ID NO: 23614 - DNA, 153 bp, synthetic construct
  source 1..153: mol_type = other DNA
ccaggccgtgcataaggctggttttagagctagaaatagcaagttaaaataaggctagtccgttatcaacttgaaaaagtggcaccgagtcggtgcacatggccccagcagcttcagtccctttctcgtcgatggtcagcacagccttatgca

SEQ ID NO: 23615 - DNA, 152 bp, synthetic construct
  source 1..152: mol_type = other DNA
ccaggccgtgcataaggctggttttagagctagaaatagcaagttaaaataaggctagtccgttatcaacttgaaaaagtggcaccgagtcggtgcacatggccccagcagcttcagtccctttctcgtcgatggtcagcacagccttatgc

SEQ ID NO: 23616 - DNA, 156 bp, synthetic construct
  source 1..156: mol_type = other DNA
ccaggccgtgcataaggctggttttagagctagaaatagcaagttaaaataaggctagtccgttatcaacttgaaaaagtggcaccgagtcggtgcgccccagcagcttcagtccctttctcgtcgatggtcagcacagccttatgcacggcctgg

SEQ ID NO: 23617 - DNA, 155 bp, synthetic construct
  source 1..155: mol_type = other DNA
ccaggccgtgcataaggctggttttagagctagaaatagcaagttaaaataaggctagtccgttatcaacttgaaaaagtggcaccgagtcggtgcgccccagcagcttcagtccctttctcgtcgatggtcagcacagccttatgcacggcctg

SEQ ID NO: 23618 - DNA, 154 bp, synthetic construct
  source 1..154: mol_type = other DNA
ccaggccgtgcataaggctggttttagagctagaaatagcaagttaaaataaggctagtccgttatcaacttgaaaaagtggcaccgagtcggtgcgccccagcagcttcagtccctttctcgtcgatggtcagcacagccttatgcacggcct

SEQ ID NO: 23619 - DNA, 153 bp, synthetic construct
  source 1..153: mol_type = other DNA
ccaggccgtgcataaggctggttttagagctagaaatagcaagttaaaataaggctagtccgttatcaacttgaaaaagtggcaccgagtcggtgcgccccagcagcttcagtccctttctcgtcgatggtcagcacagccttatgcacggcc

SEQ ID NO: 23620 - DNA, 152 bp, synthetic construct
  source 1..152: mol_type = other DNA
ccaggccgtgcataaggctggttttagagctagaaatagcaagttaaaataaggctagtccgttatcaacttgaaaaagtggcaccgagtcggtgcgccccagcagcttcagtccctttctcgtcgatggtcagcacagccttatgcacggc

SEQ ID NO: 23621 - DNA, 151 bp, synthetic construct
  source 1..151: mol_type = other DNA
ccaggccgtgcataaggctggttttagagctagaaatagcaagttaaaataaggctagtccgttatcaacttgaaaaagtggcaccgagtcggtgcgccccagcagcttcagtccctttctcgtcgatggtcagcacagccttatgcacgg

SEQ ID NO: 23622 - DNA, 150 bp, synthetic construct
  source 1..150: mol_type = other DNA
ccaggccgtgcataaggctggttttagagctagaaatagcaagttaaaataaggctagtccgttatcaacttgaaaaagtggcaccgagtcggtgcgccccagcagcttcagtccctttctcgtcgatggtcagcacagccttatgcacg

SEQ ID NO: 23623 - DNA, 149 bp, synthetic construct
  source 1..149: mol_type = other DNA
ccaggccgtgcataaggctggttttagagctagaaatagcaagttaaaataaggctagtccgttatcaacttgaaaaagtggcaccgagtcggtgcgccccagcagcttcagtccctttctcgtcgatggtcagcacagccttatgcac

SEQ ID NO: 23624 - DNA, 148 bp, synthetic construct
  source 1..148: mol_type = other DNA
ccaggccgtgcataaggctggttttagagctagaaatagcaagttaaaataaggctagtccgttatcaacttgaaaaagtggcaccgagtcggtgcgccccagcagcttcagtccctttctcgtcgatggtcagcacagccttatgca

SEQ ID NO: 23625 - DNA, 147 bp, synthetic construct
  source 1..147: mol_type = other DNA
ccaggccgtgcataaggctggttttagagctagaaatagcaagttaaaataaggctagtccgttatcaacttgaaaaagtggcaccgagtcggtgcgccccagcagcttcagtccctttctcgtcgatggtcagcacagccttatgc

SEQ ID NO: 23626 - DNA, 151 bp, synthetic construct
  source 1..151: mol_type = other DNA
ccaggccgtgcataaggctggttttagagctagaaatagcaagttaaaataaggctagtccgttatcaacttgaaaaagtggcaccgagtcggtgcagcagcttcagtccctttctcgtcgatggtcagcacagccttatgcacggcctgg

SEQ ID NO: 23627 - DNA, 150 bp, synthetic construct
  source 1..150: mol_type = other DNA
ccaggccgtgcataaggctggttttagagctagaaatagcaagttaaaataaggctagtccgttatcaacttgaaaaagtggcaccgagtcggtgcagcagcttcagtccctttctcgtcgatggtcagcacagccttatgcacggcctg

SEQ ID NO: 23628 - DNA, 149 bp, synthetic construct
  source 1..149: mol_type = other DNA
ccaggccgtgcataaggctggttttagagctagaaatagcaagttaaaataaggctagtccgttatcaacttgaaaaagtggcaccgagtcggtgcagcagcttcagtccctttctcgtcgatggtcagcacagccttatgcacggcct

SEQ ID NO: 23629 - DNA, 148 bp, synthetic construct
  source 1..148: mol_type = other DNA
ccaggccgtgcataaggctggttttagagctagaaatagcaagttaaaataaggctagtccgttatcaacttgaaaaagtggcaccgagtcggtgcagcagcttcagtccctttctcgtcgatggtcagcacagccttatgcacggcc

SEQ ID NO: 23630 - DNA, 147 bp, synthetic construct
  source 1..147: mol_type = other DNA
ccaggccgtgcataaggctggttttagagctagaaatagcaagttaaaataaggctagtccgttatcaacttgaaaaagtggcaccgagtcggtgcagcagcttcagtccctttctcgtcgatggtcagcacagccttatgcacggc

SEQ ID NO: 23631 - DNA, 146 bp, synthetic construct
  source 1..146: mol_type = other DNA
ccaggccgtgcataaggctggttttagagctagaaatagcaagttaaaataaggctagtccgttatcaacttgaaaaagtggcaccgagtcggtgcagcagcttcagtccctttctcgtcgatggtcagcacagccttatgcacgg

SEQ ID NO: 23632 - DNA, 145 bp, synthetic construct
  source 1..145: mol_type = other DNA
ccaggccgtgcataaggctggttttagagctagaaatagcaagttaaaataaggctagtccgttatcaacttgaaaaagtggcaccgagtcggtgcagcagcttcagtccctttctcgtcgatggtcagcacagccttatgcacg

SEQ ID NO: 23633 - DNA, 144 bp, synthetic construct
  source 1..144: mol_type = other DNA
ccaggccgtgcataaggctggttttagagctagaaatagcaagttaaaataaggctagtccgttatcaacttgaaaaagtggcaccgagtcggtgcagcagcttcagtccctttctcgtcgatggtcagcacagccttatgcac

SEQ ID NO: 23634 - DNA, 143 bp, synthetic construct
  source 1..143: mol_type = other DNA
ccaggccgtgcataaggctggttttagagctagaaatagcaagttaaaataaggctagtccgttatcaacttgaaaaagtggcaccgagtcggtgcagcagcttcagtccctttctcgtcgatggtcagcacagccttatgca

SEQ ID NO: 23635 - DNA, 142 bp, synthetic construct
  source 1..142: mol_type = other DNA
ccaggccgtgcataaggctggttttagagctagaaatagcaagttaaaataaggctagtccgttatcaacttgaaaaagtggcaccgagtcggtgcagcagcttcagtccctttctcgtcgatggtcagcacagccttatgc

SEQ ID NO: 23636 - DNA, 145 bp, synthetic construct
  source 1..145: mol_type = other DNA
ccaggccgtgcataaggctggttttagagctagaaatagcaagttaaaataaggctagtccgttatcaacttgaaaaagtggcaccgagtcggtgcttcagtccctttctcgtcgatggtcagcacagccttatgcacggcctgg

SEQ ID NO: 23637 - DNA, 144 bp, synthetic construct
  source 1..144: mol_type = other DNA
ccaggccgtgcataaggctggttttagagctagaaatagcaagttaaaataaggctagtccgttatcaacttgaaaaagtggcaccgagtcggtgcttcagtccctttctcgtcgatggtcagcacagccttatgcacggcctg

SEQ ID NO: 23638 - DNA, 143 bp, synthetic construct
  source 1..143: mol_type = other DNA
ccaggccgtgcataaggctggttttagagctagaaatagcaagttaaaataaggctagtccgttatcaacttgaaaaagtggcaccgagtcggtgcttcagtccctttctcgtcgatggtcagcacagccttatgcacggcct

SEQ ID NO: 23639 - DNA, 142 bp, synthetic construct
  source 1..142: mol_type = other DNA
ccaggccgtgcataaggctggttttagagctagaaatagcaagttaaaataaggctagtccgttatcaacttgaaaaagtggcaccgagtcggtgcttcagtccctttctcgtcgatggtcagcacagccttatgcacggcc

SEQ ID NO: 23640 - DNA, 141 bp, synthetic construct
  source 1..141: mol_type = other DNA
ccaggccgtgcataaggctggttttagagctagaaatagcaagttaaaataaggctagtccgttatcaacttgaaaaagtggcaccgagtcggtgcttcagtccctttctcgtcgatggtcagcacagccttatgcacggc

SEQ ID NO: 23641 - DNA, 140 bp, synthetic construct
  source 1..140: mol_type = other DNA
ccaggccgtgcataaggctggttttagagctagaaatagcaagttaaaataaggctagtccgttatcaacttgaaaaagtggcaccgagtcggtgcttcagtccctttctcgtcgatggtcagcacagccttatgcacgg

SEQ ID NO: 23642 - DNA, 139 bp, synthetic construct
  source 1..139: mol_type = other DNA
ccaggccgtgcataaggctggttttagagctagaaatagcaagttaaaataaggctagtccgttatcaacttgaaaaagtggcaccgagtcggtgcttcagtccctttctcgtcgatggtcagcacagccttatgcacg

SEQ ID NO: 23643 - DNA, 138 bp, synthetic construct
  source 1..138: mol_type = other DNA
ccaggccgtgcataaggctggttttagagctagaaatagcaagttaaaataaggctagtccgttatcaacttgaaaaagtggcaccgagtcggtgcttcagtccctttctcgtcgatggtcagcacagccttatgcac

SEQ ID NO: 23644 - DNA, 137 bp, synthetic construct
  source 1..137: mol_type = other DNA
ccaggccgtgcataaggctggttttagagctagaaatagcaagttaaaataaggctagtccgttatcaacttgaaaaagtggcaccgagtcggtgcttcagtccctttctcgtcgatggtcagcacagccttatgca

SEQ ID NO: 23645 - DNA, 136 bp, synthetic construct
  source 1..136: mol_type = other DNA
ccaggccgtgcataaggctggttttagagctagaaatagcaagttaaaataaggctagtccgttatcaacttgaaaaagtggcaccgagtcggtgcttcagtccctttctcgtcgatggtcagcacagccttatgc

SEQ ID NO: 23646 - DNA, 142 bp, synthetic construct
  source 1..142: mol_type = other DNA
ccaggccgtgcataaggctggttttagagctagaaatagcaagttaaaataaggctagtccgttatcaacttgaaaaagtggcaccgagtcggtgcagtccctttctcgtcgatggtcagcacagccttatgcacggcctgg

SEQ ID NO: 23647 - DNA, 141 bp, synthetic construct
  source 1..141: mol_type = other DNA
ccaggccgtgcataaggctggttttagagctagaaatagcaagttaaaataaggctagtccgttatcaacttgaaaaagtggcaccgagtcggtgcagtccctttctcgtcgatggtcagcacagccttatgcacggcctg

SEQ ID NO: 23648 - DNA, 140 bp, synthetic construct
  source 1..140: mol_type = other DNA
ccaggccgtgcataaggctggttttagagctagaaatagcaagttaaaataaggctagtccgttatcaacttgaaaaagtggcaccgagtcggtgcagtccctttctcgtcgatggtcagcacagccttatgcacggcct

SEQ ID NO: 23649 - DNA, 139 bp, synthetic construct
  source 1..139: mol_type = other DNA
ccaggccgtgcataaggctggttttagagctagaaatagcaagttaaaataaggctagtccgttatcaacttgaaaaagtggcaccgagtcggtgcagtccctttctcgtcgatggtcagcacagccttatgcacggcc

SEQ ID NO: 23650 - DNA, 138 bp, synthetic construct
  source 1..138: mol_type = other DNA
ccaggccgtgcataaggctggttttagagctagaaatagcaagttaaaataaggctagtccgttatcaacttgaaaaagtggcaccgagtcggtgcagtccctttctcgtcgatggtcagcacagccttatgcacggc

SEQ ID NO: 23651 - DNA, 137 bp, synthetic construct
  source 1..137: mol_type = other DNA
ccaggccgtgcataaggctggttttagagctagaaatagcaagttaaaataaggctagtccgttatcaacttgaaaaagtggcaccgagtcggtgcagtccctttctcgtcgatggtcagcacagccttatgcacgg

SEQ ID NO: 23652 - DNA, 136 bp, synthetic construct
  source 1..136: mol_type = other DNA
ccaggccgtgcataaggctggttttagagctagaaatagcaagttaaaataaggctagtccgttatcaacttgaaaaagtggcaccgagtcggtgcagtccctttctcgtcgatggtcagcacagccttatgcacg

SEQ ID NO: 23653 - DNA, 135 bp, synthetic construct
  source 1..135: mol_type = other DNA
ccaggccgtgcataaggctggttttagagctagaaatagcaagttaaaataaggctagtccgttatcaacttgaaaaagtggcaccgagtcggtgcagtccctttctcgtcgatggtcagcacagccttatgcac

SEQ ID NO: 23654 - DNA, 134 bp, synthetic construct
  source 1..134: mol_type = other DNA
ccaggccgtgcataaggctggttttagagctagaaatagcaagttaaaataaggctagtccgttatcaacttgaaaaagtggcaccgagtcggtgcagtccctttctcgtcgatggtcagcacagccttatgca

SEQ ID NO: 23655 - DNA, 133 bp, synthetic construct
  source 1..133: mol_type = other DNA
ccaggccgtgcataaggctggttttagagctagaaatagcaagttaaaataaggctagtccgttatcaacttgaaaaagtggcaccgagtcggtgcagtccctttctcgtcgatggtcagcacagccttatgc

SEQ ID NO: 23656 - DNA, 140 bp, synthetic construct
  source 1..140: mol_type = other DNA
ccaggccgtgcataaggctggttttagagctagaaatagcaagttaaaataaggctagtccgttatcaacttgaaaaagtggcaccgagtcggtgctccctttctcgtcgatggtcagcacagccttatgcacggcctgg

SEQ ID NO: 23657 - DNA, 139 bp, synthetic construct
  source 1..139: mol_type = other DNA
ccaggccgtgcataaggctggttttagagctagaaatagcaagttaaaataaggctagtccgttatcaacttgaaaaagtggcaccgagtcggtgctccctttctcgtcgatggtcagcacagccttatgcacggcctg

SEQ ID NO: 23658 - DNA, 138 bp, synthetic construct
  source 1..138: mol_type = other DNA
ccaggccgtgcataaggctggttttagagctagaaatagcaagttaaaataaggctagtccgttatcaacttgaaaaagtggcaccgagtcggtgctccctttctcgtcgatggtcagcacagccttatgcacggcct

SEQ ID NO: 23659 - DNA, 137 bp, synthetic construct
  source 1..137: mol_type = other DNA
ccaggccgtgcataaggctggttttagagctagaaatagcaagttaaaataaggctagtccgttatcaacttgaaaaagtggcaccgagtcggtgctccctttctcgtcgatggtcagcacagccttatgcacggcc

SEQ ID NO: 23660 - DNA, 136 bp, synthetic construct
  source 1..136: mol_type = other DNA
ccaggccgtgcataaggctggttttagagctagaaatagcaagttaaaataaggctagtccgttatcaacttgaaaaagtggcaccgagtcggtgctccctttctcgtcgatggtcagcacagccttatgcacggc

SEQ ID NO: 23661 - DNA, 135 bp, synthetic construct
  source 1..135: mol_type = other DNA
ccaggccgtgcataaggctggttttagagctagaaatagcaagttaaaataaggctagtccgttatcaacttgaaaaagtggcaccgagtcggtgctccctttctcgtcgatggtcagcacagccttatgcacgg

SEQ ID NO: 23662 - DNA, 134 bp, synthetic construct
  source 1..134: mol_type = other DNA
ccaggccgtgcataaggctggttttagagctagaaatagcaagttaaaataaggctagtccgttatcaacttgaaaaagtggcaccgagtcggtgctccctttctcgtcgatggtcagcacagccttatgcacg

SEQ ID NO: 23663 - DNA, 133 bp, synthetic construct
  source 1..133: mol_type = other DNA
ccaggccgtgcataaggctggttttagagctagaaatagcaagttaaaataaggctagtccgttatcaacttgaaaaagtggcaccgagtcggtgctccctttctcgtcgatggtcagcacagccttatgcac

SEQ ID NO: 23664 - DNA, 132 bp, synthetic construct
  source 1..132: mol_type = other DNA
ccaggccgtgcataaggctggttttagagctagaaatagcaagttaaaataaggctagtccgttatcaacttgaaaaagtggcaccgagtcggtgctccctttctcgtcgatggtcagcacagccttatgca

SEQ ID NO: 23665 - DNA, 131 bp, synthetic construct
  source 1..131: mol_type = other DNA
ccaggccgtgcataaggctggttttagagctagaaatagcaagttaaaataaggctagtccgttatcaacttgaaaaagtggcaccgagtcggtgctccctttctcgtcgatggtcagcacagccttatgc

SEQ ID NO: 23666 - DNA, 138 bp, synthetic construct
  source 1..138: mol_type = other DNA
ccaggccgtgcataaggctggttttagagctagaaatagcaagttaaaataaggctagtccgttatcaacttgaaaaagtggcaccgagtcggtgccctttctcgtcgatggtcagcacagccttatgcacggcctgg

SEQ ID NO: 23667 - DNA, 137 bp, synthetic construct
  source 1..137: mol_type = other DNA
ccaggccgtgcataaggctggttttagagctagaaatagcaagttaaaataaggctagtccgttatcaacttgaaaaagtggcaccgagtcggtgccctttctcgtcgatggtcagcacagccttatgcacggcctg

SEQ ID NO: 23668 - DNA, 136 bp, synthetic construct
  source 1..136: mol_type = other DNA
ccaggccgtgcataaggctggttttagagctagaaatagcaagttaaaataaggctagtccgttatcaacttgaaaaagtggcaccgagtcggtgccctttctcgtcgatggtcagcacagccttatgcacggcct

SEQ ID NO: 23669 - DNA, 135 bp, synthetic construct
  source 1..135: mol_type = other DNA
ccaggccgtgcataaggctggttttagagctagaaatagcaagttaaaataaggctagtccgttatcaacttgaaaaagtggcaccgagtcggtgccctttctcgtcgatggtcagcacagccttatgcacggcc

SEQ ID NO: 23670 - DNA, 134 bp, synthetic construct
  source 1..134: mol_type = other DNA
ccaggccgtgcataaggctggttttagagctagaaatagcaagttaaaataaggctagtccgttatcaacttgaaaaagtggcaccgagtcggtgccctttctcgtcgatggtcagcacagccttatgcacggc

SEQ ID NO: 23671 - DNA, 133 bp, synthetic construct
  source 1..133: mol_type = other DNA
ccaggccgtgcataaggctggttttagagctagaaatagcaagttaaaataaggctagtccgttatcaacttgaaaaagtggcaccgagtcggtgccctttctcgtcgatggtcagcacagccttatgcacgg

SEQ ID NO: 23672 - DNA, 132 bp, synthetic construct
  source 1..132: mol_type = other DNA
ccaggccgtgcataaggctggttttagagctagaaatagcaagttaaaataaggctagtccgttatcaacttgaaaaagtggcaccgagtcggtgccctttctcgtcgatggtcagcacagccttatgcacg

SEQ ID NO: 23673 - DNA, 131 bp, synthetic construct
  source 1..131: mol_type = other DNA
ccaggccgtgcataaggctggttttagagctagaaatagcaagttaaaataaggctagtccgttatcaacttgaaaaagtggcaccgagtcggtgccctttctcgtcgatggtcagcacagccttatgcac

SEQ ID NO: 23674 - DNA, 130 bp, synthetic construct
  source 1..130: mol_type = other DNA
ccaggccgtgcataaggctggttttagagctagaaatagcaagttaaaataaggctagtccgttatcaacttgaaaaagtggcaccgagtcggtgccctttctcgtcgatggtcagcacagccttatgca

SEQ ID NO: 23675 - DNA, 129 bp, synthetic construct
  source 1..129: mol_type = other DNA
ccaggccgtgcataaggctggttttagagctagaaatagcaagttaaaataaggctagtccgttatcaacttgaaaaagtggcaccgagtcggtgccctttctcgtcgatggtcagcacagccttatgc

SEQ ID NO: 23676 - DNA, 136 bp, synthetic construct
  source 1..136: mol_type = other DNA
ccaggccgtgcataaggctggttttagagctagaaatagcaagttaaaataaggctagtccgttatcaacttgaaaaagtggcaccgagtcggtgctttctcgtcgatggtcagcacagccttatgcacggcctgg

SEQ ID NO: 23677 - DNA, 135 bp, synthetic construct
  source 1..135: mol_type = other DNA
ccaggccgtgcataaggctggttttagagctagaaatagcaagttaaaataaggctagtccgttatcaacttgaaaaagtggcaccgagtcggtgctttctcgtcgatggtcagcacagccttatgcacggcctg

SEQ ID NO: 23678 - DNA, 134 bp, synthetic construct
  source 1..134: mol_type = other DNA
ccaggccgtgcataaggctggttttagagctagaaatagcaagttaaaataaggctagtccgttatcaacttgaaaaagtggcaccgagtcggtgctttctcgtcgatggtcagcacagccttatgcacggcct

SEQ ID NO: 23679 - DNA, 133 bp, synthetic construct
  source 1..133: mol_type = other DNA
ccaggccgtgcataaggctggttttagagctagaaatagcaagttaaaataaggctagtccgttatcaacttgaaaaagtggcaccgagtcggtgctttctcgtcgatggtcagcacagccttatgcacggcc

SEQ ID NO: 23680 - DNA, 132 bp, synthetic construct
  source 1..132: mol_type = other DNA
ccaggccgtgcataaggctggttttagagctagaaatagcaagttaaaataaggctagtccgttatcaacttgaaaaagtggcaccgagtcggtgctttctcgtcgatggtcagcacagccttatgcacggc

SEQ ID NO: 23681 - DNA, 131 bp, synthetic construct
  source 1..131: mol_type = other DNA
ccaggccgtgcataaggctggttttagagctagaaatagcaagttaaaataaggctagtccgttatcaacttgaaaaagtggcaccgagtcggtgctttctcgtcgatggtcagcacagccttatgcacgg

SEQ ID NO: 23682 - DNA, 130 bp, synthetic construct
  source 1..130: mol_type = other DNA
ccaggccgtgcataaggctggttttagagctagaaatagcaagttaaaataaggctagtccgttatcaacttgaaaaagtggcaccgagtcggtgctttctcgtcgatggtcagcacagccttatgcacg

SEQ ID NO: 23683 - DNA, 129 bp, synthetic construct
  source 1..129: mol_type = other DNA
ccaggccgtgcataaggctggttttagagctagaaatagcaagttaaaataaggctagtccgttatcaacttgaaaaagtggcaccgagtcggtgctttctcgtcgatggtcagcacagccttatgcac

SEQ ID NO: 23684 - DNA, 128 bp, synthetic construct
  source 1..128: mol_type = other DNA
ccaggccgtgcataaggctggttttagagctagaaatagcaagttaaaataaggctagtccgttatcaacttgaaaaagtggcaccgagtcggtgctttctcgtcgatggtcagcacagccttatgca

SEQ ID NO: 23685 - DNA, 127 bp, synthetic construct
  source 1..127: mol_type = other DNA
ccaggccgtgcataaggctggttttagagctagaaatagcaagttaaaataaggctagtccgttatcaacttgaaaaagtggcaccgagtcggtgctttctcgtcgatggtcagcacagccttatgc

SEQ ID NO: 23686 - DNA, 134 bp, synthetic construct
  source 1..134: mol_type = other DNA
ccaggccgtgcataaggctggttttagagctagaaatagcaagttaaaataaggctagtccgttatcaacttgaaaaagtggcaccgagtcggtgctctcgtcgatggtcagcacagccttatgcacggcctgg

SEQ ID NO: 23687 - DNA, 133 bp, synthetic construct
  source 1..133: mol_type = other DNA
ccaggccgtgcataaggctggttttagagctagaaatagcaagttaaaataaggctagtccgttatcaacttgaaaaagtggcaccgagtcggtgctctcgtcgatggtcagcacagccttatgcacggcctg

SEQ ID NO: 23688 - DNA, 132 bp, synthetic construct
  source 1..132: mol_type = other DNA
ccaggccgtgcataaggctggttttagagctagaaatagcaagttaaaataaggctagtccgttatcaacttgaaaaagtggcaccgagtcggtgctctcgtcgatggtcagcacagccttatgcacggcct

SEQ ID NO: 23689 - DNA, 131 bp, synthetic construct
  source 1..131: mol_type = other DNA
ccaggccgtgcataaggctggttttagagctagaaatagcaagttaaaataaggctagtccgttatcaacttgaaaaagtggcaccgagtcggtgctctcgtcgatggtcagcacagccttatgcacggcc

SEQ ID NO: 23690 - DNA, 130 bp, synthetic construct
  source 1..130: mol_type = other DNA
ccaggccgtgcataaggctggttttagagctagaaatagcaagttaaaataaggctagtccgttatcaacttgaaaaagtggcaccgagtcggtgctctcgtcgatggtcagcacagccttatgcacggc

SEQ ID NO: 23691 - DNA, 129 bp, synthetic construct
  source 1..129: mol_type = other DNA
ccaggccgtgcataaggctggttttagagctagaaatagcaagttaaaataaggctagtccgttatcaacttgaaaaagtggcaccgagtcggtgctctcgtcgatggtcagcacagccttatgcacgg

SEQ ID NO: 23692 - DNA, 128 bp, synthetic construct
  source 1..128: mol_type = other DNA
ccaggccgtgcataaggctggttttagagctagaaatagcaagttaaaataaggctagtccgttatcaacttgaaaaagtggcaccgagtcggtgctctcgtcgatggtcagcacagccttatgcacg

SEQ ID NO: 23693 - DNA, 127 bp, synthetic construct
  source 1..127: mol_type = other DNA
ccaggccgtgcataaggctggttttagagctagaaatagcaagttaaaataaggctagtccgttatcaacttgaaaaagtggcaccgagtcggtgctctcgtcgatggtcagcacagccttatgcac

SEQ ID NO: 23694 - DNA, 126 bp, synthetic construct
  source 1..126: mol_type = other DNA
ccaggccgtgcataaggctggttttagagctagaaatagcaagttaaaataaggctagtccgttatcaacttgaaaaagtggcaccgagtcggtgctctcgtcgatggtcagcacagccttatgca

SEQ ID NO: 23695 - DNA, 125 bp, synthetic construct
  source 1..125: mol_type = other DNA
ccaggccgtgcataaggctggttttagagctagaaatagcaagttaaaataaggctagtccgttatcaacttgaaaaagtggcaccgagtcggtgctctcgtcgatggtcagcacagccttatgc

SEQ ID NO: 23696 - DNA, 162 bp, synthetic construct
  source 1..162: mol_type = other DNA
tccaggccgtgcataaggctgttttagagctagaaatagcaagttaaaataaggctagtccgttatcaacttgaaaaagtggcaccgagtcggtgcacatggccccagcagcttcagtccctttctcgtcgatggtcagcacagccttatgcacggcctgga

SEQ ID NO: 23697 - DNA, 161 bp, synthetic construct
  source 1..161: mol_type = other DNA
tccaggccgtgcataaggctgttttagagctagaaatagcaagttaaaataaggctagtccgttatcaacttgaaaaagtggcaccgagtcggtgcacatggccccagcagcttcagtccctttctcgtcgatggtcagcacagccttatgcacggcctgg

SEQ ID NO: 23698 - DNA, 160 bp, synthetic construct
  source 1..160: mol_type = other DNA
tccaggccgtgcataaggctgttttagagctagaaatagcaagttaaaataaggctagtccgttatcaacttgaaaaagtggcaccgagtcggtgcacatggccccagcagcttcagtccctttctcgtcgatggtcagcacagccttatgcacggcctg

SEQ ID NO: 23699 - DNA, 159 bp, synthetic construct
  source 1..159: mol_type = other DNA
tccaggccgtgcataaggctgttttagagctagaaatagcaagttaaaataaggctagtccgttatcaacttgaaaaagtggcaccgagtcggtgcacatggccccagcagcttcagtccctttctcgtcgatggtcagcacagccttatgcacggcct

SEQ ID NO: 23700 - DNA, 158 bp, synthetic construct
  source 1..158: mol_type = other DNA
tccaggccgtgcataaggctgttttagagctagaaatagcaagttaaaataaggctagtccgttatcaacttgaaaaagtggcaccgagtcggtgcacatggccccagcagcttcagtccctttctcgtcgatggtcagcacagccttatgcacggcc

SEQ ID NO: 23701 - DNA, 157 bp, synthetic construct
  source 1..157: mol_type = other DNA
tccaggccgtgcataaggctgttttagagctagaaatagcaagttaaaataaggctagtccgttatcaacttgaaaaagtggcaccgagtcggtgcacatggccccagcagcttcagtccctttctcgtcgatggtcagcacagccttatgcacggc

SEQ ID NO: 23702 - DNA, 156 bp, synthetic construct
  source 1..156: mol_type = other DNA
tccaggccgtgcataaggctgttttagagctagaaatagcaagttaaaataaggctagtccgttatcaacttgaaaaagtggcaccgagtcggtgcacatggccccagcagcttcagtccctttctcgtcgatggtcagcacagccttatgcacgg

SEQ ID NO: 23703 - DNA, 155 bp, synthetic construct
  source 1..155: mol_type = other DNA
tccaggccgtgcataaggctgttttagagctagaaatagcaagttaaaataaggctagtccgttatcaacttgaaaaagtggcaccgagtcggtgcacatggccccagcagcttcagtccctttctcgtcgatggtcagcacagccttatgcacg

SEQ ID NO: 23704 - DNA, 154 bp, synthetic construct
  source 1..154: mol_type = other DNA
tccaggccgtgcataaggctgttttagagctagaaatagcaagttaaaataaggctagtccgttatcaacttgaaaaagtggcaccgagtcggtgcacatggccccagcagcttcagtccctttctcgtcgatggtcagcacagccttatgcac

SEQ ID NO: 23705 - DNA, 153 bp, synthetic construct
  source 1..153: mol_type = other DNA
tccaggccgtgcataaggctgttttagagctagaaatagcaagttaaaataaggctagtccgttatcaacttgaaaaagtggcaccgagtcggtgcacatggccccagcagcttcagtccctttctcgtcgatggtcagcacagccttatgca

SEQ ID NO: 23706 - DNA, 157 bp, synthetic construct
  source 1..157: mol_type = other DNA
tccaggccgtgcataaggctgttttagagctagaaatagcaagttaaaataaggctagtccgttatcaacttgaaaaagtggcaccgagtcggtgcgccccagcagcttcagtccctttctcgtcgatggtcagcacagccttatgcacggcctgga

SEQ ID NO: 23707 - DNA, 156 bp, synthetic construct
  source 1..156: mol_type = other DNA
tccaggccgtgcataaggctgttttagagctagaaatagcaagttaaaataaggctagtccgttatcaacttgaaaaagtggcaccgagtcggtgcgccccagcagcttcagtccctttctcgtcgatggtcagcacagccttatgcacggcctgg

SEQ ID NO: 23708 - DNA, 155 bp, synthetic construct
  source 1..155: mol_type = other DNA
tccaggccgtgcataaggctgttttagagctagaaatagcaagttaaaataaggctagtccgttatcaacttgaaaaagtggcaccgagtcggtgcgccccagcagcttcagtccctttctcgtcgatggtcagcacagccttatgcacggcctg

SEQ ID NO: 23709 - DNA, 154 bp, synthetic construct
  source 1..154: mol_type = other DNA
tccaggccgtgcataaggctgttttagagctagaaatagcaagttaaaataaggctagtccgttatcaacttgaaaaagtggcaccgagtcggtgcgccccagcagcttcagtccctttctcgtcgatggtcagcacagccttatgcacggcct

SEQ ID NO: 23710 - DNA, 153 bp, synthetic construct
  source 1..153: mol_type = other DNA
tccaggccgtgcataaggctgttttagagctagaaatagcaagttaaaataaggctagtccgttatcaacttgaaaaagtggcaccgagtcggtgcgccccagcagcttcagtccctttctcgtcgatggtcagcacagccttatgcacggcc

SEQ ID NO: 23711 - DNA, 152 bp, synthetic construct
  source 1..152: mol_type = other DNA
tccaggccgtgcataaggctgttttagagctagaaatagcaagttaaaataaggctagtccgttatcaacttgaaaaagtggcaccgagtcggtgcgccccagcagcttcagtccctttctcgtcgatggtcagcacagccttatgcacggc

SEQ ID NO: 23712 - DNA, 151 bp, synthetic construct
  source 1..151: mol_type = other DNA
tccaggccgtgcataaggctgttttagagctagaaatagcaagttaaaataaggctagtccgttatcaacttgaaaaagtggcaccgagtcggtgcgccccagcagcttcagtccctttctcgtcgatggtcagcacagccttatgcacgg

SEQ ID NO: 23713 - DNA, 150 bp, synthetic construct
  source 1..150: mol_type = other DNA
tccaggccgtgcataaggctgttttagagctagaaatagcaagttaaaataaggctagtccgttatcaacttgaaaaagtggcaccgagtcggtgcgccccagcagcttcagtccctttctcgtcgatggtcagcacagccttatgcacg

SEQ ID NO: 23714 - DNA, 149 bp, synthetic construct
  source 1..149: mol_type = other DNA
tccaggccgtgcataaggctgttttagagctagaaatagcaagttaaaataaggctagtccgttatcaacttgaaaaagtggcaccgagtcggtgcgccccagcagcttcagtccctttctcgtcgatggtcagcacagccttatgcac

SEQ ID NO: 23715 - DNA, 148 bp, synthetic construct
  source 1..148: mol_type = other DNA
tccaggccgtgcataaggctgttttagagctagaaatagcaagttaaaataaggctagtccgttatcaacttgaaaaagtggcaccgagtcggtgcgccccagcagcttcagtccctttctcgtcgatggtcagcacagccttatgca

SEQ ID NO: 23716 - DNA, 152 bp, synthetic construct
  source 1..152: mol_type = other DNA
tccaggccgtgcataaggctgttttagagctagaaatagcaagttaaaataaggctagtccgttatcaacttgaaaaagtggcaccgagtcggtgcagcagcttcagtccctttctcgtcgatggtcagcacagccttatgcacggcctgga

SEQ ID NO: 23717 - DNA, 151 bp, synthetic construct
  source 1..151: mol_type = other DNA
tccaggccgtgcataaggctgttttagagctagaaatagcaagttaaaataaggctagtccgttatcaacttgaaaaagtggcaccgagtcggtgcagcagcttcagtccctttctcgtcgatggtcagcacagccttatgcacggcctgg

SEQ ID NO: 23718 - DNA, 150 bp, synthetic construct
  source 1..150: mol_type = other DNA
tccaggccgtgcataaggctgttttagagctagaaatagcaagttaaaataaggctagtccgttatcaacttgaaaaagtggcaccgagtcggtgcagcagcttcagtccctttctcgtcgatggtcagcacagccttatgcacggcctg

SEQ ID NO: 23719 - DNA, 149 bp, synthetic construct
  source 1..149: mol_type = other DNA
tccaggccgtgcataaggctgttttagagctagaaatagcaagttaaaataaggctagtccgttatcaacttgaaaaagtggcaccgagtcggtgcagcagcttcagtccctttctcgtcgatggtcagcacagccttatgcacggcct

SEQ ID NO: 23720 - DNA, 148 bp, synthetic construct
  source 1..148: mol_type = other DNA
tccaggccgtgcataaggctgttttagagctagaaatagcaagttaaaataaggctagtccgttatcaacttgaaaaagtggcaccgagtcggtgcagcagcttcagtccctttctcgtcgatggtcagcacagccttatgcacggcc

SEQ ID NO: 23721 - DNA, 147 bp, synthetic construct
  source 1..147: mol_type = other DNA
tccaggccgtgcataaggctgttttagagctagaaatagcaagttaaaataaggctagtccgttatcaacttgaaaaagtggcaccgagtcggtgcagcagcttcagtccctttctcgtcgatggtcagcacagccttatgcacggc

SEQ ID NO: 23722 - DNA, 146 bp, synthetic construct
  source 1..146: mol_type = other DNA
tccaggccgtgcataaggctgttttagagctagaaatagcaagttaaaataaggctagtccgttatcaacttgaaaaagtggcaccgagtcggtgcagcagcttcagtccctttctcgtcgatggtcagcacagccttatgcacgg

SEQ ID NO: 23723 - DNA, 145 bp, synthetic construct
  source 1..145: mol_type = other DNA
tccaggccgtgcataaggctgttttagagctagaaatagcaagttaaaataaggctagtccgttatcaacttgaaaaagtggcaccgagtcggtgcagcagcttcagtccctttctcgtcgatggtcagcacagccttatgcacg

SEQ ID NO: 23724 - DNA, 144 bp, synthetic construct
  source 1..144: mol_type = other DNA
tccaggccgtgcataaggctgttttagagctagaaatagcaagttaaaataaggctagtccgttatcaacttgaaaaagtggcaccgagtcggtgcagcagcttcagtccctttctcgtcgatggtcagcacagccttatgcac

SEQ ID NO: 23725 - DNA, 143 bp, synthetic construct
  source 1..143: mol_type = other DNA
tccaggccgtgcataaggctgttttagagctagaaatagcaagttaaaataaggctagtccgttatcaacttgaaaaagtggcaccgagtcggtgcagcagcttcagtccctttctcgtcgatggtcagcacagccttatgca

SEQ ID NO: 23726 - DNA, 146 bp, synthetic construct
  source 1..146: mol_type = other DNA
tccaggccgtgcataaggctgttttagagctagaaatagcaagttaaaataaggctagtccgttatcaacttgaaaaagtggcaccgagtcggtgcttcagtccctttctcgtcgatggtcagcacagccttatgcacggcctgga

SEQ ID NO: 23727 - DNA, 145 bp, synthetic construct
  source 1..145: mol_type = other DNA
tccaggccgtgcataaggctgttttagagctagaaatagcaagttaaaataaggctagtccgttatcaacttgaaaaagtggcaccgagtcggtgcttcagtccctttctcgtcgatggtcagcacagccttatgcacggcctgg

SEQ ID NO: 23728 - DNA, 144 bp, synthetic construct
  source 1..144: mol_type = other DNA
tccaggccgtgcataaggctgttttagagctagaaatagcaagttaaaataaggctagtccgttatcaacttgaaaaagtggcaccgagtcggtgcttcagtccctttctcgtcgatggtcagcacagccttatgcacggcctg

SEQ ID NO: 23729 - DNA, 143 bp, synthetic construct
  source 1..143: mol_type = other DNA
tccaggccgtgcataaggctgttttagagctagaaatagcaagttaaaataaggctagtccgttatcaacttgaaaaagtggcaccgagtcggtgcttcagtccctttctcgtcgatggtcagcacagccttatgcacggcct

SEQ ID NO: 23730 - DNA, 142 bp, synthetic construct
  source 1..142: mol_type = other DNA
tccaggccgtgcataaggctgttttagagctagaaatagcaagttaaaataaggctagtccgttatcaacttgaaaaagtggcaccgagtcggtgcttcagtccctttctcgtcgatggtcagcacagccttatgcacggcc

SEQ ID NO: 23731 - DNA, 141 bp, synthetic construct
  source 1..141: mol_type = other DNA
tccaggccgtgcataaggctgttttagagctagaaatagcaagttaaaataaggctagtccgttatcaacttgaaaaagtggcaccgagtcggtgcttcagtccctttctcgtcgatggtcagcacagccttatgcacggc

SEQ ID NO: 23732 - DNA, 140 bp, synthetic construct
  source 1..140: mol_type = other DNA
tccaggccgtgcataaggctgttttagagctagaaatagcaagttaaaataaggctagtccgttatcaacttgaaaaagtggcaccgagtcggtgcttcagtccctttctcgtcgatggtcagcacagccttatgcacgg

SEQ ID NO: 23733 - DNA, 139 bp, synthetic construct
  source 1..139: mol_type = other DNA
tccaggccgtgcataaggctgttttagagctagaaatagcaagttaaaataaggctagtccgttatcaacttgaaaaagtggcaccgagtcggtgcttcagtccctttctcgtcgatggtcagcacagccttatgcacg

SEQ ID NO: 23734 - DNA, 138 bp, synthetic construct
  source 1..138: mol_type = other DNA
tccaggccgtgcataaggctgttttagagctagaaatagcaagttaaaataaggctagtccgttatcaacttgaaaaagtggcaccgagtcggtgcttcagtccctttctcgtcgatggtcagcacagccttatgcac

SEQ ID NO: 23735 - DNA, 137 bp, synthetic construct
  source 1..137: mol_type = other DNA
tccaggccgtgcataaggctgttttagagctagaaatagcaagttaaaataaggctagtccgttatcaacttgaaaaagtggcaccgagtcggtgcttcagtccctttctcgtcgatggtcagcacagccttatgca

SEQ ID NO: 23736 - DNA, 143 bp, synthetic construct
  source 1..143: mol_type = other DNA
tccaggccgtgcataaggctgttttagagctagaaatagcaagttaaaataaggctagtccgttatcaacttgaaaaagtggcaccgagtcggtgcagtccctttctcgtcgatggtcagcacagccttatgcacggcctgga

SEQ ID NO: 23737 - DNA, 142 bp, synthetic construct
  source 1..142: mol_type = other DNA
tccaggccgtgcataaggctgttttagagctagaaatagcaagttaaaataaggctagtccgttatcaacttgaaaaagtggcaccgagtcggtgcagtccctttctcgtcgatggtcagcacagccttatgcacggcctgg

SEQ ID NO: 23738 - DNA, 141 bp, synthetic construct
  source 1..141: mol_type = other DNA
tccaggccgtgcataaggctgttttagagctagaaatagcaagttaaaataaggctagtccgttatcaacttgaaaaagtggcaccgagtcggtgcagtccctttctcgtcgatggtcagcacagccttatgcacggcctg

SEQ ID NO: 23739 - DNA, 140 bp, synthetic construct
  source 1..140: mol_type = other DNA
tccaggccgtgcataaggctgttttagagctagaaatagcaagttaaaataaggctagtccgttatcaacttgaaaaagtggcaccgagtcggtgcagtccctttctcgtcgatggtcagcacagccttatgcacggcct

SEQ ID NO: 23740 - DNA, 139 bp, synthetic construct
  source 1..139: mol_type = other DNA
tccaggccgtgcataaggctgttttagagctagaaatagcaagttaaaataaggctagtccgttatcaacttgaaaaagtggcaccgagtcggtgcagtccctttctcgtcgatggtcagcacagccttatgcacggcc

SEQ ID NO: 23741 - DNA, 138 bp, synthetic construct; identical to SEQ ID NO: 19158
  source 1..138: mol_type = other DNA

SEQ ID NO: 23742 - DNA, 137 bp, synthetic construct
  source 1..137: mol_type = other DNA
tccaggccgtgcataaggctgttttagagctagaaatagcaagttaaaataaggctagtccgttatcaacttgaaaaagtggcaccgagtcggtgcagtccctttctcgtcgatggtcagcacagccttatgcacgg

SEQ ID NO: 23743 - DNA, 136 bp, synthetic construct
  source 1..136: mol_type = other DNA
tccaggccgtgcataaggctgttttagagctagaaatagcaagttaaaataaggctagtccgttatcaacttgaaaaagtggcaccgagtcggtgcagtccctttctcgtcgatggtcagcacagccttatgcacg

SEQ ID NO: 23744 - DNA, 135 bp, synthetic construct
  source 1..135: mol_type = other DNA
tccaggccgtgcataaggctgttttagagctagaaatagcaagttaaaataaggctagtccgttatcaacttgaaaaagtggcaccgagtcggtgcagtccctttctcgtcgatggtcagcacagccttatgcac

SEQ ID NO: 23745 - DNA, 134 bp, synthetic construct
  source 1..134: mol_type = other DNA
tccaggccgtgcataaggctgttttagagctagaaatagcaagttaaaataaggctagtccgttatcaacttgaaaaagtggcaccgagtcggtgcagtccctttctcgtcgatggtcagcacagccttatgca

SEQ ID NO: 23746 - DNA, 141 bp, synthetic construct
  source 1..141: mol_type = other DNA
tccaggccgtgcataaggctgttttagagctagaaatagcaagttaaaataaggctagtccgttatcaacttgaaaaagtggcaccgagtcggtgctccctttctcgtcgatggtcagcacagccttatgcacggcctgga

SEQ ID NO: 23747 - DNA, 140 bp, synthetic construct
  source 1..140: mol_type = other DNA
tccaggccgtgcataaggctgttttagagctagaaatagcaagttaaaataaggctagtccgttatcaacttgaaaaagtggcaccgagtcggtgctccctttctcgtcgatggtcagcacagccttatgcacggcctgg

SEQ ID NO: 23748 - DNA, 139 bp, synthetic construct
  source 1..139: mol_type = other DNA
tccaggccgtgcataaggctgttttagagctagaaatagcaagttaaaataaggctagtccgttatcaacttgaaaaagtggcaccgagtcggtgctccctttctcgtcgatggtcagcacagccttatgcacggcctg

SEQ ID NO: 23749 - DNA, 138 bp, synthetic construct
  source 1..138: mol_type = other DNA
tccaggccgtgcataaggctgttttagagctagaaatagcaagttaaaataaggctagtccgttatcaacttgaaaaagtggcaccgagtcggtgctccctttctcgtcgatggtcagcacagccttatgcacggcct

SEQ ID NO: 23750 - DNA, 137 bp, synthetic construct
  source 1..137: mol_type = other DNA
tccaggccgtgcataaggctgttttagagctagaaatagcaagttaaaataaggctagtccgttatcaacttgaaaaagtggcaccgagtcggtgctccctttctcgtcgatggtcagcacagccttatgcacggcc

SEQ ID NO: 23751 - DNA, 136 bp, synthetic construct
  source 1..136: mol_type = other DNA
tccaggccgtgcataaggctgttttagagctagaaatagcaagttaaaataaggctagtccgttatcaacttgaaaaagtggcaccgagtcggtgctccctttctcgtcgatggtcagcacagccttatgcacggc

SEQ ID NO: 23752 - DNA, 135 bp, synthetic construct
  source 1..135: mol_type = other DNA
tccaggccgtgcataaggctgttttagagctagaaatagcaagttaaaataaggctagtccgttatcaacttgaaaaagtggcaccgagtcggtgctccctttctcgtcgatggtcagcacagccttatgcacgg

SEQ ID NO: 23753 - DNA, 134 bp, synthetic construct
  source 1..134: mol_type = other DNA
tccaggccgtgcataaggctgttttagagctagaaatagcaagttaaaataaggctagtccgttatcaacttgaaaaagtggcaccgagtcggtgctccctttctcgtcgatggtcagcacagccttatgcacg

SEQ ID NO: 23754 - DNA, 133 bp, synthetic construct
  source 1..133: mol_type = other DNA
tccaggccgtgcataaggctgttttagagctagaaatagcaagttaaaataaggctagtccgttatcaacttgaaaaagtggcaccgagtcggtgctccctttctcgtcgatggtcagcacagccttatgcac

SEQ ID NO: 23755 - DNA, 132 bp, synthetic construct
  source 1..132: mol_type = other DNA
tccaggccgtgcataaggctgttttagagctagaaatagcaagttaaaataaggctagtccgttatcaacttgaaaaagtggcaccgagtcggtgctccctttctcgtcgatggtcagcacagccttatgca

SEQ ID NO: 23756 - DNA, 139 bp, synthetic construct
  source 1..139: mol_type = other DNA
tccaggccgtgcataaggctgttttagagctagaaatagcaagttaaaataaggctagtccgttatcaacttgaaaaagtggcaccgagtcggtgccctttctcgtcgatggtcagcacagccttatgcacggcctgga

SEQ ID NO: 23757 - DNA, 138 bp, synthetic construct
  source 1..138: mol_type = other DNA
tccaggccgtgcataaggctgttttagagctagaaatagcaagttaaaataaggctagtccgttatcaacttgaaaaagtggcaccgagtcggtgccctttctcgtcgatggtcagcacagccttatgcacggcctgg

SEQ ID NO: 23758 - DNA, 137 bp, synthetic construct
  source 1..137: mol_type = other DNA
tccaggccgtgcataaggctgttttagagctagaaatagcaagttaaaataaggctagtccgttatcaacttgaaaaagtggcaccgagtcggtgccctttctcgtcgatggtcagcacagccttatgcacggcctg

SEQ ID NO: 23759 - DNA, 136 bp, synthetic construct
  source 1..136: mol_type = other DNA
tccaggccgtgcataaggctgttttagagctagaaatagcaagttaaaataaggctagtccgttatcaacttgaaaaagtggcaccgagtcggtgccctttctcgtcgatggtcagcacagccttatgcacggcct

SEQ ID NO: 23760 - DNA, 135 bp, synthetic construct
  source 1..135: mol_type = other DNA
tccaggccgtgcataaggctgttttagagctagaaatagcaagttaaaataaggctagtccgttatcaacttgaaaaagtggcaccgagtcggtgccctttctcgtcgatggtcagcacagccttatgcacggcc

SEQ ID NO: 23761 - DNA, 134 bp, synthetic construct
  source 1..134: mol_type = other DNA
tccaggccgtgcataaggctgttttagagctagaaatagcaagttaaaataaggctagtccgttatcaacttgaaaaagtggcaccgagtcggtgccctttctcgtcgatggtcagcacagccttatgcacggc

SEQ ID NO: 23762 - DNA, 133 bp, synthetic construct
  source 1..133: mol_type = other DNA
tccaggccgtgcataaggctgttttagagctagaaatagcaagttaaaataaggctagtccgttatcaacttgaaaaagtggcaccgagtcggtgccctttctcgtcgatggtcagcacagccttatgcacgg

SEQ ID NO: 23763 - DNA, 132 bp, synthetic construct
  source 1..132: mol_type = other DNA
tccaggccgtgcataaggctgttttagagctagaaatagcaagttaaaataaggctagtccgttatcaacttgaaaaagtggcaccgagtcggtgccctttctcgtcgatggtcagcacagccttatgcacg

SEQ ID NO: 23764 - DNA, 131 bp, synthetic construct
  source 1..131: mol_type = other DNA
tccaggccgtgcataaggctgttttagagctagaaatagcaagttaaaataaggctagtccgttatcaacttgaaaaagtggcaccgagtcggtgccctttctcgtcgatggtcagcacagccttatgcac

SEQ ID NO: 23765 - DNA, 130 bp, synthetic construct
  source 1..130: mol_type = other DNA
tccaggccgtgcataaggctgttttagagctagaaatagcaagttaaaataaggctagtccgttatcaacttgaaaaagtggcaccgagtcggtgccctttctcgtcgatggtcagcacagccttatgca

SEQ ID NO: 23766 - DNA, 137 bp, synthetic construct
  source 1..137: mol_type = other DNA
tccaggccgtgcataaggctgttttagagctagaaatagcaagttaaaataaggctagtccgttatcaacttgaaaaagtggcaccgagtcggtgctttctcgtcgatggtcagcacagccttatgcacggcctgga

SEQ ID NO: 23767 - DNA, 136 bp, synthetic construct
  source 1..136: mol_type = other DNA
tccaggccgtgcataaggctgttttagagctagaaatagcaagttaaaataaggctagtccgttatcaacttgaaaaagtggcaccgagtcggtgctttctcgtcgatggtcagcacagccttatgcacggcctgg

SEQ ID NO: 23768 - DNA, 135 bp, synthetic construct
  source 1..135: mol_type = other DNA
tccaggccgtgcataaggctgttttagagctagaaatagcaagttaaaataaggctagtccgttatcaacttgaaaaagtggcaccgagtcggtgctttctcgtcgatggtcagcacagccttatgcacggcctg

SEQ ID NO: 23769 - DNA, 134 bp, synthetic construct
  source 1..134: mol_type = other DNA
tccaggccgtgcataaggctgttttagagctagaaatagcaagttaaaataaggctagtccgttatcaacttgaaaaagtggcaccgagtcggtgctttctcgtcgatggtcagcacagccttatgcacggcct

SEQ ID NO: 23770 - DNA, 133 bp, synthetic construct
  source 1..133: mol_type = other DNA
tccaggccgtgcataaggctgttttagagctagaaatagcaagttaaaataaggctagtccgttatcaacttgaaaaagtggcaccgagtcggtgctttctcgtcgatggtcagcacagccttatgcacggcc

SEQ ID NO: 23771 - DNA, 132 bp, synthetic construct
  source 1..132: mol_type = other DNA
tccaggccgtgcataaggctgttttagagctagaaatagcaagttaaaataaggctagtccgttatcaacttgaaaaagtggcaccgagtcggtgctttctcgtcgatggtcagcacagccttatgcacggc

SEQ ID NO: 23772 - DNA, 131 bp, synthetic construct
  source 1..131: mol_type = other DNA
tccaggccgtgcataaggctgttttagagctagaaatagcaagttaaaataaggctagtccgttatcaacttgaaaaagtggcaccgagtcggtgctttctcgtcgatggtcagcacagccttatgcacgg

SEQ ID NO: 23773 - DNA, 130 bp, synthetic construct
  source 1..130: mol_type = other DNA
tccaggccgtgcataaggctgttttagagctagaaatagcaagttaaaataaggctagtccgttatcaacttgaaaaagtggcaccgagtcggtgctttctcgtcgatggtcagcacagccttatgcacg

SEQ ID NO: 23774 - DNA, 129 bp, synthetic construct
  source 1..129: mol_type = other DNA
tccaggccgtgcataaggctgttttagagctagaaatagcaagttaaaataaggctagtccgttatcaacttgaaaaagtggcaccgagtcggtgctttctcgtcgatggtcagcacagccttatgcac

SEQ ID NO: 23775 - DNA, 128 bp, synthetic construct
  source 1..128: mol_type = other DNA
tccaggccgtgcataaggctgttttagagctagaaatagcaagttaaaataaggctagtccgttatcaacttgaaaaagtggcaccgagtcggtgctttctcgtcgatggtcagcacagccttatgca

SEQ ID NO: 23776 - DNA, 135 bp, synthetic construct
  source 1..135: mol_type = other DNA
tccaggccgtgcataaggctgttttagagctagaaatagcaagttaaaataaggctagtccgttatcaacttgaaaaagtggcaccgagtcggtgctctcgtcgatggtcagcacagccttatgcacggcctgga

SEQ ID NO: 23777 - DNA, 134 bp, synthetic construct
  source 1..134: mol_type = other DNA
tccaggccgtgcataaggctgttttagagctagaaatagcaagttaaaataaggctagtccgttatcaacttgaaaaagtggcaccgagtcggtgctctcgtcgatggtcagcacagccttatgcacggcctgg

SEQ ID NO: 23778 - DNA, 133 bp, synthetic construct
  source 1..133: mol_type = other DNA
tccaggccgtgcataaggctgttttagagctagaaatagcaagttaaaataaggctagtccgttatcaacttgaaaaagtggcaccgagtcggtgctctcgtcgatggtcagcacagccttatgcacggcctg

SEQ ID NO: 23779 - DNA, 132 bp, synthetic construct
  source 1..132: mol_type = other DNA
tccaggccgtgcataaggctgttttagagctagaaatagcaagttaaaataaggctagtccgttatcaacttgaaaaagtggcaccgagtcggtgctctcgtcgatggtcagcacagccttatgcacggcct

SEQ ID NO: 23780 - DNA, 131 bp, synthetic construct
  source 1..131: mol_type = other DNA
tccaggccgtgcataaggctgttttagagctagaaatagcaagttaaaataaggctagtccgttatcaacttgaaaaagtggcaccgagtcggtgctctcgtcgatggtcagcacagccttatgcacggcc

SEQ ID NO: 23781 - DNA, 130 bp, synthetic construct
  source 1..130: mol_type = other DNA
tccaggccgtgcataaggctgttttagagctagaaatagcaagttaaaataaggctagtccgttatcaacttgaaaaagtggcaccgagtcggtgctctcgtcgatggtcagcacagccttatgcacggc

SEQ ID NO: 23782 - DNA, 129 bp, synthetic construct
  source 1..129: mol_type = other DNA
tccaggccgtgcataaggctgttttagagctagaaatagcaagttaaaataaggctagtccgttatcaacttgaaaaagtggcaccgagtcggtgctctcgtcgatggtcagcacagccttatgcacgg

SEQ ID NO: 23783 - DNA, 128 bp, synthetic construct
  source 1..128: mol_type = other DNA
tccaggccgtgcataaggctgttttagagctagaaatagcaagttaaaataaggctagtccgttatcaacttgaaaaagtggcaccgagtcggtgctctcgtcgatggtcagcacagccttatgcacg

SEQ ID NO: 23784 - DNA, 127 bp, synthetic construct
  source 1..127: mol_type = other DNA
tccaggccgtgcataaggctgttttagagctagaaatagcaagttaaaataaggctagtccgttatcaacttgaaaaagtggcaccgagtcggtgctctcgtcgatggtcagcacagccttatgcac

SEQ ID NO: 23785 - DNA, 126 bp, synthetic construct
  source 1..126: mol_type = other DNA
tccaggccgtgcataaggctgttttagagctagaaatagcaagttaaaataaggctagtccgttatcaacttgaaaaagtggcaccgagtcggtgctctcgtcgatggtcagcacagccttatgca

SEQ ID NO: 23786 - DNA, 20 bp, synthetic construct
  source 1..20: mol_type = other DNA
gggtatggcctctaaaaaca

SEQ ID NO: 23787 - DNA, 20 bp, synthetic construct
  source 1..20: mol_type = other DNA
tcccctccaggccgtgcata

SEQ ID NO: 23788 - DNA, 20 bp, synthetic construct
  source 1..20: mol_type = other DNA
tctctgcttctctcccctcc

SEQ ID NO: 23789 - DNA, 21 bp, synthetic construct
  source 1..21: mol_type = other DNA
gtcccctccaggccgtgcata

SEQ ID NO: 23790 - DNA, 21 bp, synthetic construct
  source 1..21: mol_type = other DNA
gtctctgcttctctcccctcc

SEQ ID NO: 23791 - protein, 30 aa, synthetic construct
MPAAKRVKLDGGKRTADGSEFESPKKKRKV

SEQ ID NO: 23792 - protein, 28 aa, synthetic construct
KRTADSQHSTPPKTKRKVEFEPKKKRKV

SEQ ID NO: 23793 - protein, 691 aa, synthetic construct; identical to SEQ ID NO: 8076

SEQ ID NO: 23794 - protein, 15 aa, synthetic construct
SATPESSGGSSGGSS

SEQ ID NO: 23795 - protein, 1367 aa, unidentified
DKKYSIGLDIGTNSVGWAVITDEYKVPSKKFKVLGNTDRHSIKKNLIGALLFDSGETAEATRLKRTARRRYTRRKNRICYLQEIFSNEMAKVDDSFFHRLEESFLVEEDKKHERHPIFGNIVDEVAYHEKYPTIYHLRKKLVDSTDKADLRLIYLALAHMIKFRGHFLIEGDLNPDNSDVDKLFIQLVQTYNQLFEENPINASGVDAKAILSARLSKSRRLENLIAQLPGEKKNGLFGNLIALSLGLTPNFKSNFDLAEDAKLQLSKDTYDDDLDNLLAQIGDQYADLFLAAKNLSDAILLSDILRVNTEITKAPLSASMIKRYDEHHQDLTLLKALVRQQLPEKYKEIFFDQSKNGYAGYIDGGASQEEFYKFIKPILEKMDGTEELLVKLNREDLLRKQRTFDNGSIPHQIHLGELHAILRRQEDFYPFLKDNREKIEKILTFRIPYYVGPLARGNSRFAWMTRKSEETITPWNFEEVVDKGASAQSFIERMTNFDKNLPNEKVLPKHSLLYEYFTVYNELTKVKYVTEGMRKPAFLSGEQKKAIVDLLFKTNRKVTVKQLKEDYFKKIECFDSVEISGVEDRFNASLGTYHDLLKIIKDKDFLDNEENEDILEDIVLTLTLFEDREMIEERLKTYAHLFDDKVMKQLKRRRYTGWGRLSRKLINGIRDKQSGKTILDFLKSDGFANRNFMQLIHDDSLTFKEDIQKAQVSGQGDSLHEHIANLAGSPAIKKGILQTVKVVDELVKVMGRHKPENIVIEMARENQTTQKGQKNSRERMKRIEEGIKELGSQILKEHPVENTQLQNEKLYLYYLQNGRDMYVDQELDINRLSDYDVDHIVPQSFLKDDSIDNKVLTRSDKNRGKSDNVPSEEVVKKMKNYWRQLLNAKLITQRKFDNLTKAERGGLSELDKAGFIKRQLVETRQITKHVAQILDSRMNTKYDENDKLIREVKVITLKSKLVSDFRKDFQFYKVREINNYHHAHDAYLNAVVGTALIKKYPKLESEFVYGDYKVYDVRKMIAKSEQEIGKATAKYFFYSNIMNFFKTEITLANGEIRKRPLIETNGETGEIVWDKGRDFATVRKVLSMPQVNIVKKTEVQTGGFSKESILPKRNSDKLIARKKDWDPKKYGGFDSPTVAYSVLVVAKVEKGKSKKLKSVKELLGITIMERSSFEKNPIDFLEAKGYKEVKKDLIIKLPKYSLFELENGRKRMLASAGELQKGNELALPSKYVNFLYLASHYEKLKGSPEDNEQKQLFVEQHKHYLDEIIEQISEFSKRVILADANLDKVLSAYNKHRDKPIREQAENIIHLFTLTNLGAPAAFKYFDTTIDRKRYTSTKEVLDATLIHQSITGLYETRIDLSQLGGD

SEQ ID NO: 23796 - protein, 1367 aa, synthetic construct; identical to SEQ ID NO: 11096

SEQ ID NO: 23797 - protein, 1091 aa, unidentified
AYTMGIDVGIASCGWAIVDLERQRIIDIGVRTFEKAENPKNGEALAVPRREARSSRRRLRRKKHRIERLKHMFVRNGLAVDIQHLEQTLRSQNEIDVWQLRVDGLDRMLTQKEWLRVLIHLAQRRGFQSNRKTDGSSEDGQVLVNVTENDRLMEEKDYRTVAEMMVKDEKFSDHKRNKNGNYHGVVSRSSLLVEIHTLFETQRQHHNSLASKDFELEYVNIWSAQRPVATKDQIEKMIGTCTFLPKEKRAPKASWHFQYFMLLQTINHIRITNVQGTRSLNKEEIEQVVNMALTKSKVSYHDTRKILDLSEEYQFVGLDYGKEDEKKKVESKETIIKLDDYHKLNKIFNEVELAKGETWEADDYDTVAYALTFFKDDEDIRDYLQNKYKDSKNRLVKNLANKEYTNELIGKVSTLSFRKVGHLSLKALRKIIPFLEQGMTYDKACQAAGFDFQGISKKKRSVVLPVIDQISNPVVNRALTQTRKVINALIKKYGSPETIHIETARELSKTFDERKNITKDYKENRDKNEHAKKHLSELGIINPTGLDIVKYKLWCEQQGRCMYSNQPISFERLKESGYTEVDHIIPYSRSMNDSYNNRVLVMTRENREKGNQTPFEYMGNDTQRWYEFEQRVTTNPQIKKEKRQNLLLKGFTNRRELEMLERNLNDTRYITKYLSHFISTNLEFSPSDKKKKVVNTSGRITSHLRSRWGLEKNRGQNDLHHAMDAIVIAVTSDSFIQQVTNYYKRKERRELNGDDKFPLPWKFFREEVIARLSPNPKEQIEALPNHFYSEDELADLQPIFVSRMPKRSITGEAHQAQFRRVVGKTKEGKNITAKKTALVDISYDKNGDFNMYGRETDPATYEAIKERYLEFGGNVKKAFSTDLHKPKKDGTKGPLIKSVRIMENKTLVHPVNKGKGVVYNSSIVRTDVFQRKEKYYLLPVYVTDVTKGKLPNKVIVAKKGYHDWIEVDDSFTFLFSLYPNDLIFIRQNPKKKISLKKRIESHSISDSKEVQEIHAYYKGVDSSTAAIEFIIHDGSYYAKGVGVQNLDCFEKYQVDILGNYFKVKGEKRLELETSDSNHKGKDVNSIKSTSR

SEQ ID NO: 23798 - protein, 1091 aa, synthetic construct
AYTMGIDVGIASCGWAIVDLERQRIIDIGVRTFEKAENPKNGEALAVPRREARSSRRRLRRKKHRIERLKHMFVRNGLAVDIQHLEQTLRSQNEIDVWQLRVDGLDRMLTQKEWLRVLIHLAQRRGFQSNRKTDGSSEDGQVLVNVTENDRLMEEKDYRTVAEMMVKDEKFSDHKRNKNGNYHGVVSRSSLLVEIHTLFETQRQHHNSLASKDFELEYVNIWSAQRPVATKDQIEKMIGTCTFLPKEKRAPKASWHFQYFMLLQTINHIRITNVQGTRSLNKEEIEQVVNMALTKSKVSYHDTRKILDLSEEYQFVGLDYGKEDEKKKVESKETIIKLDDYHKLNKIFNEVELAKGETWEADDYDTVAYALTFFKDDEDIRDYLQNKYKDSKNRLVKNLANKEYTNELIGKVSTLSFRKVGHLSLKALRKIIPFLEQGMTYDKACQAAGFDFQGISKKKRSVVLPVIDQISNPVVNRALTQTRKVINALIKKYGSPETIHIETARELSKTFDERKNITKDYKENRDKNEHAKKHLSELGIINPTGLDIVKYKLWCEQQGRCMYSNQPISFERLKESGYTEVDHIIPYSRSMNDSYNNRVLVMTREAREKGNQTPFEYMGNDTQRWYEFEQRVTTNPQIKKEKRQNLLLKGFTNRRELEMLERNLNDTRYITKYLSHFISTNLEFSPSDKKKKVVNTSGRITSHLRSRWGLEKNRGQNDLHHAMDAIVIAVTSDSFIQQVTNYYKRKERRELNGDDKFPLPWKFFREEVIARLSPNPKEQIEALPNHFYSEDELADLQPIFVSRMPKRSITGEAHQAQFRRVVGKTKEGKNITAKKTALVDISYDKNGDFNMYGRETDPATYEAIKERYLEFGGNVKKAFSTDLHKPKKDGTKGPLIKSVRIMENKTLVHPVNKGKGVVYNSSIVRTDVFQRKEKYYLLPVYVTDVTKGKLPNKVIVAKKGYHDWIEVDDSFTFLFSLYPNDLIFIRQNPKKKISLKKRIESHSISDSKEVQEIHAYYKGVDSSTAAIEFIIHDGSYYAKGVGVQNLDCFEKYQVDILGNYFKVKGEKRLELETSDSNHKGKDVNSIKSTSR

SEQ ID NO: 23799 - protein, 1081 aa, unidentified
AAFKPNPINYILGLDIGIASVGWAMVEIDEEENPIRLIDLGVRVFERAEVPKTGDSLAMARRLARSVRRLTRRRAHRLLRARRLLKREGVLQAADFDENGLIKSLPNTPWQLRAAALDRKLTPLEWSAVLLHLIKHRGYLSQRKNEGETADKELGALLKGVANNAHALQTGDFRTPAELALNKFEKESGHIRNQRGDYSHTFSRKDLQAELILLFEKQKEFGNPHVSGGLKEGIETLLMTQRPALSGDAVQKMLGHCTFEPAEPKAAKNTYTAERFIWLTKLNNLRILEQGSERPLTDTERATLMDEPYRKSKLTYAQARKLLGLEDTAFFKGLRYGKDNAEASTLMEMKAYHAISRALEKEGLKDKKSPLNLSSELQDEIGTAFSLFKTDEDITGRLKDRVQPEILEALLKHISFDKFVQISLKALRRIVPLMEQGKRYDEACAEIYGDHYGKKNTEEKIYLPPIPADEIRNPVVLRALSQARKVINGVVRRYGSPARIHIETAREVGKSFKDRKEIEKRQEENRKDREKAAAKFREYFPNFVGEPKSKDILKLRLYEQQHGKCLYSGKEINLVRLNEKGYVEIDHALPFSRTWDDSFNNKVLVLGSENQNKGNQTPYEYFNGKDNSREWQEFKARVETSRFPRSKKQRILLQKFDEDGFKECNLNDTRYVNRFLCQFVADHILLTGKGKRRVFASNGQITNLLRGFWGLRKVRAENDRHHALDAVVVACSTVAMQQKITRFVRYKEMNAFDGKTIDKETGKVLHQKTHFPQPWEFFAQEVMIRVFGKPDGKPEFEEADTPEKLRTLLAEKLSSRPEAVHEYVTPLFVSRAPNRKMSGAHKDTLRSAKRFVKHNEKISVKRVWLTEIKLADLENMVNYKNGREIELYEALKARLEAYGGNAKQAFDPKDNPFYKKGGQLVKAVRVEKTQESGVLLNKKNAYTIADNGDMVRVDVFCKVDKKGKNQYFIVPIYAWQVAENILPDIDCKGYRIDDSYTFCFSLHKYDLIAFQKDEKSKVEFAYYINCDSSNGRFYLAWHDKGSKEQQFRISTQNLVLIQKYQVNELGKEIRPCRLKKRPPVR

SEQ ID NO: 23800 - protein, 1081 aa, synthetic construct
AAFKPNPINYILGLDIGIASVGWAMVEIDEEENPIRLIDLGVRVFERAEVPKTGDSLAMARRLARSVRRLTRRRAHRLLRARRLLKREGVLQAADFDENGLIKSLPNTPWQLRAAALDRKLTPLEWSAVLLHLIKHRGYLSQRKNEGETADKELGALLKGVANNAHALQTGDFRTPAELALNKFEKESGHIRNQRGDYSHTFSRKDLQAELILLFEKQKEFGNPHVSGGLKEGIETLLMTQRPALSGDAVQKMLGHCTFEPAEPKAAKNTYTAERFIWLTKLNNLRILEQGSERPLTDTERATLMDEPYRKSKLTYAQARKLLGLEDTAFFKGLRYGKDNAEASTLMEMKAYHAISRALEKEGLKDKKSPLNLSSELQDEIGTAFSLFKTDEDITGRLKDRVQPEILEALLKHISFDKFVQISLKALRRIVPLMEQGKRYDEACAEIYGDHYGKKNTEEKIYLPPIPADEIRNPVVLRALSQARKVINGVVRRYGSPARIHIETAREVGKSFKDRKEIEKRQEENRKDREKAAAKFREYFPNFVGEPKSKDILKLRLYEQQHGKCLYSGKEINLVRLNEKGYVEIDHALPFSRTWDDSFNNKVLVLGSEAQNKGNQTPYEYFNGKDNSREWQEFKARVETSRFPRSKKQRILLQKFDEDGFKECNLNDTRYVNRFLCQFVADHILLTGKGKRRVFASNGQITNLLRGFWGLRKVRAENDRHHALDAVVVACSTVAMQQKITRFVRYKEMNAFDGKTIDKETGKVLHQKTHFPQPWEFFAQEVMIRVFGKPDGKPEFEEADTPEKLRTLLAEKLSSRPEAVHEYVTPLFVSRAPNRKMSGAHKDTLRSAKRFVKHNEKISVKRVWLTEIKLADLENMVNYKNGREIELYEALKARLEAYGGNAKQAFDPKDNPFYKKGGQLVKAVRVEKTQESGVLLNKKNAYTIADNGDMVRVDVFCKVDKKGKNQYFIVPIYAWQVAENILPDIDCKGYRIDDSYTFCFSLHKYDLIAFQKDEKSKVEFAYYINCDSSNGRFYLAWHDKGSKEQQFRISTQNLVLIQKYQVNELGKEIRPCRLKKRPPVR

SEQ ID NO: 23801 - protein, 1054 aa, unidentified
QNNPLNYILGLDLGIASIGWAVVEIDEESSPIRLIDVGVRTFERAEVAKTGESLALSRRLARSSRRLIKRRAERLKKAKRLLKAEKILHSIDEKLPINVWQLRVKGLKEKLERQEWAAVLLHLSKHRGYLSQRKNEGKSDNKELGALLSGIASNHQMLQSSEYRTPAEIAVKKFQVEEGHIRNQRGSYTHTFSRLDLLAEMELLFQRQAELGNSYTSTTLLENLTALLMWQKPALAGDAILKMLGKCTFEPSEYKAAKNSYSAERFVWLTKLNNLRILENGTERALNDNERFALLEQPYEKSKLTYAQVRAMLALSDNAIFKGVRYLGEDKKTVESKTTLIEMKFYHQIRKTLGSAELKKEWNELKGNSDLLDEIGTAFSLYKTDDDICRYLEGKLPERVLNALLENLNFDKFIQLSLKALHQILPLMLQGQRYDEAVSAIYGDHYGKKSTETTRLLPTIPADEIRNPVVLRTLTQARKVINAVVRLYGSPARIHIETAREVGKSYQDRKKLEKQQEDNRKQRESAVKKFKEMFPHFVGEPKGKDILKMRLYELQQAKCLYSGKSLELHRLLEKGYVEVDHALPFSRTWDDSFNNKVLVLANENQNKGNLTPYEWLDGKNNSERWQHFVVRVQTSGFSYAKKQRILNHKLDEKGFIERNLNDTRYVARFLCNFIADNMLLVGKGKRNVFASNGQITALLRHRWGLQKVREQNDRHHALDAVVVACSTVAMQQKITRFVRYNEGNVFSGERIDRETGEIIPLHFPSPWAFFKENVEIRIFSENPKLELENRLPDYPQYNHEWVQPLFVSRMPTRKMTGQGHMETVKSAKRLNEGLSVLKVPLTQLKLSDLERMVNRDREIALYESLKARLEQFGNDPAKAFAEPFYKKGGALVKAVRLEQTQKSGVLVRDGNGVADNASMVRVDVFTKGGKYFLVPIYTWQVAKGILPNRAATQGKDENDWDIMDEMATFQFSLCQNDLIKLVTKKKTIFGYFNGLNRATSNINIKEHDLDKSKGKLGIYLEVGVKLAISLEKYQVDELGKNIRPCRPTKRQHVR

SEQ ID NO: 23802 - protein, 1054 aa, synthetic construct
QNNPLNYILGLDLGIASIGWAVVEIDEESSPIRLIDVGVRTFERAEVAKTGESLALSRRLARSSRRLIKRRAERLKKAKRLLKAEKILHSIDEKLPINVWQLRVKGLKEKLERQEWAAVLLHLSKHRGYLSQRKNEGKSDNKELGALLSGIASNHQMLQSSEYRTPAEIAVKKFQVEEGHIRNQRGSYTHTFSRLDLLAEMELLFQRQAELGNSYTSTTLLENLTALLMWQKPALAGDAILKMLGKCTFEPSEYKAAKNSYSAERFVWLTKLNNLRILENGTERALNDNERFALLEQPYEKSKLTYAQVRAMLALSDNAIFKGVRYLGEDKKTVESKTTLIEMKFYHQIRKTLGSAELKKEWNELKGNSDLLDEIGTAFSLYKTDDDICRYLEGKLPERVLNALLENLNFDKFIQLSLKALHQILPLMLQGQRYDEAVSAIYGDHYGKKSTETTRLLPTIPADEIRNPVVLRTLTQARKVINAVVRLYGSPARIHIETAREVGKSYQDRKKLEKQQEDNRKQRESAVKKFKEMFPHFVGEPKGKDILKMRLYELQQAKCLYSGKSLELHRLLEKGYVEVDHALPFSRTWDDSFNNKVLVLANEAQNKGNLTPYEWLDGKNNSERWQHFVVRVQTSGFSYAKKQRILNHKLDEKGFIERNLNDTRYVARFLCNFIADNMLLVGKGKRNVFASNGQITALLRHRWGLQKVREQNDRHHALDAVVVACSTVAMQQKITRFVRYNEGNVFSGERIDRETGEIIPLHFPSPWAFFKENVEIRIFSENPKLELENRLPDYPQYNHEWVQPLFVSRMPTRKMTGQGHMETVKSAKRLNEGLSVLKVPLTQLKLSDLERMVNRDREIALYESLKARLEQFGNDPAKAFAEPFYKKGGALVKAVRLEQTQKSGVLVRDGNGVADNASMVRVDVFTKGGKYFLVPIYTWQVAKGILPNRAATQGKDENDWDIMDEMATFQFSLCQNDLIKLVTKKKTIFGYFNGLNRATSNINIKEHDLDKSKGKLGIYLEVGVKLAISLEKYQVDELGKNIRPCRPTKRQHVR

SEQ ID NO: 23803 - protein, 1052 aa, unidentified
KRNYILGLDIGITSVGYGIIDYETRDVIDAGVRLFKEANVENNEGRRSKRGARRLKRRRRHRIQRVKKLLFDYNLLTDHSELSGINPYEARVKGLSQKLSEEEFSAALLHLAKRRGVHNVNEVEEDTGNELSTKEQISRNSKALEEKYVAELQLERLKKDGEVRGSINRFKTSDYVKEAKQLLKVQKAYHQLDQSFIDTYIDLLETRRTYYEGPGEGSPFGWKDIKEWYEMLMGHCTYFPEELRSVKYAYNADLYNALNDLNNLVITRDENEKLEYYEKFQIIENVFKQKKKPTLKQIAKEILVNEEDIKGYRVTSTGKPEFTNLKVYHDIKDITARKEIIENAELLDQIAKILTIYQSSEDIQEELTNLNSELTQEEIEQISNLKGYTGTHNLSLKAINLILDELWHTNDNQIAIFNRLKLVPKKVDLSQQKEIPTTLVDDFILSPVVKRSFIQSIKVINAIIKKYGLPNDIIIELAREKNSKDAQKMINEMQKRNRQTNERIEEIIRTTGKENAKYLIEKIKLHDMQEGKCLYSLEAIPLEDLLNNPFNYEVDHIIPRSVSFDNSFNNKVLVKQEENSKKGNRTPFQYLSSSDSKISYETFKKHILNLAKGKGRISKTKKEYLLEERDINRFSVQKDFINRNLVDTRYATRGLMNLLRSYFRVNNLDVKVKSINGGFTSFLRRKWKFKKERNKGYKHHAEDALIIANADFIFKEWKKLDKAKKVMENQMFEEKQAESMPEIETEQEYKEIFITPHQIKHIKDFKDYKYSHRVDKKPNRELINDTLYSTRKDDKGNTLIVNNLNGLYDKDNDKLKKLINKSPEKLLMYHHDPQTYQKLKLIMEQYGDEKNPLYKYYEETGNYLTKYSKKDNGPVIKKIKYYGNKLNAHLDITDDYPNSRNKVVKLSLKPYRFDVYLDNGVYKFVTVKNLDVIKKENYYEVNSKCYEEAKKLKKISNQAEFIASFYNNDLIKINGELYRVIGVNNDLLNRIEVNMIDITYREYLENMNDKRPPRIIKTIASKTQSIKKYSTDILGNLYEVKSKKHPQIIKKG

SEQ ID NO: 23804 - protein, 1052 aa, synthetic construct
KRNYILGLDIGITSVGYGIIDYETRDVIDAGVRLFKEANVENNEGRRSKRGARRLKRRRRHRIQRVKKLLFDYNLLTDHSELSGINPYEARVKGLSQKLSEEEFSAALLHLAKRRGVHNVNEVEEDTGNELSTKEQISRNSKALEEKYVAELQLERLKKDGEVRGSINRFKTSDYVKEAKQLLKVQKAYHQLDQSFIDTYIDLLETRRTYYEGPGEGSPFGWKDIKEWYEMLMGHCTYFPEELRSVKYAYNADLYNALNDLNNLVITRDENEKLEYYEKFQIIENVFKQKKKPTLKQIAKEILVNEEDIKGYRVTSTGKPEFTNLKVYHDIKDITARKEIIENAELLDQIAKILTIYQSSEDIQEELTNLNSELTQEEIEQISNLKGYTGTHNLSLKAINLILDELWHTNDNQIAIFNRLKLVPKKVDLSQQKEIPTTLVDDFILSPVVKRSFIQSIKVINAIIKKYGLPNDIIIELAREKNSKDAQKMINEMQKRNRQTNERIEEIIRTTGKENAKYLIEKIKLHDMQEGKCLYSLEAIPLEDLLNNPFNYEVDHIIPRSVSFDNSFNNKVLVKQEEASKKGNRTPFQYLSSSDSKISYETFKKHILNLAKGKGRISKTKKEYLLEERDINRFSVQKDFINRNLVDTRYATRGLMNLLRSYFRVNNLDVKVKSINGGFTSFLRRKWKFKKERNKGYKHHAEDALIIANADFIFKEWKKLDKAKKVMENQMFEEKQAESMPEIETEQEYKEIFITPHQIKHIKDFKDYKYSHRVDKKPNRELINDTLYSTRKDDKGNTLIVNNLNGLYDKDNDKLKKLINKSPEKLLMYHHDPQTYQKLKLIMEQYGDEKNPLYKYYEETGNYLTKYSKKDNGPVIKKIKYYGNKLNAHLDITDDYPNSRNKVVKLSLKPYRFDVYLDNGVYKFVTVKNLDVIKKENYYEVNSKCYEEAKKLKKISNQAEFIASFYNNDLIKINGELYRVIGVNNDLLNRIEVNMIDITYREYLENMNDKRPPRIIKTIASKTQSIKKYSTDILGNLYEVKSKKHPQIIKKG

SEQ ID NO: 23805 - protein, 1052 aa, unidentified
KRNYILGLDIGITSVGYGIIDYETRDVIDAGVRLFKEANVENNEGRRSKRGARRLKRRRRHRIQRVKKLLFDYNLLTDHSELSGINPYEARVKGLSQKLSEEEFSAALLHLAKRRGVHNVNEVEEDTGNELSTKEQISRNSKALEEKYVAELQLERLKKDGEVRGSINRFKTSDYVKEAKQLLKVQKAYHQLDQSFIDTYIDLLETRRTYYEGPGEGSPFGWKDIKEWYEMLMGHCTYFPEELRSVKYAYNADLYNALNDLNNLVITRDENEKLEYYEKFQIIENVFKQKKKPTLKQIAKEILVNEEDIKGYRVTSTGKPEFTNLKVYHDIKDITARKEIIENAELLDQIAKILTIYQSSEDIQEELTNLNSELTQEEIEQISNLKGYTGTHNLSLKAINLILDELWHTNDNQIAIFNRLKLVPKKVDLSQQKEIPTTLVDDFILSPVVKRSFIQSIKVINAIIKKYGLPNDIIIELAREKNSKDAQKMINEMQKRNRQTNERIEEIIRTTGKENAKYLIEKIKLHDMQEGKCLYSLEAIPLEDLLNNPFNYEVDHIIPRSVSFDNSFNNKVLVKQEENSKKGNRTPFQYLSSSDSKISYETFKKHILNLAKGKGRISKTKKEYLLEERDINRFSVQKDFINRNLVDTRYATRGLMNLLRSYFRVNNLDVKVKSINGGFTSFLRRKWKFKKERNKGYKHHAEDALIIANADFIFKEWKKLDKAKKVMENQMFEEKQAESMPEIETEQEYKEIFITPHQIKHIKDFKDYKYSHRVDKKPNRKLINDTLYSTRKDDKGNTLIVNNLNGLYDKDNDKLKKLINKSPEKLLMYHHDPQTYQKLKLIMEQYGDEKNPLYKYYEETGNYLTKYSKKDNGPVIKKIKYYGNKLNAHLDITDDYPNSRNKVVKLSLKPYRFDVYLDNGVYKFVTVKNLDVIKKENYYEVNSKCYEEAKKLKKISNQAEFIASFYKNDLIKINGELYRVIGVNNDLLNRIEVNMIDITYREYLENMNDKRPPHIIKTIASKTQSIKKYSTDILGNLYEVKSKKHPQIIKKG

SEQ ID NO: 23806 - protein, 1052 aa, synthetic construct
KRNYILGLDIGITSVGYGIIDYETRDVIDAGVRLFKEANVENNEGRRSKRGARRLKRRRRHRIQRVKKLLFDYNLLTDHSELSGINPYEARVKGLSQKLSEEEFSAALLHLAKRRGVHNVNEVEEDTGNELSTKEQISRNSKALEEKYVAELQLERLKKDGEVRGSINRFKTSDYVKEAKQLLKVQKAYHQLDQSFIDTYIDLLETRRTYYEGPGEGSPFGWKDIKEWYEMLMGHCTYFPEELRSVKYAYNADLYNALNDLNNLVITRDENEKLEYYEKFQIIENVFKQKKKPTLKQIAKEILVNEEDIKGYRVTSTGKPEFTNLKVYHDIKDITARKEIIENAELLDQIAKILTIYQSSEDIQEELTNLNSELTQEEIEQISNLKGYTGTHNLSLKAINLILDELWHTNDNQIAIFNRLKLVPKKVDLSQQKEIPTTLVDDFILSPVVKRSFIQSIKVINAIIKKYGLPNDIIIELAREKNSKDAQKMINEMQKRNRQTNERIEEIIRTTGKENAKYLIEKIKLHDMQEGKCLYSLEAIPLEDLLNNPFNYEVDHIIPRSVSFDNSFNNKVLVKQEEASKKGNRTPFQYLSSSDSKISYETFKKHILNLAKGKGRISKTKKEYLLEERDINRFSVQKDFINRNLVDTRYATRGLMNLLRSYFRVNNLDVKVKSINGGFTSFLRRKWKFKKERNKGYKHHAEDALIIANADFIFKEWKKLDKAKKVMENQMFEEKQAESMPEIETEQEYKEIFITPHQIKHIKDFKDYKYSHRVDKKPNRKLINDTLYSTRKDDKGNTLIVNNLNGLYDKDNDKLKKLINKSPEKLLMYHHDPQTYQKLKLIMEQYGDEKNPLYKYYEETGNYLTKYSKKDNGPVIKKIKYYGNKLNAHLDITDDYPNSRNKVVKLSLKPYRFDVYLDNGVYKFVTVKNLDVIKKENYYEVNSKCYEEAKKLKKISNQAEFIASFYKNDLIKINGELYRVIGVNNDLLNRIEVNMIDITYREYLENMNDKRPPHIIKTIASKTQSIKKYSTDILGNLYEVKSKKHPQIIKKG

SEQ ID NO: 23807 - protein, 1060 aa, unidentified
QENQQKQNYILGLDIGITSVGYGLIDSKTREVIDAGVRLFPEADSENNSNRRSKRGARRLKRRRIHRLNRVKDLLADYQMIDLNNVPKSTDPYTIRVKGLREPLTKEEFAIALLHIAKRRGLHNISVSMGDEEQDNELSTKQQLQKNAQQLQDKYVCELQLERLTNINKVRGEKNRFKTEDFVKEVKQLCETQRQYHNIDDQFIQQYIDLVSTRREYFEGPGNGSPYGWDGDLLKWYEKLMGRCTYFPEELRSVKYAYSADLFNALNDLNNLVVTRDDNPKLEYYEKYHIIENVFKQKKNPTLKQIAKEIGVQDYDIRGYRITKSGKPQFTSFKLYHDLKNIFEQAKYLEDVEMLDEIAKILTIYQDEISIKKALDQLPELLTESEKSQIAQLTGYTGTHRLSLKCIHIVIDELWESPENQMEIFTRLNLKPKKVEMSEIDSIPTTLVDEFILSPVVKRAFIQSIKVINAVINRFGLPEDIIIELAREKNSKDRRKFINKLQKQNEATRKKIEQLLAKYGNTNAKYMIEKIKLHDMQEGKCLYSLEAIPLEDLLSNPTHYEVDHIIPRSVSFDNSLNNKVLVKQSENSKKGNRTPYQYLSSNESKISYNQFKQHILNLSKAKDRISKKKRDMLLEERDINKFEVQKEFINRNLVDTRYATRELSNLLKTYFSTHDYAVKVKTINGGFTNHLRKVWDFKKHRNHGYKHHAEDALVIANADFLFKTHKALRRTDKILEQPGLEVNDTTVKVDTEEKYQELFETPKQVKNIKQFRDFKYSHRVDKKPNRQLINDTLYSTREIDGETYVVQTLKDLYAKDNEKVKKLFTERPQKILMYQHDPKTFEKLMTILNQYAEAKNPLAAYYEDKGEYVTKYAKKGNGPAIHKIKYIDKKLGSYLDVSNKYPETQNKLVKLSLKSFRFDIYKCEQGYKMVSIGYLDVLKKDNYYYIPKDKYEAEKQKKKIKESDLFVGSFYYNDLIMYEDELFRVIGVNSDINNLVELNMVDITYKDFCEVNNVTGEKRIKKTIGKRVVLIEKYTTDILGNLYKTPLPKKPQLIFKRGEL

SEQ ID NO: 23808 - protein, 1060 aa, synthetic construct
QENQQKQNYILGLDIGITSVGYGLIDSKTREVIDAGVRLFPEADSENNSNRRSKRGARRLKRRRIHRLNRVKDLLADYQMIDLNNVPKSTDPYTIRVKGLREPLTKEEFAIALLHIAKRRGLHNISVSMGDEEQDNELSTKQQLQKNAQQLQDKYVCELQLERLTNINKVRGEKNRFKTEDFVKEVKQLCETQRQYHNIDDQFIQQYIDLVSTRREYFEGPGNGSPYGWDGDLLKWYEKLMGRCTYFPEELRSVKYAYSADLFNALNDLNNLVVTRDDNPKLEYYEKYHIIENVFKQKKNPTLKQIAKEIGVQDYDIRGYRITKSGKPQFTSFKLYHDLKNIFEQAKYLEDVEMLDEIAKILTIYQDEISIKKALDQLPELLTESEKSQIAQLTGYTGTHRLSLKCIHIVIDELWESPENQMEIFTRLNLKPKKVEMSEIDSIPTTLVDEFILSPVVKRAFIQSIKVINAVINRFGLPEDIIIELAREKNSKDRRKFINKLQKQNEATRKKIEQLLAKYGNTNAKYMIEKIKLHDMQEGKCLYSLEAIPLEDLLSNPTHYEVDHIIPRSVSFDNSLNNKVLVKQSEASKKGNRTPYQYLSSNESKISYNQFKQHILNLSKAKDRISKKKRDMLLEERDINKFEVQKEFINRNLVDTRYATRELSNLLKTYFSTHDYAVKVKTINGGFTNHLRKVWDFKKHRNHGYKHHAEDALVIANADFLFKTHKALRRTDKILEQPGLEVNDTTVKVDTEEKYQELFETPKQVKNIKQFRDFKYSHRVDKKPNRQLINDTLYSTREIDGETYVVQTLKDLYAKDNEKVKKLFTERPQKILMYQHDPKTFEKLMTILNQYAEAKNPLAAYYEDKGEYVTKYAKKGNGPAIHKIKYIDKKLGSYLDVSNKYPETQNKLVKLSLKSFRFDIYKCEQGYKMVSIGYLDVLKKDNYYYIPKDKYEAEKQKKKIKESDLFVGSFYYNDLIMYEDELFRVIGVNSDINNLVELNMVDITYKDFCEVNNVTGEKRIKKTIGKRVVLIEKYTTDILGNLYKTPLPKKPQLIFKRGEL

SEQ ID NO: 23809 - protein, 1060 aa, unidentified
QENQQKQNYILGLDIGITSVGYGLIDSKTREVIDAGVRLFPEADSENNSNRRSKRGARRLKRRRIHRLNRVKDLLADYQMIDLNNVPKSTDPYTIRVKGLREPLTKEEFAIALLHIAKRRGLHNISVSMGDEEQDNELSTKQQLQKNAQQLQDKYVCELQLERLTNINKVRGEKNRFKTEDFVKEVKQLCETQRQYHNIDDQFIQQYIDLVSTRREYFEGPGNGSPYGWDGDLLKWYEKLMGRCTYFPEELRSVKYAYSADLFNALNDLNNLVVTRDDNPKLEYYEKYHIIENVFKQKKNPTLKQIAKEIGVQDYDIRGYRITKSGKPQFTSFKLYHDLKNIFEQAKYLEDVEMLDEIAKILTIYQDEISIKKALDQLPELLTESEKSQIAQLTGYTGTHRLSLKCIHIVIDELWESPENQMEIFTRLNLKPKKVEMSEIDSIPTTLVDEFILSPVVKRAFIQSIKVINAVINRFGLPEDIIIELAREKNSKDRRKFINKLQKQNEATRKKIEQLLAKYGNTNAKYMIEKIKLHDMQEGKCLYSLEAIPLEDLLSNPTHYEVDHIIPRSVSFDNSLNNKVLVKQSENSKKGNRTPYQYLSSNESKISYNQFKQHILNLSKAKDRISKKKRDMLLEERDINKFEVQKEFINRNLVDTRYATRELSNLLKTYFSTHDYAVKVKTINGGFTNHLRKVWDFKKHRNHGYKHHAEDALVIANADFLFKTHKALRRTDKILEQPGLEVNDTTVKVDTEEKYQELFETPKQVKNIKQFRDFKYSHRVDKKPNRKLINDTLYSTREIDGETYVVQTLKDLYAKDNEKVKKLFTERPQKILMYQHDPKTFEKLMTILNQYAEAKNPLAAYYEDKGEYVTKYAKKGNGPAIHKIKYIDKKLGSYLDVSNKYPETQNKLVKLSLKSFRFDIYKCEQGYKMVSIGYLDVLKKDNYYYIPKDKYEAEKQKKKIKESDLFVGSFYKNDLIMYEDELFRVIGVNSDINNLVELNMVDITYKDFCEVNNVTGEKHIKKTIGKRVVLIEKYTTDILGNLYKTPLPKKPQLIFKRGEL

SEQ ID NO: 23810 - protein, 1060 aa, synthetic construct
QENQQKQNYILGLDIGITSVGYGLIDSKTREVIDAGVRLFPEADSENNSNRRSKRGARRLKRRRIHRLNRVKDLLADYQMIDLNNVPKSTDPYTIRVKGLREPLTKEEFAIALLHIAKRRGLHNISVSMGDEEQDNELSTKQQLQKNAQQLQDKYVCELQLERLTNINKVRGEKNRFKTEDFVKEVKQLCETQRQYHNIDDQFIQQYIDLVSTRREYFEGPGNGSPYGWDGDLLKWYEKLMGRCTYFPEELRSVKYAYSADLFNALNDLNNLVVTRDDNPKLEYYEKYHIIENVFKQKKNPTLKQIAKEIGVQDYDIRGYRITKSGKPQFTSFKLYHDLKNIFEQAKYLEDVEMLDEIAKILTIYQDEISIKKALDQLPELLTESEKSQIAQLTGYTGTHRLSLKCIHIVIDELWESPENQMEIFTRLNLKPKKVEMSEIDSIPTTLVDEFILSPVVKRAFIQSIKVINAVINRFGLPEDIIIELAREKNSKDRRKFINKLQKQNEATRKKIEQLLAKYGNTNAKYMIEKIKLHDMQEGKCLYSLEAIPLEDLLSNPTHYEVDHIIPRSVSFDNSLNNKVLVKQSEASKKGNRTPYQYLSSNESKISYNQFKQHILNLSKAKDRISKKKRDMLLEERDINKFEVQKEFINRNLVDTRYATRELSNLLKTYFSTHDYAVKVKTINGGFTNHLRKVWDFKKHRNHGYKHHAEDALVIANADFLFKTHKALRRTDKILEQPGLEVNDTTVKVDTEEKYQELFETPKQVKNIKQFRDFKYSHRVDKKPNRKLINDTLYSTREIDGETYVVQTLKDLYAKDNEKVKKLFTERPQKILMYQHDPKTFEKLMTILNQYAEAKNPLAAYYEDKGEYVTKYAKKGNGPAIHKIKYIDKKLGSYLDVSNKYPETQNKLVKLSLKSFRFDIYKCEQGYKMVSIGYLDVLKKDNYYYIPKDKYEAEKQKKKIKESDLFVGSFYKNDLIMYEDELFRVIGVNSDINNLVELNMVDITYKDFCEVNNVTGEKHIKKTIGKRVVLIEKYTTDILGNLYKTPLPKKPQLIFKRGEL

SEQ ID NO: 23811 - protein, 1374 aa, unidentified
EKKYSIGLDIGTNSVGWAVITDDYKVPSKKFKVLGNTNRKSIKKNLMGALLFDSGETAEATRLKRTARRRYTRRKNRIRYLQEIFANEMAKLDDSFFQRLEESFLVEEDKKNERHPIFGNLADEVAYHRNYPTIYHLRKKLADSPEKADLRLIYLALAHIIKFRGHFLIEGKLNAENSDVAKLFYQLIQTYNQLFEESPLDEIEVDAKGILSARLSKSKRLEKLIAVFPNEKKNGLFGNIIALALGLTPNFKSNFDLTEDAKLQLSKDTYDDDLDELLGQIGDQYADLFSAAKNLSDAILLSDILRSNSEVTKAPLSASMVKRYDEHHQDLALLKTLVRQQFPEKYAEIFKDDTKNGYAGYVGADKKLRKRSGKLATEEEFYKFIKPILEKMDGAEELLAKLNRDDLLRKQRTFDNGSIPHQIHLKELHAILRRQEEFYPFLKENREKIEKILTFRIPYYVGPLARGNSRFAWLTRKSEEAITPWNFEEVVDKGASAQSFIERMTNFDEQLPNKKVLPKHSLLYEYFTVYNELTKVKYVTERMRKPEFLSGEQKKAIVDLLFKTNRKVTVKQLKEDYFKKIECFDSVEIIGVEDRFNASLGTYHDLLKIIKDKDFLDNEENEDILEDIVLTLTLFEDREMIEERLKTYAHLFDDKVMKQLKRRHYTGWGRLSRKMINGIRDKQSGKTILDFLKSDGFSNRNFMQLIHDDSLTFKEEIEKAQVSGQGDSLHEQIADLAGSPAIKKGILQTVKIVDELVKVMGHKPENIVIEMARENQTTTKGLQQSRERKKRIEEGIKELESQILKENPVENTQLQNEKLYLYYLQNGRDMYVDQELDINRLSDYDVDHIVPQSFIKDDSIDNKVLTRSVENRGKSDNVPSEEVVKKMKNYWRQLLNAKLITQRKFDNLTKAERGGLSEADKAGFIKRQLVETRQITKHVARILDSRMNTKRDKNDKPIREVKVITLKSKLVSDFRKDFQLYKVRDINNYHHAHDAYLNAVVGTALIKKYPKLESEFVYGDYKVYDVRKMIAKSEQEIGKATAKRFFYSNIMNFFKTEVKLANGEIRKRPLIETNGETGEVVWNKEKDFATVRKVLAMPQVNIVKKTEVQTGGFSKESILSKRESAKLIPRKKGWDTRKYGGFGSPTVAYSILVVAKVEKGKAKKLKSVKVLVGITIMEKGSYEKDPIGFLEAKGYKDIKKELIFKLPKYSLFELENGRRRMLASAKELQKANELVLPQHLVRLLYYTQNISATTGSNNLGYIEQHREEFKEIFEKIIDFSEKYILKNKVNSNLKSSFDEQFAVSDSILLSNSFVSLLKYTSFGASGGFTFLDLDVKQGRLRYQTVTEVLDATLIYQSITGLYETRTDLSQLGGD

SEQ ID NO: 23812 - protein, 1374 aa, synthetic construct
EKKYSIGLDIGTNSVGWAVITDDYKVPSKKFKVLGNTNRKSIKKNLMGALLFDSGETAEATRLKRTARRRYTRRKNRIRYLQEIFANEMAKLDDSFFQRLEESFLVEEDKKNERHPIFGNLADEVAYHRNYPTIYHLRKKLADSPEKADLRLIYLALAHIIKFRGHFLIEGKLNAENSDVAKLFYQLIQTYNQLFEESPLDEIEVDAKGILSARLSKSKRLEKLIAVFPNEKKNGLFGNIIALALGLTPNFKSNFDLTEDAKLQLSKDTYDDDLDELLGQIGDQYADLFSAAKNLSDAILLSDILRSNSEVTKAPLSASMVKRYDEHHQDLALLKTLVRQQFPEKYAEIFKDDTKNGYAGYVGADKKLRKRSGKLATEEEFYKFIKPILEKMDGAEELLAKLNRDDLLRKQRTFDNGSIPHQIHLKELHAILRRQEEFYPFLKENREKIEKILTFRIPYYVGPLARGNSRFAWLTRKSEEAITPWNFEEVVDKGASAQSFIERMTNFDEQLPNKKVLPKHSLLYEYFTVYNELTKVKYVTERMRKPEFLSGEQKKAIVDLLFKTNRKVTVKQLKEDYFKKIECFDSVEIIGVEDRFNASLGTYHDLLKIIKDKDFLDNEENEDILEDIVLTLTLFEDREMIEERLKTYAHLFDDKVMKQLKRRHYTGWGRLSRKMINGIRDKQSGKTILDFLKSDGFSNRNFMQLIHDDSLTFKEEIEKAQVSGQGDSLHEQIADLAGSPAIKKGILQTVKIVDELVKVMGHKPENIVIEMARENQTTTKGLQQSRERKKRIEEGIKELESQILKENPVENTQLQNEKLYLYYLQNGRDMYVDQELDINRLSDYDVDHIVPQSFIKDDSIDNKVLTRSVEARGKSDNVPSEEVVKKMKNYWRQLLNAKLITQRKFDNLTKAERGGLSEADKAGFIKRQLVETRQITKHVARILDSRMNTKRDKNDKPIREVKVITLKSKLVSDFRKDFQLYKVRDINNYHHAHDAYLNAVVGTALIKKYPKLESEFVYGDYKVYDVRKMIAKSEQEIGKATAKRFFYSNIMNFFKTEVKLANGEIRKRPLIETNGETGEVVWNKEKDFATVRKVLAMPQVNIVKKTEVQTGGFSKESILSKRESAKLIPRKKGWDTRKYGGFGSPTVAYSILVVAKVEKGKAKKLKSVKVLVGITIMEKGSYEKDPIGFLEAKGYKDIKKELIFKLPKYSLFELENGRRRMLASAKELQKANELVLPQHLVRLLYYTQNISATTGSNNLGYIEQHREEFKEIFEKIIDFSEKYILKNKVNSNLKSSFDEQFAVSDSILLSNSFVSLLKYTSFGASGGFTFLDLDVKQGRLRYQTVTEVLDATLIYQSITGLYETRTDLSQLGGD

SEQ ID NO: 23813 - protein, 1367 aa, unidentified
DKKYSIGLDIGTNSVGWAVITDEYKVPSKKFKVLGNTDRHSIKKNLIGALLFDSGETAERTRLKRTARRRYTRRKNRICYLQEIFSNEMAKVDDSFFHRLEESFLVEEDKKHERHPIFGNIVDEVAYHEKYPTIYHLRKKLVDSTDKADLRLIYLALAHMIKFRGHFLIEGDLNPDNSDVDKLFIQLVQTYNQLFEENPINASGVDAKAILSARLSKSRRLENLIAQLPGEKKNGLFGNLIALSLGLTPNFKSNFDLAEDAKLQLSKDTYDDDLDNLLAQIGDQYADLFLAAKNLSDAILLSDILRVNTEITKAPLSASMIKRYDEHHQDLTLLKALVRQQLPEKYKEIFFDQSKNGYAGYIDGGASQEEFYKFIKPILEKMDGTEELLVKLNREDLLRKQRTFDNGSIPHQIHLGELHAILRRQEDFYPFLKDNREKIEKILTFRIPYYVGPLARGNSRFAWMTRKSEETITPWNFEEVVDKGASAQSFIERMTNFDKNLPNEKVLPKHSLLYEYFTVYNELTKVKYVTEGMRKPAFLSGEQKKAIVDLLFKTNRKVTVKQLKEDYFKKIECFDSVEISGVEDRFNASLGTYHDLLKIIKDKDFLDNEENEDILEDIVLTLTLFEDREMIEERLKTYAHLFDDKVMKQLKRRRYTGWGRLSRKLINGIRDKQSGKTILDFLKSDGFANRNFMQLIHDDSLTFKEDIQKAQVSGQGDSLHEHIANLAGSPAIKKGILQTVKVVDELVKVMGRHKPENIVIEMARENQTTQKGQKNSRERMKRIEEGIKELGSQILKEHPVENTQLQNEKLYLYYLQNGRDMYVDQELDINRLSDYDVDHIVPQSFLKDDSIDNKVLTRSDKNRGKSDNVPSEEVVKKMKNYWRQLLNAKLITQRKFDNLTKAERGGLSELDKAGFIKRQLVETRQITKHVAQILDSRMNTKYDENDKLIREVKVITLKSKLVSDFRKDFQFYKVREINNYHHAHDAYLNAVVGTALIKKYPKLESEFVYGDYKVYDVRKMIAKSEQEIGKATAKYFFYSNIMNFFKTEITLANGEIRKRPLIETNGETGEIVWDKGRDFATVRKVLSMPQVNIVKKTEVQTGGFSKESIRPKRNSDKLIARKKDWDPKKYGGFLWPTVAYSVLVVAKVEKGKSKKLKSVKELLGITIMERSSFEKNPIDFLEAKGYKEVKKDLIIKLPKYSLFELENGRKRMLASAKQLQKGNELALPSKYVNFLYLASHYEKLKGSPEDNEQKQLFVEQHKHYLDEIIEQISEFSKRVILADANLDKVLSAYNKHRDKPIREQAENIIHLFTLTRLGAPRAFKYFDTTIDPKQYRSTKEVLDATLIHQSITGLYETRIDLSQLGGD

SEQ ID NO: 23814 - protein, 1367 aa, synthetic construct
DKKYSIGLDIGTNSVGWAVITDEYKVPSKKFKVLGNTDRHSIKKNLIGALLFDSGETAERTRLKRTARRRYTRRKNRICYLQEIFSNEMAKVDDSFFHRLEESFLVEEDKKHERHPIFGNIVDEVAYHEKYPTIYHLRKKLVDSTDKADLRLIYLALAHMIKFRGHFLIEGDLNPDNSDVDKLFIQLVQTYNQLFEENPINASGVDAKAILSARLSKSRRLENLIAQLPGEKKNGLFGNLIALSLGLTPNFKSNFDLAEDAKLQLSKDTYDDDLDNLLAQIGDQYADLFLAAKNLSDAILLSDILRVNTEITKAPLSASMIKRYDEHHQDLTLLKALVRQQLPEKYKEIFFDQSKNGYAGYIDGGASQEEFYKFIKPILEKMDGTEELLVKLNREDLLRKQRTFDNGSIPHQIHLGELHAILRRQEDFYPFLKDNREKIEKILTFRIPYYVGPLARGNSRFAWMTRKSEETITPWNFEEVVDKGASAQSFIERMTNFDKNLPNEKVLPKHSLLYEYFTVYNELTKVKYVTEGMRKPAFLSGEQKKAIVDLLFKTNRKVTVKQLKEDYFKKIECFDSVEISGVEDRFNASLGTYHDLLKIIKDKDFLDNEENEDILEDIVLTLTLFEDREMIEERLKTYAHLFDDKVMKQLKRRRYTGWGRLSRKLINGIRDKQSGKTILDFLKSDGFANRNFMQLIHDDSLTFKEDIQKAQVSGQGDSLHEHIANLAGSPAIKKGILQTVKVVDELVKVMGRHKPENIVIEMARENQTTQKGQKNSRERMKRIEEGIKELGSQILKEHPVENTQLQNEKLYLYYLQNGRDMYVDQELDINRLSDYDVDHIVPQSFLKDDSIDNKVLTRSDKARGKSDNVPSEEVVKKMKNYWRQLLNAKLITQRKFDNLTKAERGGLSELDKAGFIKRQLVETRQITKHVAQILDSRMNTKYDENDKLIREVKVITLKSKLVSDFRKDFQFYKVREINNYHHAHDAYLNAVVGTALIKKYPKLESEFVYGDYKVYDVRKMIAKSEQEIGKATAKYFFYSNIMNFFKTEITLANGEIRKRPLIETNGETGEIVWDKGRDFATVRKVLSMPQVNIVKKTEVQTGGFSKESIRPKRNSDKLIARKKDWDPKKYGGFLWPTVAYSVLVVAKVEKGKSKKLKSVKELLGITIMERSSFEKNPIDFLEAKGYKEVKKDLIIKLPKYSLFELENGRKRMLASAKQLQKGNELALPSKYVNFLYLASHYEKLKGSPEDNEQKQLFVEQHKHYLDEIIEQISEFSKRVILADANLDKVLSAYNKHRDKPIREQAENIIHLFTLTRLGAPRAFKYFDTTIDPKQYRSTKEVLDATLIHQSITGLYETRIDLSQLGGD

SEQ ID NO: 23815 - protein, 1367 aa, unidentified
DKKYSIGLDIGTNSVGWAVITDEYKVPSKKFKVLGNTDRHSIKKNLIGALLFDSGETAEATRLKRTARRRYTRRKNRICYLQEIFSNEMAKVDDSFFHRLEESFLVEEDKKHERHPIFGNIVDEVAYHEKYPTIYHLRKKLVDSTDKADLRLIYLALAHMIKFRGHFLIEGDLNPDNSDVDKLFIQLVQTYNQLFEENPINASGVDAKAILSARLSKSRRLENLIAQLPGEKKNGLFGNLIALSLGLTPNFKSNFDLAEDAKLQLSKDTYDDDLDNLLAQIGDQYADLFLAAKNLSDAILLSDILRVNTEITKAPLSASMIKRYDEHHQDLTLLKALVRQQLPEKYKEIFFDQSKNGYAGYIDGGASQEEFYKFIKPILEKMDGTEELLVKLNREDLLRKQRTFDNGSIPHQIHLGELHAILRRQEDFYPFLKDNREKIEKILTFRIPYYVGPLARGNSRFAWMTRKSEETITPWNFEEVVDKGASAQSFIERMTNFDKNLPNEKVLPKHSLLYEYFTVYNELTKVKYVTEGMRKPAFLSGEQKKAIVDLLFKTNRKVTVKQLKEDYFKKIECFDSVEISGVEDRFNASLGTYHDLLKIIKDKDFLDNEENEDILEDIVLTLTLFEDREMIEERLKTYAHLFDDKVMKQLKRRRYTGWGRLSRKLINGIRDKQSGKTILDFLKSDGFANRNFMQLIHDDSLTFKEDIQKAQVSGQGDSLHEHIANLAGSPAIKKGILQTVKVVDELVKVMGRHKPENIVIEMARENQTTQKGQKNSRERMKRIEEGIKELGSQILKEHPVENTQLQNEKLYLYYLQNGRDMYVDQELDINRLSDYDVDHIVPQSFLKDDSIDNKVLTRSDKNRGKSDNVPSEEVVKKMKNYWRQLLNAKLITQRKFDNLTKAERGGLSELDKAGFIKRQLVETRQITKHVAQILDSRMNTKYDENDKLIREVKVITLKSKLVSDFRKDFQFYKVREINNYHHAHDAYLNAVVGTALIKKYPKLESEFVYGDYKVYDVRKMIAKSEQEIGKATAKYFFYSNIMNFFKTEITLANGEIRKRPLIETNGETGEIVWDKGRDFATVRKVLSMPQVNIVKKTEVQTGGFSKESIRPKRNSDKLIARKKDWDPKKYGGFVSPTVAYSVLVVAKVEKGKSKKLKSVKELLGITIMERSSFEKNPIDFLEAKGYKEVKKDLIIKLPKYSLFELENGRKRMLASARFLQKGNELALPSKYVNFLYLASHYEKLKGSPEDNEQKQLFVEQHKHYLDEIIEQISEFSKRVILADANLDKVLSAYNKHRDKPIREQAENIIHLFTLTNLGAPRAFKYFDTTIDRKVYRSTKEVLDATLIHQSITGLYETRIDLSQLGGD

SEQ ID NO: 23816 - protein, 1367 aa, synthetic construct
DKKYSIGLDIGTNSVGWAVITDEYKVPSKKFKVLGNTDRHSIKKNLIGALLFDSGETAEATRLKRTARRRYTRRKNRICYLQEIFSNEMAKVDDSFFHRLEESFLVEEDKKHERHPIFGNIVDEVAYHEKYPTIYHLRKKLVDSTDKADLRLIYLALAHMIKFRGHFLIEGDLNPDNSDVDKLFIQLVQTYNQLFEENPINASGVDAKAILSARLSKSRRLENLIAQLPGEKKNGLFGNLIALSLGLTPNFKSNFDLAEDAKLQLSKDTYDDDLDNLLAQIGDQYADLFLAAKNLSDAILLSDILRVNTEITKAPLSASMIKRYDEHHQDLTLLKALVRQQLPEKYKEIFFDQSKNGYAGYIDGGASQEEFYKFIKPILEKMDGTEELLVKLNREDLLRKQRTFDNGSIPHQIHLGELHAILRRQEDFYPFLKDNREKIEKILTFRIPYYVGPLARGNSRFAWMTRKSEETITPWNFEEVVDKGASAQSFIERMTNFDKNLPNEKVLPKHSLLYEYFTVYNELTKVKYVTEGMRKPAFLSGEQKKAIVDLLFKTNRKVTVKQLKEDYFKKIECFDSVEISGVEDRFNASLGTYHDLLKIIKDKDFLDNEENEDILEDIVLTLTLFEDREMIEERLKTYAHLFDDKVMKQLKRRRYTGWGRLSRKLINGIRDKQSGKTILDFLKSDGFANRNFMQLIHDDSLTFKEDIQKAQVSGQGDSLHEHIANLAGSPAIKKGILQTVKVVDELVKVMGRHKPENIVIEMARENQTTQKGQKNSRERMKRIEEGIKELGSQILKEHPVENTQLQNEKLYLYYLQNGRDMYVDQELDINRLSDYDVDHIVPQSFLKDDSIDNKVLTRSDKARGKSDNVPSEEVVKKMKNYWRQLLNAKLITQRKFDNLTKAERGGLSELDKAGFIKRQLVETRQITKHVAQILDSRMNTKYDENDKLIREVKVITLKSKLVSDFRKDFQFYKVREINNYHHAHDAYLNAVVGTALIKKYPKLESEFVYGDYKVYDVRKMIAKSEQEIGKATAKYFFYSNIMNFFKTEITLANGEIRKRPLIETNGETGEIVWDKGRDFATVRKVLSMPQVNIVKKTEVQTGGFSKESIRPKRNSDKLIARKKDWDPKKYGGFVSPTVAYSVLVVAKVEKGKSKKLKSVKELLGITIMERSSFEKNPIDFLEAKGYKEVKKDLIIKLPKYSLFELENGRKRMLASARFLQKGNELALPSKYVNFLYLASHYEKLKGSPEDNEQKQLFVEQHKHYLDEIIEQISEFSKRVILADANLDKVLSAYNKHRDKPIREQAENIIHLFTLTNLGAPRAFKYFDTTIDRKVYRSTKEVLDATLIHQSITGLYETRIDLSQLGGD

SEQ ID NO: 23817 - protein, 1120 aa, unidentified
SDLVLGLDIGIGSVGVGILNKVTGEIIHKNSRIFPAAQAENNLVRRTNRQGRRLARRKKHRRVRLNRLFEESGLITDFTKISINLNPYQLRVKGLTDELSNEELFIALKNMVKHRGISYLDDASDDGNSSVGDYAQIVKENSKQLETKTPGQIQLERYQTYGQLRGDFTVEKDGKKHRLINVFPTSAYRSEALRILQTQQEFNPQITDEFINRYLEILTGKRKYYHGPGNEKSRTDYGRYRTSGETLDNIFGILIGKCTFYPDEFRAAKASYTAQEFNLLNDLNNLTVPTETKKLSKEQKNQIINYVKNEKAMGPAKLFKYIAKLLSCDVADIKGYRIDKSGKAEIHTFEAYRKMKTLETLDIEQMDRETLDKLAYVLTLNTEREGIQEALEHEFADGSFSQKQVDELVQFRKANSSIFGKGWHNFSVKLMMELIPELYETSEEQMTILTRLGKQKTTSSSNKTKYIDEKLLTEEIYNPVVAKSVRQAIKIVNAAIKEYGDFDNIVIEMARETNEDDEKKAIQKIQKANKDEKDAAMLKAANQYNGKAELPHSVFHGHKQLATKIRLWHQQGERCLYTGKTISIHDLINNSNQFEVDHILPLSITFDDSLANKVLVYATANQEKGQRTPYQALDSMDDAWSFRELKAFVRESKTLSNKKKEYLLTEEDISKFDVRKKFIERNLVDTRYASRVVLNALQEHFRAHKIDTKVSVVRGQFTSQLRRHWGIEKTRDTYHHHAVDALIIAASSQLNLWKKQKNTLVSYSEDQLLDIETGELISDDEYKESVFKAPYQHFVDTLKSKEFEDSILFSYQVDSKFNRKISDATIYATRQAKVGKDKADETYVLGKIKDIYTQDGYDAFMKIYKKDKSKFLMYRHDPQTFEKVIEPILENYPNKQINEKGKEVPCNPFLKYKEEHGYIRKYSKKGNGPEIKSLKYYDSKLGNHIDITPKDSNNKVVLQSVSPWRADVYFNKTTGKYEILGLKYADLQFEKGTGTYKISQEKYNDIKKKEGVDSDSEFKFTLYKNDLLLVKDTETKEQQLFRFLSRTMPKQKHYVELKPYDKQKFEGGEALIKVLGNVANSGQCKKGLGKSNISIYKVRTDVLGNQHIIKNEGDKPKLDF

SEQ ID NO: 23818 - protein, 1120 aa, synthetic construct
SDLVLGLDIGIGSVGVGILNKVTGEIIHKNSRIFPAAQAENNLVRRTNRQGRRLARRKKHRRVRLNRLFEESGLITDFTKISINLNPYQLRVKGLTDELSNEELFIALKNMVKHRGISYLDDASDDGNSSVGDYAQIVKENSKQLETKTPGQIQLERYQTYGQLRGDFTVEKDGKKHRLINVFPTSAYRSEALRILQTQQEFNPQITDEFINRYLEILTGKRKYYHGPGNEKSRTDYGRYRTSGETLDNIFGILIGKCTFYPDEFRAAKASYTAQEFNLLNDLNNLTVPTETKKLSKEQKNQIINYVKNEKAMGPAKLFKYIAKLLSCDVADIKGYRIDKSGKAEIHTFEAYRKMKTLETLDIEQMDRETLDKLAYVLTLNTEREGIQEALEHEFADGSFSQKQVDELVQFRKANSSIFGKGWHNFSVKLMMELIPELYETSEEQMTILTRLGKQKTTSSSNKTKYIDEKLLTEEIYNPVVAKSVRQAIKIVNAAIKEYGDFDNIVIEMARETNEDDEKKAIQKIQKANKDEKDAAMLKAANQYNGKAELPHSVFHGHKQLATKIRLWHQQGERCLYTGKTISIHDLINNSNQFEVDHILPLSITFDDSLANKVLVYATAAQEKGQRTPYQALDSMDDAWSFRELKAFVRESKTLSNKKKEYLLTEEDISKFDVRKKFIERNLVDTRYASRVVLNALQEHFRAHKIDTKVSVVRGQFTSQLRRHWGIEKTRDTYHHHAVDALIIAASSQLNLWKKQKNTLVSYSEDQLLDIETGELISDDEYKESVFKAPYQHFVDTLKSKEFEDSILFSYQVDSKFNRKISDATIYATRQAKVGKDKADETYVLGKIKDIYTQDGYDAFMKIYKKDKSKFLMYRHDPQTFEKVIEPILENYPNKQINEKGKEVPCNPFLKYKEEHGYIRKYSKKGNGPEIKSLKYYDSKLGNHIDITPKDSNNKVVLQSVSPWRADVYFNKTTGKYEILGLKYADLQFEKGTGTYKISQEKYNDIKKKEGVDSDSEFKFTLYKNDLLLVKDTETKEQQLFRFLSRTMPKQKHYVELKPYDKQKFEGGEALIKVLGNVANSGQCKKGLGKSNISIYKVRTDVLGNQHIIKNEGDKPKLDF

SEQ ID NO: 23819 - DNA, 20 bp, synthetic construct
  source 1..20: mol_type = other DNA
ctgtgctgaccatcgacaag

SEQ ID NO: 23820 - DNA, 21 bp, synthetic construct
  source 1..21: mol_type = other DNA
gctgtgctgaccatcgacaag

SEQ ID NO: 23821 - DNA, 20 bp, synthetic construct
  source 1..20: mol_type = other DNA
cagcttcagtccctttcttg

SEQ ID NO: 23822 - DNA, 21 bp, synthetic construct
  source 1..21: mol_type = other DNA
gcagcttcagtccctttcttg

SEQ ID NO: 23823 - DNA, 20 bp, synthetic construct
  source 1..20: mol_type = other DNA
ggctgtgctgaccatcgaca

SEQ ID NO: 23824 - DNA, 20 bp, synthetic construct
  source 1..20: mol_type = other DNA
aggctgtgctgaccatcgac

SEQ ID NO: 23825 - DNA, 21 bp, synthetic construct
  source 1..21: mol_type = other DNA
gaggctgtgctgaccatcgac

SEQ ID NO: 23826 - DNA, 20 bp, synthetic construct
  source 1..20: mol_type = other DNA
agcagcttcagtccctttct

SEQ ID NO: 23827 - DNA, 21 bp, synthetic construct
  source 1..21: mol_type = other DNA
gagcagcttcagtccctttct

SEQ ID NO: 23828 - DNA, 20 bp, synthetic construct
  source 1..20: mol_type = other DNA
ggccgtgcataaggctgtgc

SEQ ID NO: 23829 - DNA, 20 bp, synthetic construct
  source 1..20: mol_type = other DNA
ccaggccgtgcataaggctg

SEQ ID NO: 23830 - DNA, 21 bp, synthetic construct
  source 1..21: mol_type = other DNA
gccaggccgtgcataaggctg

SEQ ID NO: 23831 - DNA, 20 bp, synthetic construct
  source 1..20: mol_type = other DNA
cagcagcttcagtccctttc

SEQ ID NO: 23832 - DNA, 21 bp, synthetic construct
  source 1..21: mol_type = other DNA
gcagcagcttcagtccctttc

SEQ ID NO: 23833 - DNA, 20 bp, synthetic construct
  source 1..20: mol_type = other DNA
aggccgtgcataaggctgtg

SEQ ID NO: 23834 - DNA, 21 bp, synthetic construct
  source 1..21: mol_type = other DNA
gaggccgtgcataaggctgtg

SEQ ID NO: 23835 - DNA, 20 bp, synthetic construct
  source 1..20: mol_type = other DNA
tccaggccgtgcataaggct

SEQ ID NO: 23836 - DNA, 21 bp, synthetic construct
  source 1..21: mol_type = other DNA
gtccaggccgtgcataaggct

SEQ ID NO: 23837 - DNA, 20 bp, synthetic construct
  source 1..20: mol_type = other DNA
acctcgggggggatagacat

SEQ ID NO: 23838 - DNA, 21 bp, synthetic construct
  source 1..21: mol_type = other DNA
gacctcgggggggatagacat

SEQ ID NO: 23839 - DNA, 20 bp, synthetic construct
  source 1..20: mol_type = other DNA
tgttgaacttgacctcgggg

SEQ ID NO: 23840 - DNA, 21 bp, synthetic construct
  source 1..21: mol_type = other DNA
gtgttgaacttgacctcgggg

SEQ ID NO: 23841 - DNA, 21 bp, synthetic construct
  source 1..21: mol_type = other DNA
aaggctgtgctgaccatcgac

SEQ ID NO: 23842 - DNA, 22 bp, synthetic construct
  source 1..22: mol_type = other DNA
gaaggctgtgctgaccatcgac

SEQ ID NO: 23843 - DNA, 21 bp, synthetic construct
  source 1..21: mol_type = other DNA
agcagcttcagtccctttctt

SEQ ID NO: 23844 - DNA, 22 bp, synthetic construct
  source 1..22: mol_type = other DNA
gagcagcttcagtccctttctt

SEQ ID NO: 23845 - DNA, 21 bp, synthetic construct
  source 1..21: mol_type = other DNA
ccaggccgtgcataaggctgt

SEQ ID NO: 23846 - DNA, 22 bp, synthetic construct
  source 1..22: mol_type = other DNA
gccaggccgtgcataaggctgt

SEQ ID NO: 23847 - DNA, 21 bp, synthetic construct
  source 1..21: mol_type = other DNA
taaaaacatggccccagcagc

SEQ ID NO: 23848 - DNA, 22 bp, synthetic construct
  source 1..22: mol_type = other DNA
gtaaaaacatggccccagcagc

SEQ ID NO: 23849 - DNA, 21 bp, synthetic construct
  source 1..21: mol_type = other DNA
ggcctctaaaaacatggcccc

SEQ ID NO: 23850 - DNA, 21 bp, synthetic construct
  source 1..21: mol_type = other DNA
tatggcctctaaaaacatggc

SEQ ID NO: 23851 - DNA, 22 bp, synthetic construct
  source 1..22: mol_type = other DNA
gtatggcctctaaaaacatggc

SEQ ID NO: 23852 - DNA, 21 bp, synthetic construct
  source 1..21: mol_type = other DNA
ttgacctcgggggggatagac

SEQ ID NO: 23853 - DNA, 22 bp, synthetic construct
  source 1..22: mol_type = other DNA
gttgacctcgggggggatagac

SEQ ID NO: 23854 - DNA, 21 bp, synthetic construct
  source 1..21: mol_type = other DNA
tttgttgaacttgacctcggg

SEQ ID NO: 23855 - DNA, 22 bp, synthetic construct
  source 1..22: mol_type = other DNA
gtttgttgaacttgacctcggg

SEQ ID NO: 23856 - DNA, 21 bp, synthetic construct
  source 1..21: mol_type = other DNA
acgtgagccttgctcgaggcc

SEQ ID NO: 23857 - DNA, 22 bp, synthetic construct
  source 1..22: mol_type = other DNA
gacgtgagccttgctcgaggcc

SEQ ID NO: 23858 - DNA, 21 bp, synthetic construct
  source 1..21: mol_type = other DNA
attaagaagacaaagggtttg

SEQ ID NO: 23859 - DNA, 22 bp, synthetic construct
  source 1..22: mol_type = other DNA
gattaagaagacaaagggtttg

SEQ ID NO: 23860 - DNA, 21 bp, synthetic construct
  source 1..21: mol_type = other DNA
aggtgtccacgtgagccttgc

SEQ ID NO: 23861 - DNA, 22 bp, synthetic construct
  source 1..22: mol_type = other DNA
gaggtgtccacgtgagccttgc

SEQ ID NO: 23862 - DNA, 21 bp, synthetic construct
  source 1..21: mol_type = other DNA
tgttcaatcattaagaagaca

SEQ ID NO: 23863 - DNA, 22 bp, synthetic construct
  source 1..22: mol_type = other DNA
gtgttcaatcattaagaagaca

SEQ ID NO: 23864 - DNA, 21 bp, synthetic construct
  source 1..21: mol_type = other DNA
cgcttcctgggaggtgtccac

SEQ ID NO: 23865 - DNA, 22 bp, synthetic construct
  source 1..22: mol_type = other DNA
gcgcttcctgggaggtgtccac

SEQ ID NO: 23866 - DNA, 21 bp, synthetic construct
  source 1..21: mol_type = other DNA
tctcccctccaggccgtgcat

SEQ ID NO: 23867 - DNA, 22 bp, synthetic construct
  source 1..22: mol_type = other DNA
gtctcccctccaggccgtgcat

SEQ ID NO: 23868 - DNA, 21 bp, synthetic construct
  source 1..21: mol_type = other DNA
atgggtatggcctctaaaaac

SEQ ID NO: 23869 - DNA, 22 bp, synthetic construct
  source 1..22: mol_type = other DNA
gatgggtatggcctctaaaaac

SEQ ID NO: 23870 - DNA, 21 bp, synthetic construct
  source 1..21: mol_type = other DNA
taaggctgtgctgaccatcga

SEQ ID NO: 23871 - DNA, 22 bp, synthetic construct
  source 1..22: mol_type = other DNA
gtaaggctgtgctgaccatcga

SEQ ID NO: 23872 - DNA, 21 bp, synthetic construct
  source 1..21: mol_type = other DNA
aaaaacatggccccagcagct

SEQ ID NO: 23873 - DNA, 22 bp, synthetic construct
  source 1..22: mol_type = other DNA
gaaaaacatggccccagcagct

SEQ ID NO: 23874 - DNA, 21 bp, synthetic construct
  source 1..21: mol_type = other DNA
gcctctaaaaacatggcccca

SEQ ID NO: 23875 - DNA, 21 bp, synthetic construct
  source 1..21: mol_type = other DNA
atggcctctaaaaacatggcc

SEQ ID NO: 23876 - DNA, 22 bp, synthetic construct
  source 1..22: mol_type = other DNA
gatggcctctaaaaacatggcc

SEQ ID NO: 23877 - DNA, 21 bp, synthetic construct
  source 1..21: mol_type = other DNA
ctctcccctccaggccgtgca

SEQ ID NO: 23878 - DNA, 22 bp, synthetic construct
  source 1..22: mol_type = other DNA
gctctcccctccaggccgtgca

SEQ ID NO: 23879 - DNA, 21 bp, synthetic construct
  source 1..21: mol_type = other DNA
tgtctctgcttctctcccctc

SEQ ID NO: 23880 - DNA, 22 bp, synthetic construct
  source 1..22: mol_type = other DNA
gtgtctctgcttctctcccctc

SEQ ID NO: 23881 - DNA, 21 bp, synthetic construct
  source 1..21: mol_type = other DNA
tgacctcgggggggatagaca

SEQ ID NO: 23882 - DNA, 22 bp, synthetic construct
  source 1..22: mol_type = other DNA
gtgacctcgggggggatagaca

SEQ ID NO: 23883 - DNA, 21 bp, synthetic construct
  source 1..21: mol_type = other DNA
aagggtttgttgaacttgacc

SEQ ID NO: 23884 - DNA, 22 bp, synthetic construct
  source 1..22: mol_type = other DNA
gaagggtttgttgaacttgacc

SEQ ID NO: 23885 - DNA, 21 bp, synthetic construct
  source 1..21: mol_type = other DNA
gtgtccacgtgagccttgctc

SEQ ID NO: 23886 - DNA, 21 bp, synthetic construct
  source 1..21: mol_type = other DNA
gttcaatcattaagaagacaa

SEQ ID NO: 23887 - DNA, 24 bp, synthetic construct
  source 1..24: mol_type = other DNA
gtaaaaacatggccccagcagctt

SEQ ID NO: 23888 - DNA, 24 bp, synthetic construct
  source 1..24: mol_type = other DNA
gtccaggccgtgcataaggctgtg

SEQ ID NO: 23889 - DNA, 24 bp, synthetic construct
  source 1..24: mol_type = other DNA
gcatgggtatggcctctaaaaaca

SEQ ID NO: 23890 - DNA, 24 bp, synthetic construct
  source 1..24: mol_type = other DNA
gacatgggtatggcctctaaaaac

SEQ ID NO: 23891 - DNA, 24 bp, synthetic construct
  source 1..24: mol_type = other DNA
gcgtgtctctgcttctctcccctc

SEQ ID NO: 23892 - DNA, 24 bp, synthetic construct
  source 1..24: mol_type = other DNA
gccttacaacgtgtctctgcttct

SEQ ID NO: 23893 - DNA, 24 bp, synthetic construct
  source 1..24: mol_type = other DNA
gcctcgggggggatagacatgggt

SEQ ID NO: 23894 - DNA, 24 bp, synthetic construct
  source 1..24: mol_type = other DNA
gtgagccttgctcgaggcctggga

SEQ ID NO: 23895 - DNA, 24 bp, synthetic construct
  source 1..24: mol_type = other DNA
gagaagacaaagggtttgttgaac

SEQ ID NO: 23896 - DNA, 24 bp, synthetic construct
  source 1..24: mol_type = other DNA
gaggtgtccacgtgagccttgctc

SEQ ID NO: 23897 - DNA, 21 bp, synthetic construct
  source 1..21: mol_type = other DNA
tgcataaggctgtgctgacca

SEQ ID NO: 23898 - DNA, 22 bp, synthetic construct
  source 1..22: mol_type = other DNA
gtgcataaggctgtgctgacca

SEQ ID NO: 23899 - DNA, 21 bp, synthetic construct
  source 1..21: mol_type = other DNA
tggccccagcagcttcagtcc

SEQ ID NO: 23900 - DNA, 22 bp, synthetic construct
  source 1..22: mol_type = other DNA
gtggccccagcagcttcagtcc

SEQ ID NO: 23901 - DNA, 21 bp, synthetic construct
  source 1..21: mol_type = other DNA
ccgtgcataaggctgtgctga

SEQ ID NO: 23902 - DNA, 22 bp, synthetic construct
  source 1..22: mol_type = other DNA
gccgtgcataaggctgtgctga

SEQ ID NO: 23903 - DNA, 21 bp, synthetic construct
  source 1..21: mol_type = other DNA
aggccgtgcataaggctgtgc

SEQ ID NO: 23904 - DNA, 22 bp, synthetic construct
  source 1..22: mol_type = other DNA
gaggccgtgcataaggctgtgc

SEQ ID NO: 23905 - DNA, 21 bp, synthetic construct
  source 1..21: mol_type = other DNA
aaaacatggccccagcagctt

SEQ ID NO: 23906 - DNA, 22 bp, synthetic construct
  source 1..22: mol_type = other DNA
gaaaacatggccccagcagctt

SEQ ID NO: 23907 - DNA, 21 bp, synthetic construct
  source 1..21: mol_type = other DNA
ggggggatagacatgggtatg

SEQ ID NO: 23908 - DNA, 21 bp, synthetic construct
  source 1..21: mol_type = other DNA
tgaacttgacctcggggggga

SEQ ID NO: 23909 - DNA, 22 bp, synthetic construct
  source 1..22: mol_type = other DNA
gtgaacttgacctcggggggga

SEQ ID NO: 23910 - DNA, 21 bp, synthetic construct
  source 1..21: mol_type = other DNA
tcgaggcctgggatcagcctt

SEQ ID NO: 23911 - DNA, 22 bp, synthetic construct
  source 1..22: mol_type = other DNA
gtcgaggcctgggatcagcctt

SEQ ID NO: 23912 - DNA, 21 bp, synthetic construct
  source 1..21: mol_type = other DNA
acaaagggtttgttgaacttg

SEQ ID NO: 23913 - DNA, 22 bp, synthetic construct
  source 1..22: mol_type = other DNA
gacaaagggtttgttgaacttg

SEQ ID NO: 23914 - DNA, 21 bp, synthetic construct
  source 1..21: mol_type = other DNA
gccttgctcgaggcctgggat

SEQ ID NO: 23915 - DNA, 22 bp, synthetic construct
  source 1..22: mol_type = other DNA
aaagggactgaagctgctgggg

SEQ ID NO: 23916 - DNA, 23 bp, synthetic construct
  source 1..23: mol_type = other DNA
gaaagggactgaagctgctgggg

SEQ ID NO: 23917 - DNA, 22 bp, synthetic construct
  source 1..22: mol_type = other DNA
cctggaggggagagaagcagag

SEQ ID NO: 23918 - DNA, 23 bp, synthetic construct
  source 1..23: mol_type = other DNA
gcctggaggggagagaagcagag

SEQ ID NO: 23919 - DNA, 22 bp, synthetic construct
  source 1..22: mol_type = other DNA
cccatgtctatcccccccgagg

SEQ ID NO: 23920 - DNA, 23 bp, synthetic construct
  source 1..23: mol_type = other DNA
gcccatgtctatcccccccgagg

SEQ ID NO: 23921 - DNA, 22 bp, synthetic construct
  source 1..22: mol_type = other DNA
tcaatcattaagaagacaaagg

SEQ ID NO: 23922 - DNA, 23 bp, synthetic construct
  source 1..23: mol_type = other DNA
gtcaatcattaagaagacaaagg

SEQ ID NO: 23923 - DNA, 22 bp, synthetic construct
  source 1..22: mol_type = other DNA
ttgttcaatcattaagaagaca

SEQ ID NO: 23924 - DNA, 23 bp, synthetic construct
  source 1..23: mol_type = other DNA
gttgttcaatcattaagaagaca

SEQ ID NO: 23925 - DNA, 22 bp, synthetic construct
  source 1..22: mol_type = other DNA
tcaacaaaccctttgtcttctt

SEQ ID NO: 23926 - DNA, 23 bp, synthetic construct
  source 1..23: mol_type = other DNA
gtcaacaaaccctttgtcttctt

SEQ ID NO: 23927 - DNA, 22 bp, synthetic construct
  source 1..22: mol_type = other DNA
ggggagacttggtattttgttc

SEQ ID NO: 23928 - DNA, 22 bp, synthetic construct
  source 1..22: mol_type = other DNA
catgaagaggggagacttggta

SEQ ID NO: 23929 - DNA, 23 bp, synthetic construct
  source 1..23: mol_type = other DNA
gcatgaagaggggagacttggta

SEQ ID NO: 23930 - DNA, 22 bp, synthetic construct
  source 1..22: mol_type = other DNA
tttcccatgaagaggggagact

SEQ ID NO: 23931 - DNA, 23 bp, synthetic construct
  source 1..23: mol_type = other DNA
gtttcccatgaagaggggagact

SEQ ID NO: 23932 - DNA, 20 bp, synthetic construct
  source 1..20: mol_type = other DNA
aaggctgtgctgaccatcga

SEQ ID NO: 23933 - DNA, 21 bp, synthetic construct
  source 1..21: mol_type = other DNA
gaaggctgtgctgaccatcga

SEQ ID NO: 23934 - DNA, 20 bp, synthetic construct
  source 1..20: mol_type = other DNA
aaggctcacgtggacacctc

SEQ ID NO: 23935 - DNA, 21 bp, synthetic construct
  source 1..21: mol_type = other DNA
gaaggctcacgtggacacctc

SEQ ID NO: 23936 - DNA, 20 bp, synthetic construct
  source 1..20: mol_type = other DNA
taccaagtctcccctcttca

SEQ ID NO: 23937 - DNA, 21 bp, synthetic construct
  source 1..21: mol_type = other DNA
gtaccaagtctcccctcttca

SEQ ID NO: 23938 - DNA, 76 bp, synthetic construct; identical to SEQ ID NO: 11012
  source 1..76: mol_type = other DNA

SEQ ID NO: 23939 - DNA, 76 bp, synthetic construct; identical to SEQ ID NO: 11012
  source 1..76: mol_type = other DNA

SEQ ID NO: 23940 - DNA, 76 bp, synthetic construct; identical to SEQ ID NO: 11012
  source 1..76: mol_type = other DNA

SEQ ID NO: 23941 - DNA, 76 bp, synthetic construct; identical to SEQ ID NO: 11012
  source 1..76: mol_type = other DNA

SEQ ID NO: 23942 - DNA, 76 bp, synthetic construct; identical to SEQ ID NO: 11012
  source 1..76: mol_type = other DNA

SEQ ID NO: 23943 - DNA, 76 bp, synthetic construct; identical to SEQ ID NO: 11012
  source 1..76: mol_type = other DNA

SEQ ID NO: 23944 - DNA, 76 bp, synthetic construct; identical to SEQ ID NO: 11012
  source 1..76: mol_type = other DNA

SEQ ID NO: 23945 - DNA, 76 bp, synthetic construct; identical to SEQ ID NO: 11012
  source 1..76: mol_type = other DNA

SEQ ID NO: 23946 - DNA, 76 bp, synthetic construct; identical to SEQ ID NO: 11012
  source 1..76: mol_type = other DNA

SEQ ID NO: 23947 - DNA, 76 bp, synthetic construct; identical to SEQ ID NO: 11012
  source 1..76: mol_type = other DNA

SEQ ID NO: 23948 - DNA, 76 bp, synthetic construct; identical to SEQ ID NO: 11012
  source 1..76: mol_type = other DNA

SEQ ID NO: 23949 - DNA, 76 bp, synthetic construct; identical to SEQ ID NO: 11012
  source 1..76: mol_type = other DNA

SEQ ID NO: 23950 - DNA, 76 bp, synthetic construct; identical to SEQ ID NO: 11012
  source 1..76: mol_type = other DNA

SEQ ID NO: 23951 - DNA, 76 bp, synthetic construct; identical to SEQ ID NO: 11012
  source 1..76: mol_type = other DNA

SEQ ID NO: 23952 - DNA, 76 bp, synthetic construct; identical to SEQ ID NO: 11012
  source 1..76: mol_type = other DNA

SEQ ID NO: 23953 - DNA, 76 bp, synthetic construct; identical to SEQ ID NO: 11012
  source 1..76: mol_type = other DNA

SEQ ID NO: 23954 - DNA, 76 bp, synthetic construct; identical to SEQ ID NO: 11012
  source 1..76: mol_type = other DNA

SEQ ID NO: 23955 - DNA, 76 bp, synthetic construct; identical to SEQ ID NO: 11012
  source 1..76: mol_type = other DNA

SEQ ID NO: 23956 - DNA, 76 bp, synthetic construct; identical to SEQ ID NO: 11012
  source 1..76: mol_type = other DNA

SEQ ID NO: 23957 - DNA, 76 bp, synthetic construct; identical to SEQ ID NO: 11012
  source 1..76: mol_type = other DNA

SEQ ID NO: 23958 - DNA, 76 bp, synthetic construct; identical to SEQ ID NO: 11012
  source 1..76: mol_type = other DNA

SEQ ID NO: 23959 - DNA, 76 bp, synthetic construct; identical to SEQ ID NO: 11012
  source 1..76: mol_type = other DNA

SEQ ID NO: 23960 - DNA, 76 bp, synthetic construct; identical to SEQ ID NO: 20449
  source 1..76: mol_type = other DNA

SEQ ID NO: 23961 - DNA, 76 bp, synthetic construct; identical to SEQ ID NO: 20449
  source 1..76: mol_type = other DNA

SEQ ID NO: 23962 - DNA, 76 bp, synthetic construct; identical to SEQ ID NO: 20449
  source 1..76: mol_type = other DNA

SEQ ID NO: 23963 - DNA, 76 bp, synthetic construct; identical to SEQ ID NO: 20449
  source 1..76: mol_type = other DNA

SEQ ID NO: 23964 - DNA, 76 bp, synthetic construct; identical to SEQ ID NO: 20449
  source 1..76: mol_type = other DNA

SEQ ID NO: 23965 - DNA, 76 bp, synthetic construct; identical to SEQ ID NO: 20449
  source 1..76: mol_type = other DNA

SEQ ID NO: 23966 - DNA, 76 bp, synthetic construct; identical to SEQ ID NO: 20449
  source 1..76: mol_type = other DNA

SEQ ID NO: 23967 - DNA, 76 bp, synthetic construct; identical to SEQ ID NO: 20449
  source 1..76: mol_type = other DNA

SEQ ID NO: 23968 - DNA, 76 bp, synthetic construct; identical to SEQ ID NO: 20449
  source 1..76: mol_type = other DNA

SEQ ID NO: 23969 - DNA, 76 bp, synthetic construct; identical to SEQ ID NO: 20449
  source 1..76: mol_type = other DNA

SEQ ID NO: 23970 - DNA, 76 bp, synthetic construct; identical to SEQ ID NO: 20449
  source 1..76: mol_type = other DNA

SEQ ID NO: 23971 - DNA, 76 bp, synthetic construct; identical to SEQ ID NO: 20449
  source 1..76: mol_type = other DNA

SEQ ID NO: 23972 - DNA, 76 bp, synthetic construct; identical to SEQ ID NO: 20449
  source 1..76: mol_type = other DNA

SEQ ID NO: 23973 - DNA, 76 bp, synthetic construct; identical to SEQ ID NO: 20449
  source 1..76: mol_type = other DNA

SEQ ID NO: 23974 - DNA, 76 bp, synthetic construct; identical to SEQ ID NO: 20449
  source 1..76: mol_type = other DNA

SEQ ID NO: 23975 - DNA, 76 bp, synthetic construct; identical to SEQ ID NO: 20449
  source 1..76: mol_type = other DNA

SEQ ID NO: 23976 - DNA, 76 bp, synthetic construct; identical to SEQ ID NO: 20449
  source 1..76: mol_type = other DNA

SEQ ID NO: 23977 - DNA, 76 bp, synthetic construct; identical to SEQ ID NO: 20449
  source 1..76: mol_type = other DNA

SEQ ID NO: 23978 - DNA, 76 bp, synthetic construct; identical to SEQ ID NO: 20449
  source 1..76: mol_type = other DNA

SEQ ID NO: 23979 - DNA, 76 bp, synthetic construct; identical to SEQ ID NO: 20449
  source 1..76: mol_type = other DNA

SEQ ID NO: 23980 - DNA, 76 bp, synthetic construct; identical to SEQ ID NO: 20449
  source 1..76: mol_type = other DNA

SEQ ID NO: 23981 - DNA, 76 bp, synthetic construct; identical to SEQ ID NO: 20449
  source 1..76: mol_type = other DNA

SEQ ID NO: 23982 - DNA, 76 bp, synthetic construct; identical to SEQ ID NO: 20449
  source 1..76: mol_type = other DNA

SEQ ID NO: 23983 - DNA, 76 bp, synthetic construct; identical to SEQ ID NO: 20449
  source 1..76: mol_type = other DNA

SEQ ID NO: 23984 - DNA, 76 bp, synthetic construct; identical to SEQ ID NO: 20449
  source 1..76: mol_type = other DNA

SEQ ID NO: 23985 - DNA, 76 bp, synthetic construct; identical to SEQ ID NO: 20449
  source 1..76: mol_type = other DNA

SEQ ID NO: 23986 - DNA, 76 bp, synthetic construct; identical to SEQ ID NO: 20449
  source 1..76: mol_type = other DNA

SEQ ID NO: 23987 - DNA, 76 bp, synthetic construct; identical to SEQ ID NO: 20449
  source 1..76: mol_type = other DNA

SEQ ID NO: 23988 - DNA, 76 bp, synthetic construct; identical to SEQ ID NO: 20449
  source 1..76: mol_type = other DNA

SEQ ID NO: 23989 - DNA, 76 bp, synthetic construct; identical to SEQ ID NO: 20449
  source 1..76: mol_type = other DNA

SEQ ID NO: 23990 - DNA, 76 bp, synthetic construct; identical to SEQ ID NO: 20449
  source 1..76: mol_type = other DNA

SEQ ID NO: 23991 - DNA, 76 bp, synthetic construct; identical to SEQ ID NO: 20449
  source 1..76: mol_type = other DNA

SEQ ID NO: 23992 - DNA, 76 bp, synthetic construct; identical to SEQ ID NO: 20449
  source 1..76: mol_type = other DNA

SEQ ID NO: 23993 - DNA, 76 bp, synthetic construct; identical to SEQ ID NO: 20449
  source 1..76: mol_type = other DNA

SEQ ID NO: 23994 - DNA, 76 bp, synthetic construct; identical to SEQ ID NO: 20449
  source 1..76: mol_type = other DNA

SEQ ID NO: 23995 - DNA, 76 bp, synthetic construct; identical to SEQ ID NO: 20449
  source 1..76: mol_type = other DNA

SEQ ID NO: 23996 - DNA, 76 bp, synthetic construct; identical to SEQ ID NO: 20449
  source 1..76: mol_type = other DNA

SEQ ID NO: 23997 - DNA, 76 bp, synthetic construct; identical to SEQ ID NO: 20449
  source 1..76: mol_type = other DNA

SEQ ID NO: 23998 - DNA, 76 bp, synthetic construct; identical to SEQ ID NO: 20449
  source 1..76: mol_type = other DNA

SEQ ID NO: 23999 - DNA, 76 bp, synthetic construct; identical to SEQ ID NO: 20449
  source 1..76: mol_type = other DNA

SEQ ID NO: 24000 - DNA, 76 bp, synthetic construct; identical to SEQ ID NO: 20449
  source 1..76: mol_type = other DNA

SEQ ID NO: 24001 - DNA, 76 bp, synthetic construct; identical to SEQ ID NO: 20449
  source 1..76: mol_type = other DNA

SEQ ID NO: 24002 - DNA, 76 bp, synthetic construct; identical to SEQ ID NO: 20449
  source 1..76: mol_type = other DNA

SEQ ID NO: 24003 - DNA, 76 bp, synthetic construct; identical to SEQ ID NO: 20449
  source 1..76: mol_type = other DNA

SEQ ID NO: 24004 - DNA, 76 bp, synthetic construct; identical to SEQ ID NO: 20449
  source 1..76: mol_type = other DNA

SEQ ID NO: 24005 - DNA, 76 bp, synthetic construct; identical to SEQ ID NO: 20449
  source 1..76: mol_type = other DNA

SEQ ID NO: 24006 - DNA, 121 bp, synthetic construct; identical to SEQ ID NO: 20495
  source 1..121: mol_type = other DNA

SEQ ID NO: 24007 - DNA, 121 bp, synthetic construct; identical to SEQ ID NO: 20495
  source 1..121: mol_type = other DNA

SEQ ID NO: 24008 - DNA, 121 bp, synthetic construct; identical to SEQ ID NO: 20495
  source 1..121: mol_type = other DNA

SEQ ID NO: 24009 - DNA, 121 bp, synthetic construct; identical to SEQ ID NO: 20495
  source 1..121: mol_type = other DNA

SEQ ID NO: 24010 - DNA, 121 bp, synthetic construct; identical to SEQ ID NO: 20495
  source 1..121: mol_type = other DNA

SEQ ID NO: 24011 - DNA, 121 bp, synthetic construct; identical to SEQ ID NO: 20495
  source 1..121: mol_type = other DNA

SEQ ID NO: 24012 - DNA, 121 bp, synthetic construct; identical to SEQ ID NO: 20495
  source 1..121: mol_type = other DNA

SEQ ID NO: 24013 - DNA, 121 bp, synthetic construct; identical to SEQ ID NO: 20495
  source 1..121: mol_type = other DNA

SEQ ID NO: 24014 - DNA, 121 bp, synthetic construct; identical to SEQ ID NO: 20495
  source 1..121: mol_type = other DNA

SEQ ID NO: 24015 - DNA, 121 bp, synthetic construct; identical to SEQ ID NO: 20495
  source 1..121: mol_type = other DNA

SEQ ID NO: 24016 - DNA, 147 bp, synthetic construct; identical to SEQ ID NO: 20505
  source 1..147: mol_type = other DNA

SEQ ID NO: 24017 - DNA, 147 bp, synthetic construct; identical to SEQ ID NO: 20505
  source 1..147: mol_type = other DNA

SEQ ID NO: 24018 - DNA, 147 bp, synthetic construct; identical to SEQ ID NO: 20505
  source 1..147: mol_type = other DNA

SEQ ID NO: 24019 - DNA, 147 bp, synthetic construct; identical to SEQ ID NO: 20505
  source 1..147: mol_type = other DNA

SEQ ID NO: 24020 - DNA, 147 bp, synthetic construct; identical to SEQ ID NO: 20505
  source 1..147: mol_type = other DNA

SEQ ID NO: 24021 - DNA, 147 bp, synthetic construct; identical to SEQ ID NO: 20505
  source 1..147: mol_type = other DNA

SEQ ID NO: 24022 - DNA, 147 bp, synthetic construct; identical to SEQ ID NO: 20505
  source 1..147: mol_type = other DNA

SEQ ID NO: 24023 - DNA, 147 bp, synthetic construct; identical to SEQ ID NO: 20505
  source 1..147: mol_type = other DNA

SEQ ID NO: 24024 - DNA, 147 bp, synthetic construct; identical to SEQ ID NO: 20505
  source 1..147: mol_type = other DNA

SEQ ID NO: 24025 - DNA, 147 bp, synthetic construct; identical to SEQ ID NO: 20505
  source 1..147: mol_type = other DNA

SEQ ID NO: 24026 - DNA, 147 bp, synthetic construct; identical to SEQ ID NO: 20505
  source 1..147: mol_type = other DNA

SEQ ID NO: 24027 - DNA, 147 bp, synthetic construct; identical to SEQ ID NO: 20505
  source 1..147: mol_type = other DNA

SEQ ID NO: 24028 - DNA, 147 bp, synthetic construct; identical to SEQ ID NO: 20505
  source 1..147: mol_type = other DNA

SEQ ID NO: 24029 - DNA, 147 bp, synthetic construct; identical to SEQ ID NO: 20505
  source 1..147: mol_type = other DNA

SEQ ID NO: 24030 - DNA, 147 bp, synthetic construct; identical to SEQ ID NO: 20505
  source 1..147: mol_type = other DNA

SEQ ID NO: 24031 - DNA, 147 bp, synthetic construct; identical to SEQ ID NO: 20505
  source 1..147: mol_type = other DNA

SEQ ID NO: 24032 - DNA, 147 bp, synthetic construct; identical to SEQ ID NO: 20505
  source 1..147: mol_type = other DNA

SEQ ID NO: 24033 - DNA, 147 bp, synthetic construct; identical to SEQ ID NO: 20505
  source 1..147: mol_type = other DNA

SEQ ID NO: 24034 - DNA, 111 bp, synthetic construct; identical to SEQ ID NO: 20523
  source 1..111: mol_type = other DNA

SEQ ID NO: 24035 - DNA, 111 bp, synthetic construct; identical to SEQ ID NO: 20523
  source 1..111: mol_type = other DNA

SEQ ID NO: 24036 - DNA, 111 bp, synthetic construct; identical to SEQ ID NO: 20523
  source 1..111: mol_type = other DNA

SEQ ID NO: 24037 - DNA, 111 bp, synthetic construct; identical to SEQ ID NO: 20523
  source 1..111: mol_type = other DNA

SEQ ID NO: 24038 - DNA, 111 bp, synthetic construct; identical to SEQ ID NO: 20523
  source 1..111: mol_type = other DNA

SEQ ID NO: 24039 - DNA, 111 bp, synthetic construct; identical to SEQ ID NO: 20523
  source 1..111: mol_type = other DNA

SEQ ID NO: 24040 - DNA, 111 bp, synthetic construct; identical to SEQ ID NO: 20523
  source 1..111: mol_type = other DNA

SEQ ID NO: 24041 - DNA, 111 bp, synthetic construct; identical to SEQ ID NO: 20523
  source 1..111: mol_type = other DNA

SEQ ID NO: 24042 - DNA, 111 bp, synthetic construct; identical to SEQ ID NO: 20523
  source 1..111: mol_type = other DNA

SEQ ID NO: 24043 - DNA, 111 bp, synthetic construct; identical to SEQ ID NO: 20523
  source 1..111: mol_type = other DNA

SEQ ID NO: 24044 - DNA, 111 bp, synthetic construct; identical to SEQ ID NO: 20523
  source 1..111: mol_type = other DNA

SEQ ID NO: 24045 - DNA, 111 bp, synthetic construct; identical to SEQ ID NO: 20523
  source 1..111: mol_type = other DNA

SEQ ID NO: 24046 - DNA, 111 bp, synthetic construct; identical to SEQ ID NO: 20523
  source 1..111: mol_type = other DNA

SEQ ID NO: 24047 - DNA, 111 bp, synthetic construct; identical to SEQ ID NO: 20523
  source 1..111: mol_type = other DNA

SEQ ID NO: 24048 - DNA, 111 bp, synthetic construct; identical to SEQ ID NO: 20523
  source 1..111: mol_type = other DNA

SEQ ID NO: 24049 - DNA, 111 bp, synthetic construct; identical to SEQ ID NO: 20523
  source 1..111: mol_type = other DNA

SEQ ID NO: 24050 - DNA, 111 bp, synthetic construct; identical to SEQ ID NO: 20523
  source 1..111: mol_type = other DNA

SEQ ID NO: 24051 - DNA, 84 bp, synthetic construct; identical to SEQ ID NO: 20540
  source 1..84: mol_type = other DNA

SEQ ID NO: 24052 - DNA, 84 bp, synthetic construct; identical to SEQ ID NO: 20540
  source 1..84: mol_type = other DNA

SEQ ID NO: 24053 - DNA, 84 bp, synthetic construct; identical to SEQ ID NO: 20540
  source 1..84: mol_type = other DNA

SEQ ID NO: 24054 - DNA, 84 bp, synthetic construct; identical to SEQ ID NO: 20540
  source 1..84: mol_type = other DNA

SEQ ID NO: 24055 - DNA, 84 bp, synthetic construct; identical to SEQ ID NO: 20540
  source 1..84: mol_type = other DNA

SEQ ID NO: 24056 - DNA, 84 bp, synthetic construct; identical to SEQ ID NO: 20540
  source 1..84: mol_type = other DNA

SEQ ID NO: 24057 - DNA, 20 bp, synthetic construct
  source 1..20: mol_type = other DNA
ctgtgctgaccatcgacaag

SEQ ID NO: 24058 - DNA, 21 bp, synthetic construct
  source 1..21: mol_type = other DNA
gctgtgctgaccatcgacaag

SEQ ID NO: 24059 - DNA, 20 bp, synthetic construct
  source 1..20: mol_type = other DNA
ggctgtgctgaccatcgaca

SEQ ID NO: 24060 - DNA, 20 bp, synthetic construct
  source 1..20: mol_type = other DNA
aggctgtgctgaccatcgac

SEQ ID NO: 24061 - DNA, 20 bp, synthetic construct
  source 1..20: mol_type = other DNA
aggctgtgctgaccatcgac

SEQ ID NO: 24062 - DNA, 20 bp, synthetic construct
  source 1..20: mol_type = other DNA
ccaggccgtgcataaggctg

SEQ ID NO: 24063 - DNA, 20 bp, synthetic construct
  source 1..20: mol_type = other DNA
aggccgtgcataaggctgtg

SEQ ID NO: 24064 - DNA, 20 bp, synthetic construct
  source 1..20: mol_type = other DNA
aggccgtgcataaggctgtg

SEQ ID NO: 24065 - DNA, 24 bp, synthetic construct
  source 1..24: mol_type = other DNA
gtaaaaacatggccccagcagctt

SEQ ID NO: 24066 - DNA, 24 bp, synthetic construct
  source 1..24: mol_type = other DNA
gtccaggccgtgcataaggctgtg

SEQ ID NO: 24067 - DNA, 20 bp, synthetic construct
  source 1..20: mol_type = other DNA
aaggctgtgctgaccatcga

SEQ ID NO: 24068 - DNA, 21 bp, synthetic construct
  source 1..21: mol_type = other DNA
gaaggctgtgctgaccatcga

SEQ ID NO: 24069 - RNA, 144 nt, synthetic construct
  source 1..144: mol_type = other RNA
  modified_base 1: mod_base = OTHER; note = 2'O-methyl cytidine phosphorothioate
  modified_base 2: mod_base = OTHER; note = 2'O-methyl uridine phosphorothioate
  modified_base 3: mod_base = OTHER; note = 2'O-methyl guanosine phosphorothioate
  modified_base 141: mod_base = OTHER; note = adenosine phosphorothioate
  modified_base 142: mod_base = OTHER; note = 2'O-methyl cytidine phosphorothioate
  modified_base 143: mod_base = OTHER; note = 2'O-methyl adenosine phosphorothioate
  modified_base 144: mod_base = OTHER; note = 2'O-methyl guanosine
ctgtgctgaccatcgacaaggttttagagctagaaatagcaagttaaaataaggctagtccgttatcaacttgaaaaagtggcaccgagtcggtgcacatggccccagcagcttcagtccctttctcgtcgatggtcagcacag

SEQ ID NO: 24070 - RNA, 143 nt, synthetic construct
  source 1..143: mol_type = other RNA
  modified_base 1: mod_base = OTHER; note = 2'O-methyl cytidine phosphorothioate
  modified_base 2: mod_base = OTHER; note = 2'O-methyl uridine phosphorothioate
  modified_base 3: mod_base = OTHER; note = 2'O-methyl guanosine phosphorothioate
  modified_base 140: mod_base = OTHER; note = cytidine phosphorothioate
  modified_base 141: mod_base = OTHER; note = 2'O-methyl adenosine phosphorothioate
  modified_base 142: mod_base = OTHER; note = 2'O-methyl cytidine phosphorothioate
  modified_base 143: mod_base = OTHER; note = 2'O-methyl adenosine
ctgtgctgaccatcgacaaggttttagagctagaaatagcaagttaaaataaggctagtccgttatcaacttgaaaaagtggcaccgagtcggtgcacatggccccagcagcttcagtccctttctcgtcgatggtcagcaca

SEQ ID NO: 24071 - RNA, 142 nt, synthetic construct
  source 1..142: mol_type = other RNA
  modified_base 1: mod_base = OTHER; note = 2'O-methyl cytidine phosphorothioate
  modified_base 2: mod_base = OTHER; note = 2'O-methyl uridine phosphorothioate
  modified_base 3: mod_base = OTHER; note = 2'O-methyl guanosine phosphorothioate
  modified_base 139: mod_base = OTHER; note = guanosine phosphorothioate
  modified_base 140: mod_base = OTHER; note = 2'O-methyl cytidine phosphorothioate
  modified_base 141: mod_base = OTHER; note = 2'O-methyl adenosine phosphorothioate
  modified_base 142: mod_base = OTHER; note = 2'O-methyl cytidine
ctgtgctgaccatcgacaaggttttagagctagaaatagcaagttaaaataaggctagtccgttatcaacttgaaaaagtggcaccgagtcggtgcacatggccccagcagcttcagtccctttctcgtcgatggtcagcac

SEQ ID NO: 24072 - RNA, 141 nt, synthetic construct
  source 1..141: mol_type = other RNA
  modified_base 1: mod_base = OTHER; note = 2'O-methyl cytidine phosphorothioate
  modified_base 2: mod_base = OTHER; note = 2'O-methyl uridine phosphorothioate
  modified_base 3: mod_base = OTHER; note = 2'O-methyl guanosine phosphorothioate
  modified_base 138: mod_base = OTHER; note = adenosine phosphorothioate
  modified_base 139: mod_base = OTHER; note = 2'O-methyl guanosine phosphorothioate
  modified_base 140: mod_base = OTHER; note = 2'O-methyl cytidine phosphorothioate
  modified_base 141: mod_base = OTHER; note = 2'O-methyl adenosine
ctgtgctgaccatcgacaaggttttagagctagaaatagcaagttaaaataaggctagtccgttatcaacttgaaaaagtggcaccgagtcggtgcacatggccccagcagcttcagtccctttctcgtcgatggtcagca

SEQ ID NO: 24073 - RNA, 140 nt, synthetic construct
  source 1..140: mol_type = other RNA
  modified_base 1: mod_base = OTHER; note = 2'O-methyl cytidine phosphorothioate
  modified_base 2: mod_base = OTHER; note = 2'O-methyl uridine phosphorothioate
  modified_base 3: mod_base = OTHER; note = 2'O-methyl guanosine phosphorothioate
  modified_base 137: mod_base = OTHER; note = cytidine phosphorothioate
  modified_base 138: mod_base = OTHER; note = 2'O-methyl adenosine phosphorothioate
  modified_base 139: mod_base = OTHER; note = 2'O-methyl guanosine phosphorothioate
  modified_base 140: mod_base = OTHER; note = 2'O-methyl cytidine
ctgtgctgaccatcgacaaggttttagagctagaaatagcaagttaaaataaggctagtccgttatcaacttgaaaaagtggcaccgagtcggtgcacatggccccagcagcttcagtccctttctcgtcgatggtcagc

SEQ ID NO: 24074 - RNA, 139 nt, synthetic construct
  source 1..139: mol_type = other RNA
  modified_base 1: mod_base = OTHER; note = 2'O-methyl cytidine phosphorothioate
  modified_base 2: mod_base = OTHER; note = 2'O-methyl uridine phosphorothioate
  modified_base 3: mod_base = OTHER; note = 2'O-methyl guanosine phosphorothioate
  modified_base 136: mod_base = OTHER; note = uridine phosphorothioate
  modified_base 137: mod_base = OTHER; note = 2'O-methyl cytidine phosphorothioate
  modified_base 138: mod_base = OTHER; note = 2'O-methyl adenosine phosphorothioate
  modified_base 139: mod_base = OTHER; note = 2'O-methyl guanosine
ctgtgctgaccatcgacaaggttttagagctagaaatagcaagttaaaataaggctagtccgttatcaacttgaaaaagtggcaccgagtcggtgcacatggccccagcagcttcagtccctttctcgtcgatggtcag

SEQ ID NO: 24075 - RNA, 138 nt, synthetic construct
  source 1..138: mol_type = other RNA
  modified_base 1: mod_base = OTHER; note = 2'O-methyl cytidine phosphorothioate
  modified_base 2: mod_base = OTHER; note = 2'O-methyl uridine phosphorothioate
  modified_base 3: mod_base = OTHER; note = 2'O-methyl guanosine phosphorothioate
  modified_base 135: mod_base = OTHER; note = guanosine phosphorothioate
  modified_base 136: mod_base = OTHER; note = 2'O-methyl uridine phosphorothioate
  modified_base 137: mod_base = OTHER; note = 2'O-methyl cytidine phosphorothioate
  modified_base 138: mod_base = OTHER; note = 2'O-methyl adenosine
ctgtgctgaccatcgacaaggttttagagctagaaatagcaagttaaaataaggctagtccgttatcaacttgaaaaagtggcaccgagtcggtgcacatggccccagcagcttcagtccctttctcgtcgatggtca

SEQ ID NO: 24076 - RNA, 137 nt, synthetic construct
  source 1..137: mol_type = other RNA
  modified_base 1: mod_base = OTHER; note = 2'O-methyl cytidine phosphorothioate
  modified_base 2: mod_base = OTHER; note = 2'O-methyl uridine phosphorothioate
  modified_base 3: mod_base = OTHER; note = 2'O-methyl guanosine phosphorothioate
  modified_base 134: mod_base = OTHER; note = guanosine phosphorothioate
  modified_base 135: mod_base = OTHER; note = 2'O-methyl guanosine phosphorothioate
  modified_base 136: mod_base = OTHER; note = 2'O-methyl uridine phosphorothioate
  modified_base 137: mod_base = OTHER; note = 2'O-methyl cytidine
ctgtgctgaccatcgacaaggttttagagctagaaatagcaagttaaaataaggctagtccgttatcaacttgaaaaagtggcaccgagtcggtgcacatggccccagcagcttcagtccctttctcgtcgatggtc

SEQ ID NO: 24077 - RNA, 136 nt, synthetic construct
  source 1..136: mol_type = other RNA
  modified_base 1: mod_base = OTHER; note = 2'O-methyl cytidine phosphorothioate
  modified_base 2: mod_base = OTHER; note = 2'O-methyl uridine phosphorothioate
  modified_base 3: mod_base = OTHER; note = 2'O-methyl guanosine phosphorothioate
  modified_base 133: mod_base = OTHER; note = uridine phosphorothioate
  modified_base 134: mod_base = OTHER; note = 2'O-methyl guanosine phosphorothioate
  modified_base 135: mod_base = OTHER; note = 2'O-methyl guanosine phosphorothioate
  modified_base 136: mod_base = OTHER; note = 2'O-methyl uridine
ctgtgctgaccatcgacaaggttttagagctagaaatagcaagttaaaataaggctagtccgttatcaacttgaaaaagtggcaccgagtcggtgcacatggccccagcagcttcagtccctttctcgtcgatggt

SEQ ID NO: 24078 - RNA, 135 nt, synthetic construct
  source 1..135: mol_type = other RNA
  modified_base 1: mod_base = OTHER; note = 2'O-methyl cytidine phosphorothioate
  modified_base 2: mod_base = OTHER; note = 2'O-methyl uridine phosphorothioate
  modified_base 3: mod_base = OTHER; note = 2'O-methyl guanosine phosphorothioate
  modified_base 132: mod_base = OTHER; note = adenosine phosphorothioate
  modified_base 133: mod_base = OTHER; note = 2'O-methyl uridine phosphorothioate
  modified_base 134: mod_base = OTHER; note = 2'O-methyl guanosine phosphorothioate
  modified_base 135: mod_base = OTHER; note = 2'O-methyl guanosine
ctgtgctgaccatcgacaaggttttagagctagaaatagcaagttaaaataaggctagtccgttatcaacttgaaaaagtggcaccgagtcggtgcacatggccccagcagcttcagtccctttctcgtcgatgg

SEQ ID NO: 24079 - RNA, 139 nt, synthetic construct
  source 1..139: mol_type = other RNA
  modified_base 1: mod_base = OTHER; note = 2'O-methyl cytidine phosphorothioate
  modified_base 2: mod_base = OTHER; note = 2'O-methyl uridine phosphorothioate
  modified_base 3: mod_base = OTHER; note = 2'O-methyl guanosine phosphorothioate
  modified_base 136: mod_base = OTHER; note = adenosine phosphorothioate
  modified_base 137: mod_base = OTHER; note = 2'O-methyl cytidine phosphorothioate
  modified_base 138: mod_base = OTHER; note = 2'O-methyl adenosine phosphorothioate
  modified_base 139: mod_base = OTHER; note = 2'O-methyl guanosine
ctgtgctgaccatcgacaaggttttagagctagaaatagcaagttaaaataaggctagtccgttatcaacttgaaaaagtggcaccgagtcggtgcgccccagcagcttcagtccctttctcgtcgatggtcagcacag

SEQ ID NO: 24080 - RNA, 138 nt, synthetic construct
  source 1..138: mol_type = other RNA
  modified_base 1: mod_base = OTHER; note = 2'O-methyl cytidine phosphorothioate
  modified_base 2: mod_base = OTHER; note = 2'O-methyl uridine phosphorothioate
  modified_base 3: mod_base = OTHER; note = 2'O-methyl guanosine phosphorothioate
  modified_base 135: mod_base = OTHER; note = cytidine phosphorothioate
  modified_base 136: mod_base = OTHER; note = 2'O-methyl adenosine phosphorothioate
  modified_base 137: mod_base = OTHER; note = 2'O-methyl cytidine phosphorothioate
  modified_base 138: mod_base = OTHER; note = 2'O-methyl adenosine
ctgtgctgaccatcgacaaggttttagagctagaaatagcaagttaaaataaggctagtccgttatcaacttgaaaaagtggcaccgagtcggtgcgccccagcagcttcagtccctttctcgtcgatggtcagcaca

SEQ ID NO: 24081 - RNA, 137 nt, synthetic construct
  source 1..137: mol_type = other RNA
  modified_base 1: mod_base = OTHER; note = 2'O-methyl cytidine phosphorothioate
  modified_base 2: mod_base = OTHER; note = 2'O-methyl uridine phosphorothioate
  modified_base 3: mod_base = OTHER; note = 2'O-methyl guanosine phosphorothioate
  modified_base 134: mod_base = OTHER; note = guanosine phosphorothioate
  modified_base 135: mod_base = OTHER; note = 2'O-methyl cytidine phosphorothioate
  modified_base 136: mod_base = OTHER; note = 2'O-methyl adenosine phosphorothioate
  modified_base 137: mod_base = OTHER; note = 2'O-methyl cytidine
ctgtgctgaccatcgacaaggttttagagctagaaatagcaagttaaaataaggctagtccgttatcaacttgaaaaagtggcaccgagtcggtgcgccccagcagcttcagtccctttctcgtcgatggtcagcac

SEQ ID NO: 24082 - RNA, 136 nt, synthetic construct
  source 1..136: mol_type = other RNA
  modified_base 1: mod_base = OTHER; note = 2'O-methyl cytidine phosphorothioate
  modified_base 2: mod_base = OTHER; note = 2'O-methyl uridine phosphorothioate
  modified_base 3: mod_base = OTHER; note = 2'O-methyl guanosine phosphorothioate
  modified_base 133: mod_base = OTHER; note = adenosine phosphorothioate
  modified_base 134: mod_base = OTHER; note = 2'O-methyl guanosine phosphorothioate
  modified_base 135: mod_base = OTHER; note = 2'O-methyl cytidine phosphorothioate
  modified_base 136: mod_base = OTHER; note = 2'O-methyl adenosine
ctgtgctgaccatcgacaaggttttagagctagaaatagcaagttaaaataaggctagtccgttatcaacttgaaaaagtggcaccgagtcggtgcgccccagcagcttcagtccctttctcgtcgatggtcagca

SEQ ID NO: 24083 - RNA, 135 nt, synthetic construct
  source 1..135: mol_type = other RNA
  modified_base 1: mod_base = OTHER; note = 2'O-methyl cytidine phosphorothioate
  modified_base 2: mod_base = OTHER; note = 2'O-methyl uridine phosphorothioate
  modified_base 3: mod_base = OTHER; note = 2'O-methyl guanosine phosphorothioate
  modified_base 132: mod_base = OTHER; note = cytidine phosphorothioate
  modified_base 133: mod_base = OTHER; note = 2'O-methyl adenosine phosphorothioate
  modified_base 134: mod_base = OTHER; note = 2'O-methyl guanosine phosphorothioate
  modified_base 135: mod_base = OTHER; note = 2'O-methyl cytidine
ctgtgctgaccatcgacaaggttttagagctagaaatagcaagttaaaataaggctagtccgttatcaacttgaaaaagtggcaccgagtcggtgcgccccagcagcttcagtccctttctcgtcgatggtcagc

SEQ ID NO: 24084 - RNA, 134 nt, synthetic construct
  source 1..134: mol_type = other RNA
  modified_base 1: mod_base = OTHER; note = 2'O-methyl cytidine phosphorothioate
  modified_base 2: mod_base = OTHER; note = 2'O-methyl uridine phosphorothioate
  modified_base 3: mod_base = OTHER; note = 2'O-methyl guanosine phosphorothioate
  modified_base 131: mod_base = OTHER; note = uridine phosphorothioate
  modified_base 132: mod_base = OTHER; note = 2'O-methyl cytidine phosphorothioate
  modified_base 133: mod_base = OTHER; note = 2'O-methyl adenosine phosphorothioate
  modified_base 134: mod_base = OTHER; note = 2'O-methyl guanosine
ctgtgctgaccatcgacaaggttttagagctagaaatagcaagttaaaataaggctagtccgttatcaacttgaaaaagtggcaccgagtcggtgcgccccagcagcttcagtccctttctcgtcgatggtcag

SEQ ID NO: 24085 - RNA, 133 nt, synthetic construct
  source 1..133: mol_type = other RNA
  modified_base 1: mod_base = OTHER; note = 2'O-methyl cytidine phosphorothioate
  modified_base 2: mod_base = OTHER; note = 2'O-methyl uridine phosphorothioate
  modified_base 3: mod_base = OTHER; note = 2'O-methyl guanosine phosphorothioate
  modified_base 130: mod_base = OTHER; note = guanosine phosphorothioate
  modified_base 131: mod_base = OTHER; note = 2'O-methyl uridine phosphorothioate
  modified_base 132: mod_base = OTHER; note = 2'O-methyl cytidine phosphorothioate
  modified_base 133: mod_base = OTHER; note = 2'O-methyl adenosine
ctgtgctgaccatcgacaaggttttagagctagaaatagcaagttaaaataaggctagtccgttatcaacttgaaaaagtggcaccgagtcggtgcgccccagcagcttcagtccctttctcgtcgatggtca

SEQ ID NO: 24086 - RNA, 132 nt, synthetic construct
  source 1..132: mol_type = other RNA
  modified_base 1: mod_base = OTHER; note = 2'O-methyl cytidine phosphorothioate
  modified_base 2: mod_base = OTHER; note = 2'O-methyl uridine phosphorothioate
  modified_base 3: mod_base = OTHER; note = 2'O-methyl guanosine phosphorothioate
  modified_base 129: mod_base = OTHER; note = guanosine phosphorothioate
  modified_base 130: mod_base = OTHER; note = 2'O-methyl guanosine phosphorothioate
  modified_base 131: mod_base = OTHER; note = 2'O-methyl uridine phosphorothioate
  modified_base 132: mod_base = OTHER; note = 2'O-methyl cytidine
ctgtgctgaccatcgacaaggttttagagctagaaatagcaagttaaaataaggctagtccgttatcaacttgaaaaagtggcaccgagtcggtgcgccccagcagcttcagtccctttctcgtcgatggtc

SEQ ID NO: 24087 - RNA, 131 nt, synthetic construct
  source 1..131: mol_type = other RNA
  modified_base 1: mod_base = OTHER; note = 2'O-methyl cytidine phosphorothioate
  modified_base 2: mod_base = OTHER; note = 2'O-methyl uridine phosphorothioate
  modified_base 3: mod_base = OTHER; note = 2'O-methyl guanosine phosphorothioate
  modified_base 128: mod_base = OTHER; note = uridine phosphorothioate
  modified_base 129: mod_base = OTHER; note = 2'O-methyl guanosine phosphorothioate
  modified_base 130: mod_base = OTHER; note = 2'O-methyl guanosine phosphorothioate
  modified_base 131: mod_base = OTHER; note = 2'O-methyl uridine
ctgtgctgaccatcgacaaggttttagagctagaaatagcaagttaaaataaggctagtccgttatcaacttgaaaaagtggcaccgagtcggtgcgccccagcagcttcagtccctttctcgtcgatggt

SEQ ID NO: 24088 - RNA, 130 nt, synthetic construct
  source 1..130: mol_type = other RNA
  modified_base 1: mod_base = OTHER; note = 2'O-methyl cytidine phosphorothioate
  modified_base 2: mod_base = OTHER; note = 2'O-methyl uridine phosphorothioate
  modified_base 3: mod_base = OTHER; note = 2'O-methyl guanosine phosphorothioate
  modified_base 127: mod_base = OTHER; note = adenosine phosphorothioate
  modified_base 128: mod_base = OTHER; note = 2'O-methyl uridine phosphorothioate
  modified_base 129: mod_base = OTHER; note = 2'O-methyl guanosine phosphorothioate
  modified_base 130: mod_base = OTHER; note = 2'O-methyl guanosine
ctgtgctgaccatcgacaaggttttagagctagaaatagcaagttaaaataaggctagtccgttatcaacttgaaaaagtggcaccgagtcggtgcgccccagcagcttcagtccctttctcgtcgatgg

SEQ ID NO: 24089 - RNA, 134 nt, synthetic construct
  source 1..134: mol_type = other RNA
  modified_base 1: mod_base = OTHER; note = 2'O-methyl cytidine phosphorothioate
  modified_base 2: mod_base = OTHER; note = 2'O-methyl uridine phosphorothioate
  modified_base 3: mod_base = OTHER; note = 2'O-methyl guanosine phosphorothioate
  modified_base 131: mod_base = OTHER; note = adenosine phosphorothioate
  modified_base 132: mod_base = OTHER; note = 2'O-methyl cytidine phosphorothioate
  modified_base 133: mod_base = OTHER; note = 2'O-methyl adenosine phosphorothioate
  modified_base 134: mod_base = OTHER; note = 2'O-methyl guanosine
ctgtgctgaccatcgacaaggttttagagctagaaatagcaagttaaaataaggctagtccgttatcaacttgaaaaagtggcaccgagtcggtgcagcagcttcagtccctttctcgtcgatggtcagcacag

SEQ ID NO: 24090 - RNA, 133 nt, synthetic construct
  source 1..133: mol_type = other RNA
  modified_base 1: mod_base = OTHER; note = 2'O-methyl cytidine phosphorothioate
  modified_base 2: mod_base = OTHER; note = 2'O-methyl uridine phosphorothioate
  modified_base 3: mod_base = OTHER; note = 2'O-methyl guanosine phosphorothioate
  modified_base 130: mod_base = OTHER; note = cytidine phosphorothioate
  modified_base 131: mod_base = OTHER; note = 2'O-methyl adenosine phosphorothioate
  modified_base 132: mod_base = OTHER; note = 2'O-methyl cytidine phosphorothioate
  modified_base 133: mod_base = OTHER; note = 2'O-methyl adenosine
ctgtgctgaccatcgacaaggttttagagctagaaatagcaagttaaaataaggctagtccgttatcaacttgaaaaagtggcaccgagtcggtgcagcagcttcagtccctttctcgtcgatggtcagcaca

SEQ ID NO: 24091 - RNA, 132 nt, synthetic construct
  source 1..132: mol_type = other RNA
  modified_base 1: mod_base = OTHER; note = 2'O-methyl cytidine phosphorothioate
  modified_base 2: mod_base = OTHER; note = 2'O-methyl uridine phosphorothioate
  modified_base 3: mod_base = OTHER; note = 2'O-methyl guanosine phosphorothioate
  modified_base 129: mod_base = OTHER; note = guanosine phosphorothioate
  modified_base 130: mod_base = OTHER; note = 2'O-methyl cytidine phosphorothioate
  modified_base 131: mod_base = OTHER; note = 2'O-methyl adenosine phosphorothioate
  modified_base 132: mod_base = OTHER; note = 2'O-methyl cytidine
ctgtgctgaccatcgacaaggttttagagctagaaatagcaagttaaaataaggctagtccgttatcaacttgaaaaagtggcaccgagtcggtgcagcagcttcagtccctttctcgtcgatggtcagcac

SEQ ID NO: 24092 - RNA, 131 nt, synthetic construct
  source 1..131: mol_type = other RNA
  modified_base 1: mod_base = OTHER; note = 2'O-methyl cytidine phosphorothioate
  modified_base 2: mod_base = OTHER; note = 2'O-methyl uridine phosphorothioate
  modified_base 3: mod_base = OTHER; note = 2'O-methyl guanosine phosphorothioate
  modified_base 128: mod_base = OTHER; note = adenosine phosphorothioate
  modified_base 129: mod_base = OTHER; note = 2'O-methyl guanosine phosphorothioate
  modified_base 130: mod_base = OTHER; note = 2'O-methyl cytidine phosphorothioate
  modified_base 131: mod_base = OTHER; note = 2'O-methyl adenosine
ctgtgctgaccatcgacaaggttttagagctagaaatagcaagttaaaataaggctagtccgttatcaacttgaaaaagtggcaccgagtcggtgcagcagcttcagtccctttctcgtcgatggtcagca

SEQ ID NO: 24093 - RNA, 130 nt, synthetic construct
  source 1..130: mol_type = other RNA
  modified_base 1: mod_base = OTHER; note = 2'O-methyl cytidine phosphorothioate
  modified_base 2: mod_base = OTHER; note = 2'O-methyl uridine phosphorothioate
  modified_base 3: mod_base = OTHER; note = 2'O-methyl guanosine phosphorothioate
  modified_base 127: mod_base = OTHER; note = cytidine phosphorothioate
  modified_base 128: mod_base = OTHER; note = 2'O-methyl adenosine phosphorothioate
  modified_base 129: mod_base = OTHER; note = 2'O-methyl guanosine phosphorothioate
  modified_base 130: mod_base = OTHER; note = 2'O-methyl cytidine
ctgtgctgaccatcgacaaggttttagagctagaaatagcaagttaaaataaggctagtccgttatcaacttgaaaaagtggcaccgagtcggtgcagcagcttcagtccctttctcgtcgatggtcagc

SEQ ID NO: 24094 - RNA, 129 nt, synthetic construct
  source 1..129: mol_type = other RNA
  modified_base 1: mod_base = OTHER; note = 2'O-methyl cytidine phosphorothioate
  modified_base 2: mod_base = OTHER; note = 2'O-methyl uridine phosphorothioate
  modified_base 3: mod_base = OTHER; note = 2'O-methyl guanosine phosphorothioate
  modified_base 126: mod_base = OTHER; note = uridine phosphorothioate
  modified_base 127: mod_base = OTHER; note = 2'O-methyl cytidine phosphorothioate
  modified_base 128: mod_base = OTHER; note = 2'O-methyl adenosine phosphorothioate
  modified_base 129: mod_base = OTHER; note = 2'O-methyl guanosine
ctgtgctgaccatcgacaaggttttagagctagaaatagcaagttaaaataaggctagtccgttatcaacttgaaaaagtggcaccgagtcggtgcagcagcttcagtccctttctcgtcgatggtcag

SEQ ID NO: 24095 - RNA, 128 nt, synthetic construct
  source 1..128: mol_type = other RNA
  modified_base 1: mod_base = OTHER; note = 2'O-methyl cytidine phosphorothioate
  modified_base 2: mod_base = OTHER; note = 2'O-methyl uridine phosphorothioate
  modified_base 3: mod_base = OTHER; note = 2'O-methyl guanosine phosphorothioate
  modified_base 125: mod_base = OTHER; note = guanosine phosphorothioate
  modified_base 126: mod_base = OTHER; note = 2'O-methyl uridine phosphorothioate
  modified_base 127: mod_base = OTHER; note = 2'O-methyl cytidine phosphorothioate
  modified_base 128: mod_base = OTHER; note = 2'O-methyl adenosine
ctgtgctgaccatcgacaaggttttagagctagaaatagcaagttaaaataaggctagtccgttatcaacttgaaaaagtggcaccgagtcggtgcagcagcttcagtccctttctcgtcgatggtca

SEQ ID NO: 24096 - RNA, 127 nt, synthetic construct
  source 1..127: mol_type = other RNA
  modified_base 1: mod_base = OTHER; note = 2'O-methyl cytidine phosphorothioate
  modified_base 2: mod_base = OTHER; note = 2'O-methyl uridine phosphorothioate
  modified_base 3: mod_base = OTHER; note = 2'O-methyl guanosine phosphorothioate
  modified_base 124: mod_base = OTHER; note = guanosine phosphorothioate
  modified_base 125: mod_base = OTHER; note = 2'O-methyl guanosine phosphorothioate
  modified_base 126: mod_base = OTHER; note = 2'O-methyl uridine phosphorothioate
  modified_base 127: mod_base = OTHER; note = 2'O-methyl cytidine
ctgtgctgaccatcgacaaggttttagagctagaaatagcaagttaaaataaggctagtccgttatcaacttgaaaaagtggcaccgagtcggtgcagcagcttcagtccctttctcgtcgatggtc

SEQ ID NO: 24097 - RNA, 126 nt, synthetic construct
  source 1..126: mol_type = other RNA
  modified_base 1: mod_base = OTHER; note = 2'O-methyl cytidine phosphorothioate
  modified_base 2: mod_base = OTHER; note = 2'O-methyl uridine phosphorothioate
  modified_base 3: mod_base = OTHER; note = 2'O-methyl guanosine phosphorothioate
  modified_base 123: mod_base = OTHER; note = uridine phosphorothioate
  modified_base 124: mod_base = OTHER; note = 2'O-methyl guanosine phosphorothioate
  modified_base 125: mod_base = OTHER; note = 2'O-methyl guanosine phosphorothioate
  modified_base 126: mod_base = OTHER; note = 2'O-methyl uridine
ctgtgctgaccatcgacaaggttttagagctagaaatagcaagttaaaataaggctagtccgttatcaacttgaaaaagtggcaccgagtcggtgcagcagcttcagtccctttctcgtcgatggt

SEQ ID NO: 24098 - RNA, 125 nt, synthetic construct
  source 1..125: mol_type = other RNA
  modified_base 1: mod_base = OTHER; note = 2'O-methyl cytidine phosphorothioate
  modified_base 2: mod_base = OTHER; note = 2'O-methyl uridine phosphorothioate
  modified_base 3: mod_base = OTHER; note = 2'O-methyl guanosine phosphorothioate
  modified_base 122: mod_base = OTHER; note = adenosine phosphorothioate
  modified_base 123: mod_base = OTHER; note = 2'O-methyl uridine phosphorothioate
  modified_base 124: mod_base = OTHER; note = 2'O-methyl guanosine phosphorothioate
  modified_base 125: mod_base = OTHER; note = 2'O-methyl guanosine
ctgtgctgaccatcgacaaggttttagagctagaaatagcaagttaaaataaggctagtccgttatcaacttgaaaaagtggcaccgagtcggtgcagcagcttcagtccctttctcgtcgatgg

SEQ ID NO: 24099 - RNA, 128 nt, synthetic construct
  source 1..128: mol_type = other RNA
  modified_base 1: mod_base = OTHER; note = 2'O-methyl cytidine phosphorothioate
  modified_base 2: mod_base = OTHER; note = 2'O-methyl uridine phosphorothioate
  modified_base 3: mod_base = OTHER; note = 2'O-methyl guanosine phosphorothioate
  modified_base 125: mod_base = OTHER; note = adenosine phosphorothioate
  modified_base 126: mod_base = OTHER; note = 2'O-methyl cytidine phosphorothioate
  modified_base 127: mod_base = OTHER; note = 2'O-methyl adenosine phosphorothioate
  modified_base 128: mod_base = OTHER; note = 2'O-methyl guanosine
ctgtgctgaccatcgacaaggttttagagctagaaatagcaagttaaaataaggctagtccgttatcaacttgaaaaagtggcaccgagtcggtgcttcagtccctttctcgtcgatggtcagcacag

SEQ ID NO: 24100 - RNA, 127 nt, synthetic construct
  source 1..127: mol_type = other RNA
  modified_base 1: mod_base = OTHER; note = 2'O-methyl cytidine phosphorothioate
  modified_base 2: mod_base = OTHER; note = 2'O-methyl uridine phosphorothioate
  modified_base 3: mod_base = OTHER; note = 2'O-methyl guanosine phosphorothioate
  modified_base 124: mod_base = OTHER; note = cytidine phosphorothioate
  modified_base 125: mod_base = OTHER; note = 2'O-methyl adenosine phosphorothioate
  modified_base 126: mod_base = OTHER; note = 2'O-methyl cytidine phosphorothioate
  modified_base 127: mod_base = OTHER; note = 2'O-methyl adenosine
ctgtgctgaccatcgacaaggttttagagctagaaatagcaagttaaaataaggctagtccgttatcaacttgaaaaagtggcaccgagtcggtgcttcagtccctttctcgtcgatggtcagcaca

SEQ ID NO: 24101 - RNA, 126 nt, synthetic construct
  source 1..126: mol_type = other RNA
  modified_base 1: mod_base = OTHER; note = 2'O-methyl cytidine phosphorothioate
  modified_base 2: mod_base = OTHER; note = 2'O-methyl uridine phosphorothioate
  modified_base 3: mod_base = OTHER; note = 2'O-methyl guanosine phosphorothioate
  modified_base 123: mod_base = OTHER; note = guanosine phosphorothioate
  modified_base 124: mod_base = OTHER; note = 2'O-methyl cytidine phosphorothioate
  modified_base 125: mod_base = OTHER; note = 2'O-methyl adenosine phosphorothioate
  modified_base 126: mod_base = OTHER; note = 2'O-methyl cytidine
ctgtgctgaccatcgacaaggttttagagctagaaatagcaagttaaaataaggctagtccgttatcaacttgaaaaagtggcaccgagtcggtgcttcagtccctttctcgtcgatggtcagcac

SEQ ID NO: 24102 - RNA, 125 nt, synthetic construct
  source 1..125: mol_type = other RNA
  modified_base 1: mod_base = OTHER; note = 2'O-methyl cytidine phosphorothioate
  modified_base 2: mod_base = OTHER; note = 2'O-methyl uridine phosphorothioate
  modified_base 3: mod_base = OTHER; note = 2'O-methyl guanosine phosphorothioate
  modified_base 122: mod_base = OTHER; note = adenosine phosphorothioate
  modified_base 123: mod_base = OTHER; note = 2'O-methyl guanosine phosphorothioate
  modified_base 124: mod_base = OTHER; note = 2'O-methyl cytidine phosphorothioate
  modified_base 125: mod_base = OTHER; note = 2'O-methyl adenosine
ctgtgctgaccatcgacaaggttttagagctagaaatagcaagttaaaataaggctagtccgttatcaacttgaaaaagtggcaccgagtcggtgcttcagtccctttctcgtcgatggtcagca

SEQ ID NO: 24103 - RNA, 124 nt, synthetic construct
  source 1..124: mol_type = other RNA
  modified_base 1: mod_base = OTHER; note = 2'O-methyl cytidine phosphorothioate
  modified_base 2: mod_base = OTHER; note = 2'O-methyl uridine phosphorothioate
  modified_base 3: mod_base = OTHER; note = 2'O-methyl guanosine phosphorothioate
  modified_base 121: mod_base = OTHER; note = cytidine phosphorothioate
  modified_base 122: mod_base = OTHER; note = 2'O-methyl adenosine phosphorothioate
  modified_base 123: mod_base = OTHER; note = 2'O-methyl guanosine phosphorothioate
  modified_base 124: mod_base = OTHER; note = 2'O-methyl cytidine
ctgtgctgaccatcgacaaggttttagagctagaaatagcaagttaaaataaggctagtccgttatcaacttgaaaaagtggcaccgagtcggtgcttcagtccctttctcgtcgatggtcagc

SEQ ID NO: 24104 - RNA, 123 nt, synthetic construct
  source 1..123: mol_type = other RNA
  modified_base 1: mod_base = OTHER; note = 2'O-methyl cytidine phosphorothioate
  modified_base 2: mod_base = OTHER; note = 2'O-methyl uridine phosphorothioate
  modified_base 3: mod_base = OTHER; note = 2'O-methyl guanosine phosphorothioate
  modified_base 120: mod_base = OTHER; note = uridine phosphorothioate
  modified_base 121: mod_base = OTHER; note = 2'O-methyl cytidine phosphorothioate
  modified_base 122: mod_base = OTHER; note = 2'O-methyl adenosine phosphorothioate
  modified_base 123: mod_base = OTHER; note = 2'O-methyl guanosine
ctgtgctgaccatcgacaaggttttagagctagaaatagcaagttaaaataaggctagtccgttatcaacttgaaaaagtggcaccgagtcggtgcttcagtccctttctcgtcgatggtcag

SEQ ID NO: 24105 - RNA, 122 nt, synthetic construct
  source 1..122: mol_type = other RNA
  modified_base 1: mod_base = OTHER; note = 2'O-methyl cytidine phosphorothioate
  modified_base 2: mod_base = OTHER; note = 2'O-methyl uridine phosphorothioate
  modified_base 3: mod_base = OTHER; note = 2'O-methyl guanosine phosphorothioate
  modified_base 119: mod_base = OTHER; note = guanosine phosphorothioate
  modified_base 120: mod_base = OTHER; note = 2'O-methyl uridine phosphorothioate
  modified_base 121: mod_base = OTHER; note = 2'O-methyl cytidine phosphorothioate
  modified_base 122: mod_base = OTHER; note = 2'O-methyl adenosine
ctgtgctgaccatcgacaaggttttagagctagaaatagcaagttaaaataaggctagtccgttatcaacttgaaaaagtggcaccgagtcggtgcttcagtccctttctcgtcgatggtca

SEQ ID NO: 24106 - RNA, 121 nt, synthetic construct
  source 1..121: mol_type = other RNA
  modified_base 1: mod_base = OTHER; note = 2'O-methyl cytidine phosphorothioate
  modified_base 2: mod_base = OTHER; note = 2'O-methyl uridine phosphorothioate
  modified_base 3: mod_base = OTHER; note = 2'O-methyl guanosine phosphorothioate
  modified_base 118: mod_base = OTHER; note = guanosine phosphorothioate
  modified_base 119: mod_base = OTHER; note = 2'O-methyl guanosine phosphorothioate
  modified_base 120: mod_base = OTHER; note = 2'O-methyl uridine phosphorothioate
  modified_base 121: mod_base = OTHER; note = 2'O-methyl cytidine
ctgtgctgaccatcgacaaggttttagagctagaaatagcaagttaaaataaggctagtccgttatcaacttgaaaaagtggcaccgagtcggtgcttcagtccctttctcgtcgatggtc

SEQ ID NO: 24107 - RNA, 120 nt, synthetic construct
  source 1..120: mol_type = other RNA
  modified_base 1: mod_base = OTHER; note = 2'O-methyl cytidine phosphorothioate
  modified_base 2: mod_base = OTHER; note = 2'O-methyl uridine phosphorothioate
  modified_base 3: mod_base = OTHER; note = 2'O-methyl guanosine phosphorothioate
  modified_base 117: mod_base = OTHER; note = uridine phosphorothioate
  modified_base 118: mod_base = OTHER; note = 2'O-methyl guanosine phosphorothioate
  modified_base 119: mod_base = OTHER; note = 2'O-methyl guanosine phosphorothioate
  modified_base 120: mod_base = OTHER; note = 2'O-methyl uridine
ctgtgctgaccatcgacaaggttttagagctagaaatagcaagttaaaataaggctagtccgttatcaacttgaaaaagtggcaccgagtcggtgcttcagtccctttctcgtcgatggt

SEQ ID NO: 24108 - RNA, 119 nt, synthetic construct
  source 1..119: mol_type = other RNA
  modified_base 1: mod_base = OTHER; note = 2'O-methyl cytidine phosphorothioate
  modified_base 2: mod_base = OTHER; note = 2'O-methyl uridine phosphorothioate
  modified_base 3: mod_base = OTHER; note = 2'O-methyl guanosine phosphorothioate
  modified_base 116: mod_base = OTHER; note = adenosine phosphorothioate
  modified_base 117: mod_base = OTHER; note = 2'O-methyl uridine phosphorothioate
  modified_base 118: mod_base = OTHER; note = 2'O-methyl guanosine phosphorothioate
  modified_base 119: mod_base = OTHER; note = 2'O-methyl guanosine
ctgtgctgaccatcgacaaggttttagagctagaaatagcaagttaaaataaggctagtccgttatcaacttgaaaaagtggcaccgagtcggtgcttcagtccctttctcgtcgatgg

SEQ ID NO: 24109 - RNA, 125 nt, synthetic construct
  source 1..125: mol_type = other RNA
  modified_base 1: mod_base = OTHER; note = 2'O-methyl cytidine phosphorothioate
  modified_base 2: mod_base = OTHER; note = 2'O-methyl uridine phosphorothioate
  modified_base 3: mod_base = OTHER; note = 2'O-methyl guanosine phosphorothioate
  modified_base 122: mod_base = OTHER; note = adenosine phosphorothioate
  modified_base 123: mod_base = OTHER; note = 2'O-methyl cytidine phosphorothioate
  modified_base 124: mod_base = OTHER; note = 2'O-methyl adenosine phosphorothioate
  modified_base 125: mod_base = OTHER; note = 2'O-methyl guanosine
ctgtgctgaccatcgacaaggttttagagctagaaatagcaagttaaaataaggctagtccgttatcaacttgaaaaagtggcaccgagtcggtgcagtccctttctcgtcgatggtcagcacag

SEQ ID NO: 24110 - RNA, 124 nt, synthetic construct
  source 1..124: mol_type = other RNA
  modified_base 1: mod_base = OTHER; note = 2'O-methyl cytidine phosphorothioate
  modified_base 2: mod_base = OTHER; note = 2'O-methyl uridine phosphorothioate
  modified_base 3: mod_base = OTHER; note = 2'O-methyl guanosine phosphorothioate
  modified_base 121: mod_base = OTHER; note = cytidine phosphorothioate
  modified_base 122: mod_base = OTHER; note = 2'O-methyl adenosine phosphorothioate
  modified_base 123: mod_base = OTHER; note = 2'O-methyl cytidine phosphorothioate
  modified_base 124: mod_base = OTHER; note = 2'O-methyl adenosine
ctgtgctgaccatcgacaaggttttagagctagaaatagcaagttaaaataaggctagtccgttatcaacttgaaaaagtggcaccgagtcggtgcagtccctttctcgtcgatggtcagcaca

SEQ ID NO: 24111 - RNA, 123 nt, synthetic construct
  source 1..123: mol_type = other RNA
  modified_base 1: mod_base = OTHER; note = 2'O-methyl cytidine phosphorothioate
  modified_base 2: mod_base = OTHER; note = 2'O-methyl uridine phosphorothioate
  modified_base 3: mod_base = OTHER; note = 2'O-methyl guanosine phosphorothioate
  modified_base 120: mod_base = OTHER; note = guanosine phosphorothioate
  modified_base 121: mod_base = OTHER; note = 2'O-methyl cytidine phosphorothioate
  modified_base 122: mod_base = OTHER; note = 2'O-methyl adenosine phosphorothioate
  modified_base 123: mod_base = OTHER; note = 2'O-methyl cytidine
ctgtgctgaccatcgacaaggttttagagctagaaatagcaagttaaaataaggctagtccgttatcaacttgaaaaagtggcaccgagtcggtgcagtccctttctcgtcgatggtcagcac

SEQ ID NO: 24112 - RNA, 122 nt, synthetic construct
  source 1..122: mol_type = other RNA
  modified_base 1: mod_base = OTHER; note = 2'O-methyl cytidine phosphorothioate
  modified_base 2: mod_base = OTHER; note = 2'O-methyl uridine phosphorothioate
  modified_base 3: mod_base = OTHER; note = 2'O-methyl guanosine phosphorothioate
  modified_base 119: mod_base = OTHER; note = adenosine phosphorothioate
  modified_base 120: mod_base = OTHER; note = 2'O-methyl guanosine phosphorothioate
  modified_base 121: mod_base = OTHER; note = 2'O-methyl cytidine phosphorothioate
  modified_base 122: mod_base = OTHER; note = 2'O-methyl adenosine
ctgtgctgaccatcgacaaggttttagagctagaaatagcaagttaaaataaggctagtccgttatcaacttgaaaaagtggcaccgagtcggtgcagtccctttctcgtcgatggtcagca

SEQ ID NO: 24113 - RNA, 121 nt, synthetic construct
  source 1..121: mol_type = other RNA
  modified_base 1: mod_base = OTHER; note = 2'O-methyl cytidine phosphorothioate
  modified_base 2: mod_base = OTHER; note = 2'O-methyl uridine phosphorothioate
  modified_base 3: mod_base = OTHER; note = 2'O-methyl guanosine phosphorothioate
  modified_base 118: mod_base = OTHER; note = cytidine phosphorothioate
  modified_base 119: mod_base = OTHER; note = 2'O-methyl adenosine phosphorothioate
  modified_base 120: mod_base = OTHER; note = 2'O-methyl guanosine phosphorothioate
  modified_base 121: mod_base = OTHER; note = 2'O-methyl cytidine
ctgtgctgaccatcgacaaggttttagagctagaaatagcaagttaaaataaggctagtccgttatcaacttgaaaaagtggcaccgagtcggtgcagtccctttctcgtcgatggtcagc

SEQ ID NO: 24114 - RNA, 120 nt, synthetic construct
  source 1..120: mol_type = other RNA
  modified_base 1: mod_base = OTHER; note = 2'O-methyl cytidine phosphorothioate
  modified_base 2: mod_base = OTHER; note = 2'O-methyl uridine phosphorothioate
  modified_base 3: mod_base = OTHER; note = 2'O-methyl guanosine phosphorothioate
  modified_base 117: mod_base = OTHER; note = uridine phosphorothioate
  modified_base 118: mod_base = OTHER; note = 2'O-methyl cytidine phosphorothioate
  modified_base 119: mod_base = OTHER; note = 2'O-methyl adenosine phosphorothioate
  modified_base 120: mod_base = OTHER; note = 2'O-methyl guanosine
ctgtgctgaccatcgacaaggttttagagctagaaatagcaagttaaaataaggctagtccgttatcaacttgaaaaagtggcaccgagtcggtgcagtccctttctcgtcgatggtcag

SEQ ID NO: 24115 - RNA, 119 nt, synthetic construct
  source 1..119: mol_type = other RNA
  modified_base 1: mod_base = OTHER; note = 2'O-methyl cytidine phosphorothioate
  modified_base 2: mod_base = OTHER; note = 2'O-methyl uridine phosphorothioate
  modified_base 3: mod_base = OTHER; note = 2'O-methyl guanosine phosphorothioate
  modified_base 116: mod_base = OTHER; note = guanosine phosphorothioate
  modified_base 117: mod_base = OTHER; note = 2'O-methyl uridine phosphorothioate
  modified_base 118: mod_base = OTHER; note = 2'O-methyl cytidine phosphorothioate
  modified_base 119: mod_base = OTHER; note = 2'O-methyl adenosine
ctgtgctgaccatcgacaaggttttagagctagaaatagcaagttaaaataaggctagtccgttatcaacttgaaaaagtggcaccgagtcggtgcagtccctttctcgtcgatggtca

SEQ ID NO: 24116 - RNA, 118 nt, synthetic construct
  source 1..118: mol_type = other RNA
  modified_base 1: mod_base = OTHER; note = 2'O-methyl cytidine phosphorothioate
  modified_base 2: mod_base = OTHER; note = 2'O-methyl uridine phosphorothioate
  modified_base 3: mod_base = OTHER; note = 2'O-methyl guanosine phosphorothioate
  modified_base 115: mod_base = OTHER; note = guanosine phosphorothioate
  modified_base 116: mod_base = OTHER; note = 2'O-methyl guanosine phosphorothioate
  modified_base 117: mod_base = OTHER; note = 2'O-methyl uridine phosphorothioate
  modified_base 118: mod_base = OTHER; note = 2'O-methyl cytidine
ctgtgctgaccatcgacaaggttttagagctagaaatagcaagttaaaataaggctagtccgttatcaacttgaaaaagtggcaccgagtcggtgcagtccctttctcgtcgatggtc

SEQ ID NO: 24117 - RNA, 117 nt, synthetic construct
  source 1..117: mol_type = other RNA
  modified_base 1: mod_base = OTHER; note = 2'O-methyl cytidine phosphorothioate
  modified_base 2: mod_base = OTHER; note = 2'O-methyl uridine phosphorothioate
  modified_base 3: mod_base = OTHER; note = 2'O-methyl guanosine phosphorothioate
  modified_base 114: mod_base = OTHER; note = uridine phosphorothioate
  modified_base 115: mod_base = OTHER; note = 2'O-methyl guanosine phosphorothioate
  modified_base 116: mod_base = OTHER; note = 2'O-methyl guanosine phosphorothioate
  modified_base 117: mod_base = OTHER; note = 2'O-methyl uridine
ctgtgctgaccatcgacaaggttttagagctagaaatagcaagttaaaataaggctagtccgttatcaacttgaaaaagtggcaccgagtcggtgcagtccctttctcgtcgatggt

SEQ ID NO: 24118 - RNA, 116 nt, synthetic construct
  source 1..116: mol_type = other RNA
  modified_base 1: mod_base = OTHER; note = 2'O-methyl cytidine phosphorothioate
  modified_base 2: mod_base = OTHER; note = 2'O-methyl uridine phosphorothioate
  modified_base 3: mod_base = OTHER; note = 2'O-methyl guanosine phosphorothioate
  modified_base 113: mod_base = OTHER; note = adenosine phosphorothioate
  modified_base 114: mod_base = OTHER; note = 2'O-methyl uridine phosphorothioate
  modified_base 115: mod_base = OTHER; note = 2'O-methyl guanosine phosphorothioate
  modified_base 116: mod_base = OTHER; note = 2'O-methyl guanosine
ctgtgctgaccatcgacaaggttttagagctagaaatagcaagttaaaataaggctagtccgttatcaacttgaaaaagtggcaccgagtcggtgcagtccctttctcgtcgatgg

SEQ ID NO: 24119 - RNA, 123 nt, synthetic construct
  source 1..123: mol_type = other RNA
  modified_base 1: mod_base = OTHER; note = 2'O-methyl cytidine phosphorothioate
  modified_base 2: mod_base = OTHER; note = 2'O-methyl uridine phosphorothioate
  modified_base 3: mod_base = OTHER; note = 2'O-methyl guanosine phosphorothioate
  modified_base 120: mod_base = OTHER; note = adenosine phosphorothioate
  modified_base 121: mod_base = OTHER; note = 2'O-methyl cytidine phosphorothioate
  modified_base 122: mod_base = OTHER; note = 2'O-methyl adenosine phosphorothioate
  modified_base 123: mod_base = OTHER; note = 2'O-methyl guanosine
ctgtgctgaccatcgacaaggttttagagctagaaatagcaagttaaaataaggctagtccgttatcaacttgaaaaagtggcaccgagtcggtgctccctttctcgtcgatggtcagcacag

SEQ ID NO: 24120 - RNA, 122 nt, synthetic construct
  source 1..122: mol_type = other RNA
  modified_base 1: mod_base = OTHER; note = 2'O-methyl cytidine phosphorothioate
  modified_base 2: mod_base = OTHER; note = 2'O-methyl uridine phosphorothioate
  modified_base 3: mod_base = OTHER; note = 2'O-methyl guanosine phosphorothioate
  modified_base 119: mod_base = OTHER; note = cytidine phosphorothioate
  modified_base 120: mod_base = OTHER; note = 2'O-methyl adenosine phosphorothioate
  modified_base 121: mod_base = OTHER; note = 2'O-methyl cytidine phosphorothioate
  modified_base 122: mod_base = OTHER; note = 2'O-methyl adenosine
ctgtgctgaccatcgacaaggttttagagctagaaatagcaagttaaaataaggctagtccgttatcaacttgaaaaagtggcaccgagtcggtgctccctttctcgtcgatggtcagcaca

SEQ ID NO: 24121 - RNA, 121 nt, synthetic construct
  source 1..121: mol_type = other RNA
  modified_base 1: mod_base = OTHER; note = 2'O-methyl cytidine phosphorothioate
  modified_base 2: mod_base = OTHER; note = 2'O-methyl uridine phosphorothioate
  modified_base 3: mod_base = OTHER; note = 2'O-methyl guanosine phosphorothioate
  modified_base 118: mod_base = OTHER; note = guanosine phosphorothioate
  modified_base 119: mod_base = OTHER; note = 2'O-methyl cytidine phosphorothioate
  modified_base 120: mod_base = OTHER; note = 2'O-methyl adenosine phosphorothioate
  modified_base 121: mod_base = OTHER; note = 2'O-methyl cytidine
ctgtgctgaccatcgacaaggttttagagctagaaatagcaagttaaaataaggctagtccgttatcaacttgaaaaagtggcaccgagtcggtgctccctttctcgtcgatggtcagcac

SEQ ID NO: 24122 - RNA, 120 nt, synthetic construct
  source 1..120: mol_type = other RNA
  modified_base 1: mod_base = OTHER; note = 2'O-methyl cytidine phosphorothioate
  modified_base 2: mod_base = OTHER; note = 2'O-methyl uridine phosphorothioate
  modified_base 3: mod_base = OTHER; note = 2'O-methyl guanosine phosphorothioate
  modified_base 117: mod_base = OTHER; note = adenosine phosphorothioate
  modified_base 118: mod_base = OTHER; note = 2'O-methyl guanosine phosphorothioate
  modified_base 119: mod_base = OTHER; note = 2'O-methyl cytidine phosphorothioate
  modified_base 120: mod_base = OTHER; note = 2'O-methyl adenosine
ctgtgctgaccatcgacaaggttttagagctagaaatagcaagttaaaataaggctagtccgttatcaacttgaaaaagtggcaccgagtcggtgctccctttctcgtcgatggtcagca

SEQ ID NO: 24123 - RNA, 119 nt, synthetic construct
  source 1..119: mol_type = other RNA
  modified_base 1: mod_base = OTHER; note = 2'O-methyl cytidine phosphorothioate
  modified_base 2: mod_base = OTHER; note = 2'O-methyl uridine phosphorothioate
  modified_base 3: mod_base = OTHER; note = 2'O-methyl guanosine phosphorothioate
  modified_base 116: mod_base = OTHER; note = cytidine phosphorothioate
  modified_base 117: mod_base = OTHER; note = 2'O-methyl adenosine phosphorothioate
  modified_base 118: mod_base = OTHER; note = 2'O-methyl guanosine phosphorothioate
  modified_base 119: mod_base = OTHER; note = 2'O-methyl cytidine
ctgtgctgaccatcgacaaggttttagagctagaaatagcaagttaaaataaggctagtccgttatcaacttgaaaaagtggcaccgagtcggtgctccctttctcgtcgatggtcagc

SEQ ID NO: 24124 - RNA, 118 nt, synthetic construct
  source 1..118: mol_type = other RNA
  modified_base 1: mod_base = OTHER; note = 2'O-methyl cytidine phosphorothioate
  modified_base 2: mod_base = OTHER; note = 2'O-methyl uridine phosphorothioate
  modified_base 3: mod_base = OTHER; note = 2'O-methyl guanosine phosphorothioate
  modified_base 115: mod_base = OTHER; note = uridine phosphorothioate
  modified_base 116: mod_base = OTHER; note = 2'O-methyl cytidine phosphorothioate
  modified_base 117: mod_base = OTHER; note = 2'O-methyl adenosine phosphorothioate
  modified_base 118: mod_base = OTHER; note = 2'O-methyl guanosine
ctgtgctgaccatcgacaaggttttagagctagaaatagcaagttaaaataaggctagtccgttatcaacttgaaaaagtggcaccgagtcggtgctccctttctcgtcgatggtcag

SEQ ID NO: 24125 - RNA, 117 nt, synthetic construct
  source 1..117: mol_type = other RNA
  modified_base 1: mod_base = OTHER; note = 2'O-methyl cytidine phosphorothioate
  modified_base 2: mod_base = OTHER; note = 2'O-methyl uridine phosphorothioate
  modified_base 3: mod_base = OTHER; note = 2'O-methyl guanosine phosphorothioate
  modified_base 114: mod_base = OTHER; note = guanosine phosphorothioate
  modified_base 115: mod_base = OTHER; note = 2'O-methyl uridine phosphorothioate
  modified_base 116: mod_base = OTHER; note = 2'O-methyl cytidine phosphorothioate
  modified_base 117: mod_base = OTHER; note = 2'O-methyl adenosine
ctgtgctgaccatcgacaaggttttagagctagaaatagcaagttaaaataaggctagtccgttatcaacttgaaaaagtggcaccgagtcggtgctccctttctcgtcgatggtca

SEQ ID NO: 24126 - RNA, 116 nt, synthetic construct
  source 1..116: mol_type = other RNA
  modified_base 1: mod_base = OTHER; note = 2'O-methyl cytidine phosphorothioate
  modified_base 2: mod_base = OTHER; note = 2'O-methyl uridine phosphorothioate
  modified_base 3: mod_base = OTHER; note = 2'O-methyl guanosine phosphorothioate
  modified_base 113: mod_base = OTHER; note = guanosine phosphorothioate
  modified_base 114: mod_base = OTHER; note = 2'O-methyl guanosine phosphorothioate
  modified_base 115: mod_base = OTHER; note = 2'O-methyl uridine phosphorothioate
  modified_base 116: mod_base = OTHER; note = 2'O-methyl cytidine
ctgtgctgaccatcgacaaggttttagagctagaaatagcaagttaaaataaggctagtccgttatcaacttgaaaaagtggcaccgagtcggtgctccctttctcgtcgatggtc

SEQ ID NO: 24127 - RNA, 115 nt, synthetic construct
  source 1..115: mol_type = other RNA
  modified_base 1: mod_base = OTHER; note = 2'O-methyl cytidine phosphorothioate
  modified_base 2: mod_base = OTHER; note = 2'O-methyl uridine phosphorothioate
  modified_base 3: mod_base = OTHER; note = 2'O-methyl guanosine phosphorothioate
  modified_base 112: mod_base = OTHER; note = uridine phosphorothioate
  modified_base 113: mod_base = OTHER; note = 2'O-methyl guanosine phosphorothioate
  modified_base 114: mod_base = OTHER; note = 2'O-methyl guanosine phosphorothioate
  modified_base 115: mod_base = OTHER; note = 2'O-methyl uridine
ctgtgctgaccatcgacaaggttttagagctagaaatagcaagttaaaataaggctagtccgttatcaacttgaaaaagtggcaccgagtcggtgctccctttctcgtcgatggt

SEQ ID NO: 24128 - RNA, 114 nt, synthetic construct
  source 1..114: mol_type = other RNA
  modified_base 1: mod_base = OTHER; note = 2'O-methyl cytidine phosphorothioate
  modified_base 2: mod_base = OTHER; note = 2'O-methyl uridine phosphorothioate
  modified_base 3: mod_base = OTHER; note = 2'O-methyl guanosine phosphorothioate
  modified_base 111: mod_base = OTHER; note = adenosine phosphorothioate
  modified_base 112: mod_base = OTHER; note = 2'O-methyl uridine phosphorothioate
  modified_base 113: mod_base = OTHER; note = 2'O-methyl guanosine phosphorothioate
  modified_base 114: mod_base = OTHER; note = 2'O-methyl guanosine
ctgtgctgaccatcgacaaggttttagagctagaaatagcaagttaaaataaggctagtccgttatcaacttgaaaaagtggcaccgagtcggtgctccctttctcgtcgatgg

SEQ ID NO: 24129 - RNA, 121 nt, synthetic construct
  source 1..121: mol_type = other RNA
  modified_base 1: mod_base = OTHER; note = 2'O-methyl cytidine phosphorothioate
  modified_base 2: mod_base = OTHER; note = 2'O-methyl uridine phosphorothioate
  modified_base 3: mod_base = OTHER; note = 2'O-methyl guanosine phosphorothioate
  modified_base 118: mod_base = OTHER; note = adenosine phosphorothioate
  modified_base 119: mod_base = OTHER; note = 2'O-methyl cytidine phosphorothioate
  modified_base 120: mod_base = OTHER; note = 2'O-methyl adenosine phosphorothioate
  modified_base 121: mod_base = OTHER; note = 2'O-methyl guanosine
ctgtgctgaccatcgacaaggttttagagctagaaatagcaagttaaaataaggctagtccgttatcaacttgaaaaagtggcaccgagtcggtgccctttctcgtcgatggtcagcacag

SEQ ID NO: 24130 - RNA, 120 nt, synthetic construct
  source 1..120: mol_type = other RNA
  modified_base 1: mod_base = OTHER; note = 2'O-methyl cytidine phosphorothioate
  modified_base 2: mod_base = OTHER; note = 2'O-methyl uridine phosphorothioate
  modified_base 3: mod_base = OTHER; note = 2'O-methyl guanosine phosphorothioate
  modified_base 117: mod_base = OTHER; note = cytidine phosphorothioate
  modified_base 118: mod_base = OTHER; note = 2'O-methyl adenosine phosphorothioate
  modified_base 119: mod_base = OTHER; note = 2'O-methyl cytidine phosphorothioate
  modified_base 120: mod_base = OTHER; note = 2'O-methyl adenosine
ctgtgctgaccatcgacaaggttttagagctagaaatagcaagttaaaataaggctagtccgttatcaacttgaaaaagtggcaccgagtcggtgccctttctcgtcgatggtcagcaca

SEQ ID NO: 24131 - RNA, 119 nt, synthetic construct
  source 1..119: mol_type = other RNA
  modified_base 1: mod_base = OTHER; note = 2'O-methyl cytidine phosphorothioate
  modified_base 2: mod_base = OTHER; note = 2'O-methyl uridine phosphorothioate
  modified_base 3: mod_base = OTHER; note = 2'O-methyl guanosine phosphorothioate
  modified_base 116: mod_base = OTHER; note = guanosine phosphorothioate
  modified_base 117: mod_base = OTHER; note = 2'O-methyl cytidine phosphorothioate
  modified_base 118: mod_base = OTHER; note = 2'O-methyl adenosine phosphorothioate
  modified_base 119: mod_base = OTHER; note = 2'O-methyl cytidine
ctgtgctgaccatcgacaaggttttagagctagaaatagcaagttaaaataaggctagtccgttatcaacttgaaaaagtggcaccgagtcggtgccctttctcgtcgatggtcagcac

SEQ ID NO: 24132 - RNA, 118 nt, synthetic construct
  source 1..118: mol_type = other RNA
  modified_base 1: mod_base = OTHER; note = 2'O-methyl cytidine phosphorothioate
  modified_base 2: mod_base = OTHER; note = 2'O-methyl uridine phosphorothioate
  modified_base 3: mod_base = OTHER; note = 2'O-methyl guanosine phosphorothioate
  modified_base 115: mod_base = OTHER; note = adenosine phosphorothioate
  modified_base 116: mod_base = OTHER; note = 2'O-methyl guanosine phosphorothioate
  modified_base 117: mod_base = OTHER; note = 2'O-methyl cytidine phosphorothioate
  modified_base 118: mod_base = OTHER; note = 2'O-methyl adenosine
ctgtgctgaccatcgacaaggttttagagctagaaatagcaagttaaaataaggctagtccgttatcaacttgaaaaagtggcaccgagtcggtgccctttctcgtcgatggtcagca

SEQ ID NO: 24133 - RNA, 117 nt, synthetic construct
  source 1..117: mol_type = other RNA
  modified_base 1: mod_base = OTHER; note = 2'O-methyl cytidine phosphorothioate
  modified_base 2: mod_base = OTHER; note = 2'O-methyl uridine phosphorothioate
  modified_base 3: mod_base = OTHER; note = 2'O-methyl guanosine phosphorothioate
  modified_base 114: mod_base = OTHER; note = cytidine phosphorothioate
  modified_base 115: mod_base = OTHER; note = 2'O-methyl adenosine phosphorothioate
  modified_base 116: mod_base = OTHER; note = 2'O-methyl guanosine phosphorothioate
  modified_base 117: mod_base = OTHER; note = 2'O-methyl cytidine
ctgtgctgaccatcgacaaggttttagagctagaaatagcaagttaaaataaggctagtccgttatcaacttgaaaaagtggcaccgagtcggtgccctttctcgtcgatggtcagc

SEQ ID NO: 24134 - RNA, 116 nt, synthetic construct
  source 1..116: mol_type = other RNA
  modified_base 1: mod_base = OTHER; note = 2'O-methyl cytidine phosphorothioate
  modified_base 2: mod_base = OTHER; note = 2'O-methyl uridine phosphorothioate
  modified_base 3: mod_base = OTHER; note = 2'O-methyl guanosine phosphorothioate
  modified_base 113: mod_base = OTHER; note = uridine phosphorothioate
  modified_base 114: mod_base = OTHER; note = 2'O-methyl cytidine phosphorothioate
  modified_base 115: mod_base = OTHER; note = 2'O-methyl adenosine phosphorothioate
  modified_base 116: mod_base = OTHER; note = 2'O-methyl guanosine
ctgtgctgaccatcgacaaggttttagagctagaaatagcaagttaaaataaggctagtccgttatcaacttgaaaaagtggcaccgagtcggtgccctttctcgtcgatggtcag

SEQ ID NO: 24135 - RNA, 115 nt, synthetic construct
  source 1..115: mol_type = other RNA
  modified_base 1: mod_base = OTHER; note = 2'O-methyl cytidine phosphorothioate
  modified_base 2: mod_base = OTHER; note = 2'O-methyl uridine phosphorothioate
  modified_base 3: mod_base = OTHER; note = 2'O-methyl guanosine phosphorothioate
  modified_base 112: mod_base = OTHER; note = guanosine phosphorothioate
  modified_base 113: mod_base = OTHER; note = 2'O-methyl uridine phosphorothioate
  modified_base 114: mod_base = OTHER; note = 2'O-methyl cytidine phosphorothioate
  modified_base 115: mod_base = OTHER; note = 2'O-methyl adenosine
ctgtgctgaccatcgacaaggttttagagctagaaatagcaagttaaaataaggctagtccgttatcaacttgaaaaagtggcaccgagtcggtgccctttctcgtcgatggtca

SEQ ID NO: 24136 - RNA, 114 nt, synthetic construct
  source 1..114: mol_type = other RNA
  modified_base 1: mod_base = OTHER; note = 2'O-methyl cytidine phosphorothioate
  modified_base 2: mod_base = OTHER; note = 2'O-methyl uridine phosphorothioate
  modified_base 3: mod_base = OTHER; note = 2'O-methyl guanosine phosphorothioate
  modified_base 111: mod_base = OTHER; note = guanosine phosphorothioate
  modified_base 112: mod_base = OTHER; note = 2'O-methyl guanosine phosphorothioate
  modified_base 113: mod_base = OTHER; note = 2'O-methyl uridine phosphorothioate
  modified_base 114: mod_base = OTHER; note = 2'O-methyl cytidine
ctgtgctgaccatcgacaaggttttagagctagaaatagcaagttaaaataaggctagtccgttatcaacttgaaaaagtggcaccgagtcggtgccctttctcgtcgatggtc

SEQ ID NO: 24137 - RNA, 113 nt, synthetic construct
  source 1..113: mol_type = other RNA
  modified_base 1: mod_base = OTHER; note = 2'O-methyl cytidine phosphorothioate
  modified_base 2: mod_base = OTHER; note = 2'O-methyl uridine phosphorothioate
  modified_base 3: mod_base = OTHER; note = 2'O-methyl guanosine phosphorothioate
  modified_base 110: mod_base = OTHER; note = uridine phosphorothioate
  modified_base 111: mod_base = OTHER; note = 2'O-methyl guanosine phosphorothioate
  modified_base 112: mod_base = OTHER; note = 2'O-methyl guanosine phosphorothioate
  modified_base 113: mod_base = OTHER; note = 2'O-methyl uridine
ctgtgctgaccatcgacaaggttttagagctagaaatagcaagttaaaataaggctagtccgttatcaacttgaaaaagtggcaccgagtcggtgccctttctcgtcgatggt

SEQ ID NO: 24138 - RNA, 112 nt, synthetic construct
  source 1..112: mol_type = other RNA
  modified_base 1: mod_base = OTHER; note = 2'O-methyl cytidine phosphorothioate
  modified_base 2: mod_base = OTHER; note = 2'O-methyl uridine phosphorothioate
  modified_base 3: mod_base = OTHER; note = 2'O-methyl guanosine phosphorothioate
  modified_base 109: mod_base = OTHER; note = adenosine phosphorothioate
  modified_base 110: mod_base = OTHER; note = 2'O-methyl uridine phosphorothioate
  modified_base 111: mod_base = OTHER; note = 2'O-methyl guanosine phosphorothioate
  modified_base 112: mod_base = OTHER; note = 2'O-methyl guanosine
ctgtgctgaccatcgacaaggttttagagctagaaatagcaagttaaaataaggctagtccgttatcaacttgaaaaagtggcaccgagtcggtgccctttctcgtcgatgg

SEQ ID NO: 24139 - RNA, 119 nt, synthetic construct
  source 1..119: mol_type = other RNA
  modified_base 1: mod_base = OTHER; note = 2'O-methyl cytidine phosphorothioate
  modified_base 2: mod_base = OTHER; note = 2'O-methyl uridine phosphorothioate
  modified_base 3: mod_base = OTHER; note = 2'O-methyl guanosine phosphorothioate
  modified_base 116: mod_base = OTHER; note = adenosine phosphorothioate
  modified_base 117: mod_base = OTHER; note = 2'O-methyl cytidine phosphorothioate
  modified_base 118: mod_base = OTHER; note = 2'O-methyl adenosine phosphorothioate
  modified_base 119: mod_base = OTHER; note = 2'O-methyl guanosine
ctgtgctgaccatcgacaaggttttagagctagaaatagcaagttaaaataaggctagtccgttatcaacttgaaaaagtggcaccgagtcggtgctttctcgtcgatggtcagcacag

SEQ ID NO: 24140 - RNA, 118 nt, synthetic construct
  source 1..118: mol_type = other RNA
  modified_base 1: mod_base = OTHER; note = 2'O-methyl cytidine phosphorothioate
  modified_base 2: mod_base = OTHER; note = 2'O-methyl uridine phosphorothioate
  modified_base 3: mod_base = OTHER; note = 2'O-methyl guanosine phosphorothioate
  modified_base 115: mod_base = OTHER; note = cytidine phosphorothioate
  modified_base 116: mod_base = OTHER; note = 2'O-methyl adenosine phosphorothioate
  modified_base 117: mod_base = OTHER; note = 2'O-methyl cytidine phosphorothioate
  modified_base 118: mod_base = OTHER; note = 2'O-methyl adenosine
ctgtgctgaccatcgacaaggttttagagctagaaatagcaagttaaaataaggctagtccgttatcaacttgaaaaagtggcaccgagtcggtgctttctcgtcgatggtcagcaca

SEQ ID NO: 24141 - RNA, 117 nt, synthetic construct
  source 1..117: mol_type = other RNA
  modified_base 1: mod_base = OTHER; note = 2'O-methyl cytidine phosphorothioate
  modified_base 2: mod_base = OTHER; note = 2'O-methyl uridine phosphorothioate
  modified_base 3: mod_base = OTHER; note = 2'O-methyl guanosine phosphorothioate
  modified_base 114: mod_base = OTHER; note = guanosine phosphorothioate
  modified_base 115: mod_base = OTHER; note = 2'O-methyl cytidine phosphorothioate
  modified_base 116: mod_base = OTHER; note = 2'O-methyl adenosine phosphorothioate
  modified_base 117: mod_base = OTHER; note = 2'O-methyl cytidine
ctgtgctgaccatcgacaaggttttagagctagaaatagcaagttaaaataaggctagtccgttatcaacttgaaaaagtggcaccgagtcggtgctttctcgtcgatggtcagcac

SEQ ID NO: 24142 - RNA, 116 nt, synthetic construct
  source 1..116: mol_type = other RNA
  modified_base 1: mod_base = OTHER; note = 2'O-methyl cytidine phosphorothioate
  modified_base 2: mod_base = OTHER; note = 2'O-methyl uridine phosphorothioate
  modified_base 3: mod_base = OTHER; note = 2'O-methyl guanosine phosphorothioate
  modified_base 113: mod_base = OTHER; note = adenosine phosphorothioate
  modified_base 114: mod_base = OTHER; note = 2'O-methyl guanosine phosphorothioate
  modified_base 115: mod_base = OTHER; note = 2'O-methyl cytidine phosphorothioate
  modified_base 116: mod_base = OTHER; note = 2'O-methyl adenosine
ctgtgctgaccatcgacaaggttttagagctagaaatagcaagttaaaataaggctagtccgttatcaacttgaaaaagtggcaccgagtcggtgctttctcgtcgatggtcagca

SEQ ID NO: 24143 - RNA, 115 nt, synthetic construct
  source 1..115: mol_type = other RNA
  modified_base 1: mod_base = OTHER; note = 2'O-methyl cytidine phosphorothioate
  modified_base 2: mod_base = OTHER; note = 2'O-methyl uridine phosphorothioate
  modified_base 3: mod_base = OTHER; note = 2'O-methyl guanosine phosphorothioate
  modified_base 112: mod_base = OTHER; note = cytidine phosphorothioate
  modified_base 113: mod_base = OTHER; note = 2'O-methyl adenosine phosphorothioate
  modified_base 114: mod_base = OTHER; note = 2'O-methyl guanosine phosphorothioate
  modified_base 115: mod_base = OTHER; note = 2'O-methyl cytidine
ctgtgctgaccatcgacaaggttttagagctagaaatagcaagttaaaataaggctagtccgttatcaacttgaaaaagtggcaccgagtcggtgctttctcgtcgatggtcagc

SEQ ID NO: 24144 - RNA, 114 nt, synthetic construct
  source 1..114: mol_type = other RNA
  modified_base 1: mod_base = OTHER; note = 2'O-methyl cytidine phosphorothioate
  modified_base 2: mod_base = OTHER; note = 2'O-methyl uridine phosphorothioate
  modified_base 3: mod_base = OTHER; note = 2'O-methyl guanosine phosphorothioate
  modified_base 111: mod_base = OTHER; note = uridine phosphorothioate
  modified_base 112: mod_base = OTHER; note = 2'O-methyl cytidine phosphorothioate
  modified_base 113: mod_base = OTHER; note = 2'O-methyl adenosine phosphorothioate
  modified_base 114: mod_base = OTHER; note = 2'O-methyl guanosine
ctgtgctgaccatcgacaaggttttagagctagaaatagcaagttaaaataaggctagtccgttatcaacttgaaaaagtggcaccgagtcggtgctttctcgtcgatggtcag

SEQ ID NO: 24145 - RNA, 113 nt, synthetic construct
  source 1..113: mol_type = other RNA
  modified_base 1: mod_base = OTHER; note = 2'O-methyl cytidine phosphorothioate
  modified_base 2: mod_base = OTHER; note = 2'O-methyl uridine phosphorothioate
  modified_base 3: mod_base = OTHER; note = 2'O-methyl guanosine phosphorothioate
  modified_base 110: mod_base = OTHER; note = guanosine phosphorothioate
  modified_base 111: mod_base = OTHER; note = 2'O-methyl uridine phosphorothioate
  modified_base 112: mod_base = OTHER; note = 2'O-methyl cytidine phosphorothioate
  modified_base 113: mod_base = OTHER; note = 2'O-methyl adenosine
ctgtgctgaccatcgacaaggttttagagctagaaatagcaagttaaaataaggctagtccgttatcaacttgaaaaagtggcaccgagtcggtgctttctcgtcgatggtca

SEQ ID NO: 24146 - RNA, 112 nt, synthetic construct
  source 1..112: mol_type = other RNA
  modified_base 1: mod_base = OTHER; note = 2'O-methyl cytidine phosphorothioate
  modified_base 2: mod_base = OTHER; note = 2'O-methyl uridine phosphorothioate
  modified_base 3: mod_base = OTHER; note = 2'O-methyl guanosine phosphorothioate
  modified_base 109: mod_base = OTHER; note = guanosine phosphorothioate
  modified_base 110: mod_base = OTHER; note = 2'O-methyl guanosine phosphorothioate
  modified_base 111: mod_base = OTHER; note = 2'O-methyl uridine phosphorothioate
  modified_base 112: mod_base = OTHER; note = 2'O-methyl cytidine
ctgtgctgaccatcgacaaggttttagagctagaaatagcaagttaaaataaggctagtccgttatcaacttgaaaaagtggcaccgagtcggtgctttctcgtcgatggtc

SEQ ID NO: 24147 - RNA, 111 nt, synthetic construct
  source 1..111: mol_type = other RNA
  modified_base 1: mod_base = OTHER; note = 2'O-methyl cytidine phosphorothioate
  modified_base 2: mod_base = OTHER; note = 2'O-methyl uridine phosphorothioate
  modified_base 3: mod_base = OTHER; note = 2'O-methyl guanosine phosphorothioate
  modified_base 108: mod_base = OTHER; note = uridine phosphorothioate
  modified_base 109: mod_base = OTHER; note = 2'O-methyl guanosine phosphorothioate
  modified_base 110: mod_base = OTHER; note = 2'O-methyl guanosine phosphorothioate
  modified_base 111: mod_base = OTHER; note = 2'O-methyl uridine
ctgtgctgaccatcgacaaggttttagagctagaaatagcaagttaaaataaggctagtccgttatcaacttgaaaaagtggcaccgagtcggtgctttctcgtcgatggt

SEQ ID NO: 24148 - RNA, 110 nt, synthetic construct
  source 1..110: mol_type = other RNA
  modified_base 1: mod_base = OTHER; note = 2'O-methyl cytidine phosphorothioate
  modified_base 2: mod_base = OTHER; note = 2'O-methyl uridine phosphorothioate
  modified_base 3: mod_base = OTHER; note = 2'O-methyl guanosine phosphorothioate
  modified_base 107: mod_base = OTHER; note = adenosine phosphorothioate
  modified_base 108: mod_base = OTHER; note = 2'O-methyl uridine phosphorothioate
  modified_base 109: mod_base = OTHER; note = 2'O-methyl guanosine phosphorothioate
  modified_base 110: mod_base = OTHER; note = 2'O-methyl guanosine
ctgtgctgaccatcgacaaggttttagagctagaaatagcaagttaaaataaggctagtccgttatcaacttgaaaaagtggcaccgagtcggtgctttctcgtcgatgg

SEQ ID NO: 24149 - RNA, 117 nt, synthetic construct
  source 1..117: mol_type = other RNA
  modified_base 1: mod_base = OTHER; note = 2'O-methyl cytidine phosphorothioate
  modified_base 2: mod_base = OTHER; note = 2'O-methyl uridine phosphorothioate
  modified_base 3: mod_base = OTHER; note = 2'O-methyl guanosine phosphorothioate
  modified_base 114: mod_base = OTHER; note = adenosine phosphorothioate
  modified_base 115: mod_base = OTHER; note = 2'O-methyl cytidine phosphorothioate
  modified_base 116: mod_base = OTHER; note = 2'O-methyl adenosine phosphorothioate
  modified_base 117: mod_base = OTHER; note = 2'O-methyl guanosine
ctgtgctgaccatcgacaaggttttagagctagaaatagcaagttaaaataaggctagtccgttatcaacttgaaaaagtggcaccgagtcggtgctctcgtcgatggtcagcacag

SEQ ID NO: 24150 - RNA, 116 nt, synthetic construct
  source 1..116: mol_type = other RNA
  modified_base 1: mod_base = OTHER; note = 2'O-methyl cytidine phosphorothioate
  modified_base 2: mod_base = OTHER; note = 2'O-methyl uridine phosphorothioate
  modified_base 3: mod_base = OTHER; note = 2'O-methyl guanosine phosphorothioate
  modified_base 113: mod_base = OTHER; note = cytidine phosphorothioate
  modified_base 114: mod_base = OTHER; note = 2'O-methyl adenosine phosphorothioate
  modified_base 115: mod_base = OTHER; note = 2'O-methyl cytidine phosphorothioate
  modified_base 116: mod_base = OTHER; note = 2'O-methyl adenosine
ctgtgctgaccatcgacaaggttttagagctagaaatagcaagttaaaataaggctagtccgttatcaacttgaaaaagtggcaccgagtcggtgctctcgtcgatggtcagcaca

SEQ ID NO: 24151 - RNA, 115 nt, synthetic construct
  source 1..115: mol_type = other RNA
  modified_base 1: mod_base = OTHER; note = 2'O-methyl cytidine phosphorothioate
  modified_base 2: mod_base = OTHER; note = 2'O-methyl uridine phosphorothioate
  modified_base 3: mod_base = OTHER; note = 2'O-methyl guanosine phosphorothioate
  modified_base 112: mod_base = OTHER; note = guanosine phosphorothioate
  modified_base 113: mod_base = OTHER; note = 2'O-methyl cytidine phosphorothioate
  modified_base 114: mod_base = OTHER; note = 2'O-methyl adenosine phosphorothioate
  modified_base 115: mod_base = OTHER; note = 2'O-methyl cytidine
ctgtgctgaccatcgacaaggttttagagctagaaatagcaagttaaaataaggctagtccgttatcaacttgaaaaagtggcaccgagtcggtgctctcgtcgatggtcagcac

SEQ ID NO: 24152 - RNA, 114 nt, synthetic construct
  source 1..114: mol_type = other RNA
  modified_base 1: mod_base = OTHER; note = 2'O-methyl cytidine phosphorothioate
  modified_base 2: mod_base = OTHER; note = 2'O-methyl uridine phosphorothioate
  modified_base 3: mod_base = OTHER; note = 2'O-methyl guanosine phosphorothioate
  modified_base 111: mod_base = OTHER; note = adenosine phosphorothioate
  modified_base 112: mod_base = OTHER; note = 2'O-methyl guanosine phosphorothioate
  modified_base 113: mod_base = OTHER; note = 2'O-methyl cytidine phosphorothioate
  modified_base 114: mod_base = OTHER; note = 2'O-methyl adenosine
ctgtgctgaccatcgacaaggttttagagctagaaatagcaagttaaaataaggctagtccgttatcaacttgaaaaagtggcaccgagtcggtgctctcgtcgatggtcagca

SEQ ID NO: 24153 - RNA, 113 nt, synthetic construct
  source 1..113: mol_type = other RNA
  modified_base 1: mod_base = OTHER; note = 2'O-methyl cytidine phosphorothioate
  modified_base 2: mod_base = OTHER; note = 2'O-methyl uridine phosphorothioate
  modified_base 3: mod_base = OTHER; note = 2'O-methyl guanosine phosphorothioate
  modified_base 110: mod_base = OTHER; note = cytidine phosphorothioate
  modified_base 111: mod_base = OTHER; note = 2'O-methyl adenosine phosphorothioate
  modified_base 112: mod_base = OTHER; note = 2'O-methyl guanosine phosphorothioate
  modified_base 113: mod_base = OTHER; note = 2'O-methyl cytidine
ctgtgctgaccatcgacaaggttttagagctagaaatagcaagttaaaataaggctagtccgttatcaacttgaaaaagtggcaccgagtcggtgctctcgtcgatggtcagc

SEQ ID NO: 24154 - RNA, 112 nt, synthetic construct
  source 1..112: mol_type = other RNA
  modified_base 1: mod_base = OTHER; note = 2'O-methyl cytidine phosphorothioate
  modified_base 2: mod_base = OTHER; note = 2'O-methyl uridine phosphorothioate
  modified_base 3: mod_base = OTHER; note = 2'O-methyl guanosine phosphorothioate
  modified_base 109: mod_base = OTHER; note = uridine phosphorothioate
  modified_base 110: mod_base = OTHER; note = 2'O-methyl cytidine phosphorothioate
  modified_base 111: mod_base = OTHER; note = 2'O-methyl adenosine phosphorothioate
  modified_base 112: mod_base = OTHER; note = 2'O-methyl guanosine
ctgtgctgaccatcgacaaggttttagagctagaaatagcaagttaaaataaggctagtccgttatcaacttgaaaaagtggcaccgagtcggtgctctcgtcgatggtcag

SEQ ID NO: 24155 - RNA, 111 nt, synthetic construct
  source 1..111: mol_type = other RNA
  modified_base 1: mod_base = OTHER; note = 2'O-methyl cytidine phosphorothioate
  modified_base 2: mod_base = OTHER; note = 2'O-methyl uridine phosphorothioate
  modified_base 3: mod_base = OTHER; note = 2'O-methyl guanosine phosphorothioate
  modified_base 108: mod_base = OTHER; note = guanosine phosphorothioate
  modified_base 109: mod_base = OTHER; note = 2'O-methyl uridine phosphorothioate
  modified_base 110: mod_base = OTHER; note = 2'O-methyl cytidine phosphorothioate
  modified_base 111: mod_base = OTHER; note = 2'O-methyl adenosine
ctgtgctgaccatcgacaaggttttagagctagaaatagcaagttaaaataaggctagtccgttatcaacttgaaaaagtggcaccgagtcggtgctctcgtcgatggtca

SEQ ID NO: 24156 - RNA, 110 nt, synthetic construct
  source 1..110: mol_type = other RNA
  modified_base 1: mod_base = OTHER; note = 2'O-methyl cytidine phosphorothioate
  modified_base 2: mod_base = OTHER; note = 2'O-methyl uridine phosphorothioate
  modified_base 3: mod_base = OTHER; note = 2'O-methyl guanosine phosphorothioate
  modified_base 107: mod_base = OTHER; note = guanosine phosphorothioate
  modified_base 108: mod_base = OTHER; note = 2'O-methyl guanosine phosphorothioate
  modified_base 109: mod_base = OTHER; note = 2'O-methyl uridine phosphorothioate
  modified_base 110: mod_base = OTHER; note = 2'O-methyl cytidine
ctgtgctgaccatcgacaaggttttagagctagaaatagcaagttaaaataaggctagtccgttatcaacttgaaaaagtggcaccgagtcggtgctctcgtcgatggtc

SEQ ID NO: 24157 - RNA, 109 nt, synthetic construct
  source 1..109: mol_type = other RNA
  modified_base 1: mod_base = OTHER; note = 2'O-methyl cytidine phosphorothioate
  modified_base 2: mod_base = OTHER; note = 2'O-methyl uridine phosphorothioate
  modified_base 3: mod_base = OTHER; note = 2'O-methyl guanosine phosphorothioate
  modified_base 106: mod_base = OTHER; note = uridine phosphorothioate
  modified_base 107: mod_base = OTHER; note = 2'O-methyl guanosine phosphorothioate
  modified_base 108: mod_base = OTHER; note = 2'O-methyl guanosine phosphorothioate
  modified_base 109: mod_base = OTHER; note = 2'O-methyl uridine
ctgtgctgaccatcgacaaggttttagagctagaaatagcaagttaaaataaggctagtccgttatcaacttgaaaaagtggcaccgagtcggtgctctcgtcgatggt

SEQ ID NO: 24158 - RNA, 108 nt, synthetic construct
  source 1..108: mol_type = other RNA
  modified_base 1: mod_base = OTHER; note = 2'O-methyl cytidine phosphorothioate
  modified_base 2: mod_base = OTHER; note = 2'O-methyl uridine phosphorothioate
  modified_base 3: mod_base = OTHER; note = 2'O-methyl guanosine phosphorothioate
  modified_base 105: mod_base = OTHER; note = adenosine phosphorothioate
  modified_base 106: mod_base = OTHER; note = 2'O-methyl uridine phosphorothioate
  modified_base 107: mod_base = OTHER; note = 2'O-methyl guanosine phosphorothioate
  modified_base 108: mod_base = OTHER; note = 2'O-methyl guanosine
ctgtgctgaccatcgacaaggttttagagctagaaatagcaagttaaaataaggctagtccgttatcaacttgaaaaagtggcaccgagtcggtgctctcgtcgatgg

SEQ ID NO: 24159 - RNA, 146 nt, synthetic construct
  source 1..146: mol_type = other RNA
  modified_base 1: mod_base = OTHER; note = 2'O-methyl guanosine phosphorothioate
  modified_base 2: mod_base = OTHER; note = 2'O-methyl guanosine phosphorothioate
  modified_base 3: mod_base = OTHER; note = 2'O-methyl cytidine phosphorothioate
  modified_base 143: mod_base = OTHER; note = adenosine phosphorothioate
  modified_base 144: mod_base = OTHER; note = 2'O-methyl guanosine phosphorothioate
  modified_base 145: mod_base = OTHER; note = 2'O-methyl cytidine phosphorothioate
  modified_base 146: mod_base = OTHER; note = 2'O-methyl cytidine
ggctgtgctgaccatcgacagttttagagctagaaatagcaagttaaaataaggctagtccgttatcaacttgaaaaagtggcaccgagtcggtgcacatggccccagcagcttcagtccctttctcgtcgatggtcagcacagcc

SEQ ID NO: 24160 - RNA, 145 nt, synthetic construct
  source 1..145: mol_type = other RNA
  modified_base 1: mod_base = OTHER; note = 2'O-methyl guanosine phosphorothioate
  modified_base 2: mod_base = OTHER; note = 2'O-methyl guanosine phosphorothioate
  modified_base 3: mod_base = OTHER; note = 2'O-methyl cytidine phosphorothioate
  modified_base 142: mod_base = OTHER; note = cytidine phosphorothioate
  modified_base 143: mod_base = OTHER; note = 2'O-methyl adenosine phosphorothioate
  modified_base 144: mod_base = OTHER; note = 2'O-methyl guanosine phosphorothioate
  modified_base 145: mod_base = OTHER; note = 2'O-methyl cytidine
ggctgtgctgaccatcgacagttttagagctagaaatagcaagttaaaataaggctagtccgttatcaacttgaaaaagtggcaccgagtcggtgcacatggccccagcagcttcagtccctttctcgtcgatggtcagcacagc

SEQ ID NO: 24161 - RNA, 144 nt, synthetic construct
  source 1..144: mol_type = other RNA
  modified_base 1: mod_base = OTHER; note = 2'O-methyl guanosine phosphorothioate
  modified_base 2: mod_base = OTHER; note = 2'O-methyl guanosine phosphorothioate
  modified_base 3: mod_base = OTHER; note = 2'O-methyl cytidine phosphorothioate
  modified_base 141: mod_base = OTHER; note = adenosine phosphorothioate
  modified_base 142: mod_base = OTHER; note = 2'O-methyl cytidine phosphorothioate
  modified_base 143: mod_base = OTHER; note = 2'O-methyl adenosine phosphorothioate
  modified_base 144: mod_base = OTHER; note = 2'O-methyl guanosine
ggctgtgctgaccatcgacagttttagagctagaaatagcaagttaaaataaggctagtccgttatcaacttgaaaaagtggcaccgagtcggtgcacatggccccagcagcttcagtccctttctcgtcgatggtcagcacag

SEQ ID NO: 24162 - RNA, 143 nt, synthetic construct
  source 1..143: mol_type = other RNA
  modified_base 1: mod_base = OTHER; note = 2'O-methyl guanosine phosphorothioate
  modified_base 2: mod_base = OTHER; note = 2'O-methyl guanosine phosphorothioate
  modified_base 3: mod_base = OTHER; note = 2'O-methyl cytidine phosphorothioate
  modified_base 140: mod_base = OTHER; note = cytidine phosphorothioate
  modified_base 141: mod_base = OTHER; note = 2'O-methyl adenosine phosphorothioate
  modified_base 142: mod_base = OTHER; note = 2'O-methyl cytidine phosphorothioate
  modified_base 143: mod_base = OTHER; note = 2'O-methyl adenosine
ggctgtgctgaccatcgacagttttagagctagaaatagcaagttaaaataaggctagtccgttatcaacttgaaaaagtggcaccgagtcggtgcacatggccccagcagcttcagtccctttctcgtcgatggtcagcaca

SEQ ID NO: 24163 - RNA, 142 nt, synthetic construct
  source 1..142: mol_type = other RNA
  modified_base 1: mod_base = OTHER; note = 2'O-methyl guanosine phosphorothioate
  modified_base 2: mod_base = OTHER; note = 2'O-methyl guanosine phosphorothioate
  modified_base 3: mod_base = OTHER; note = 2'O-methyl cytidine phosphorothioate
  modified_base 139: mod_base = OTHER; note = guanosine phosphorothioate
  modified_base 140: mod_base = OTHER; note = 2'O-methyl cytidine phosphorothioate
  modified_base 141: mod_base = OTHER; note = 2'O-methyl adenosine phosphorothioate
  modified_base 142: mod_base = OTHER; note = 2'O-methyl cytidine
ggctgtgctgaccatcgacagttttagagctagaaatagcaagttaaaataaggctagtccgttatcaacttgaaaaagtggcaccgagtcggtgcacatggccccagcagcttcagtccctttctcgtcgatggtcagcac

SEQ ID NO: 24164 - RNA, 141 nt, synthetic construct
  source 1..141: mol_type = other RNA
  modified_base 1: mod_base = OTHER; note = 2'O-methyl guanosine phosphorothioate
  modified_base 2: mod_base = OTHER; note = 2'O-methyl guanosine phosphorothioate
  modified_base 3: mod_base = OTHER; note = 2'O-methyl cytidine phosphorothioate
  modified_base 138: mod_base = OTHER; note = adenosine phosphorothioate
  modified_base 139: mod_base = OTHER; note = 2'O-methyl guanosine phosphorothioate
  modified_base 140: mod_base = OTHER; note = 2'O-methyl cytidine phosphorothioate
  modified_base 141: mod_base = OTHER; note = 2'O-methyl adenosine
ggctgtgctgaccatcgacagttttagagctagaaatagcaagttaaaataaggctagtccgttatcaacttgaaaaagtggcaccgagtcggtgcacatggccccagcagcttcagtccctttctcgtcgatggtcagca

SEQ ID NO: 24165 - RNA, 140 nt, synthetic construct
  source 1..140: mol_type = other RNA
  modified_base 1: mod_base = OTHER; note = 2'O-methyl guanosine phosphorothioate
  modified_base 2: mod_base = OTHER; note = 2'O-methyl guanosine phosphorothioate
  modified_base 3: mod_base = OTHER; note = 2'O-methyl cytidine phosphorothioate
  modified_base 137: mod_base = OTHER; note = cytidine phosphorothioate
  modified_base 138: mod_base = OTHER; note = 2'O-methyl adenosine phosphorothioate
  modified_base 139: mod_base = OTHER; note = 2'O-methyl guanosine phosphorothioate
  modified_base 140: mod_base = OTHER; note = 2'O-methyl cytidine
ggctgtgctgaccatcgacagttttagagctagaaatagcaagttaaaataaggctagtccgttatcaacttgaaaaagtggcaccgagtcggtgcacatggccccagcagcttcagtccctttctcgtcgatggtcagc

SEQ ID NO: 24166 - RNA, 139 nt, synthetic construct
  source 1..139: mol_type = other RNA
  modified_base 1: mod_base = OTHER; note = 2'O-methyl guanosine phosphorothioate
  modified_base 2: mod_base = OTHER; note = 2'O-methyl guanosine phosphorothioate
  modified_base 3: mod_base = OTHER; note = 2'O-methyl cytidine phosphorothioate
  modified_base 136: mod_base = OTHER; note = uridine phosphorothioate
  modified_base 137: mod_base = OTHER; note = 2'O-methyl cytidine phosphorothioate
  modified_base 138: mod_base = OTHER; note = 2'O-methyl adenosine phosphorothioate
  modified_base 139: mod_base = OTHER; note = 2'O-methyl guanosine
ggctgtgctgaccatcgacagttttagagctagaaatagcaagttaaaataaggctagtccgttatcaacttgaaaaagtggcaccgagtcggtgcacatggccccagcagcttcagtccctttctcgtcgatggtcag

SEQ ID NO: 24167 - RNA, 138 nt, synthetic construct
  source 1..138: mol_type = other RNA
  modified_base 1: mod_base = OTHER; note = 2'O-methyl guanosine phosphorothioate
  modified_base 2: mod_base = OTHER; note = 2'O-methyl guanosine phosphorothioate
  modified_base 3: mod_base = OTHER; note = 2'O-methyl cytidine phosphorothioate
  modified_base 135: mod_base = OTHER; note = guanosine phosphorothioate
  modified_base 136: mod_base = OTHER; note = 2'O-methyl uridine phosphorothioate
  modified_base 137: mod_base = OTHER; note = 2'O-methyl cytidine phosphorothioate
  modified_base 138: mod_base = OTHER; note = 2'O-methyl adenosine
ggctgtgctgaccatcgacagttttagagctagaaatagcaagttaaaataaggctagtccgttatcaacttgaaaaagtggcaccgagtcggtgcacatggccccagcagcttcagtccctttctcgtcgatggtca

SEQ ID NO: 24168 - RNA, 137 nt, synthetic construct
  source 1..137: mol_type = other RNA
  modified_base 1: mod_base = OTHER; note = 2'O-methyl guanosine phosphorothioate
  modified_base 2: mod_base = OTHER; note = 2'O-methyl guanosine phosphorothioate
  modified_base 3: mod_base = OTHER; note = 2'O-methyl cytidine phosphorothioate
  modified_base 134: mod_base = OTHER; note = guanosine phosphorothioate
  modified_base 135: mod_base = OTHER; note = 2'O-methyl guanosine phosphorothioate
  modified_base 136: mod_base = OTHER; note = 2'O-methyl uridine phosphorothioate
  modified_base 137: mod_base = OTHER; note = 2'O-methyl cytidine
ggctgtgctgaccatcgacagttttagagctagaaatagcaagttaaaataaggctagtccgttatcaacttgaaaaagtggcaccgagtcggtgcacatggccccagcagcttcagtccctttctcgtcgatggtc

SEQ ID NO: 24169 - RNA, 141 nt, synthetic construct
  source 1..141: mol_type = other RNA
  modified_base 1: mod_base = OTHER; note = 2'O-methyl guanosine phosphorothioate
  modified_base 2: mod_base = OTHER; note = 2'O-methyl guanosine phosphorothioate
  modified_base 3: mod_base = OTHER; note = 2'O-methyl cytidine phosphorothioate
  modified_base 138: mod_base = OTHER; note = adenosine phosphorothioate
  modified_base 139: mod_base = OTHER; note = 2'O-methyl guanosine phosphorothioate
  modified_base 140: mod_base = OTHER; note = 2'O-methyl cytidine phosphorothioate
  modified_base 141: mod_base = OTHER; note = 2'O-methyl cytidine
ggctgtgctgaccatcgacagttttagagctagaaatagcaagttaaaataaggctagtccgttatcaacttgaaaaagtggcaccgagtcggtgcgccccagcagcttcagtccctttctcgtcgatggtcagcacagcc

SEQ ID NO: 24170 - RNA, 140 nt, synthetic construct
  source 1..140: mol_type = other RNA
  modified_base 1: mod_base = OTHER; note = 2'O-methyl guanosine phosphorothioate
  modified_base 2: mod_base = OTHER; note = 2'O-methyl guanosine phosphorothioate
  modified_base 3: mod_base = OTHER; note = 2'O-methyl cytidine phosphorothioate
  modified_base 137: mod_base = OTHER; note = cytidine phosphorothioate
  modified_base 138: mod_base = OTHER; note = 2'O-methyl adenosine phosphorothioate
  modified_base 139: mod_base = OTHER; note = 2'O-methyl guanosine phosphorothioate
  modified_base 140: mod_base = OTHER; note = 2'O-methyl cytidine
ggctgtgctgaccatcgacagttttagagctagaaatagcaagttaaaataaggctagtccgttatcaacttgaaaaagtggcaccgagtcggtgcgccccagcagcttcagtccctttctcgtcgatggtcagcacagc

SEQ ID NO: 24171 - RNA, 139 nt, synthetic construct
  source 1..139: mol_type = other RNA
  modified_base 1: mod_base = OTHER; note = 2'O-methyl guanosine phosphorothioate
  modified_base 2: mod_base = OTHER; note = 2'O-methyl guanosine phosphorothioate
  modified_base 3: mod_base = OTHER; note = 2'O-methyl cytidine phosphorothioate
  modified_base 136: mod_base = OTHER; note = adenosine phosphorothioate
  modified_base 137: mod_base = OTHER; note = 2'O-methyl cytidine phosphorothioate
  modified_base 138: mod_base = OTHER; note = 2'O-methyl adenosine phosphorothioate
  modified_base 139: mod_base = OTHER; note = 2'O-methyl guanosine
ggctgtgctgaccatcgacagttttagagctagaaatagcaagttaaaataaggctagtccgttatcaacttgaaaaagtggcaccgagtcggtgcgccccagcagcttcagtccctttctcgtcgatggtcagcacag

SEQ ID NO: 24172 - RNA, 138 nt, synthetic construct
  source 1..138: mol_type = other RNA
  modified_base 1: mod_base = OTHER; note = 2'O-methyl guanosine phosphorothioate
  modified_base 2: mod_base = OTHER; note = 2'O-methyl guanosine phosphorothioate
  modified_base 3: mod_base = OTHER; note = 2'O-methyl cytidine phosphorothioate
  modified_base 135: mod_base = OTHER; note = cytidine phosphorothioate
  modified_base 136: mod_base = OTHER; note = 2'O-methyl adenosine phosphorothioate
  modified_base 137: mod_base = OTHER; note = 2'O-methyl cytidine phosphorothioate
  modified_base 138: mod_base = OTHER; note = 2'O-methyl adenosine
ggctgtgctgaccatcgacagttttagagctagaaatagcaagttaaaataaggctagtccgttatcaacttgaaaaagtggcaccgagtcggtgcgccccagcagcttcagtccctttctcgtcgatggtcagcaca

SEQ ID NO: 24173 - RNA, 137 nt, synthetic construct
  source 1..137: mol_type = other RNA
  modified_base 1: mod_base = OTHER; note = 2'O-methyl guanosine phosphorothioate
  modified_base 2: mod_base = OTHER; note = 2'O-methyl guanosine phosphorothioate
  modified_base 3: mod_base = OTHER; note = 2'O-methyl cytidine phosphorothioate
  modified_base 134: mod_base = OTHER; note = guanosine phosphorothioate
  modified_base 135: mod_base = OTHER; note = 2'O-methyl cytidine phosphorothioate
  modified_base 136: mod_base = OTHER; note = 2'O-methyl adenosine phosphorothioate
  modified_base 137: mod_base = OTHER; note = 2'O-methyl cytidine
ggctgtgctgaccatcgacagttttagagctagaaatagcaagttaaaataaggctagtccgttatcaacttgaaaaagtggcaccgagtcggtgcgccccagcagcttcagtccctttctcgtcgatggtcagcac

SEQ ID NO: 24174 - RNA, 136 nt, synthetic construct
  source 1..136: mol_type = other RNA
  modified_base 1: mod_base = OTHER; note = 2'O-methyl guanosine phosphorothioate
  modified_base 2: mod_base = OTHER; note = 2'O-methyl guanosine phosphorothioate
  modified_base 3: mod_base = OTHER; note = 2'O-methyl cytidine phosphorothioate
  modified_base 133: mod_base = OTHER; note = adenosine phosphorothioate
  modified_base 134: mod_base = OTHER; note = 2'O-methyl guanosine phosphorothioate
  modified_base 135: mod_base = OTHER; note = 2'O-methyl cytidine phosphorothioate
  modified_base 136: mod_base = OTHER; note = 2'O-methyl adenosine
ggctgtgctgaccatcgacagttttagagctagaaatagcaagttaaaataaggctagtccgttatcaacttgaaaaagtggcaccgagtcggtgcgccccagcagcttcagtccctttctcgtcgatggtcagca

SEQ ID NO: 24175 - RNA, 135 nt, synthetic construct
  source 1..135: mol_type = other RNA
  modified_base 1: mod_base = OTHER; note = 2'O-methyl guanosine phosphorothioate
  modified_base 2: mod_base = OTHER; note = 2'O-methyl guanosine phosphorothioate
  modified_base 3: mod_base = OTHER; note = 2'O-methyl cytidine phosphorothioate
  modified_base 132: mod_base = OTHER; note = cytidine phosphorothioate
  modified_base 133: mod_base = OTHER; note = 2'O-methyl adenosine phosphorothioate
  modified_base 134: mod_base = OTHER; note = 2'O-methyl guanosine phosphorothioate
  modified_base 135: mod_base = OTHER; note = 2'O-methyl cytidine
ggctgtgctgaccatcgacagttttagagctagaaatagcaagttaaaataaggctagtccgttatcaacttgaaaaagtggcaccgagtcggtgcgccccagcagcttcagtccctttctcgtcgatggtcagc

SEQ ID NO: 24176 - RNA, 134 nt, synthetic construct
  source 1..134: mol_type = other RNA
  modified_base 1: mod_base = OTHER; note = 2'O-methyl guanosine phosphorothioate
  modified_base 2: mod_base = OTHER; note = 2'O-methyl guanosine phosphorothioate
  modified_base 3: mod_base = OTHER; note = 2'O-methyl cytidine phosphorothioate
  modified_base 131: mod_base = OTHER; note = uridine phosphorothioate
  modified_base 132: mod_base = OTHER; note = 2'O-methyl cytidine phosphorothioate
  modified_base 133: mod_base = OTHER; note = 2'O-methyl adenosine phosphorothioate
  modified_base 134: mod_base = OTHER; note = 2'O-methyl guanosine
ggctgtgctgaccatcgacagttttagagctagaaatagcaagttaaaataaggctagtccgttatcaacttgaaaaagtggcaccgagtcggtgcgccccagcagcttcagtccctttctcgtcgatggtcag

SEQ ID NO: 24177 - RNA, 133 nt, synthetic construct
  source 1..133: mol_type = other RNA
  modified_base 1: mod_base = OTHER; note = 2'O-methyl guanosine phosphorothioate
  modified_base 2: mod_base = OTHER; note = 2'O-methyl guanosine phosphorothioate
  modified_base 3: mod_base = OTHER; note = 2'O-methyl cytidine phosphorothioate
  modified_base 130: mod_base = OTHER; note = guanosine phosphorothioate
  modified_base 131: mod_base = OTHER; note = 2'O-methyl uridine phosphorothioate
  modified_base 132: mod_base = OTHER; note = 2'O-methyl cytidine phosphorothioate
  modified_base 133: mod_base = OTHER; note = 2'O-methyl adenosine
ggctgtgctgaccatcgacagttttagagctagaaatagcaagttaaaataaggctagtccgttatcaacttgaaaaagtggcaccgagtcggtgcgccccagcagcttcagtccctttctcgtcgatggtca

SEQ ID NO: 24178 - RNA, 132 nt, synthetic construct
  source 1..132: mol_type = other RNA
  modified_base 1: mod_base = OTHER; note = 2'O-methyl guanosine phosphorothioate
  modified_base 2: mod_base = OTHER; note = 2'O-methyl guanosine phosphorothioate
  modified_base 3: mod_base = OTHER; note = 2'O-methyl cytidine phosphorothioate
  modified_base 129: mod_base = OTHER; note = guanosine phosphorothioate
  modified_base 130: mod_base = OTHER; note = 2'O-methyl guanosine phosphorothioate
  modified_base 131: mod_base = OTHER; note = 2'O-methyl uridine phosphorothioate
  modified_base 132: mod_base = OTHER; note = 2'O-methyl cytidine
ggctgtgctgaccatcgacagttttagagctagaaatagcaagttaaaataaggctagtccgttatcaacttgaaaaagtggcaccgagtcggtgcgccccagcagcttcagtccctttctcgtcgatggtc

SEQ ID NO: 24179 - RNA, 136 nt, synthetic construct
  source 1..136: mol_type = other RNA
  modified_base 1: mod_base = OTHER; note = 2'O-methyl guanosine phosphorothioate
  modified_base 2: mod_base = OTHER; note = 2'O-methyl guanosine phosphorothioate
  modified_base 3: mod_base = OTHER; note = 2'O-methyl cytidine phosphorothioate
  modified_base 133: mod_base = OTHER; note = adenosine phosphorothioate
  modified_base 134: mod_base = OTHER; note = 2'O-methyl guanosine phosphorothioate
  modified_base 135: mod_base = OTHER; note = 2'O-methyl cytidine phosphorothioate
  modified_base 136: mod_base = OTHER; note = 2'O-methyl cytidine
ggctgtgctgaccatcgacagttttagagctagaaatagcaagttaaaataaggctagtccgttatcaacttgaaaaagtggcaccgagtcggtgcagcagcttcagtccctttctcgtcgatggtcagcacagcc

SEQ ID NO: 24180 - RNA, 135 nt, synthetic construct
  source 1..135: mol_type = other RNA
  modified_base 1: mod_base = OTHER; note = 2'O-methyl guanosine phosphorothioate
  modified_base 2: mod_base = OTHER; note = 2'O-methyl guanosine phosphorothioate
  modified_base 3: mod_base = OTHER; note = 2'O-methyl cytidine phosphorothioate
  modified_base 132: mod_base = OTHER; note = cytidine phosphorothioate
  modified_base 133: mod_base = OTHER; note = 2'O-methyl adenosine phosphorothioate
  modified_base 134: mod_base = OTHER; note = 2'O-methyl guanosine phosphorothioate
  modified_base 135: mod_base = OTHER; note = 2'O-methyl cytidine
ggctgtgctgaccatcgacagttttagagctagaaatagcaagttaaaataaggctagtccgttatcaacttgaaaaagtggcaccgagtcggtgcagcagcttcagtccctttctcgtcgatggtcagcacagc

SEQ ID NO: 24181 - RNA, 134 nt, synthetic construct
  source 1..134: mol_type = other RNA
  modified_base 1: mod_base = OTHER; note = 2'O-methyl guanosine phosphorothioate
  modified_base 2: mod_base = OTHER; note = 2'O-methyl guanosine phosphorothioate
  modified_base 3: mod_base = OTHER; note = 2'O-methyl cytidine phosphorothioate
  modified_base 131: mod_base = OTHER; note = adenosine phosphorothioate
  modified_base 132: mod_base = OTHER; note = 2'O-methyl cytidine phosphorothioate
  modified_base 133: mod_base = OTHER; note = 2'O-methyl adenosine phosphorothioate
  modified_base 134: mod_base = OTHER; note = 2'O-methyl guanosine
ggctgtgctgaccatcgacagttttagagctagaaatagcaagttaaaataaggctagtccgttatcaacttgaaaaagtggcaccgagtcggtgcagcagcttcagtccctttctcgtcgatggtcagcacag

SEQ ID NO: 24182 - RNA, 133 nt, synthetic construct
  source 1..133: mol_type = other RNA
  modified_base 1: mod_base = OTHER; note = 2'O-methyl guanosine phosphorothioate
  modified_base 2: mod_base = OTHER; note = 2'O-methyl guanosine phosphorothioate
  modified_base 3: mod_base = OTHER; note = 2'O-methyl cytidine phosphorothioate
  modified_base 130: mod_base = OTHER; note = cytidine phosphorothioate
  modified_base 131: mod_base = OTHER; note = 2'O-methyl adenosine phosphorothioate
  modified_base 132: mod_base = OTHER; note = 2'O-methyl cytidine phosphorothioate
  modified_base 133: mod_base = OTHER; note = 2'O-methyl adenosine
ggctgtgctgaccatcgacagttttagagctagaaatagcaagttaaaataaggctagtccgttatcaacttgaaaaagtggcaccgagtcggtgcagcagcttcagtccctttctcgtcgatggtcagcaca

SEQ ID NO: 24183 - RNA, 132 nt, synthetic construct
  source 1..132: mol_type = other RNA
  modified_base 1: mod_base = OTHER; note = 2'O-methyl guanosine phosphorothioate
  modified_base 2: mod_base = OTHER; note = 2'O-methyl guanosine phosphorothioate
  modified_base 3: mod_base = OTHER; note = 2'O-methyl cytidine phosphorothioate
  modified_base 129: mod_base = OTHER; note = guanosine phosphorothioate
  modified_base 130: mod_base = OTHER; note = 2'O-methyl cytidine phosphorothioate
  modified_base 131: mod_base = OTHER; note = 2'O-methyl adenosine phosphorothioate
  modified_base 132: mod_base = OTHER; note = 2'O-methyl cytidine
ggctgtgctgaccatcgacagttttagagctagaaatagcaagttaaaataaggctagtccgttatcaacttgaaaaagtggcaccgagtcggtgcagcagcttcagtccctttctcgtcgatggtcagcac

SEQ ID NO: 24184 - RNA, 131 nt, synthetic construct
  source 1..131: mol_type = other RNA
  modified_base 1: mod_base = OTHER; note = 2'O-methyl guanosine phosphorothioate
  modified_base 2: mod_base = OTHER; note = 2'O-methyl guanosine phosphorothioate
  modified_base 3: mod_base = OTHER; note = 2'O-methyl cytidine phosphorothioate
  modified_base 128: mod_base = OTHER; note = adenosine phosphorothioate
  modified_base 129: mod_base = OTHER; note = 2'O-methyl guanosine phosphorothioate
  modified_base 130: mod_base = OTHER; note = 2'O-methyl cytidine phosphorothioate
  modified_base 131: mod_base = OTHER; note = 2'O-methyl adenosine
ggctgtgctgaccatcgacagttttagagctagaaatagcaagttaaaataaggctagtccgttatcaacttgaaaaagtggcaccgagtcggtgcagcagcttcagtccctttctcgtcgatggtcagca

SEQ ID NO: 24185 - RNA, 130 nt, synthetic construct
  source 1..130: mol_type = other RNA
  modified_base 1: mod_base = OTHER; note = 2'O-methyl guanosine phosphorothioate
  modified_base 2: mod_base = OTHER; note = 2'O-methyl guanosine phosphorothioate
  modified_base 3: mod_base = OTHER; note = 2'O-methyl cytidine phosphorothioate
  modified_base 127: mod_base = OTHER; note = cytidine phosphorothioate
  modified_base 128: mod_base = OTHER; note = 2'O-methyl adenosine phosphorothioate
  modified_base 129: mod_base = OTHER; note = 2'O-methyl guanosine phosphorothioate
  modified_base 130: mod_base = OTHER; note = 2'O-methyl cytidine
ggctgtgctgaccatcgacagttttagagctagaaatagcaagttaaaataaggctagtccgttatcaacttgaaaaagtggcaccgagtcggtgcagcagcttcagtccctttctcgtcgatggtcagc

SEQ ID NO: 24186 - RNA, 129 nt, synthetic construct
  source 1..129: mol_type = other RNA
  modified_base 1: mod_base = OTHER; note = 2'O-methyl guanosine phosphorothioate
  modified_base 2: mod_base = OTHER; note = 2'O-methyl guanosine phosphorothioate
  modified_base 3: mod_base = OTHER; note = 2'O-methyl cytidine phosphorothioate
  modified_base 126: mod_base = OTHER; note = uridine phosphorothioate
  modified_base 127: mod_base = OTHER; note = 2'O-methyl cytidine phosphorothioate
  modified_base 128: mod_base = OTHER; note = 2'O-methyl adenosine phosphorothioate
  modified_base 129: mod_base = OTHER; note = 2'O-methyl guanosine
ggctgtgctgaccatcgacagttttagagctagaaatagcaagttaaaataaggctagtccgttatcaacttgaaaaagtggcaccgagtcggtgcagcagcttcagtccctttctcgtcgatggtcag

SEQ ID NO: 24187 - RNA, 128 nt, synthetic construct
  source 1..128: mol_type = other RNA
  modified_base 1: mod_base = OTHER; note = 2'O-methyl guanosine phosphorothioate
  modified_base 2: mod_base = OTHER; note = 2'O-methyl guanosine phosphorothioate
  modified_base 3: mod_base = OTHER; note = 2'O-methyl cytidine phosphorothioate
  modified_base 125: mod_base = OTHER; note = guanosine phosphorothioate
  modified_base 126: mod_base = OTHER; note = 2'O-methyl uridine phosphorothioate
  modified_base 127: mod_base = OTHER; note = 2'O-methyl cytidine phosphorothioate
  modified_base 128: mod_base = OTHER; note = 2'O-methyl adenosine
ggctgtgctgaccatcgacagttttagagctagaaatagcaagttaaaataaggctagtccgttatcaacttgaaaaagtggcaccgagtcggtgcagcagcttcagtccctttctcgtcgatggtca

SEQ ID NO: 24188 - RNA, 127 nt, synthetic construct
  source 1..127: mol_type = other RNA
  modified_base 1: mod_base = OTHER; note = 2'O-methyl guanosine phosphorothioate
  modified_base 2: mod_base = OTHER; note = 2'O-methyl guanosine phosphorothioate
  modified_base 3: mod_base = OTHER; note = 2'O-methyl cytidine phosphorothioate
  modified_base 124: mod_base = OTHER; note = guanosine phosphorothioate
  modified_base 125: mod_base = OTHER; note = 2'O-methyl guanosine phosphorothioate
  modified_base 126: mod_base = OTHER; note = 2'O-methyl uridine phosphorothioate
  modified_base 127: mod_base = OTHER; note = 2'O-methyl cytidine
ggctgtgctgaccatcgacagttttagagctagaaatagcaagttaaaataaggctagtccgttatcaacttgaaaaagtggcaccgagtcggtgcagcagcttcagtccctttctcgtcgatggtc

SEQ ID NO: 24189 - RNA, 130 nt, synthetic construct
  source 1..130: mol_type = other RNA
  modified_base 1: mod_base = OTHER; note = 2'O-methyl guanosine phosphorothioate
  modified_base 2: mod_base = OTHER; note = 2'O-methyl guanosine phosphorothioate
  modified_base 3: mod_base = OTHER; note = 2'O-methyl cytidine phosphorothioate
  modified_base 127: mod_base = OTHER; note = adenosine phosphorothioate
  modified_base 128: mod_base = OTHER; note = 2'O-methyl guanosine phosphorothioate
  modified_base 129: mod_base = OTHER; note = 2'O-methyl cytidine phosphorothioate
  modified_base 130: mod_base = OTHER; note = 2'O-methyl cytidine
ggctgtgctgaccatcgacagttttagagctagaaatagcaagttaaaataaggctagtccgttatcaacttgaaaaagtggcaccgagtcggtgcttcagtccctttctcgtcgatggtcagcacagcc

SEQ ID NO: 24190 - RNA, 129 nt, synthetic construct
  source 1..129: mol_type = other RNA
  modified_base 1: mod_base = OTHER; note = 2'O-methyl guanosine phosphorothioate
  modified_base 2: mod_base = OTHER; note = 2'O-methyl guanosine phosphorothioate
  modified_base 3: mod_base = OTHER; note = 2'O-methyl cytidine phosphorothioate
  modified_base 126: mod_base = OTHER; note = cytidine phosphorothioate
  modified_base 127: mod_base = OTHER; note = 2'O-methyl adenosine phosphorothioate
  modified_base 128: mod_base = OTHER; note = 2'O-methyl guanosine phosphorothioate
  modified_base 129: mod_base = OTHER; note = 2'O-methyl cytidine
ggctgtgctgaccatcgacagttttagagctagaaatagcaagttaaaataaggctagtccgttatcaacttgaaaaagtggcaccgagtcggtgcttcagtccctttctcgtcgatggtcagcacagc

SEQ ID NO: 24191 - RNA, 128 nt, synthetic construct
  source 1..128: mol_type = other RNA
  modified_base 1: mod_base = OTHER; note = 2'O-methyl guanosine phosphorothioate
  modified_base 2: mod_base = OTHER; note = 2'O-methyl guanosine phosphorothioate
  modified_base 3: mod_base = OTHER; note = 2'O-methyl cytidine phosphorothioate
  modified_base 125: mod_base = OTHER; note = adenosine phosphorothioate
  modified_base 126: mod_base = OTHER; note = 2'O-methyl cytidine phosphorothioate
  modified_base 127: mod_base = OTHER; note = 2'O-methyl adenosine phosphorothioate
  modified_base 128: mod_base = OTHER; note = 2'O-methyl guanosine
ggctgtgctgaccatcgacagttttagagctagaaatagcaagttaaaataaggctagtccgttatcaacttgaaaaagtggcaccgagtcggtgcttcagtccctttctcgtcgatggtcagcacag

SEQ ID NO: 24192 - RNA, 127 nt, synthetic construct
  source 1..127: mol_type = other RNA
  modified_base 1: mod_base = OTHER; note = 2'O-methyl guanosine phosphorothioate
  modified_base 2: mod_base = OTHER; note = 2'O-methyl guanosine phosphorothioate
  modified_base 3: mod_base = OTHER; note = 2'O-methyl cytidine phosphorothioate
  modified_base 124: mod_base = OTHER; note = cytidine phosphorothioate
  modified_base 125: mod_base = OTHER; note = 2'O-methyl adenosine phosphorothioate
  modified_base 126: mod_base = OTHER; note = 2'O-methyl cytidine phosphorothioate
  modified_base 127: mod_base = OTHER; note = 2'O-methyl adenosine
ggctgtgctgaccatcgacagttttagagctagaaatagcaagttaaaataaggctagtccgttatcaacttgaaaaagtggcaccgagtcggtgcttcagtccctttctcgtcgatggtcagcaca

SEQ ID NO: 24193 - RNA, 126 nt, synthetic construct
  source 1..126: mol_type = other RNA
  modified_base 1: mod_base = OTHER; note = 2'O-methyl guanosine phosphorothioate
  modified_base 2: mod_base = OTHER; note = 2'O-methyl guanosine phosphorothioate
  modified_base 3: mod_base = OTHER; note = 2'O-methyl cytidine phosphorothioate
  modified_base 123: mod_base = OTHER; note = guanosine phosphorothioate
  modified_base 124: mod_base = OTHER; note = 2'O-methyl cytidine phosphorothioate
  modified_base 125: mod_base = OTHER; note = 2'O-methyl adenosine phosphorothioate
  modified_base 126: mod_base = OTHER; note = 2'O-methyl cytidine
ggctgtgctgaccatcgacagttttagagctagaaatagcaagttaaaataaggctagtccgttatcaacttgaaaaagtggcaccgagtcggtgcttcagtccctttctcgtcgatggtcagcac
